United States Patent Application Publication US 2012/0017292 A1 - sequence listing, part 12

SEQ ID NO: 48060 - protein, 783 aa, Zea mays
  Coding DNA Sequence Number=SeqID_4685
  Gene Ontology: Mol. function=hydrogen ion transmembrane transporter activity; Cellular component=integral to membrane; Biological process=proton transport
  Homolog annotation: Hit_ID=Q06572; Match level="QueryCoverage=95%, HitCoverage=99%, E-value=0.0, Identity=88%"; Hit description =Pyrophosphate-energized vacuolar membrane proton pump (EC 3.6.1.1) (Pyrophosphate-energized ...
  Homolog annotation: Hit description=inorganic pyrophosphatase) (H(+) -PPase)
  Pfam annotation: Domain name=H_PPase; Domain location=6-738; Score =1582.9; E_value=0; Accession=PF03030.7; Description=Inorganic H+ pyrophosphatase
MAILSALATEVLIPVAAVIGIAFAVVQWVVVSRVKLSPAASGGSGGKAGYADSLIEEEEGLNDHNVVVKCAEIQNAISEGATSFLFTEYQYVGIFMAIFAVVIFLFLGSVEGFSTKSQPCTYSKDKYCKPALFTALFSTVSFLLGAITSLVSGFLGMKIATYANARTTLEARKGVGKAFITAFRSGAVMGFLLASSGLVVLYITINVFKLYYGDDWEGLFESITGYGLGGSSMALFGRVGGGIYTKAADVGADLVGKVERNIPEDDPRNPAVIADNVGDNVGDIAGMGSDLFGSYAESSCAALVVASISSFGIDHDFTGMCYPLLVSSVGIIVCLITTLFATDFFEVKAVKEIEPALKKQLIISTVLMTFGIALISWLALPAKFTIYNFGTQKEVSNWGLFFCVSIGLWAGLIIGFVTEYYTSNAYRTGAATNVIFGLALGYKSVIIPIFAIAVSIYVSFSIAAMYGIAVAALGMLSTIATGLAIDAYGPISDNAGGIAEMAGMSHRIRERTDALDAAGNTTAAIGKGFAIGSAALVSLALFGAFVSRAGVKVVDVLSPKVFIGLIVGAMLPYWFSAMTMKSVGSAALKMVEEVRRQFNTIPGLMEGTAKPDYATCVKISTDASIKEMIPPGALVMLTPLIVGTLFGVETLSGVLAGALVSGVQIAISASNTGGAWDNAKKYIEAGASEHARTLGPKGSDCHKAAVIGDTIGDPLKDTSGPSLNILIKLMAVESLVFAPFFATQGGLLFKIAAAVRIQSLGLPEPPEARFTVSLTTLTPCSST

SEQ ID NO: 48061 - protein, 25 aa, Zea mays
  Coding DNA Sequence Number=SeqID_4686
MDMVACPTFDLGHMAEPDLALLMNG

SEQ ID NO: 48062 - protein, 259 aa, Zea mays
  Coding DNA Sequence Number=SeqID_4687
  Subcellular localization annotation: CTP_CleavageSite=21; ConfidenceScore=5.25e-01
MAPPVTWSVRALGWARWRLLRGRGRVCLPRPRSSPSPWVGQGGDRRLRPGLSPSPGVGRSGVRRLPGPSPSPSPGVGQSGVRRLPGPSPSPSPGVGRSGVRRLPGPSPSLSLGVERSGVRRLPGPSPSPSPRVGRSGVHRLPGSSPSPSPGVGRCGVRRLPGPSPSPSPGVGRSGVRRLPGPSPSPSPGSGEAEFPTAPETGLGCCQPHSVEWHNSQSGAGGAVLLSGRLHVVARLLWSVDHLDLQLKGCAYFPVYHDF

SEQ ID NO: 48063 - protein, 672 aa, Zea mays
  Coding DNA Sequence Number=SeqID_4688
  Gene Ontology: Mol. function=oxidoreductase activity; Cellular component=cytoplasm; Biological process=flavonoid biosynthetic process
  Homolog annotation: Hit_ID=Q6ES21; Match level="QueryCoverage=39%, HitCoverage=100%, E-value=4e-49, Identity=54%"; Hit description =Putative iron/ascorbate-dependent oxidoreductase
  Pfam annotation: Domain name=2OG-FeII_Oxy; Domain location=113-215; Score=114.4; E_value=3.5e-31; Accession=PF03171.11; Description=2OG -Fe(II) oxygenase superfamily
MADESWRIPMLVQELAAKVQQPPSRYMQPEQYHPVSLDVGAETLEPIPVIDLSRLSTAGGADDDESGKLRLALQTWGALPGKWMGLLHEYTLNCKRIKDCILGTTAKTLGLGEDCFARFNYYPPCPRPDLVFGVKPHSDSSGVLTILLIDKDVSGLQVLRDGVWHNNVPASPFMLLINVGDFMEIISNGVLRSPVHRAVSNAEKERISLAMFHGLDPDEEIEPAPAALLSENQPARYRTLKAKEYLLAGFYEHFFCRFIESVKIHLNEGSDSGSAPEDDELRFARPQGSDSGSAPEDDELRFARPQGSDSGSAPEDDELRFARPQGSDSGSAPEDDELRFARPQGSGSALASADGLRLARPRGSDSTSALEDRLDLDLGGASTLPNPGLGPTTSQEAPSLPYPKLTQATGNKTGVPSGSLRLQCSSDGHDTTRTRCQNLSGCHDGIRLLRAHVTRGARNRPAPGHLSPEPHSPSPPPPFALQQTPLPPLPRCAHARAPPPQIPAVPSSFPGRRWSYAVSVATVSFAPASATRDAPQFPLPLPISLCPRSPAVPRAAAEVRHRRPGPPSRHCRRRGVPGARLEVKNLSRPYRPAYCLLPCVIPRRSRFMPPPSRSAVDRPPPVPLPRPRPHQRTPRALPNLPGRSGRLGGPPNARAPRLRRVLRRGDERRRPS

SEQ ID NO: 48064 - protein, 172 aa, Zea mays
  Coding DNA Sequence Number=SeqID_4689
MGVDMVVIGRLCASSHDEIINECVAPVSNNTSTIWESTGNIPTVMSGFLELLQPPSDSVSHGYSVAESGCLLQAETHSALLGHWGLTASGLPSSDIASPNDLALHNGNMLCFRLGLGLLDCSGWLLGREDEVPTDSTSGTDLLLTGCSGDSATGAEGTAFETATAEVGAGST

SEQ ID NO: 48065 - protein, 73 aa, Zea mays
  Coding DNA Sequence Number=SeqID_4690
MFLISWSNSSSWGVGLEAFLFWLRASGIERVSWFGSSGCKAAVPIAEAFFGGMTKVSFSKICFGSLEPRVLLP

SEQ ID NO: 48066 - protein, 158 aa, Zea mays
  Coding DNA Sequence Number=SeqID_4691
  Subcellular localization annotation: CTP_CleavageSite=24; ConfidenceScore=5.44e-01
MSLISWSNSSSWSVGLVAFLFWLRASQRERVSWFGSSGCSAVAPVAEAFFGGMTKSREKEIGKDAEGGSIRVPSATRVSVKKKRHMMAVMRTVHKTTPPVATEKIVPLAAAEATEAEPEAKNIGVPLRTTLSEIGRIIANVVPEREMGEYIVVEAATS

SEQ ID NO: 48067 - protein, 109 aa, Zea mays
  Coding DNA Sequence Number=SeqID_4692
  Subcellular localization annotation: CTP_CleavageSite=25; ConfidenceScore=5.06e-01
MSLNPKLKSSENLRNKATVGKQKLRNQAKKRTGTFGLGSEPQYEEVQRMRRLAQSRSYAQGTFGVMSEKGTDLKGKRLFRPRWISIESLANVKGMSVILHGLRPVPINR

SEQ ID NO: 48068 - protein, 508 aa, Zea mays
  Coding DNA Sequence Number=SeqID_4693
  Gene Ontology: Mol. function=ubiquitin-protein ligase activity; Cellular component=ubiquitin ligase complex; Biological process =protein ubiquitination
  Homolog annotation: Hit_ID=Q6ETF7; Match level="QueryCoverage=75%, HitCoverage=87%, E-value=3e-50, Identity=74%"; Hit description =Putative photoperiod responsive protein
  Pfam annotation: Domain name=U-box; Domain location=135-209; Score =60.3; E_value=6.7e-15; Accession=PF04564.6; Description=U-box domain
MDMQFTFVGAGLPGSCHGMAVLRSCMEEANYPHPPAGSYLVAFRRRTRCIRVVARYAEREGKVRPSVLRVAKPPTTKQGEYPPPRVVRSPAPAAGCRLPAGVAVAYARSSRRSCGRVTRKMNGRLSAEYRGLEVKVPNLFRCPISLDVMHSPVSLCTGVTYERASIQRWLDSGNTTCPATMLTLPSTDLVPNLTLRRLIALWASTAAPSSSSPAASAVGPTPAAAAAELLRRIADPGADPCPPLRKLAAFLSDDDVDEFDKNALARAGGADREAAEAAVRVLAAIAASDCIEEESKRRVAAALAADAPSAAASLARVLRSRDLAGGARRRGEAGGVAAPQCGTGGAGRGGGVRGPAAVAATRRARAAMVRLGAVAAAVRVLEADAGPPGQALRVLEATVGCAEGRAAVCESALSVVPAVVSKMMKAGVGGAEAAVSVLWAVCHRYRDRRAVEAAAACEGGLTKLLLLMQSGCSAAARQMASELLKIFRVNGKSCVAGYDSKTSHIMPF

SEQ ID NO: 48069 - protein, 207 aa, Zea mays
  Coding DNA Sequence Number=SeqID_4694
MPPTPPQGIPAAGGDSDRDGDDDDDAGGSSSHGTELSEELEPEGWIAKPTTRDAAHGCHFHDALDTQLRQAFDRHTWDTAEASMQDAARQALSQYCSLFSGVADGLDLKYYPRRSTGSAGGVIASPVGEGNPRLNNMVNLAAVLNTELDHALNELGKVRAEVAELRAECAARHYLDGGSPAPVMIQHPYRSPPHGRFNCGTPDCRPR

SEQ ID NO: 48070 - protein, 79 aa, Zea mays
  Coding DNA Sequence Number=SeqID_4695
  Subcellular localization annotation: CTP_CleavageSite=81; ConfidenceScore=5.40e-01
MESLQVTGLTWHRATQWTLRQARRQKGNHRLTCSAPKTSHLQKTSSLRRGTQIKGLSPLRLLLREVSNNTLRNLGLLVV

SEQ ID NO: 48071 - protein, 150 aa, Zea mays
  Coding DNA Sequence Number=SeqID_4696
MASAEGAELIGQAHGTEKEERGTQGNGSATGDPGPRDRERGGARVKKTGADRVLGHQAHISTVLKRLRRRHYTETSFSCKSLAQSQLYYLKPKVWYLAEVGPTDDVVLRRCPISALSWGRLGSSSASRDQLAHLMRCIMHMYEYQGIAHK

SEQ ID NO: 48072 - protein, 63 aa, Zea mays
  Coding DNA Sequence Number=SeqID_4697
  Subcellular localization annotation: CTP_CleavageSite=39; ConfidenceScore=5.21e-01
MAMMGSTSDKVYLCQSFASGKLILGRPTRNGSGEMARVACTLRGKRLDGGVSVLSVGVNPVWS

SEQ ID NO: 48073 - protein, 121 aa, Zea mays
  Coding DNA Sequence Number=SeqID_4698
MAQGPSLVRARAGEPPSLMANALLSQTGSDGTMVLSTFTNYEDACTRIMATAPLLRSLFPNNSGWDMHTHGHSLTLGENSASPKDGFCLGRSLRLARAWPQPTALATTAHESRKDLSNRLY

SEQ ID NO: 48074 - protein, 161 aa, Zea mays
  Coding DNA Sequence Number=SeqID_4699
  Subcellular localization annotation: CTP_CleavageSite=58; ConfidenceScore=5.00e-01
MEKMAARGAGRAARAKPFPARRLDRTQDSKSAKRHSRSSKRLAHADRERGIPRKGSFSAKEPGSEPPITDQGFEGWPSEGFNSRLRSRGPDTHYWLAPEGFTVASDTERGMTREARGLLSQKPAPAKSLTASTYQPESLGPDRAPGLRPVRMRERPDQPKR

SEQ ID NO: 48075 - protein, 124 aa, Zea mays
  Coding DNA Sequence Number=SeqID_4700
  Homolog annotation: Hit_ID=Q8SA86; Match level="QueryCoverage=95%, HitCoverage=21%, E-value=3e-08, Identity=26%"; Hit description =Putative retrotransposon protein
MSKIDRLISNVVAKKDVATVPSDKGKRIEETSSEDMNFNLRNLGGQQLSEEDISELKEFAISCGYQPRSMLFDESLLLNKALKMQQDDEEKDSQLRSAEGSLAEAWAQNEKLSKELKETQTFLK

SEQ ID NO: 48076 - protein, 267 aa, Zea mays
  Coding DNA Sequence Number=SeqID_4701
  Homolog annotation: Hit_ID=Q2QUK2; Match level="QueryCoverage=28%, HitCoverage=14%, E-value=7e-19, Identity=61%"; Hit description =Putative uncharacterized protein
  Subcellular localization annotation: CTP_CleavageSite=17; ConfidenceScore=5.19e-01
MQPGTPLSPPLILFLPHSSSFSPTSFSNPNRYRRDTTGVDDLPPRPGDTDDDDTESYEQPQPLQLRCSFSLQSSGWQIVALHFIVFNLYPRSATNTTRASKKKTNPNMALGIRFSKREPTDANDDIPNSPTTPGLADHFSRAAEEDMAFTAHDSTAPTQRAPRRPRAATKGKQLDRMTKVMQRRLPIAVEEGKKRTHEPVQAVKFASEAGIIIRETMPILTRWKDYKDDQKYYNNFVSQLNGRLSVNTEILLWGEGCNTPGVTATKT

SEQ ID NO: 48077 - protein, 146 aa, Zea mays
  Coding DNA Sequence Number=SeqID_4702
MSTKDDVDFSVDARECSASSPFLLLGLPRFSGSSSWWGRWQTLEGLVVPDGVLEVSTVPKGVAHVLVVQTLGVEDVVQCPFASAGCPSGMRDGWSGGVDFFARPLLPMFVGLLVRVASWCRWCRLRSSDEVLSPFVGGDVEVRFPK

SEQ ID NO: 48078 - protein, 237 aa, Zea mays
  Coding DNA Sequence Number=SeqID_4703
MGVPDFCARWRAFNALQVAVGAETKKELYIASRILRRESLPQQSPEKPERSRKKRNLQRSEQRLPPASQGQRVRLPGELRCPPLPQRNGHRSLGERRRTRSRIVKLLFWYLRPQRRTGRSSSLRRFHSTPTSSSSGEESNQLPSLTMNQPRREKNLFSGNLADEGTDAEIFGDITKPESGTRRSLCHEMKSRRWEKLQKNGSSGKEGTPDDVIVGKLKSRLSRKQDSAERILFSDET

SEQ ID NO: 48079 - protein, 106 aa, Zea mays
  Coding DNA Sequence Number=SeqID_4704
MDAQYDVTQEWLDRVKIARKGLRGTRRRGLATGGRATCPAWDLYAGVMDLDAGGWAASSSSLGYVWARWPAPTLECSDARARSQVLGTQCPRVARCLGLMPTAGGW

SEQ ID NO: 48080 - protein, 340 aa, Zea mays
  Coding DNA Sequence Number=SeqID_4705
  Homolog annotation: Hit_ID=A2WNL0; Match level="QueryCoverage=88%, HitCoverage=84%, E-value=3e-33, Identity=38%"; Hit description =Putative uncharacterized protein
MASPSTEAPPLPTLRDVIAHDDDDDHFIAEEEEDEEWDDMSKRMSRLSMEGSEAGDADDEDDGGEDEGEEDDDEFDDVRSDVNAAATYRAWPPRDEPQQAPSAASLPGTPDRGAQAPWWPGPSAKGYASETEARWPPGADGRGGRRQRQRMAAREVWLERAWRTRKQRRQLQEEVPVPVVVLGGGGGDSPASRGVAMDMEEVRACRDLGLDLPCDWTVEIPSCALSVSGVDTASSGGNSPASGSWRISSPGSALERTKVRFGSRNVTQSGCGCGMELDSWRSTKAAPTLLPLPRGPRLRAICGTVLTLLPVTGDDPKDVKARLKVWAQAVALASASRLGS

SEQ ID NO: 48081 - protein, 120 aa, Zea mays
  Coding DNA Sequence Number=SeqID_4706
  Gene Ontology: Mol. function=peptidyl-prolyl cis-trans isomerase activity; Cellular component=mitochondrial matrix; Biological process=protein folding
  Homolog annotation: Hit_ID=UPI0000EB3E26; Match level="QueryCoverage =27%, HitCoverage=20%, E-value=2e-09, Identity=87%"; Hit description =Peptidyl-prolyl cis-trans isomerase, mitochondrial precursor (EC 5.2.1.8) (PPIase) ...
  Homolog annotation: Hit description=(Rotamase) (Cyclophilin F).
  Pfam annotation: Domain name=Pro_isomerase; Domain location=26-119; Score=-60.1; E_value=0.0065; Accession=PF00160.12; Description =Cyclophilin type peptidyl-prolyl cis-tr
MMTVKIMVIKASLKRVLVGEVFMVNALMMKILHTGAYRKLILNEVLLNCKNVDVSGAISLVLKLRGSLAYFVAVKHVGPGVLSMANAGPNTNGSQFFICTVKRNALGEFEPEVPRSLLLR

SEQ ID NO: 48082 - protein, 48 aa, Zea mays
  Coding DNA Sequence Number=SeqID_4707
MMKSFREQGPTLAPTSSELIRPPSASIDFHNAAEEDNGVKGCPATTGH

SEQ ID NO: 48083 - protein, 87 aa, Zea mays
  Coding DNA Sequence Number=SeqID_4708
MKKKGTLGELNNVQPKLSKDLMKHKNIIKGCKFIQNPNGEDCNLADREYILILEQGVAQEVAQDPAPESTIEDLPAPTLEGKPRFYA

SEQ ID NO: 48084 - protein, 124 aa, Zea mays
  Coding DNA Sequence Number=SeqID_4709
MEPSDPVDKGLGPADHPQLTGDTMFGALRGQHGASPLLLAERRHRGSRSDRSHFAAPLTSLTEGQRRLRRSDCCATRQIEADKQLGPASGTIGNSAPPDPGLGLGLSPGRRRTPLRPTQGSDSG

SEQ ID NO: 48085 - protein, 151 aa, Zea mays
  Coding DNA Sequence Number=SeqID_4710
MQAACNRAKWAHFSDFQHAHASCNWRAGRYVQATAPPLAPLPRLLDCGTSTATRGDPAHDPAAPAWRDGQYGQKWAGSNGGGRRAGAAVTSSTRLTSHPRARDKRRLWQGKRATLRLRHNDRVKKGHSGSVPTTDQGFEGWPSKGSQPPQT

SEQ ID NO: 48086 - protein, 139 aa, Zea mays
  Coding DNA Sequence Number=SeqID_4711
  Subcellular localization annotation: CTP_CleavageSite=72; ConfidenceScore=5.29e-01
MMVLASVATTSFAILLLFSLPSCLHLRATPFSAEGVGACASSSYLSDTSPDTDSRSGYCTSTRTFHIMRAPSFSLSSDVPFVFPAFALFFLPNLLPPPTVAVVTQPTLVDAGTRRAESVMLLAFLCACHRGGHGGACHT

SEQ ID NO: 48087 - protein, 517 aa, Zea mays
  Coding DNA Sequence Number=SeqID_4712
  Homolog annotation: Hit_ID=Q6QP51; Match level="QueryCoverage=28%, HitCoverage=65%, E-value=4e-10, Identity=36%"; Hit description =Putative growth-regulating factor 1
MNRHRHSRCHYKQNFGSVPAGGADGLDGGEASPSCHHVSIDGGIRLSTNAAPANAGRSKAHRQDASSAELEDGFHHQKLEEEVASRPVREVEPRLTSLSASARMMKILEAEGGTKIAARLASPHLGAGDQRVKGRTAMQAACNRAKWAHPFDSNAPSMEAQAHTSCNRHAECYVRATAPPLAPLPCLLDCGTSTATRGNPAYDPTVPARHIDHGSVSHGRRRDGRYSQKWAGSNGGGRRAEAAVASDRERGILRKGSFFVKETGPEPPTNQRFEGWPLGGVQQPPQSARAPRPLLVRGSKVGPSEGFNGRLRPPGSVPTTDQGGNDLVMESHQREASSPRTPSKGDRLTGDTMFGASKGNMALFPPPPCGKATQGPKSGLERHRKLRLARPMARTRAQPRKTTNSASPDPGLGLGLSPGRRRTLPRPTQGSDSGSAPEDDELRLARPQGSDSGSAPEDDELRLARPQGSDSALASADGLRLARPRGSDSTSASEDRLDLDLGGASASPNPGLGPTTS

SEQ ID NO: 48088 - protein, 148 aa, Zea mays
  Coding DNA Sequence Number=SeqID_4713
MGKSKKGSGSSPRSGDKRKREPTPPSEDFGDSEYSEEEFSSESEGSPAPVSPPASSDDSDDSQGIIAEVWTYIWAVERSGLEGSDESEYSSDEEDSSDLSEEGSGGDGGDDDDDGGDGGSGDDSGRGGDGGRKGGNGSGSKGSNKASG

SEQ ID NO: 48089 - protein, 66 aa, Zea mays
  Coding DNA Sequence Number=SeqID_4714
MEPSGGTAVGAVESLLTSSCFCKGAESRCRHRNDSVLLDSSTKRYLGLSPSPSPGSGGAEFIVFRG

SEQ ID NO: 48090 - protein, 102 aa, Zea mays
  Coding DNA Sequence Number=SeqID_4715
  Gene Ontology: Mol. function=kinase activity; Cellular component =ornithine carbamoyltransferase complex; Biological process=amino acid metabolic process
  Homolog annotation: Hit_ID=Q6QP54; Match level="QueryCoverage=59%, HitCoverage=29%, E-value=3e-16, Identity=56%"; Hit description =Putative kinase
MALPVDVAGLCPRSGDVGAPPKPRSKARAEFEPWGRVKQSSSSSGAEPESEPWVGRSGIRRLPGLSPSPNPGSGGAEFAVFRVLARVRALGRAERSSPSSGA

SEQ ID NO: 48091 - protein, 363 aa, Zea mays
  Coding DNA Sequence Number=SeqID_4716
MEVRCQTSFCQNEDGFPKLLKACTVCLRIRSQPEYDGREFVEHGTEKCVVTVYIGSSPHHVEWSVTAAGHRFKDTCQVVARKALRALCQIYEEEVADTPLRFFPPFQRDRPAWMARMRALEEQQVLEDDPTVVYLTAYLLTLGCPMIARAEDTEKLNCKLHVDLTSAQARVAALESREAIAVEALKQAKDEHVQKLMEAYLVTHNQRRALRIQEPASSNPVQPRRAKDPHILEGHRVSIRGKKKIWELPKGAIVLEGIPVFPQAMDKQEHPESSQDPLPELFEPLTMKKILASSREIKEEAASTPPAPPPSEELQEPVPLEEEFNLKGKCALGPFLCILVIECQHMCLIGNLCTWMNKVKIMK

SEQ ID NO: 48092 - protein, 210 aa, Zea mays
  Coding DNA Sequence Number=SeqID_4717
MDKSVRRWKEYHVVAAIVVVARRWKEYHVVAAVEGHELKTPETEHRPRPERLLETAHLELDGKLFVNTQQAPTWRANCRRFETGGSLSRRGVTSVHVGEGSERPQESACPVLVPARPTFSKKALVLPFIGARRGSRAESEPWGRAKRSSSSSGAEPESEPWVGRSGVRRLPGLSPSPSPGSGGAEFAVFRVLARVRALGREERSSPSSGA

SEQ ID NO: 48093 - protein, 145 aa, Zea mays
  Coding DNA Sequence Number=SeqID_4718
MGKSNKRKREPTPPSEDFGDSEYSEEEFSSESEGSPAPGIAAEVWTYIRAVERSGLEGSDESEYSSDEEDSDGGEDEDDDDDDGDDDDGGDSDGDGSGSGGGISGGDGSKGSTRGGSSKGSTRGGSSKGSTRGGGGGGSSSKASG

SEQ ID NO: 48094 - protein, 134 aa, Zea mays
  Coding DNA Sequence Number=SeqID_4719
  Subcellular localization annotation: CTP_CleavageSite=18; ConfidenceScore=5.09e-01
MKLWKETSRSSKITTSSRCGLAATPSRLPVKAALSTFLFRTLIYYAKPTQAADWGFATKKELELVVVLKLLEIFHVASITSGVLSIVGTTWGGWCVKQGGCTLYPQVVIPLCLGLIKPSKHYQGPYGEVLRKKT

SEQ ID NO: 48095 - protein, 125 aa, Zea mays
  Coding DNA Sequence Number=SeqID_4720
MSGSDKLISDMVAKEAVATKRKLWSRCLAKIKKLLILRQKEKNLTFGTWGVKNCLRQRKRSWKNMQNLVGYQPRSMLFGGVDEEILGGNISSAASSALISRMAVPKVDNPKHIPKVAELKLPFMS

SEQ ID NO: 48096 - protein, 260 aa, Zea mays
  Coding DNA Sequence Number=SeqID_4721
MSSRSLMHCVFPPSEPPDGEHPRSFCLVVGGTQLRGSWYLFSPSFGFKDFHQAARPHPLATTSPWVGRSKPGCDLGPALSFKDLHHPCWGGGRAEPELYLPRGFVGQPLPQHSRERALTGLAGGSDSDNAGPIGGERRQLQRVGLAGSAGSGSAPGAPSRREGGCRAARTGGPPKTSRAARAAFVFWGCPAFAPVRRLCAEVGAPSRPGGSEWGSAGGQTTPVVGAEVAAAGEVLVADRITATIRAPGLRLFVLVLAPRA

SEQ ID NO: 48097 - protein, 308 aa, Zea mays
  Coding DNA Sequence Number=SeqID_4722
MPSSSSSTAATPPADAPSEETLSNVAAEELRAGDTVDFGASRMSSKRMIGNKIAQFESCTFTPKTGKTSMEVVELVPCARNKWGNWQDIVDRRGKKPAAETEDDSAPAAAPSSKKRKLGSGEGQLVVVPPAVAPVVSAAVPGAKGSALSAGSEISALAAVKDEAGAVSRRLKEASQRLSQAADFADRVASGALTAVVSAEVERLRAQHAEAVREKSAADSKCRKLAEKVAALEGERTELRRQLAEERREANQALAKAQSAQAEANYARVEGSLARQRAEEWEERLNALQARMERAEASTRSEVERTRK

SEQ ID NO: 48098 - protein, 142 aa, Zea mays
  Coding DNA Sequence Number=SeqID_4723
MNALSREGCCHYEVFDRSDEDFEREIYKVEDPVVKESTGALFDRMWGPPRSGGGQGAVARDEKVEDFGALNSARPEAESNPVAAGTEVAPAPPPETVEGSLDAPAATAAGGGSSPTAVPRAEGPPKTATELAAEDPTAAGSS

SEQ ID NO: 48099 - protein, 106 aa, Zea mays
  Coding DNA Sequence Number=SeqID_4724
  Homolog annotation: Hit_ID=Q6QP51; Match level="QueryCoverage=34%, HitCoverage=16%, E-value=1e-08, Identity=75%"; Hit description =Putative growth-regulating factor 1
MEAEGTRCAVFSSLCLLSQVAKAKAEGKDGSANGKGSGKEIFRKCPSQQRKRAPSPPTNQGFEGCALRDSATAPEHSGSEPSTDQGFEGCPLGRVRQPPQSMQSQG

SEQ ID NO: 48100 - protein, 281 aa, Zea mays
  Coding DNA Sequence Number=SeqID_4725
  Subcellular localization annotation: CTP_CleavageSite=77; ConfidenceScore=5.68e-01
MRPLLPTTGQGSARLATEASRPSAADTSGLSSVKATGLCSPTSATTAAPSPWSKTGESGMTRTEGAGGGGTSAISTSAAAGGSVGAPAAAPAGIDVGVGNEEGGLEAVVVSTASLGTIATPTGGSTLEACPMTARASWAPHRRAPCAEANQQAWRAATPAEEVGPVLRAFVGVRPVEPCLRLLKGRKDKIKIHRKMAETRVPLDTYPLRGKANRAYGETSRTPVSADATEGWPAVGFDAASASDARGTKGAACPGDVTTAEGTTSRTGGTGTCSQGAWRSA

SEQ ID NO: 48101 - protein, 152 aa, Zea mays
  Coding DNA Sequence Number=SeqID_4726
  Subcellular localization annotation: CTP_CleavageSite=56; ConfidenceScore=5.10e-01
MFGALRGQHGTSPPPPCGKATKGRMIKAESVLGRPLALCGGSGAALANPAPAKPLTASTYQPENSKPDYAPGLRQDKAMSAQGTRSRLARAQPRAGTADPGIFTPRPRASSSNGRTFDSPEAQLGQASRRSNLGQIASPADQIAGAFNARIV

SEQ ID NO: 48102 - protein, 375 aa, Zea mays
  Coding DNA Sequence Number=SeqID_4727
  Gene Ontology: Mol. function=DNA binding; Cellular component=nucleus; Biological process=response to DNA damage stimulus
  Homolog annotation: Hit_ID=A2WXE2; Match level="QueryCoverage=40%, HitCoverage=20%, E-value=1e-38, Identity=57%"; Hit description =Putative uncharacterized protein
  Subcellular localization annotation: CTP_CleavageSite=64; ConfidenceScore=5.12e-01
MAGEAGKDPQAWLAANETASAFLSRSLSSRPPITLPPPLHRAPLRPGNVVEIAGPSNSGKSHLLLMAAVQCILPKEWEGIYFGGLGRAVMYLDLDCRFDVLRLAQILRNRIAEGCRLAHLRNGDPENDVTKDEFQCSLQNTLFSDCMQRFLYARCCKSPEFIDALKWVVSGCWRKLITAVPKEMCKGLSSLMILVAWEVWKHRNDSVFENLSPSTQAVLRSTVQSQSRREVSGAGIYFVMIDRKTLQSIFESVVHELRKILQLEPALVLVTKASVYGEGTTTANDFNRINLQVEAEVPSVLESEVLPLHTSEWVQPCLKMKEKFSIMDLQQSKQLQQCRLVASRTRPIAILKFLIGLQYYEPGAVNHVFMILEDY

SEQ ID NO: 48103 - protein, 209 aa, Zea mays
  Coding DNA Sequence Number=SeqID_4728
  Gene Ontology: Mol. function=drug transporter activity; Cellular component=membrane; Biological process=multidrug transport
  Homolog annotation: Hit_ID=A7P1Q5; Match level="QueryCoverage=83%, HitCoverage=37%, E-value=1e-33, Identity=43%"; Hit description =Chromosome chr19 scaffold_4, whole genome shotgun sequence
  Pfam annotation: Domain name=MatE; Domain location=1-157; Score=13.0; E_value=0.00039; Accession=PF01554.9; Description=MatE
MGAEVQSHGSSDRAPYTNLEFEHTTGLMPDSHLSTSIIAMCQNTEAISYMITYGFAAVISTRVSNELGARNIANARKALTVSLALSLMLGVAFLLLLGLGHDLWRLRLHDAAAHRLRRAGLHAGVLCGVARGYGWQHLAAWTNLVAFYVIGLPLAILLGFTLAFQTKGLWMGQICSLLCQNCVLFFITLRTNWQELDLTIFNKDNDFVC

SEQ ID NO: 48104 - protein, 300 aa, Zea mays
  Coding DNA Sequence Number=SeqID_4729
  Pfam annotation: Domain name=Keratin_B2; Domain location=35-186; Score=-74.7; E_value=0.063; Accession=PF01500.8; Description=Keratin, high sulfur B2 protein
  Subcellular localization annotation: CTP_CleavageSite=66; ConfidenceScore=5.55e-01
MDSYASGIRIPHSSSSAISSDVNRGSSSTLGIDSTFSADSASVHAHTDAFGSGSLQSGRGSSVGPGADATAGRLSFASLLEGREPDIKAKELEVGPRVALTVSSAEKLSPAATTSAPAAASTCPPTPHQRELAAPKRTGRSSLPSSPRKQEWDRPRTRVPPSRRTTCCETPRCGWPPSPGQRTKCCTLDWAATVRLPRHGWRAPPPQSWRMVSTPRSRRKKRDASPREGRPRLTSPSSPARMMKILEAEGGAEATARLASPHHRTGGHHLGRRGLSFHQRAQRSSPYDTGAGSHTTCKLA

SEQ ID NO: 48105 - protein, 225 aa, Zea mays
  Coding DNA Sequence Number=SeqID_4730
MALHVWRLLGEALQVGDEGLGFGEGLGVLHALHVTFVRVSEEVCAGFMARFARLRSLETFEQWKKLTSTCSTPSARTRARPRAPPHAQRRARAKPAPWPAPELIKPSQASATLFRAPSKPHRSLARRRLPVRSESAAAQSLCHRRPANRAIPNPVQPSEKTVRPSVKLPERGIGVCFAGEASPRSPELSTPPEYVDREVVPDPAPESAPEDLPATALEGKPRFYA

SEQ ID NO: 48106 - protein, 46 aa, Zea mays
  Coding DNA Sequence Number=SeqID_4731
MAIGEGFCRMAHRTVRCATGHCPEAQGYLWSYLTESMALAWGSNKD

SEQ ID NO: 48107 - protein, 145 aa, Zea mays
  Coding DNA Sequence Number=SeqID_4732
MGKNNKRKREPTPPSEDFGDSEYSEEESSSESEGSPAPIPLRESSDDSDDSQGLAAEVWTYIRAVERSGLEGSDESEYYSDEEDSSEEDGGGNGEDDDDDDDDEGGGSGDGDDSGRGGSKDGDGDSSRGGSGGGDSSRGSNRASG

SEQ ID NO: 48108 - protein, 94 aa, Zea mays
  Coding DNA Sequence Number=SeqID_4733
  Subcellular localization annotation: CTP_CleavageSite=75; ConfidenceScore=5.05e-01
MAAINPPAGGGIDDVFPTWRKSNIRVCPVTFPADGGGGGAGMAKQEAAPRRLSSKSTTLAPQHRRRSPPPVFVARGAPTTSDADPHIDVTVATS

SEQ ID NO: 48109 - protein, 46 aa, Zea mays
  Coding DNA Sequence Number=SeqID_4734
MARRQPGSTVADPCGGTEGGGWLGGSVVARMSAFLHRRHRLPLCRS

SEQ ID NO: 48110 - protein, 305 aa, Zea mays
  Coding DNA Sequence Number=SeqID_4735
MATTRGVDPFLKATLLARVLRRRGLSLHQRTPGSSPYDTGAGSHTTCKLAWDRSIQTVACAERVTAQRLQALLHLRLNQRVKGRTAMQVACNCATGMHPFDFDASSMEAQAHTSCNQRAGYYVRKTAPPLTPMSRLLDCGTGAATRGDPAHGPAVPTKRIGHGREALSHGVKTTRPCSVPRTAHATAAPRTTRLVALTLWQGRRHLWQAKRATLHLRHDDRVKKGTGKGDTLKGILLCEGSGPRALLLIRGSKAGPSEGFDSRLRALGLRAHYWSEVRRLAPRKGSTAASGHSGSAPTTAQGFEG

SEQ ID NO: 48111 - protein, 324 aa, Zea mays
  Coding DNA Sequence Number=SeqID_4736
  Subcellular localization annotation: CTP_CleavageSite=70; ConfidenceScore=5.13e-01
MEETHLHVFDAFCPRQSTPARAPACPAPRPSQASAMARARAYKALPGFDCTLPRTLKLHRSLARRRLPVRSVSAAAQSLCHRRPANRAIPNPVQPSEKTVHTSVKLPERGIGVCFAGEASPRSPELSTPPEYVDRVIHSTILRFLVHTVTTLPREAHRALGLNQFAVVWPVHSPPTKTPACARGPSDSGHPRRQVVPRRDRQSLPEPTPPFAGPSSPSVSRATLFSPTVTVYIGGRTADCNLADGEYILVPEQGAAQEVAPDPAPEPAPEDLPATALEGKPRNPVEMNTSSLEEMVAGVTWSFILPPSWTVEWDPASAEEEHEE

SEQ ID NO: 48112 - protein, 190 aa, Zea mays
  Coding DNA Sequence Number=SeqID_4737
MEETHLHVFDASCPRQSTLTHAPACPAPRPSQASAMARARAYETLPDFGCTLPRTLKPHRSLARRRLPVRSVSAAAQSLCHRRPANRAIPNPVQPSEKTVHTSVKLPERGIRVCFAGEASPRSPELSTPPDSSWFGWYTRHRREHPPARVDRAIPAIPDVKPYLNVTAKASPSQPHPSPDLPRRRNFENP

SEQ ID NO: 48113 - protein, 454 aa, Zea mays
  Coding DNA Sequence Number=SeqID_4738
  Homolog annotation: Hit_ID=Q6QP51; Match level="QueryCoverage=35%, HitCoverage=77%, E-value=3e-10, Identity=32%"; Hit description =Putative growth-regulating factor 1
  Pfam annotation: Domain name=Extensin_2; Domain location=67-387; Score=-142.6; E_value=0.1; Accession=PF04554.4; Description=Extensin- like region
  Subcellular localization annotation: CTP_CleavageSite=34; ConfidenceScore=5.23e-01
MEETHLHVFGASCPRQSTLTRAPACPAPRPSQASAMARARAYKTLPDFGCTLPRTLKPHRSLARRRLPVRSVSAVAQSLCHRRPANRAIPNPVQPSEKTVHTSVKLPERGIGVCFAGEASPRSPELSTPPEYVDRVIHSTILRFLVHTVPTLPREAHRALGLNQFAVVWPVHSPPTRTPACARGPGDSGYPRRQAVPRRDRQSLPEPTPPFAGPPSPPFRHTLTLRQDRRHLWQAKQVTLHLRHNDHVKKGTERDPSPRRKRALSPPTDQRLAPRKGSTATSGHSGSAPTTDQGFVGWPPKGSDSRLRARRARDDPGYVRYITKARATLPRARAQPRRWTTDFASPDPRARAQPRRWTTNSGSPNPRARTQPRPRKTVSASPDPVLGLDLDLGRQTPPCPTPGVGLDLDLGRRTPPRPTLGVELDLDLGGASASPDLGLGPTTSQGGHHYPTPR

SEQ ID NO: 48114 - protein, 110 aa, Zea mays
  Coding DNA Sequence Number=SeqID_4739
MAPFSLLLLPRAPVIAPRLAAAALGIVQPPASGPCGSAQGHPQVVWKGVASSAGGDSRWARHDGSPVFTGALEFALAAGSLPATIPGFIVHRIDGIWELETRARVLTELR

SEQ ID NO: 48115 - protein, 109 aa, Zea mays
  Coding DNA Sequence Number=SeqID_4740
MSSSKARTEKGQEHDRLAPYPRRRASVGSRLLPWAGQQVGEEEQGEGREDKRDVRRRQKRWCAHDVKRPRGRAIATARVGVRAGVGRIQGVGACSYALYREWGGAKVDA

SEQ ID NO: 48116 - protein, 896 aa, Zea mays
  Coding DNA Sequence Number=SeqID_4741
  Pfam annotation: Domain name=HR1; Domain location=520-590; Score=3.6; E_value=0.093; Accession=PF02185.7; Description=Hr1 repeat
MEVVELVPCARNKWGNWHEFWFYVAEGTVEDHPGLHVSEMCSHYYSAYPPFEVVEEDADEGALRCAAGLSSGCDLVEEFVAYGVWPLAHGWALGEVCPRQMPSHGGKLVRSPAFALDLHSRDPAAFVREAEDGAMRIVDRYVPKTEGQRSWDIRGSNDRLNRVFELNRLPYGGYPGQDDVDRRGKKPVVETGDDPAPAAAPSSKKRKLGIAMGGLGVSDGFARELMRTCAAPGGRMSSPELRESSARMLRVTGGWWPKNVPIPRAAGEDFFTSRMVRDWKVFPYGRNIAAVVSAVMDKDRQGAAQKRQAVVRLHEARPKRQRGVVKAAAPSGGQPPLAAKSAVPASSRAPEAAKAAAAGGSKSVKAAPASSRVPEAAKAARELPPPGKRVADFATDISVEDYLVGSDEGQLVVVPPAVATAAAAVVSRAKGSALSAGGEIPALTTVRDEAGAVSRRLKEMQEALSQAADFADRAASGALTAVVSAEVERLRTQHADAVREKSAADSKCRKLADKVVALEGEKTDLRRQLAEERKEANEALAKAQAAQAEANLARAEGSLARQRAEQLEERLSALQSRVERAEASTRSEAERTRKQLMDSYHELGARTADFEVPDREPGLCCLEWIHEELLALPAIVEGFMSYASLVTCEGAMNALSREGCRHYEVFDQADEDFERDIYKVEDPVVKESAGALYNRMWGLHGREVVRERAETARGQAARGERVDDFGALNSALPDPEPNPTAAVSEAALEPPLETAEGVPDAPTATAAGGGPSPTAAPRAEDPVKVAAEPTAEDPATAGSSQVQDFGPAHTTATTNFLAASTVDDGNKSDGSASKFSDFGDSESSVEWTEESSDEDLDYFAALDVAAAEASPHAADAEVVPGPSTGRRRRRAVAKRR

SEQ ID NO: 48117 - protein, 163 aa, Zea mays
  Coding DNA Sequence Number=SeqID_4742
MGKSKKGGGSSHHSGDKRKRESTPPSEDFGDSEYSDEEFSSESEGSPVHASPPASSDDSDDSQGIAAEVWTYIRAIERSGLEGSDESEVSSYEENSSNSSEEGSDGDDDSDDNGDDGGDDDGDDDSDDNDDDGGDDDGDDDGGKGDGKGGSSGGSGSGKAPLA

SEQ ID NO: 48118 - protein, 114 aa, Zea mays
  Coding DNA Sequence Number=SeqID_4743
MAERCQRFIYIYTKSTVRNTVDYSGQEKLFGKTGQARTVRALAADRPRHEDVTRPEPMQKSKSVLWTVRRKNRPSEPLCGPSGLWRGPSAVDLQGRTVRTRRADRPRSAERPNG

SEQ ID NO: 48119 - protein, 337 aa, Zea mays
  Coding DNA Sequence Number=SeqID_4744
  Subcellular localization annotation: CTP_CleavageSite=30; ConfidenceScore=5.16e-01
MSSRSLMHRVFPPSKPPDGGYPPSFRLIVGGTQVRGSWYLSAIVRLQGFSSHSPVAPLHWWSPKMVTSSSWMGRGKPGCDLDLALSVEGVRHPHWGRERGEPGLYLLHGSVGHLFFQLLVVAIALQPCGGDVLQPCRGRRTVAAQLGRNIPPSPSHSRRGRQRGPAGALGSGPLFGFNSWFASLERERGRKPSGGRVHPGPWLLLQRSLAGLPTFVAPQARGCSYPRGRNQSSVCNGTLNASVFVHCGCRGLNMYVILARSRVFSSFSSTKTSPVGCLNRFTKRESPRVKVTSESGDPRTTSPSEARSDLAEDVVDAEGAAAPFQRQDPSLQDQIVL

SEQ ID NO: 48120 - protein, 111 aa, Zea mays
  Coding DNA Sequence Number=SeqID_4745
MHNQGKQKRGSQWFIIEEHANIVQGCRCFGSDRTPGVAPQVGMGNPLGTRNPHGYGFGQNFIPVMGMGFLAGVFFLRGYGFGQVIPSGFLPIAISTWGALEVHPMGVAPDL

SEQ ID NO: 48121 - protein, 2379 aa, Zea mays
  Coding DNA Sequence Number=SeqID_4746
  Gene Ontology: Mol. function=RNA splicing factor activity, transesterification mechanism; Cellular component=spliceosome; Biological process=nuclear mRNA splicing, via spliceosome
  Homolog annotation: Hit_ID=A2Y0Q3; Match level="QueryCoverage=94%, HitCoverage=87%, E-value=0.0, Identity=94%"; Hit description =Putative uncharacterized protein
  Pfam annotation: Domain name=Mov34; Domain location=2098-2204; Score =58.1; E_value=3.1e-14; Accession=PF01398.12; Description=Mov34MPNPAD- 1 family
  Pfam annotation: Domain name=PRO8NT; Domain location=71-222; Score =415.3; E_value=8.8e-122; Accession=PF08082.2; Description=PRO8NT (NUC069) domain
  Pfam annotation: Domain name=PROCN; Domain location=408-799; Score =989.3; E_value=1.4e-294; Accession=PF08083.2; Description=PROCN (NUC071) domain
  Pfam annotation: Domain name=PROCT; Domain location=2210-2331; Score =278.5; E_value=1.4e-80; Accession=PF08084.2; Description=PROCT (NUC072) domain
  Pfam module annotation: Pfam domain module=Mov34::PRO8NT::PROCN::PROCT ; Domain location=2098-2204::71-222::408-799::2210-2331
MAAAPPPPGTTVPGAGQPPPPPPPAGAPLGGKPLTPAELEAQLVEKARKWHQLNSKRYGDKRKFGFVEAQKEDMPPEHVRKIIRDHGDMSSKKYRHDKRVYLGALKFVPHAVYKLLENMPMPWEQVRHVKILYHITGAITFINEIPWVVEPIYLAQWGTMWIMMRREKRDRRHFKRMRFPPFDDEEPPLDYADNLLDVEPLEAIQLELDEEEDAAVYEWFYDHKPLMKTKLINGPSYRKWHLSLPIMATLYRLAGQLLSDLIDRNYFYLFDMESFFTAKALNMCIPGGPKFEPLYRDMEKGDEDWNEFNDINKLIIRQPLRTEYRIAFPHLYNNRPRKVKLGIYHTPMIMYIKTEDPDLPAFYYDPLINPITSTNKVDRRERKAAEEEDDEDFCLPEDVEPLLKQTELYTDTTAAVSAITAQLTAFFLTPLFSPPAYPVKVRVSYQKLLKCYVLNELHHRPPKAQKKKHLFRSLQATKFFQTTELDWAEAGLQVCKQGYNMLNLLIHRKNLNYLHLDYNFNLKPVKTLTTKERKKSRFGNAFHLCREILRLTKLVVDANIQFRLGNVDAFQLADGLQYIFSHVGQLTGMYRYKYRLMRQIRMCKDLKHLIYYRFNTGPVGKGPGCGFWAPMWRVWLFFLRGIVPLLERWLGNLLARQFEGRHSKGVAKTVTKQRVESHFDLELRAAVMHDVLDAMPEGIKQNKARTILQHLSEAWRCWKANIPWKVPGLPVPIENMILRYVKSKADWWTNVAHYNRERIRRGATVDKTVCRKNLGRLTRLWLKAEQERQHNYLKDGPYVTPEEAVAIYTTTVHWLESRKFSPIPFPPLSYKHDTKLLILALERLKESYSVAVRLNQLQREELGLIEQAYDNPHEALSRIKRHLLTQRAFKEVGIEFMDLYSYLIPVYEIEPLEKITDAYLDQYLWYEGDKRHLFPNWVKPADSEPPPLLVYKWCQGINNLLDIWDTSDGQCVVMLQTKFEKFFEKIDLTLLNRLLRLVLDHNIADYVTAKNNVVLSYKDMSHTNSYGLIRGLQFASFVVQYYGLVLDLLILGLTRASEIAGPPQMPNEFLTYADTKVETRHPIRLYSRYIDKVHILFRFTHEEARDLIQRYLTEHPDPNNENMVGYNNKKCWPRDARMRLMKHDVNLGRSVFWDMKNRLPRSITTLEWENSFVSVYSKDNPNLLFSMSGFEVRILPKIRMTQEAFSNTKDGVWNLQNEQTKERTAIAFLRVDDEHMKVFENRVRQILMSSGSTTFTKIVNKWNTALIGLMTYFREATVHTQELLDLLVKCENKIQTRIKIGLNSKMPSRFPPVIFYTPKEIGGLGMLSMGHILIPQSDLRYSKQTDVGVTHFRSGMSHEEDQLIPNLYRYIQPWESEFIDSQRVWAEYALKRQEAQSQNRRLTLEDLEDSWDRGIPRINTLFQKDRHTLAYDKGWRVRTDFKQYQVLKQNPFWWTHQRHDGKLWNLNNYRTDVIQALGGVEGILEHTLFKGTYFPTWEGLFWEKASGFEESMKYKKLTNAQRSGLNQIPNRRFTLWWSPTINRANVYVGFQVQLDLTGIFMHGKIPTLKISLIQIFRAHLWQKIHESVVMDLCQVLDQELDALEIETVQKETIHPRKSYKMNSSCADILLFAAHRWQMSKPSLVSESKDVFDQKASNKYWIDVQLRWGDYDSHDIERYTRAKFMDYTTDNMSIYPSPTGVMIGIDLAYNLHSAFGNWFPGSKPLLQQAMNKIMKSNPALYVLRERIRKGLQLYSSEPTEPYLSSQNYGEIFSNQIIWFVDDTNVYRVTIHKTFEGNLTTKPINGAIFIFNPRTGQLFLKVIHTSVWAGQKRLGQLAKWKTAEEVAALVRSLPVEEQPKQIIVTRKGMLDPLEVHLLDFPNIVIKGSELQLPFQACLKIEKFGDLILKATEPQMVLYNIYDDWLKSISSYTAFSRIVLILRALHVNNEKAKMLLKPDKTIVTEPHHIWPSLNDEQWLKVECALRDLILSDYAKKNNVNTSALTQSEMRDIILGAEIAPPSQQRQQIAEIEKQSRETTQLTAVTTRTTNVHGDELIITTTSPYEQQAFASKTDWRVRAISATNLYLRVNHIYVNSDDIKETGYTYIMPKNILKKFICVADLRTQIAGFLYGLSPQDNPQVKEIRCIAIPPQHGTHQMVTLPSNLPEHEFLNDLEPLGWMHTQPNEAPQLSPQDLTSHAKILENNKQWDGEKCIILTCSFTPGSCSLTAYKLTPSGYEWGRSNKDNGSNPHGYLPTHYEKVQMLLSDRFLGFYMIPDNTPWNFNFMGVKHDPQMKYNMKLGMPRDFYHEDHRPTHFLEFSNIEEGEVAEGHGPYGNIGTTLSLIEGSRISQLLSPMLERKLGVGVKLVLKASSFSWRNMMMM

SEQ ID NO: 48122 - protein, 147 aa, Zea mays
  Coding DNA Sequence Number=SeqID_4747
  Gene Ontology: Mol. function=nucleic acid binding
  Homolog annotation: Hit_ID=A2XS22; Match level="QueryCoverage=69%, HitCoverage=12%, E-value=2e-12, Identity=39%"; Hit description =Putative uncharacterized protein
MELYFDLTLENQTLKAALGGLAADFEVLQLADRVFRFSVSSMAVGFHIYNLGSIERKEFRAFFNLWNRGGPNWKHEFRLFLDEEAASWSKVRVRNSPSYADVVKLPLTGANAVPIRNPTRSPGGAQHAAWAGSSVFNRLGRPFTNHA

SEQ ID NO: 48123 - protein, 71 aa, Zea mays
  Coding DNA Sequence Number=SeqID_4748
MGYTTCGYRVQPLQSVKLMVNTRKGGGIDLPPNRHSRRIFRQPQQQEEMDPPNPPPVGADPAVIAQMRIMQ

SEQ ID NO: 48124 - protein, 329 aa, Zea mays
  Coding DNA Sequence Number=SeqID_4749
  Homolog annotation: Hit_ID=Q6J9V9; Match level="QueryCoverage=22%, HitCoverage=27%, E-value=4e-07, Identity=45%"; Hit description =Putative uncharacterized protein
  Subcellular localization annotation: CTP_CleavageSite=69; ConfidenceScore=5.54e-01
MRAACNRAKWARFSDSQHAQHGGPGPRVMQPARRMLRACNCTATCATTAPPRLRNQYRDSRRPSARPSSASLARRRSRRRFAFAVITAPKKGPGKGDTPKRILPSERTRLRATLLIRGSKAGPPEGFDSRLRSRGPYTHYWLGLRSRGTLGHFRDQRERSCNGFPSEGGIEPSDPVARGLGPADHLQRLGGCSRKPGSGRTVDSVNIPDRELGTRPYTRATASSHEGTIRPAEALRKALRPRRSKTTPPRPRGLHPVGALARTHRNKMQPRKAGPLAKKCDESLQASANTPFEARGLLSGTIIRGTLKAPNSQLVTPISIKLQRPDGCD

SEQ ID NO: 48125 - protein, 336 aa, Zea mays
  Coding DNA Sequence Number=SeqID_4750
  Gene Ontology: Mol. function=triose-phosphate isomerase activity; Cellular component=chloroplast; Biological process=tryptophan metabolic process
  Homolog annotation: Hit_ID=Q9FQ77; Match level="QueryCoverage=100%, HitCoverage=100%, E-value=1e-155, Identity=86%"; Hit description =Indole-3-glycerol phosphate lyase
  Pfam annotation: Domain name=Trp_syntA; Domain location=75-334; Score= 433.6; E_value=2.8e-127; Accession=PF00290.11; Description=Tryptophan synthase alpha chain
  Subcellular localization annotation: CTP_CleavageSite=47; ConfidenceScore=5.86e-01
MASAIKAASTSSQWSSSPAAVHSSPLSKRLPAAVAMPGRRRSVATVRAVAAVAPGAPAKLTAGAGGRCLPVSQTMSRLRAQGKTAFIPYITAGDPDLATTAEALRLLDACGADVIELGVPFSDPYADGPVIQASAARALASGTTPDGVLAMLKEVTPELSCPVVLFSYFNPIVRWGLADFAAAVKEAGVHGLIVPDLPYGNSCALTLRTEAIKNSLELVLLTTPSTPADRMGEITRASRGFVYLATVNGVTGPRANVNTRVQSLIQEVKQVTDIPVAVGFGISKPEHVKQIAEWGADGVIIGSAMVRQLGEAASPKEGLKRLEKYARSMKNALPCQ

SEQ ID NO: 48126 - protein, 283 aa, Zea mays
  Coding DNA Sequence Number=SeqID_4751
  Gene Ontology: Mol. function=tryptophan synthase activity; Cellular component=chloroplast; Biological process=tryptophan metabolic process
  Homolog annotation: Hit_ID=Q9FQ75; Match level="QueryCoverage=100%, HitCoverage=100%, E-value=1e-141, Identity=93%"; Hit description =Putative tryptophan synthase alpha
  Pfam annotation: Domain name=Trp_syntA; Domain location=31-283; Score= 444.4; E_value=1.6e-130; Accession=PF00290.11; Description=Tryptophan synthase alpha chain
MANGGAAAGKLTVAETFSNLREQGKVPQCSFSTKSAFIPFITAGDPDLVTTSKALKILNSCGSDVIEVGVPYSDPLADGPVIQASATRALKKGTTLDSVIEMLKGVTPELSCPIVLFTYYNPILKRGVGNFMSTIKQAGIHGLVVPDLPLEETALLRSEAIMHNIELVLLTTPTTPTDRMKGIAQASEGFLYLVSAVGVTGARSNVNLRVEHLLREIKKVTDKPVAVGFGVSTPEHVKQIVGWGADGVIVGSAIVKQLCEAATPEEGLERLEEYARSMKAAMP

SEQ ID NO: 48127 - protein, 179 aa, Zea mays
  Coding DNA Sequence Number=SeqID_4752
  Gene Ontology: Mol. function=catalytic activity
  Homolog annotation: Hit_ID=A2Y3P0; Match level="QueryCoverage=56%, HitCoverage=36%, E-value=2e-12, Identity=42%"; Hit description =Putative uncharacterized protein
MYDKLRRSRRLDAVQSGCSVLSIVKQGDLMVVANPSQESSILGMSRAFDDYYIKDCGVILALEVTHGRTDNNDQFVILATVEASLGRGAERLLRAVHRQAGDLMVVANVGDSRVVLGTTFDDDAITSSSSFGQGYYLADEPGVHFVLQSNQESSVLGMSRAFDDYYIEDCGVILAPKVT

SEQ ID NO: 48128 - protein, 133 aa, Zea mays
  Coding DNA Sequence Number=SeqID_4753
MADVARLLAVNTHDLLAHIASFDYRPEMIDELDVQMRFVVGGTILMLLTVVFYEIQALAAIALTQATTKNQPQCPQVIAPSGSRSSLAITARLKVEREGTEERFTRWNVEVLPYWYGEAEGGGGAAEAAVPAD

SEQ ID NO: 48129 - protein, 344 aa, Zea mays
  Coding DNA Sequence Number=SeqID_4754
  Homolog annotation: Hit_ID=A2YGC2; Match level="QueryCoverage=30%, HitCoverage=46%, E-value=7e-07, Identity=32%"; Hit description =Putative uncharacterized protein
MRMVMIMLMVMMARLRHTARKSVIPFLPSRLAERPLRRPVAGQSSHLDRLRHHLHEEQERRRQEQQGSSFSLQQEIESVRSCSPVLPLEAPPAPPLGAPASGGDPDDGGGDDSSSHDTDFPADPEPEGWVARPITRDAARGCHFHDALDALLRRALNRRTWSIEYRCVVYQHSRGVYPDRWEATCLVRRPENSLQGAEACSEHYSISERDSAEAAMQDVARRALSHYCSVFGGVADGLDLKYYPRRPSGSTGGVIVSPAGEDNPRLSRTVNLAAVLNTELDHALDELSRARAEIALLRAERAERRHLDDGSPAPVGSQHPYRSPRRGRQSYGNPNCKTKINLEP

SEQ ID NO: 48130 - protein, 81 aa, Zea mays
  Coding DNA Sequence Number=SeqID_4755
  Subcellular localization annotation: CTP_CleavageSite=34; ConfidenceScore=5.13e-01
MAAPKSSPSLFGFRQTCVAPCSIYVTPCVVIVPRVSKKFQESGEDEANNTIFPKRSTKLPESENRYRSRRFVLAVETVRLI

SEQ ID NO: 48131 - protein, 251 aa, Zea mays
  Coding DNA Sequence Number=SeqID_4756
  Gene Ontology: Mol. function=endonuclease activity; Cellular component=cytoplasm; Biological process=RNA-dependent DNA replication
  Homolog annotation: Hit_ID=UPI0000F3310F; Match level="QueryCoverage =58%, HitCoverage=50%, E-value=3e-12, Identity=32%"; Hit description =UPI0000F3310F related cluster
MSRKQLGRNPLSDVPYRKSGMMLNGRQNVRAKSEGGGEHWFQTMVCLSESEKMKFWKDLDDMVRAVPTNEKLFIGGYLNGHVGSTNVDYELAHAGFGYGSRNQEGDDILDFVVAYNLLIANTFFRKRDSHLVTFSSGHRSSQIDFVLTRREDKQACLDCKVIPGESVEPQHNLVVADFCFRISTHRVKQAKIARTKWWKLKGETSEVFRERVFVEGAWSEEEHANIMWVKMATFIKKVASPRVLSDQREQR

SEQ ID NO: 48132 - protein, 196 aa, Zea mays
  Coding DNA Sequence Number=SeqID_4757
  Homolog annotation: Hit_ID=A2X6T6; Match level="QueryCoverage=32%, HitCoverage=5%, E-value=4e-10, Identity=51%"; Hit description =Putative uncharacterized protein
MEKEPLDMVESSVRVIETHVDIIRSLVTDGVVDTSEPESVYTLKTTLFQIGDVCDMLEKCALSIKKYVDSKRAKIIQDEALQYAEDDEAADDLEELPSPDLLTQADILEKYFGIEYDSDQSRVRQRRHGCDVIMLKDPKKRLSPVVYHLPLFVGFTDGWKHLVIANDLRAEDVCELVKGPDDGEPVYYVRMCGHKI

SEQ ID NO: 48133 - protein, 192 aa, Zea mays
  Coding DNA Sequence Number=SeqID_4758
MALPVDVAPESEPWGRAKRSFVVFRVLARVRALGSGGAEFAVFRPESEPWGRAKRSFIVFRVLAQVRALGSGGAEFAVFRVLARVRALGSGGAEFAVFRVLARVRALGSGRAEFAVFRVLARVRALGSGGAEFAVFRVLARVRALGSGGAEFAVAPLARPDCLSDSLCRVALQSEWRRRRCPSVRLASGAVE

SEQ ID NO: 48134 - protein, 172 aa, Zea mays
  Coding DNA Sequence Number=SeqID_4759
MAHDKEVEDLGDLDGTLPESMLPEASGVELAPPSDACKGPSATPTSTAPTGAGEDPTPALALTGEDASKAMGEPATGDPAAAAAGPSQCFESDGESGSSFPWTEESSDEGLDYFVALDVAEAETSPRVEDVGIFLVRVLGVGGEGWWETIAWVNFREVAGTVVWGWSVAVSE

SEQ ID NO: 48135 - protein, 357 aa, Zea mays
  Coding DNA Sequence Number=SeqID_4760
MEKDHQDAARKRRAVTRVGDPFREAKKARGGAKFAAPSSSKPQPTVKPPAPEPSKSSAGAKAAASGAGKLPSAEPAKERRLPSPARTDVAATRVADFDTDICVENYLVGPKQDHGAGSDVGQLAVVSTPVAATSPTVAVGAKGASKDPWSNFCASGEISSAATAKDVAGSVSLQLRHAPQQLKHLVEERRDANKAITDAHAAQAKAKLARAEASLTRQRVEELEARLNGLRNRVDKTEASTRAEVERTHAQLVDAYRELGARTAAFEAPDQEVGLCFLEWLQEELGVLPTIVTGLMSFASLVTCEGVVNALSREGCGHFEVFDQSDEGFEREIFLVEDPVLKLSARALFDRMWGPHG

SEQ ID NO: 48136 - protein, 97 aa, Zea mays
  Coding DNA Sequence Number=SeqID_4761
  Gene Ontology: Mol. function=ATP-dependent helicase activity
  Homolog annotation: Hit_ID=A3AMB6; Match level="QueryCoverage=53%, HitCoverage=7%, E-value=2e-10, Identity=69%"; Hit description =Putative uncharacterized protein
MDTAEEAGQEVVSAVGEDSIPEAAACSREERKEEEEEEVEVSFDELGLDEQLKRALRKKGILKATPIQREAIPLILSRRLASAIQSASRPGSGGVCE

SEQ ID NO: 48137 - protein, 416 aa, Zea mays
  Coding DNA Sequence Number=SeqID_4762
  Gene Ontology: Mol. function=phenylalanine ammonia-lyase activity; Cellular component=cytoplasm; Biological process=phenylpropanoid metabolic process
  Homolog annotation: Hit_ID=A2X7F7; Match level="QueryCoverage=76%, HitCoverage=44%, E-value=1e-158, Identity=90%"; Hit description =Phenylalanine ammonia-lyase
  Pfam annotation: Domain name=PAL; Domain location=98-416; Score =315.2; E_value=1.2e-91; Accession=PF00221.10; Description =Phenylalanine and histidine ammonia-lyase
MRAAVNSSQISARHGASLPALPARAGSDEAAAVPGPATAIFQAPVAAAAVVGAPLALPPPRPRMRPPPRYPPWLPRPQHLAVHLRRVLRMVAEYRQPLVKIEGASLSITQVATGAGEARVKLDESARSRVKASSDWIMNSMMNRTDSYGVTTGFDAMSHRRTKEGGALQRELIRFLNAGAFGTGTDGHVLPAKATCATMLVRINTLLQGYSGIRFEILEAIVKLLNANVTPCLPLRGTVTASRDLVPLSYIADLVTGRENFVALAPDGSKVNATEAFKIAGIQGGFFELQPKEGLAMVNGTTLGSGLASTVLFEANILAILAEVLSAVFCEVMNGKPEYTDHLTHKLKHHPGQIEAAAIMEHILEGSSFMKLAKKLGELDPLMKPKQDRYALRTSPQWLIRSVFSNVSKCCVWSIK

SEQ ID NO: 48138 - protein, 110 aa, Zea mays
  Coding DNA Sequence Number=SeqID_4763
  Subcellular localization annotation: CTP_CleavageSite=49; ConfidenceScore=5.16e-01
MQESLAGPPSQQILPRAPYTDHSPTALALSAVVSELGTRVGVASFAVSRCDERGGQRNSVMREFVERGKNALTRWVPRAVRSRARQQPDPQGFAAAATTNAEIPGWKNAQ

SEQ ID NO: 48139 - protein, 181 aa, Zea mays
  Coding DNA Sequence Number=SeqID_4764
MPAGPPARGGVETEQVRELAHGGNCSRALRVDGSGGKKWADGGALRAGPSDLGGWHPCDQGWTRERLRGEQRVGHVMGLEAVGGKGGEGVRWVARQVEQAGGLALGRTSGEGGGRAGWASRWQAEGRSSGLRERATRPSWAKGRVLLIAITRVKFPITWKEINKGAKRKRNKKVTPEFGGD

SEQ ID NO: 48140 - protein, 478 aa, Zea mays
  Coding DNA Sequence Number=SeqID_4765
  Homolog annotation: Hit_ID=Q6QP51; Match level="QueryCoverage=25%, HitCoverage=58%, E-value=2e-16, Identity=45%"; Hit description =Putative growth-regulating factor 1
  Pfam annotation: Domain name=Keratin_B2; Domain location=10-173; Score=-73.1; E_value=0.048; Accession=PF01500.8; Description=Keratin, high sulfur B2 protein
  Subcellular localization annotation: CTP_CleavageSite=58; ConfidenceScore=5.02e-01
MAQRHISLSMVAFQGGHPPFKGDSPYLRPQPSWAESSPTHSKVLPYGAGAGPHTSCKSAQSRRSQTAARGACNRPAVASGSPLLPRPTGERASSHAGGMQPRQMGALLRLPTRPAWGPRPTRHATGAPNASCMQLHRHLRHHRASSTAQPIPRLEATQRTTQQRQPGATVNTAKNGPAVMAVAGGQEQRSRRRPSLRPIQGRRENPLSRREDNAPVFRSSNGSRTRNDRLTNHSPCRINSAAGQAEKRATLRLCHNDRVKKGSEPPYCSEVQRLAPRKGSTAASDRVGSTPTIGQRFEGRPLGRVPRPPQATRALRPLLIKGSKAGPRRVHSRLRHRARDDHGYVRYITKARAALPRYPRTFRDQRERSCNEIPSKGGIEPSDPVARGPGPADHPQLTGDTMFGAHRGQHGAFPPSSLRKGDAGAHHRKLRFARPRARTRAKPRKTANSAPPDPGLGLGLSPGRRRTPLRPTQGSDSG

SEQ ID NO: 48141 - protein, 323 aa, Zea mays
  Coding DNA Sequence Number=SeqID_4766
  Gene Ontology: Mol. function=structural constituent of ribosome; Cellular component=ribonucleoprotein complex; Biological process =translation
  Homolog annotation: Hit_ID=Q9XHS0; Match level="QueryCoverage=41%, HitCoverage=95%, E-value=2e-67, Identity=93%"; Hit description=40S ribosomal protein S12
  Pfam annotation: Domain name=Ribosomal_L7Ae; Domain location=208-303; Score=104.4; E_value=3.5e-28; Accession=PF01248.17; Description =Ribosomal protein L7AeL30eS12eGadd45 family
MKCSLESAVKKLQLWLEGEPPNRPYPLNGGPLVAWKVNHQIASEDKVIGAVLTQVTGGKEHVVTYLSRRLVDAETRHSTSTPAKVSLGTCPGKLGSGSATACRRRARDLQLAVVSLLPLVTHVGVAHTLVNMVVMASLRCWHPLSKPPFPRRPLHTLTSLPSDAEQAEGIVPSATGRTRRHTYLSDQEAPVAVEAPTPVLGEPMDLMTALQLVMKKSSAHDGLVKGLREAAKAIEKHAAQLCVLAEDCDQPDYVKLVKALCAEHNVHLVTVPAAKTLGEWAGLCKIDSEGKARKVVGCSCVVVKDYGEESEGLNIVQEYVKSH

SEQ ID NO: 48142 - protein, 167 aa, Zea mays
  Coding DNA Sequence Number=SeqID_4767
MAPGCFTSGGPGCAHRGPAPSGPDGVVSENATFNCSRDTPWGCFSAWLRVAAQASCLYTVVRGTPNPEYRHIPISISIHILIPIMGIRFIPYPSPFGYRVPNVSPSSTTKIHIPADLSFTFSTDRFNSWWGIWESHAFPRALGPLLQKIDVEYEVLDGDVLFLAILF

SEQ ID NO: 48143 - protein, 312 aa, Zea mays
  Coding DNA Sequence Number=SeqID_4768
  Gene Ontology: Mol. function=DNA binding; Cellular component=nucleus; Biological process=regulation of transcription
  Homolog annotation: Hit_ID=A2Y4N1; Match level="QueryCoverage=100%, HitCoverage=100%, E-value=7e-67, Identity=63%"; Hit description =Putative uncharacterized protein
  Pfam annotation: Domain name=Myb_DNA-binding; Domain location=98-148; Score=43.5; E_value=7.7e-10; Accession=PF00249.22; Description=Myb -like DNA-binding domain
MREEEEASWFARGEEQQLLRPDELMPLTQTLITPHLAVAFDITTHGAGGTGAAGGAGAGPGAGGPDINGGGASSAAGSSGGGGGGGGDEPARTLKRPRLVWTPQLHKRFVDAVAHLGIKNAVPKTIMQLMSVDGLTRENVASHLQKYRLYLKRMQGLGGGGGGGGGGGAGGSHSSGSGTDAATEHLFATGPVPFLPPGHRAPAAADSYPPFSPMGGAHHHQHHQIGHFHHPATRPLAHYGGAAVGGFDHGFLSRVGPPAGPPGMHHRMVGGGAGMGMMAPASFADEMDLGSRGGGGSGSRRELTLFPTSGDH

SEQ ID NO: 48144 - protein, 375 aa, Zea mays
  Coding DNA Sequence Number=SeqID_4769
MKLTIVGKTLAKRCIHNNVVRKLRLRKLDMQWQGNKGRKPSDLGNIRDGNGYGGQAGNGYPLDSGYPAGTDMGRDPYPRTFIDTGVPPRLLNSAGNHHQHKAAKARWAQYRSKLRPLKGHDLASPEPSLGQEQQTQENSAACPAPTAVPPARVRLTAAKSSLRRHRKLRLARSQGSAPALPDPRARTQPRPRKTVSASPDPRARTQPRPRRSHRLARPWARTDHVTEGTIITLPLASSGYGEQDRRPIWLAPVNRCQRFIYNYTKSTVRNTVDYSGQEKLIGKTGQARTVRALVADRPRHEDDTRTEPMQKSKSALWTVRRKRADRLSPRADHPATGADRPPLLLTVAFSAVDLQGRTVRTSRADRPRSAEWSNG

SEQ ID NO: 48145 - protein, 52 aa, Zea mays
  Coding DNA Sequence Number=SeqID_4770
MDGRRRVTSSPFVAVDIVNRTERDCESGIGTEQLRPIDFLEWNGSGFEENFP

SEQ ID NO: 48146 - protein, 381 aa, Zea mays
  Coding DNA Sequence Number=SeqID_4771
  Gene Ontology: Mol. function=nucleic acid binding
  Homolog annotation: Hit_ID=Q1ANZ5; Match level="QueryCoverage=76%, HitCoverage=83%, E-value=1e-150, Identity=90%"; Hit description=DIP1
MTSTDHITSNLDKLAVQNKGTNWTSQPAGQDAIDAMLQDLSSEIASKDLRQLHYFLGIEAYFDFASTSEKLRTGEVLRMELDIQNFMQNPQLQEFEFQNFPTSYLRCAAHRVAQHYGLETIVADSLVEGSVSRIVARKTAESRYPAIFLSEVPSNQARNDHETAEKLKFVIYQRPKAFQNGSADSRNKSGVPKTVDERIEEYNKARARIFNGSISADSDAASIMGTLSTGKDEPVNVDPSVDETKVSTMNSRSRVAVFKDTEKDRSDPDYDRNYKRYVRSSVPGFNLSPGVFNFVVPQFMQYDIGYVQSPGMSTNQHTMYFGQPDLTIGSSGAAVYRHWPTPTMMYPHCYDNVSPMMSQNVIFHHFSKLSYKAISNSWGER

SEQ ID NO: 48147 - protein, 250 aa, Zea mays
  Coding DNA Sequence Number=SeqID_4772
MGGWEKGSTAVMGNDAGAKELELKALSLYLCMDQSTRFFRAHGRNCYLRLLDILNHVYEVVEFGPKGCFGLGHRTVRWCTGQCPVRQAASGEEAALGNLPTAYGYNSPDCPVCTGLSGEPTVGRANGQPRDLRETRGRANGRNGAPDCPVCTGHVRCANGSQIFNGQQRSAALFMEINRAPDSVRCALDCPVRPTTEGKDGLPDLFSTAPSCLGAIKGTPRRMEENTKHSYNIPKHQDIDLTHSFHCDSI

SEQ ID NO: 48148 - protein, 251 aa, Zea mays
  Coding DNA Sequence Number=SeqID_4773
MTTNLVVGRSEPGCSLPLSSASRMFIICAGEEGEPSWGPAFCMGWWPASSSSIWGRRALTSLAEEANFGYAGPADCGCRRPPRARFPGLDGLGAASDAASYRLVGAWLPVHRTSDVRHIHGFSRAGGRTGGAYKTSYAARAAAVFLDGLVLTPAVRTGARTSSRVLRQPLPTGAEVPAVVGAEVVATGEVAAAVGAEVVASAGEPLGASYPAALLAGYQLSGTIIRGTIKSPNSQLVTPISIKLQRPDGRD

SEQ ID NO: 48149 - protein, 183 aa, Zea mays
  Coding DNA Sequence Number=SeqID_4774
MQDAARRALSQYCLLFSGVADNLDLKYYPRRSTDSTRDVIVSPVGEGNPRLNNMVNLVAVLNTELDHALDELGKVRTKVAELREDCVAHHYLDGGSPAPVGIQHPYHSQPCGRFDYERRLRWQTPSVRSQTSSMRRPKRRSSLRQAEAKTHDHYKGRETKAAKTTGRVPLSAGRGSCAIRSML

SEQ ID NO: 48150 - protein, 66 aa, Zea mays
  Coding DNA Sequence Number=SeqID_4775
MADHSSLYRLPHREESLASPGSLSSRKGEGVELFHALTGRNISGSAPLAADDPAFGFAPAPRFTLC

SEQ ID NO: 48151 - protein, 98 aa, Zea mays
  Coding DNA Sequence Number=SeqID_4776
  Subcellular localization annotation: CTP_CleavageSite=69; ConfidenceScore=5.52e-01
MQAACNRAKWARFSDSQHAQHGGLGPRVMQPARRMLRACNCTATCATTAPPRLRNQYRDSRRPSARPSSASLARRDRERGIPRKGSFPVKEPGSEPPY

SEQ ID NO: 48152 - protein, 38 aa, Zea mays
  Coding DNA Sequence Number=SeqID_4777
MGDHVSGHVRGKVYCQVQSGGHSRGFAGLVRGGFELQQ

SEQ ID NO: 48153 - protein, 258 aa, Zea mays
  Coding DNA Sequence Number=SeqID_4778
MELIRPHTPLPRKRGRVPLRGLYKVPLASENPLQFIGSSSAGIPRLTTIAAKSTQGPPYTDHSPTALAPFRGYSVKEIETQKLRGEDRGLFSIFGESSYSHITERRPTARAAAPSSANPRARQEGSMSNVIRCKMKRGRWRAQWWKLYRGLGHQEARPRRTAEVCGSTTTVSNLLPGDPNQRTNCGGETSDEHQGSHPYYELGLESCNSRSQPRRPVTIAFTARDEGPEDGVAGGTREIEEERGERLRPALMGVQGLS

SEQ ID NO: 48154 - protein, 161 aa, Zea mays
  Coding DNA Sequence Number=SeqID_4779
  Gene Ontology: Mol. function=thiosulfate sulfurtransferase activity; Cellular component=mitochondrion; Biological process=sulfate transport
  Homolog annotation: Hit_ID=A2ZMK2; Match level="QueryCoverage=43%, HitCoverage=17%, E-value=3e-28, Identity=87%"; Hit description =Putative uncharacterized protein
MQAAKRQTVATGSPTPGRTAWVGKGTVTALMIICKMKTQMMLLGGHIPGALFFDVDGVAHIPGALFFDVDGISDRTSSLPHMLPSEKAFSVAVSALGIYNKDGIVVYDGKGMFSAACVWWVKNVGTHVLNVKNVGTVELIVQSSQTHAGHISSTATWPRRT

SEQ ID NO: 48155 - protein, 176 aa, Zea mays
  Coding DNA Sequence Number=SeqID_4780
MVTTSSWVGKSKPGCDLGPTLSFKDVHHPRWGGGQAEPALYLPCGPAGHPLPRRSGVEALTGPASGADLDNVGLIDGGRRHLQRVGVVGRTPGGPSCRRAAAAPGRCPTRLGGFEWGSAGGLVSPAFGAEAEAAREVLVAEGITATIRAPGLWFFVLVLAPRASAWARARLQQRPP

SEQ ID NO: 48156 - protein, 131 aa, Zea mays
  Coding DNA Sequence Number=SeqID_4781
  Subcellular localization annotation: CTP_CleavageSite=34; ConfidenceScore=5.19e-01
MSGFGRHRKLRLARPQGSAPVSASDDELRLARPRARTRLRLRKTTNSASPDPGLGLGLSSGRRRTPPRPTLGLGLSIGLRQWSPPRPTRGSDSTSTSEDRLDLDLGGATASLDPRLGPTTSQGGHHYPTPS

SEQ ID NO: 48157 - protein, 211 aa, Zea mays
  Coding DNA Sequence Number=SeqID_4782
  Homolog annotation: Hit_ID=A2WLI9; Match level="QueryCoverage=36%, HitCoverage=16%, E-value=3e-16, Identity=58%"; Hit description =Putative uncharacterized protein
  Pfam annotation: Domain name=WD40; Domain location=135-173; Score =30.3; E_value=7.2e-06; Accession=PF00400.23; Description=WD domain, G-beta repeat
MDLGTPWSLITSFIYKGTNCEAELVVFMGIQCANLVKRSTTTQIASLPRGERARRPARRPPSPPQPPPQPPPDVPSCTRPLEPSQKAVRSGLGRRAEPNVPDARAAESKPKLALGDDDDRPPLEEKHRCSGEGGFIFLCALVGHTEAIGGISMPSGSNKLYSGSVDGSVRIWDYNSGKATNNLFDYGRVTGCFHGGSSEEVVIVRGGSCAD

SEQ ID NO: 48158 - protein, 311 aa, Zea mays
  Coding DNA Sequence Number=SeqID_4783
MPGKANCCCPARMQHSILCPRFCGEDGSEDLPVRFGAARACWCGVGGQADAAVGADVVAAGESFSAVEAVGAAYGPTSGSLALMSGSRPLSGDTNENLPVAVSVLGPWLMLQRSLASHPELVTPQALRCGGCSYPRGQNRSSVCNGTFNAGDCSLRLSGPEHPKPEAAVSAWTEAELARKEDFVGRSLAGPSTCRTSVGAELPRPRAGLVSSEDSWLRLRGSRPRRPLGLDSWRRPWRRWPGRGADVVLRSGDPPTVLPSEARSYFAEGGVDAEGAAAPPPSTSEPAGSVHLVVCVCFLRPPRPKHTVVML

SEQ ID NO: 48159 - protein, 188 aa, Zea mays
  Coding DNA Sequence Number=SeqID_4784
MESHDLRAERESRLVGGNEIDGSGYDYGAGKWYSFRLERMARLRHIARKSVIPFLPSRLAERPLRRPVAGQSSHLERLHHCLHEEQEHRRQEQQGSSFSLQQEIESVRSCSHVLPLEAPPAPPLGALASRVAAGGDPDDGGGDDSSSHDTDFSADQEPEGWGCSTHHSRRCSRVSLPRCARHPATSGT

SEQ ID NO: 48160 - protein, 110 aa, Zea mays
  Coding DNA Sequence Number=SeqID_4785
MKLWKETSRSSKTTTSSRRGLAATPSRLPVKAAFIYVSFPHFDLLWLDLDTLHESPSSPSYPPALLSVRCQRTGAEEEGVLSRSEPLNKKRCPSSSTCRPRHRCPSSRCF

SEQ ID NO: 48161 - protein, 136 aa, Zea mays
  Coding DNA Sequence Number=SeqID_4786
MPCFQPELVLPDCSAGLLGQEGEVPADSASETDLLTDCSDGSGTDAKDTAFGTADAAEWRPKSDRWLELPESASETSARWTSGAGAAGAAAGAPLLVERLAPAEHAFLLCACSLTSAECNHTSELIWQILQHKKRV

SEQ ID NO: 48162 - protein, 134 aa, Zea mays
  Coding DNA Sequence Number=SeqID_4787
  Homolog annotation: Hit_ID=B0JCV8; Match level="QueryCoverage=55%, HitCoverage=13%, E-value=2e-19, Identity=59%"; Hit description =Misfit TNP1-like protein
MGSPIKDQGLEPEHMDKSVPQEQSGSEGYQTPSDPCPSIDRAARRELQRDPSYDPREDEVLSQFHAILDEDEARYQDAPEPTDTITERSMKRKQSDQKRDVSPKGQHLALEEALPKFRNALGFLVRDNLDITIR

SEQ ID NO: 48163 - protein, 96 aa, Zea mays
  Coding DNA Sequence Number=SeqID_4788
MAPPVDVAGLRPRLGDVEAPPKLRSSLSSVAEVESEPLVRARRRPSAEARAESEPWGRAERSSSSSGAVSHPVFRRQTECEPCTCQDQLFTYTAVT

SEQ ID NO: 48164 - protein, 686 aa, Zea mays
  Coding DNA Sequence Number=SeqID_4789
MASSSSSAATTPPAAASSEETLSSLMVEELRAGDSVDFGVSRMTSARVEDMQRLGYFGGGVARAPGTEEVPEPEVAEEDANEGALRCAAGQSSGRDLVEEFVAYGVWPLAHGWALGEVCPRQMPFHGGREVRSPAFALNLRNRDPAAFVRDAEDGAVRLVGRYVPRTEGQRSFDIRGSNDRLNRVFELNQLPYDGYPGQDEADRRGKKTAVETGDDPAPAAAPSSKKRKLGTAMGGLGVSDSFARELMRTCAAPGERMSSPELRESSARMMRVTGGCWPRNVPIPCAAGEDCFTSRMVRQWRVFPYGRNIVAVVWAVMDKDRQGAAQKRQAAVRLHEARPKRQRGAAKAGASAPSKAPEATAGAGGSKLTKVVPPASGVAEASKAARALPLSGKRVADFGTDITVDDYLGGSDEGQLAMVAPGVEIATAAIVPKARGEALDAGGEVSALAVVRDEAGAATRRLKGVTEALSQATEALSQVADFASRTASGALTAAVSAEVERLRTQHADAVREKSASDSKCRKLTDRVAALEREKADLRRQLAAERREANEAIAKEQAAQAEAKLARAEGNLAKELAEHLQERLTALESRAKGAEAVMRAEAERTRAQLMDTYRELGARTGDFEVPDREPGLRCLQWVQEELQELPTVVGGFMSYASLVPLEGAEDPLFPGRVPPFGVLGPARESF

SEQ ID NO: 48165 - protein, 206 aa, Zea mays
  Coding DNA Sequence Number=SeqID_4790
PTYDGEALDWKYGSSQLAIGRDEDDLKCPGGRYGTRVNGISLWPVVVSSSDACSSPGACNDSCFSPNNASADSCSDACNDSSCFSPNGASTDTSANTITDTSADSCPGAIRKPIRPVTQRRPRRARYNGPDHTWASELNEAALRDGVAAGLRLVPNGAKGVPARFVSVGPATAAKASSEGWRLCLRPNICPPRDQFDKVTWCRRRR

SEQ ID NO: 48166 - protein, 448 aa, Zea mays
  Coding DNA Sequence Number=SeqID_4791
  Gene Ontology: Mol. function=ligase activity
  Homolog annotation: Hit_ID=Q6ZD68; Match level="QueryCoverage=86%, HitCoverage=72%, E-value=8e-62, Identity=38%"; Hit description=DNA ligase-like
  Pfam annotation: Domain name=DRMBL; Domain location=91-203; Score =24.6; E_value=5e-06; Accession=PF07522.5; Description=DNA repair metallo-beta-lactamase
MCRDVPVRGPLRIRPAHRRLPQCPDAPPRPPHRLPLPRAVLPALPRHAGLHPPGGRPRLVGVSKAFGSKIYVDREKNSDWHQRLAHVTPEILAANDAAPSTRFHVLSFSRLSEQATEILALARAARQLKPLIIRPSSQWYAYYDPPPPEEASTQQQQQKPVLTEAMCDELGVWHVCLSMHSSREELEQALGILKPKWVVYTMSSCMAVELSYAVLLTVEAVEKLEEVFNACAPSNDISQALEEGAEATVVDFENYEYESVEIIGDDELEAKDFANELEFCRHSKPIQVVGLTEAATREQNPVSDESELLNDIKSDGGVERLNMIEGTERLNWGAQEQNLNARARLTVGVCRHKVIADKGTEAIEGMVSAAHVPEDGTTVTLGTGRSTDHQYSERASDSSTTFGSSKGLNASLRRLYRSMNVLVSRPLPSLVQLMVASKRPRVSQTAQS

SEQ ID NO: 48167 - protein, 156 aa, Zea mays
  Coding DNA Sequence Number=SeqID_4792
MDEYIRADNDFRQSREEAYSKLPIGHQPREAEEGGTSEEGEVSASPDPRARPPPRPRKVVSASPDPRAQPQPRPRKVVSASPDPRAQPQPRPREESRPRPTPASASGGVSASPDLRLGPTTPQGPLTEARRRQQGPNSPDSCASTGLKRSSDGHDT

SEQ ID NO: 48168 - protein, 96 aa, Zea mays
  Coding DNA Sequence Number=SeqID_4793
  Homolog annotation: Hit_ID=B0JCV8; Match level="QueryCoverage=39%, HitCoverage=5%, E-value=4e-11, Identity=84%"; Hit description=Misfit TNP1-like protein
MKQFAINFKNWRSEMNTKFAKKDLDPTNKYKISAGERAQNGLAYTHAYRSGRRCAANQTRVQETISTWAQVEKAPTLPIHSITIAHVRKIATMVGP

SEQ ID NO: 48169 - protein, 207 aa, Zea mays
  Coding DNA Sequence Number=SeqID_4794
  Homolog annotation: Hit_ID=Q6QP51; Match level="QueryCoverage=33%, HitCoverage=63%, E-value=2e-17, Identity=44%"; Hit description =Putative growth-regulating factor 1
MQVACNRTTETHPFDFDASSMEAQAHTSCERKQQSNRLQPHVPSWSSRGALSHGVKTTRPCSVYRTARATTAPRTTRPVALTSRQGKRRPWQAKQALFHLRHDDRVKKAAPEHSSSAPATDQGFEGWPLEGFDSRPRACRVRDDSGYVRYMAEARATLPSLRRHRKLRLARPWASASGEVSASPDPRARPPPRPRKVVSASPDPRAL

SEQ ID NO: 48170 - protein, 96 aa, Zea mays
  Coding DNA Sequence Number=SeqID_4795
MAPPVDVTGLRPRLGDVEAPPKLRSSLSSVAEVESEPLVRARRRPSAEARAESEPWGRAERSSSSSGAVSHPVFRRQTECEPCTCQDQLFTYTAVT

SEQ ID NO: 48171 - protein, 188 aa, Zea mays
  Coding DNA Sequence Number=SeqID_4796
  Subcellular localization annotation: CTP_CleavageSite=80; ConfidenceScore=5.42e-01
MGVGKGRLVAVVGDGRLPSSSINSVLASPAFSHLLLLSAACFLLLPSFPPWARVTNASASRLLHRRTSATRNTRRPISPPASSDDSDDSQGIAAEVWTYIRAVERSGLEGSDESEYSSDEEDSSDSSEEGSGGDGGDDDDDGGDGDDDDDSGGGGDGGSSRGSNGVAAARAATRPVARCHWSLDVSID

SEQ ID NO: 48172 - protein, 77 aa, Zea mays
  Coding DNA Sequence Number=SeqID_4797
MKVGRVRVGGGQGQGRGAGGRGSGDGRGGGDGGGRQGRGWRQETQVHDSDSGDPKPGTRLRAHDKPTQVISSKDLHS

SEQ ID NO: 48173 - protein, 255 aa, Zea mays
  Coding DNA Sequence Number=SeqID_4798
  Homolog annotation: Hit_ID=Q6J9V9; Match level="QueryCoverage=45%, HitCoverage=46%, E-value=2e-08, Identity=37%"; Hit description =Putative uncharacterized protein
MEAQAHASCNRRAECFVHATAPPLAPPPRLLDCGTNTATRGDPAHDPAAPAWRDGQCGQKWTGSNGGCRRAGAAAPSRSGRRFAFAIMTASKKGPGKGDTPKRILPREGTRLRASLLIRGSKVGPSKGFDSRLRSRGLYTHYWSEVRRPAPRNGSKAASGYSGSSPTTDQGGNDLVMESHQREASSPRTPLPGDRVQQITRRHHRKLRFAQPRARTRAKPRKTANSAPPAPGLGHGLSPGRRRTPLRPTQGSDSG

SEQ ID NO: 48174 - protein, 122 aa, Zea mays
  Coding DNA Sequence Number=SeqID_4799
  Subcellular localization annotation: CTP_CleavageSite=20; ConfidenceScore=5.09e-01
MASAGLWRDAGHARSGVLWRAQNASNTWRCSSARVQTLAEIANVRILAKIRRRPLPGTYGYLSYMNSNTVLFTLTCNRSHVILGLLPSVKPKKLRLNARTMMKDETDIKGKDYSVLNRLPFS

SEQ ID NO: 48175 - protein, 52 aa, Zea mays
  Coding DNA Sequence Number=SeqID_4800
MARVACTLHGKRLDGGVSVLSVKKQQTFVASVPRWCRKKKIKTKAAGGKVLH

SEQ ID NO: 48176 - protein, 251 aa, Zea mays
  Coding DNA Sequence Number=SeqID_4801
  Subcellular localization annotation: CTP_CleavageSite=59; ConfidenceScore=5.18e-01
MAHARAYKAPRDLNRTPPRTLDLTGAQTHRRLPVHGVSAATQSPCHRRPANRAFPNPVRPSEKTEHTSVKLPERGIGVCFAGEASPRSLDSIRPPASVDRISLYSILRFLVRTTSTSPREAHRAIGLNQVAVVWPAHPPPTRAPACARGPGDSGHPRRQAVHRCDRQSLPEPTPPLAGPLSLPTLPLTRPETWSPIPVMVGTSAVTARRQSGSVRHCSLEDMVAGVTWPSILPPGWTVEWDPASAEEEHEE

SEQ ID NO: 48177 - protein, 255 aa, Zea mays
  Coding DNA Sequence Number=SeqID_4802
MRSIFNLPKGKCPDELVKIVWNNNMSSWIEAPTVSEVVEAKILLAEIVVLKDKGLTAKAMSSFSEFVSNPPICEEGCSSRNRMWPSLDKPVIEAKLNPDDDVVDAGLEDVVEGGHGVKTTRFVVDVEDEEEEEGLSMSAVDGILEEGVHEELLLELPEINVIDVCIDYPDEVPSTCLMAGPEVMELPLDAQSSGRRLDVDEHVEQCRAVVGVLHVLARFVLMLQMQHLRGIHTYREEAPRTELLGSRRRLGEGER

SEQ ID NO: 48178 - protein, 38 aa, Zea mays
  Coding DNA Sequence Number=SeqID_4803
MTEAQAGAMFYGDGDGFLTFRFNSDDAGALRIEDAFKA

SEQ ID NO: 48179 - protein, 566 aa, Zea mays
  Coding DNA Sequence Number=SeqID_4804
  Gene Ontology: Mol. function=RNA-directed DNA polymerase activity
  Homolog annotation: Hit_ID=A2YUU6; Match level="QueryCoverage=17%, HitCoverage=11%, E-value=3e-11, Identity=39%"; Hit description =Putative uncharacterized protein
MEISAKPIDVVHEIFLVICLLPHQGSKLMVKLWRIGLTHPLDPDVRRYGAYDCGKRQVIVAVDNILAFLWLSSAPPSCDLQVHPELFSGIDRGFGEDEPITTSYQEHALVAPGVRRCALAWCPPAHGHGGPQAESVGLLQSFVGGKADLFRVSQLADRVFRFSLSCKIVGFTVYQLRSYSCSVFKAYLHLWNSGGPNWFIEWQRYSVEESKSWKLVSHRRSSTTSFATMARKPALSGANLVPLGRPMRSIRSSSGLKQRHSVFDRISFPLHTVSDHGVDVRPHFQNYSNRRIGRKDSVPSLNGSAVPAASGHHHFWDLSLPGNKSQLFGLSGQKCNRPVGSFPNKFANASWGGSFEYQRFAFHGTCTVHKTPFRYAALEESVAINLSTECDWGIVLVQPLPEHEVNFHIFDDIIREYLVEARRVQVRSIQRSHLGQALVRFRESLGLFNVTSCNNLCLVPNLKIRTPCLPTLMMDTSFQLSFFGMGQPVPNFQFDLNIPPMEGVNAEEDVAINADEGWDPWPVQQAQPPAPVVIANNAKGVQFQQEEAPVLAGAVLSFACFFLPKT

SEQ ID NO: 48180 - protein, 183 aa, Zea mays
  Coding DNA Sequence Number=SeqID_4805
MAVTYTCRNSDGFDVPSYFSGRCGRNLGGHDAAQSEVLIEVATTDVLAALARPFQGDSGILSRTPAVEFCPEVECAIPSSRSTSSRHCFMDPGEAVELGGCRNNSLATDNARGVALDGVRDVCAAVCCRAACTAAVPGTWRLGTCGVEEAASPSTAKSTEVSARCSTICTIMLEQGNKQKPNA

SEQ ID NO: 48181 - protein, 128 aa, Zea mays
  Coding DNA Sequence Number=SeqID_4806
MSASSPVERPPEGAALTRIPLETTDAPHLEARKAEGRDECKRSETWATAREIDPFLKADFPTRALKRQGAKSPPDVHQGSHPMTRGLGPHMSYRPTRSTKKANHRTRSVKIALPLAPMPRLLGAVMED

SEQ ID NO: 48182 - protein, 283 aa, Zea mays
  Coding DNA Sequence Number=SeqID_4807
  Subcellular localization annotation: CTP_CleavageSite=46; ConfidenceScore=5.10e-01
MATAKGEGSRVKCSGDPGSGPSPMASTKPRRAPQLSPSWEGPFKVTGMHRLEGNHLATTEGVPYPDAGTSLTLEYLTKSESITSVSKRSPSSISTLQVALMVSLAEATTSATGSLTSGGDHLSTDDSGHLYTGGRRLPQHARRGPRSRPPAGVRTRPSKNVVAAPTAYDVLYGPPVRPPAREKLWMWRTSTRRDRRPCGGRTATPRPSSRRQRQRRHQSHPGQGARHAVADGACSRPTLRSRSSPPPQGSWTPLSPECWRKKRVASPCGRQDPNSARPLPHRG

SEQ ID NO: 48183 - protein, 193 aa, Zea mays
  Coding DNA Sequence Number=SeqID_4808
ATAAFGWAPLDRALITVVPKKELGLGWCLTRRSAYKTSRPGPAQNATARLAAKGSLARPGLDERRVELAQVCHGDASRVEEREGRVGGDEGGYGGGGGEEMRRTGGRESTRQRKAAVTAPSDGDDGFAECLPGSTRQSRCLYRVPKGTLGKEPAREGPIVKLFAECSVRHSAKRSALPSASDITLGKEPKPVP

SEQ ID NO: 48184 - protein, 254 aa, Zea mays
  Coding DNA Sequence Number=SeqID_4809
MAERYQLPRSCVPPTTRRKDCGCSPSGGSEGGKTRCIREREDMVAFQGDHPPFKGDSPHLCPQPSRAESSPTRSKVLPYDMGAGSHASCKLAQGRRSQTAARGACNCPAVTSIPPLLPRPAGERADSHAVGMQPAKWAHPFDSNAPSMEAQAHTSCNRRAGCYVRATAPPLAPLPRLLDCGTSTATRGNPTYDPTVPARHIGHGPVSRRRRRDGRCGQKWADSNGGGRRAKAAVTSLAKLTSHPGTAREPSLAA

SEQ ID NO: 48185 - protein, 148 aa, Zea mays
  Coding DNA Sequence Number=SeqID_4810
MNKTPALKVPLQMELRFRPRGYEQPPHRGACGATSSVRLAGDLCSSSYGPRTDAATGRLSFVSPLKGREPDIKAKEPKDASSAELEDGFHHQKLEEEVASRPAREVELRLTPLSAPARMMRILEAEGGTETAARLASPNQGAGGHRLG

SEQ ID NO: 48186 - protein, 47 aa, Zea mays
  Coding DNA Sequence Number=SeqID_4811
MDESEKGDRPPGTSNCITFESQRIGDASPVYFISEVLSETKIRYPQN

SEQ ID NO: 48187 - protein, 156 aa, Zea mays
  Coding DNA Sequence Number=SeqID_4812
  Subcellular localization annotation: CTP_CleavageSite=71; ConfidenceScore=5.14e-01
MKNERRDVGSCGVSGRLAVRLPGPWRGQQLQARVARLLARGRAARSRRRLGCGSAGRRVQGVRWVLASVCSCVARWARSCWFLGAAAGDFEEAEERRRPVGERRSQAVVGVKRCGTAASSELTSRDEQKAARGKEMTRMTRGSHLLKRKAHEGPAT

SEQ ID NO: 48188 - protein, 107 aa, Zea mays
  Coding DNA Sequence Number=SeqID_4813
MRSSSSSGAEPESEPWGRAMRSSSSSGAEPESEPWVGRGEASYGARGRTWLLSAALYRVAQQPERRRRRCPFVRPQCSALTILFGKPYTSRELPPLASSCTLFPTTC

SEQ ID NO: 48189 - protein, 192 aa, Zea mays
  Coding DNA Sequence Number=SeqID_4814
MNKDGDLQNGIGVQMGQIQVIEIKETAEKGGNRKSKTAEKKRNINNGFVGVLCWNSDPVANPPRTELLQRKNSDGHEMEKVRLRNNRHMVTYERQLAVGIDGGNDSNGRTGGFPLGRHLNLAGERSGSRIAKGQRGPGCRKARTRARKAEARNYAVHMGFLRPDTVSKKCPVITRQLFLKRWRAMSSLSCYF

SEQ ID NO: 48190 - protein, 154 aa, Zea mays
  Coding DNA Sequence Number=SeqID_4815
MGKSKKGSGSSPRSGDKRKHEPTPPSEDFGDSEYSEEEFSSESKGSPTPVSPPASSDDSDDSQGIAAEVWTYIRAIERSGLEGSDESEYSSDEEDSSDEEDSSDSSEEGSRDDGGDDDDDRGDGDGGGDSGRGGDGGSKGGNGGGSKGNNKASG

SEQ ID NO: 48191 - protein, 288 aa, Zea mays
  Coding DNA Sequence Number=SeqID_4816
MELMGTCAAPGGRMSSPELRESSARMLEVTGGRWPKNVPIPCAAGEDFFTSHMVRDLKVFPYRRNIAAVVSVVMKRDRQDAAQKHRAVVKIADPMREAKKAWGSAKAAASGSSKPVPVAKPAAVGHNKASASAKAAASSRRLGEGQLAVVPPPVATTSPTVVVGAKDAARDPWATFCASGEIQSAAAARDVAVDFADHVASGALTSDVAVEVESLQAQHADVLAEERWEANKAITDAQAAQAEAKVARTEGGLARQRIEELEEKFNALRSRVDKAEASTRAEVERTHT

SEQ ID NO: 48192 - protein, 105 aa, Zea mays
  Coding DNA Sequence Number=SeqID_4817
MTVGGGCLSYGAPDMSGAPATSPIPLGFDRWSSDFWARLDVRCTSDMYCSMSGPSATPVPTAAGEIPAPPPVPTGEDASKVVAELAAEPAAEDPTTAAGPSQVAE

SEQ ID NO: 48193 - protein, 60 aa, Zea mays
  Coding DNA Sequence Number=SeqID_4818
MQAACNRAEWARPFDSNVPSMEVQAHASCNRRAGCYVDRERGIPRKGPFSVKETGSEPPY

SEQ ID NO: 48194 - protein, 148 aa, Zea mays
  Coding DNA Sequence Number=SeqID_4819
MGKSKKGSGSSPRSGDKRKREPTPPSEDFGDSEYSEEEFSSESEGSPAPVSHPASSDDSNDSQGIAAEVWTYIRAVERSGLEGSDESEYSSDEEDSSDSSEESSGGDGGDDGDDGGDGGGGGDSGRGSDGGSKGGNGNGSKGSNKASG

SEQ ID NO: 48195 - protein, 134 aa, Zea mays
  Coding DNA Sequence Number=SeqID_4820
  Gene Ontology: Mol. function=galactosylgalactosylxylosylprotein 3 -beta-glucuronosyltransferase activity; Cellular component=membrane; Biological process=cellulose and pectin-containing secondary cell wall biogenesis
  Homolog annotation: Hit_ID=Q50HW1; Match level="QueryCoverage=50%, HitCoverage=18%, E-value=2e-30, Identity=92%"; Hit description =Glycosyltransferase
  Pfam annotation: Domain name=Glyco_transf_43; Domain location=38-134; Score=-98.9; E_value=0.018; Accession=PF03360.7; Description =Glycosyltransferase family 43
MATSVKRSHSCRCQVLFLLALVLLAFVSASPTPISGNPPVVWVVVEPAADAPATAEVLRGTDIMYRHLAFKPEDNFTTADTEAHVQRNAALAHVEKHRLAGVLHFADASGVYDVGFFDQIRQIDARLINCHTRL

SEQ ID NO: 48196 - protein, 520 aa, Zea mays
  Coding DNA Sequence Number=SeqID_4821
  Pfam annotation: Domain name=Transposase_28; Domain location=1-145; Score=-48.6; E_value=0.0048; Accession=PF04195.3; Description =Putative gypsy type transposon
MTLLGHPDRFQFEEALNLVRGLLGWSAPGLTGRIRAGAVPHGNLAAGEFILFTSYISCGLAMPISPFFLLLLEEFGLQLQHLMPHSILQAEDQRPHRGLLLPDEARSGRRLHPTLGGARWENWRSDWVIASAEANDRLVLPSDGPALDRKHWRTKPSLALEFQPVLDRIKGLATGGLTLMHVGIPALCDDPGLRTTILATLPTLDESGVAVRQTGGRDPHRGIWISNTPAGGPQPAGAAPMPRRGPQPLGQGGTSSSNNSSSNSHNGSISNNNNSDRPASRVAGKSRAPTAAQTAPAASHVLAGGPAAAAPASGGVAATEEVPTGGSTPASDITPTPDVGGDTGGASSSNPPPAPKEMEVVFGRRLWSGVEEEDAPIPLPRNLSRADHVLSDTGAAILREWEVLEAEHQRLSDWCTQLEERTRTASHQFISERSQLEWDRKEYKKDLQKVYARELEAHQREKKVAKREEALSQREALTTELRAKLNALDQTLEAQRVQQVKVVERLQQWQHVIPNFLKRS

SEQ ID NO: 48197 - protein, 191 aa, Zea mays
  Coding DNA Sequence Number=SeqID_4822
MVNGSTAVTPNFGKEFVPPRGGQSPRFAPVDGGEAGNMEDFEEFQDYDEFYVHCVTRCQEQELEQQDSPTLPQRVVEFERPPSPAPQPEMPPAPPQGIPAARGDPDRDGDNDDAGGSSSHGTERSEEPEPEGLYPDQWKGYLLGGAVRTMISSVQRPSQSTILSLRGILSRQPCKMQHDEHFLSIARCSAG

SEQ ID NO: 48198 - protein, 155 aa, Zea mays
  Coding DNA Sequence Number=SeqID_4823
  Subcellular localization annotation: CTP_CleavageSite=67; ConfidenceScore=5.04e-01
MPEPKFTGLCLEHAAPLPAEPPEPRPLRPAPSSHFQVAPVTRPNSSSLTSSPACARGPTYSDHHSQRSAPRRDRQRPSDLTRPFTGVTSPPITISYCRTLNFIGCTEDCNLADGEYVLIPEQGAVHEEDQEQAPETAIEDLLAAPAFEGKSRFYA

SEQ ID NO: 48199 - protein, 116 aa, Zea mays
  Coding DNA Sequence Number=SeqID_4824
  Subcellular localization annotation: CTP_CleavageSite=63; ConfidenceScore=5.45e-01
MQGHYVPTHINRPHRFPVSRSGLTALAYNASLTPTGRRAVTALVPTITGMGDLVSGRVRGKVYCQVQSGTRLTDLPYFSVMHKTGACLLKQWQAGPLVQTLVLDPGLPPEQLLAPA

SEQ ID NO: 48200 - protein, 127 aa, Zea mays
  Coding DNA Sequence Number=SeqID_4825
MTTSLVAGKSMPGCGLSPTLSFKDVHHPRCGGRWVEPGPYPPFGSVTRFFLQHSEGKGVHQSYGRGGPWLHGVGRLQAVSYSVSSPLGLDGSGAAFDAASCHLGALGVLVWVAKLRFRTPLGRGSRY

SEQ ID NO: 48201 - protein, 404 aa, Zea mays
  Coding DNA Sequence Number=SeqID_4826
  Gene Ontology: Mol. function=protein disulfide oxidoreductase activity; Cellular component=cytoplasm; Biological process=cell redox homeostasis
  Homolog annotation: Hit_ID=Q0IWL9; Match level="QueryCoverage=99%, HitCoverage=83%, E-value=0.0, Identity=68%"; Hit description =Monothiol glutaredoxin-S11
  Pfam annotation: Domain name=Glutaredoxin; Domain location=216-276; Score=53.4; E_value=8.1e-13; Accession=PF00462.15; Description =Glutaredoxin
  Pfam annotation: Domain name=Glutaredoxin; Domain location=319-383; Score=100.6; E_value=4.9e-27; Accession=PF00462.15; Description =Glutaredoxin
  Pfam annotation: Domain name=Glutaredoxin; Domain location=89-153; Score=98.8; E_value=1.7e-26; Accession=PF00462.15; Description =Glutaredoxin
  Pfam module annotation: Pfam domain module=Glutaredoxin::Glutaredoxin: :Glutaredoxin; Domain location=216-276::319-383::89-153
MEEGKTVDTLEGANPASLANKVAKVAGPASVAESAVPASLGVAAGPAVLENIQKMAQRNGSSAVESISSGSTEDALNKRLEQLVNSHPVFLFMKGTPEQPRCGFSRKVIDILKQEGVKFGSFDILTDNDVREGMKKFSNWPTFPQLYCKGELLGGCDIVVAMHESGELKDVFEEHNITLKPQGSKNEEAGEPESATEKGSAVSESIKLTDAQKTPLESLITPSPCGFSGKLVHILKQENIPFSSFDILSDDEVRQGLKVFSNWPSYPQLYIKGELVGGSDIVMEMHKSGELKKILSEKGVRQKGNLEDRLKSLISSAPVMLFMKGTPDAPRCGFSSKVVNALKKEGVSFGSFDILSDEEVRQGLKTYSNWPTFPQLYYKSELIGGCDIILEMEKSGELKSTLSM

SEQ ID NO: 48202 - protein, 85 aa, Zea mays
  Coding DNA Sequence Number=SeqID_4827
  Subcellular localization annotation: CTP_CleavageSite=64; ConfidenceScore=5.01e-01
MAQLTGPCAYMMGGFPDRADHTLNHRAKSLRRCQPRRSGIIGSAAIPRRCLFVAANPRDEQATVESEVQQVEIAEQELIEGKLCP

SEQ ID NO: 48203 - protein, 315 aa, Zea mays
  Coding DNA Sequence Number=SeqID_4828
MTSHGSSDDGNALTHTDGLAREGFPRILWEVLQGAGYTTPPQYAVQQFEKHRVPRCRVRMTLEPHPLQPGWRSLDSESFGYRAEDTIEAIALHGFTTFCGFHPLELATHPIGLFPAEKEDDPMWKDRVEHAKDIWAIYPGQTAHLTVRCMNALYRLQVMRGEAMSHLMALLEATKITLDNRVELMVDLSQEMVEKDLQVEQLSTDVQELEELVGTEENTIEVLEDQLINTQQQLAEANKHLDMHHQEIQDQEANEDVDIEGGDEPASSVDTAGSGRPPSPRVECCFVRSLGVQDRLRSWIVGLLAASLAFAPLGY

SEQ ID NO: 48204 - protein, 77 aa, Zea mays
  Coding DNA Sequence Number=SeqID_4829
MESHDLRAERESRLVGGNEIDGSGYDYGADCNLADGEYVLIPEQGVVHEEDQEQAPETAIEDLPAALAFEGKPRFYA

SEQ ID NO: 48205 - protein, 99 aa, Zea mays
  Coding DNA Sequence Number=SeqID_4830
  Subcellular localization annotation: CTP_CleavageSite=60; ConfidenceScore=5.01e-01
MRSPIPVMVGRSAVTARRPVGVSEALYAKAVSPDLLTGNRWGRLINSASAFGNPTPQPNSCMSRGSLEEMVAGITWPSTLPPGWTVEWDPASAEEEHEE

SEQ ID NO: 48206 - protein, 48 aa, Zea mays
  Coding DNA Sequence Number=SeqID_4831
MAGSVREEPEVEHHLRVEKAHGYLRSYSTEFKGGTYKDAEPQHVGPGA

SEQ ID NO: 48207 - protein, 87 aa, Zea mays
  Coding DNA Sequence Number=SeqID_4832
MGECWTPGYTVRTSKVGPGPPRVQVGPLEWDLDPSYGVRAAHNGVPRRHAQSTIRGPSYYSPLLARFGYQCCMDCCHQDSRWLLRHY

SEQ ID NO: 48208 - protein, 271 aa, Zea mays
  Coding DNA Sequence Number=SeqID_4833
MRFHILRGMKAEVILAFADICTHEFDIILLAEMCHLTLVLLNAVEFRGVCGPRGVTQQELEGKASEAALAEENLKAKGESLDRREMDLARWETDLGFREEMLTQRGELLAEHELEAEKKEKELEEQGSQEVEATRKALEDLQTEHRSGVQRIAASAGEASTALVPLGISPIPVSELPASISEALLVLDSAANRLQHLDQILGARLEVEGSKLCWAVIEYILTCFRSHDPTISLELVIAGPVATTEDAARESVQDAMELVGERFQRDPTDDE

SEQ ID NO: 48209 - protein, 168 aa, Zea mays
  Coding DNA Sequence Number=SeqID_4834
  Gene Ontology: Mol. function=aspartic-type endopeptidase activity; Biological process=RNA-dependent DNA replication
  Homolog annotation: Hit_ID=Q2R2J9; Match level="QueryCoverage=59%, HitCoverage=5%, E-value=2e-08, Identity=34%"; Hit description =Retrotransposon protein, putative, Ty3-gypsy subclass
MEANEDVDIEGGEEPKPAFSLDTAGSGRPPSLESSVASVNRHLSTMVVVTTISVPQQQLLIRSSSGNRTVLQYAQAFNDLCQYAGYHADTDEKKRDRFRRGLSTKLRDRLNTIRANNYNELVNMAISQEDCITSRQTAKKRKTPVAGSSAQPQRFRIVFDPQNRGPQQ

SEQ ID NO: 48210 - protein, 369 aa, Zea mays
  Coding DNA Sequence Number=SeqID_4835
  Pfam annotation: Domain name=zf-CCHC; Domain location=269-286; Score =18.5; E_value=0.0024; Accession=PF00098.14; Description=Zinc knuckle
  Pfam annotation: Domain name=zf-CCHC; Domain location=31-48; Score =25.9; E_value=0.00015; Accession=PF00098.14; Description=Zinc knuckle
  Pfam module annotation: Pfam domain module=zf-CCHC::zf-CCHC; Domain location=269-286::31-48
MRMIRKINLMGVPLQVEDILFNIDRKKQRKRECFTCGEKGHFRDNCPTMAEPKKGRSKGKALTSVKTWDDSSSEDEPPRMRSHRSSSRSSRSSHKCLMSRAFANLNCELSTKIEQLESSATSTATDDSLIKRNEKLKAKLASSQESIENLLGKMEILSIHNNELTTKLENIGSTPEVSLVEIPEIIKKDASSSWFDLIDDSNSCNQVLVENIVVETCSNEVAKENEQLKQEVDRLGKALYDKKGKAKQIQPPQDNTTAGVNKPVEGESVICRLCHKEGHKSFQCKAKTRDKQKEKLKQNPTSKIYNTYIKKVDKKVATPYLIKKKNGKVIAIKANKQANNGKGAKRIWVPKEIISTMKSTKKVWIPKGK

SEQ ID NO: 48211 - protein, 600 aa, Zea mays
  Coding DNA Sequence Number=SeqID_4836
  Gene Ontology: Cellular component=nuclear chromosome; Biological process=chromosome segregation
  Homolog annotation: Hit_ID=Q9AXN6; Match level="QueryCoverage=77%, HitCoverage=95%, E-value=3e-72, Identity=41%"; Hit description=RIX4
  Pfam annotation: Domain name=Rad21_Rec8; Domain location=540-594; Score=77.8; E_value=3.5e-20; Accession=PF04824.7; Description =Conserved region of Rad21  Rec8 like protein
  Pfam annotation: Domain name=Rad21_Rec8_N; Domain location=46-140; Score=9.5; E_value=8.8e-05; Accession=PF04825.4; Description=N terminus of Rad21  Rec8 like protein
  Pfam module annotation: Pfam domain module=Rad21_Rec8::Rad21_Rec8_N; Domain location=540-594::46-140
MGNSGTGEGIGFGDLPRPWREEAADGTSSSAREFAYPVSRRGPPRMFYSHTILARKSPLGTVWIAAHLERKIKKPQIDGIDIPTYAGIFGSIWWRVKGAVFPVAHSVQITAYMIFPIRVRCRYFRSDYEFPDARVEQSGPAPSLHMGPTAIEDETSPPFHDGFGANNDPNEEAPIDRPIGNSPVNSNIANLTDGALDPPEKMREAPHEFPHLKLTESILGNDDPMDLDHDSSPFVQNKAITPPVIDETTSAGRQTFSYLNFGLSHLHVQYKRTRIIEDQKHNCMRKQIDGAELDELICKRRKLPQTALDVWRFSRTNRQGSFLLEPLLHGTCSDLQETYERNFPCVSGLDAECSNVAGVANDDPDASLERQLSPNVPRTAELSYHELTPTSPGNAEAQPEPPLPTLKSPGAAGAVPDDDMLPELPRFSPIDVPSSIRGNDTPYKTPGGTPSWLGGSAVSEIPSSDGNYSLPGQSTRDSDNMSFLFPINEDDEHPEIPGLMSTPGGVSSVATGTTGLGSMSARTRAVALFFKDHASSPSDDQPGKFSLNKILEGKTRKQAARMFFETTVLKSYNYIDVQQEDPYGAIEILVKPLLSAAKLT

SEQ ID NO: 48212 - protein, 249 aa, Zea mays
  Coding DNA Sequence Number=SeqID_4837
MAVMGSTLEKMYLCQVPNFGLNDKAETGRVRKQQIFVAFVPRWSLRKKTRIEASGGNMPPRTRKTARKFTGPIGMPRHQLAPRHEESSSGNNDHIGDLEAQVEQLRTELRHRNSVWVEDGQRINELRTDIRHLQDELAERDLALDWAVNSCSIVWDREAKARAHVEELSTAIDNLQVYCNTLHEKVHELYSRLHPNVPADPVGMGVRPSGTADEALGGELDLFKPPPSMNLADKWSPTTDNEATKDDKY

SEQ ID NO: 48213 - protein, 24 aa, Zea mays
  Coding DNA Sequence Number=SeqID_4838
MTKKNRNGNKLQMYLRLEKKVQHP

SEQ ID NO: 48214 - protein, 153 aa, Zea mays
  Coding DNA Sequence Number=SeqID_4839
MGKSKKGGGSSHHSGDKRKREPTPSSEDFGDSEYSEEFSSESEGSPAPASPPASSDDSDDSQGIAAEVWTYIRAVECAGLEGSDESEYSSDEENSSDSSEEGGGGDGDGDDDRGDGDGGGDSGKGGDGSGKGGSGDDSGGSKGSSKGNNKASG

SEQ ID NO: 48215 - protein, 80 aa, Zea mays
  Coding DNA Sequence Number=SeqID_4840
MRASSVFVVPLFPDPRYYLSRKRSSAIDYRRKEDPWMTSTGNHRRACDYRVELVRSIYLILVLLVLIHVHRASHEVIGVV

SEQ ID NO: 48216 - protein, 252 aa, Zea mays
  Coding DNA Sequence Number=SeqID_4841
  Subcellular localization annotation: CTP_CleavageSite=79; ConfidenceScore=5.20e-01
MMTASKKPQAQQEAPPRPTLGLGLNLGLGRWTPPRPTPGLGLNLGLERRTRPRSTPGLGLNPDLRRRSLPRPTPGLGPRLGLGRWSPPRPTPGLGLNLDLGRRTLPRPTLGLGLNLGLRRKTPPRPTPGLGLNPDLRRRSPPRPTPRLGPRLGLGRWSPPRPTPGLGLNLDLGRNRVLARPRPRPQEESPPRPTLGSDRPRHGGCIITLPLASSGYGATRPASHPGSPRPDSCTSTGLKRSSDGHDTAYTGL

SEQ ID NO: 48217 - protein, 671 aa, Zea mays
  Coding DNA Sequence Number=SeqID_4842
MGLLLSVESDGQMLVLGGPTGEGRVTFMRYSVAFLQSVGFQGPMLIFGRTRGFPKRHGQFELALGMPPLCPSQTPWSIDGDVAGHEVAYQLVTRNTQAARRHVEITALTVPTFWGSGHCPEPLVILRKGSTVACYGYPRSHSSSMKRATNWPGKIWRRGDRMDGRQERAKKSWRLGEKMVALGAMGTEVRMVAAVENEATATSRLIVVVRGHGAEHLPEKSRLIRLKKPHRRRRRPHLTDGDGLGDGDNDPQFSSRPDRLHFGVKKKANMPQGKSKKNVVKEKAKKIKKNAESRAKVHENTDQIEINIREGVSIWITKAAVQKCFEFPPGTDKKLPIDPTTKTFDSLYRVLSVSEKKINVKKKKMKENMKEKQVEEEKIEMNMEEKKQNLVEDEGSQQEESEEEDGEDGEIGEEEGEDGAIGDAKVGGDGDKESAKRGGIKVAVRRNVLTPLNINLMLQNINNDEILKLLVKRNEDTDGTEPNLDIDLIVRCFFAVSSVAEFGKDKKKLISGCTTVLMVVFLDHLVENPLDPLTIPRINLYTSDFIADLIMVPKDSPGPEKKRRKQELIHQDIGVKELDKELTAEVMNKVDLKYLDNKHNFDMSNYTDHVPPVQHQKNKKKLGITLKRKLPGILDLTIEGERSESEAAVIIEIENRDDKTLEDEHISVEKE

SEQ ID NO: 48218 - protein, 272 aa, Zea mays
  Coding DNA Sequence Number=SeqID_4843
  Homolog annotation: Hit_ID=A7QTT0; Match level="QueryCoverage=18%, HitCoverage=5%, E-value=7e-08, Identity=59%"; Hit description =Chromosome undetermined scaffold_171, whole genome shotgun sequence
MDTISRGLDVDCYEWSKNCRRSNEFNIKLNLENGKNMPRKGDLMLFSERGLESREKIIKAGSFCTILVVNHPTSMVFLMSHSPYGGSLNDQSSYKVMHPCNLTTFACSWAVMKGGCQDNTEIINLILTKNKENVDNMLQADGDYGQFTCKDFGLNNHRKMEWQDAFQPLKVQRNYLFVGNQQFDNLVIDEAANLKECESLIPLGIGGIKHVVLMGDDKQLQSVVMSPMHGILCSSRFDNLAWDLKVANVELYYKAVHFYFQENPDLINDMLD

SEQ ID NO: 48219 - protein, 96 aa, Zea mays
  Coding DNA Sequence Number=SeqID_4844
MRVPALPPSRARVLAAWPLGAPRRGLPGPGGAASLAPGGAAPRPLWRGLPGPGDALWEFGICGKHSPVVNFRIVLRDLPKLPVKASKTVMVIPSVN

SEQ ID NO: 48220 - protein, 62 aa, Zea mays
  Coding DNA Sequence Number=SeqID_4845
MTSSSPEQWLQRGQPGEFGGGLALCGVKVQQLLLVGQEGRVIAYGSRQLRKHEGNYPTHESS

SEQ ID NO: 48221 - protein, 210 aa, Zea mays
  Coding DNA Sequence Number=SeqID_4846
  Homolog annotation: Hit_ID=Q8H6I2; Match level="QueryCoverage=100%, HitCoverage=100%, E-value=6e-90, Identity=72%"; Hit description =Putative MURBZC
  Pfam annotation: Domain name=Zea_mays_MuDR; Domain location=5-210; Score=-30.4; E_value=0.0018; Accession=PF05928.2; Description=Zea mays MURB-like protein (MuDR)
MEPAAELCSQKLSAAVDAARDTMKASSTACMVAGDYCATFSLGNDVVSTLDVLESAVAAEKIAMSSYSQASAAVDCAKETIAKYSEVNQKLAQALRYSLSLMSDAAKKLQDTASLCYTDEDVVDGFKLTQVARSLDELAETLEVTAIDCQVSMMDPTTILEAGYGSEDSVVWEDVFRDREIMNQPLEAETLAEHCAKWGLNYNEIRDRSV

SEQ ID NO: 48222 - protein, 164 aa, Zea mays
  Coding DNA Sequence Number=SeqID_4847
  Subcellular localization annotation: CTP_CleavageSite=68; ConfidenceScore=5.45e-01
MHLAALLNAFARLPPLPLSRLHLPLSLPTASRLVASFPPLLLLVCFLRALHLLPSSPSRPFDSLIKSYAEAVRSGRRMSFSRKGVKTSTRRWSDFSGDGGGAASAEAVRSGSHGRDALGGSGSGRGGCLDRGVGFGGDGGVSGGTTAATETLFFLHTAAVGKVG

SEQ ID NO: 48223 - protein, 209 aa, Zea mays
  Coding DNA Sequence Number=SeqID_4848
  Gene Ontology: Mol. function=transcription regulator activity; Cellular component=nucleus; Biological process=regulation of transcription
  Homolog annotation: Hit_ID=A7QMS9; Match level="QueryCoverage=77%, HitCoverage=50%, E-value=1e-57, Identity=65%"; Hit description =Chromosome undetermined scaffold_127, whole genome shotgun sequence
MEDFYREIYAVDGITGIKFPDHYPVSRLLGCVEVVGCLRSEELVCWEHVPESVRLEGLTDFCWLCENPQKLVVPFEMRGYQGVYNLERRIYDGAVRGLLPVQGPLPVKFPLPDPRDPFSLKPGSLTFAASKPTLQKSESVAAAIAGARAAATQFSKKDRKAAASSEIGTEEQSWGSHGGSSSVDCNVALSELKQLSLSKKGTGQAVPRS

SEQ ID NO: 48224 - protein, 138 aa, Zea mays
  Coding DNA Sequence Number=SeqID_4849
MGKGKRGRGSPRHAGDKRKRDPSPPSEDFGDSEYSEEEGIAAEVWTYIRSVKRVGLEGLDESEVSSDEEDSFGSSEERSGDDNDDEGGGGGDDNDDGDGGGGDDDGGRSGEGDDDDNGGGGDNDGSGGGKASGKVPLV

SEQ ID NO: 48225 - protein, 53 aa, Zea mays
  Coding DNA Sequence Number=SeqID_4850
MVGTSAITARRQPGSAEHCMLQDMVDGVTWPTTLPPGWTAEWDAASMGEEQEE

SEQ ID NO: 48226 - protein, 120 aa, Zea mays
  Coding DNA Sequence Number=SeqID_4851
MWCNRVSHAKDVWAMYPDLVGRVTVQCMSALYCLQALQSDAMAHLANIAQTTKLTLDSREDFVVDLSTELVEKDLQMEANEAGIEGEDAPEELGPAPGANGTTSAMPPSPASSVASTAQG

SEQ ID NO: 48227 - protein, 20 aa, Zea mays
  Coding DNA Sequence Number=SeqID_4852
MANAIYGVWAKYRMQITGRM

SEQ ID NO: 48228 - protein, 188 aa, Zea mays
  Coding DNA Sequence Number=SeqID_4853
  Homolog annotation: Hit_ID=A7PD61; Match level="QueryCoverage=45%, HitCoverage=61%, E-value=4e-38, Identity=85%"; Hit description =Chromosome chr17 scaffold_12, whole genome shotgun sequence
  Pfam annotation: Domain name=DUF393; Domain location=61-171; Score =23.6; E_value=1.1e-06; Accession=PF04134.3; Description=Protein of unknown function, DUF393
MASSLARLGAALPRAAARALPPGRWAAAVLGIGASRRAERCQVHSDIKVAPTSDVKDDSKSETRRIKMLYDGDCPLCMREVNMLRERNKSYGAIKFVDISSKDYSPDDNQGLDYETVMGKIHAILSDGTVITDVEAFRKLYEEVGLDWVYAVRLSPATSSIYILYIRPLQSSLKDSISYIYFLFNNVL

SEQ ID NO: 48229 - protein, 116 aa, Zea mays
  Coding DNA Sequence Number=SeqID_4854
MAGSKDHTKISTTNIIKPAMEALPADDQMPFEDLVMRDKKEVMRQWNEQRDKEEAELLHKLSERRKEAADKYLSHFTIDRHQKIIRQGEIDMESLLPPLHGPARLFRIASSSAMST

SEQ ID NO: 48230 - protein, 448 aa, Zea mays
  Coding DNA Sequence Number=SeqID_4855
  Gene Ontology: Mol. function=catalytic activity; Cellular component =integral to membrane; Biological process=recognition or rejection of self pollen
  Homolog annotation: Hit_ID=Q2R2Z6; Match level="QueryCoverage=76%, HitCoverage=82%, E-value=1e-166, Identity=81%"; Hit description =Membrane associated salt-inducible protein, putative, expressed
  Pfam annotation: Domain name=Peptidase_C12; Domain location=48-380; Score=46.9; E_value=7.3e-11; Accession=PF01088.12; Description =Ubiquitin carboxyl-terminal hydrolase, family 1
MHAACSRNCLSDLLHCQRHWRCRCPYQLSPARGMTRGRSVKDRSKKKRVHALEVATERWKVLSKVLAVVDALKKEDEHVTPLKRLEILRPQLGLVKPHKVAHFVRRSPHLFEVCRDSRGVMWAGLSPQAEALVEEEARLLEDHSPVAVQYVTRMLMMSVDRRLPVDKIAHFRRDMGLPHDFRTRWVHMFPEHFRLVRLEDGEYLELISWDPTWAVTELEKKASVSTGDAIASSPGELSLPFPMKFPPNFTTYYRFRGKAHHYVKMGNTDQFQKVTYLSPYAEAKGLTPGSPEFDKRAVAVMHEILSFMLEKRLVTDHLTHFRREFVMPQKLMRLLLKHYGIFYVSERGKRLSVFLTEAYDGNELIEKCPLVRWREKLLQLTGYRGRLKNLGKVDVCSDSDEYLLGHDDDDDVLDVESENPDDILDDCSISDDSEMDLGDADADEFCRD

SEQ ID NO: 48231 - protein, 17 aa, Zea mays
  Coding DNA Sequence Number=SeqID_4856
MLRRRYMSTWATLIGVR

SEQ ID NO: 48232 - protein, 213 aa, Zea mays
  Coding DNA Sequence Number=SeqID_4857
MNVNGNLQNGIGIQMGQIKTIEIKEAAEKVRNRKSETAEKKRNINHRFVGILCWDSDPVANPPRTELLWRKNPDGHEVEKVGFRNNRHVVTCKGQLAVGSIGGITAADELEAFRLGAISIPPVNRTGAEFQKDRKDLKAGKQELGRGKQRRLKAQHLWDIPESDTVSKKRPVTRQLLLKTPACHVITRRLLLKHQYATSSLGYCPQSGRRSPF

SEQ ID NO: 48233 - protein, 132 aa, Zea mays
  Coding DNA Sequence Number=SeqID_4858
  Subcellular localization annotation: CTP_CleavageSite=82; ConfidenceScore=5.59e-01
MGAPSARPMPSSGKLCRAATSAESPYPLTENSTVRPAPATMPATRERLTTVTAPSSASGAKGSSASPDPKPRPQLRPREKVSASTDPDLGLSLGLGRRTPPRLTSASGEGLRLARPWPRTDYATGDTSLPYL

SEQ ID NO: 48234 - protein, 332 aa, Zea mays
  Coding DNA Sequence Number=SeqID_4859
  Gene Ontology: Mol. function=transferase activity; Cellular component= endoplasmic reticulum membrane; Biological process=biosynthetic process
  Homolog annotation: Hit_ID=Q10QW6; Match level="QueryCoverage=95%, HitCoverage=94%, E-value=1e-137, Identity=61%"; Hit description =Glycosyl transferase, group 1 family protein, expressed
MAEVTERRKRAAVVVLGDIGRSPRMQYHSLSLANQASMEVDIVANGEKVQLTGISKISGALALLLKAAVQFILLVWFLCFKIPRPYVFVVQNPPSVPTLAAVKLASWLRGAKFIVDWHKFGYTLLGLSHGRSHIIVKIYFWFEKYFGQMADGAFCVTKAMQHELAQNWGIRLGNSICSAMGNAKCISVEEVWEDMSITVFATLGEDDSTDEEQLWIDIKNGKQFVYPRLLFIVTGKGPDRKKYEVQIKRLKLRRVALRTMWLASEDYPLLLGSADLGVSLHTSSSGLDLPMKMLFKGFPEECNALKSLKECAMKSPSSSKWSQNGKPTPYRW

SEQ ID NO: 48235 - protein, 129 aa, Zea mays
  Coding DNA Sequence Number=SeqID_4860
  Subcellular localization annotation: CTP_CleavageSite=12; ConfidenceScore=5.08e-01
MKSFARSLLGSRSSSRSSSRGEDSVFQGTGSTMSRRRALAEHLPPQDDAEIEEPVVEDHARDDVEDDGGDNVGDDARDDVGGDSGAGDSGAGGDSAAGSGLLELETRKLHFVTLRASPESRVDKASESE

SEQ ID NO: 48236 - protein, 151 aa, Zea mays
  Coding DNA Sequence Number=SeqID_4861
  Subcellular localization annotation: CTP_CleavageSite=73; ConfidenceScore=5.03e-01
MLVDYITILDGPSVSVEGPTQQGIESVLEVTPASSVTSDGSSNPSLRLRLLRTLRALARTTTGVIVVVSFSVRGASLAEVQGKAVSQTPPPAEARGKSPTAPAPSVGAPAPRAGDDAVSPVGWTDLTLCDVVDVLPGEKAKKGSQTYVWCT

SEQ ID NO: 48237 - protein, 158 aa, Zea mays
  Coding DNA Sequence Number=SeqID_4862
  Gene Ontology: Mol. function=sugar:hydrogen symporter activity; Cellular component=integral to membrane; Biological process =carbohydrate transport
  Homolog annotation: Hit_ID=A3CD52; Match level="QueryCoverage=32%, HitCoverage=11%, E-value=7e-22, Identity=98%"; Hit description =Putative uncharacterized protein
  Pfam annotation: Domain name=RAMP4; Domain location=73-138; Score =93.6; E_value=6.3e-25; Accession=PF06624.3; Description=Ribosome associated membrane protein RAMP4
MELLRAFRLSRSGAQTWSGAGLHRYLAFQVQIQGGDFVPGDGKHKKDFLASCCSPVGGIITDPCEHEWMQTVETTSRRLADRKTAKFQKNITRRGSVPETTVKKGNDYPVGPLVLGFFIFVVIGSSSGHQKLLRTVKRSVFEPAFIKFIGGKNHSKST

SEQ ID NO: 48238 - protein, 158 aa, Zea mays
  Coding DNA Sequence Number=SeqID_4863
  Gene Ontology: Mol. function=oxidoreductase activity; Biological process=electron transport
  Homolog annotation: Hit_ID=A3BMR4; Match level="QueryCoverage=29%, HitCoverage=8%, E-value=2e-11, Identity=63%"; Hit description =Putative uncharacterized protein
MAIDITYLTLGSGVTVPARSILVVPLHLVQMDASVWGDDADQFNPHRFLKRDIDIGALSKTTTSIIECVLRRDPHEAEYIQSIQEVVHSLEPVLVKNAQSLFLIYLISAIPFTSLSSPTFKRVVALTFDKVPDMGTPLADSLPSAVRQTLGKVYTFKE

SEQ ID NO: 48239 - protein, 1075 aa, Zea mays
  Coding DNA Sequence Number=SeqID_4864
  Gene Ontology: Mol. function=protein binding
  Homolog annotation: Hit_ID=A9UKL6; Match level="QueryCoverage=91%, HitCoverage=97%, E-value=1e-129, Identity=33%"; Hit description=NBS -LRR resistance-like protein
  Pfam annotation: Domain name=LRR_1; Domain location=1001-1022; Score =2.8; E_value=93; Accession=PF00560.24; Description=Leucine Rich Repeat
  Pfam annotation: Domain name=LRR_1; Domain location=400-421; Score =0.3; E_value=2.7e+02; Accession=PF00560.24; Description=Leucine Rich Repeat
  Pfam annotation: Domain name=LRR_1; Domain location=423-446; Score =0.6; E_value=2.4e+02; Accession=PF00560.24; Description=Leucine Rich Repeat
  Pfam annotation: Domain name=LRR_1; Domain location=534-556; Score =7.8; E_value=11; Accession=PF00560.24; Description=Leucine Rich Repeat
  Pfam annotation: Domain name=LRR_1; Domain location=573-597; Score =5.5; E_value=30; Accession=PF00560.24; Description=Leucine Rich Repeat
  Pfam annotation: Domain name=LRR_1; Domain location=906-926; Score =0.4; E_value=2.6e+02; Accession=PF00560.24; Description=Leucine Rich Repeat
  Pfam annotation: Domain name=NB-ARC; Domain location=26-324; Score= -124.2; E_value=0.024; Accession=PF00931.13; Description=NB-ARC domain
  Pfam module annotation: Pfam domain module=LRR_1::LRR_1::LRR_1::LRR _1::LRR_1::LRR_1::NB-ARC; Domain location=1001-1022::400-421::423 -446::534-556::573-597::906-926::26-324
MLQQEIFGPPGRFANFRTSFLCVNQELAEGLNTHCYIMRTEVILADTIEAAAERILIEISSDDTHTERSNVFYFDGWDGLGASAVLRAVAQRLATASEAPAGLKFDQVINIDCSKWVSRRAMQRVIAEELELPAEFMEMIETRDEEDDYRGEDQSSRDVIPQVINREIYQRLQNRRFLVIFYNGSSEEIDLANLGFPLQDLGFHLYSSNKVLWTFQGSFRLMPMTKVTRALGTTGVFLSATSSQVGQDPHVFWSYLVLQEAAQIVASKDNTGGSIIGDPAQVAECFLYLLDLCLMGHHFIVDYDLETHGCNYWICDGIIHVQHGQREVDRDIGLWKAVEALQREMRMDVDYYHHHDHQDMPTHIVKCADFSPRWTSPTYRVVQILERATPVRCSLDHYDKLGVLKLSYCTFSFSSPPFLCCQSLRFLWLDHCQDMLESGPDGAAQMWEADGIQQCFQRLWVLDVRYTCCDQILSGRMLEFMTQLRVLNVIGAEDWDMRQLQGQLPNICKLGVAKSTIECGTTLWNGDLLAGSKHLRFLDLSGNEIISSGKSCISATEKSCSLETIVIHQGCAGLEKISLAGCAQLENVLLTGSFNELVSLDISGSAVKRLDLSAMIMLKLNELILLDCNMLRAILWPPEGREREYPGKLRIRTKKETTIGSATAPSGLTMMFGSLVPAEYLWWYISVYDERLLWSLLPLKQYFSYHFVHFEISSPGRRPDGLACTSDEMILEVTTPEGYNTSIYVDVAKGQLLHVKGDEGDSPISFTRVWPCPRAPDLVPSNCYLHIQDWPQGRKPQRTSQKTATITIPDTICNRTGSIHVHDSLYITRMPDPAPSGAIWANLFWCRVERCPKMDCVFTSSSMVGAENRDDRIFWRLATLWVSQLPKARFIWSSRKHEISGYSFLDLDFVHVDFCPRLTHVLPLSMALIRGSGLDSLTTLEIVWCGDLRAVFPLDTDAQSYQDHRRNQAITVEFPSLQRIHLHESPKLHGLCGRGRMYAPKLESMVIRGCWNLTRIPSVGDGGDRITKKVKCDCEKEWWDRLEWDWLEERHHPSLYEPTHPKYYKKTLLRTSVLR

SEQ ID NO: 48240 - protein, 78 aa, Zea mays
  Coding DNA Sequence Number=SeqID_4865
MAHRSFSGPPETFSPSFSPLYPWIHGLFPAIEFAMAPSPSLPNSGDPGATLAHACLNSGDLTAAERSDAASRMSVSPV

SEQ ID NO: 48241 - protein, 96 aa, Zea mays
  Coding DNA Sequence Number=SeqID_4866
  Gene Ontology: Mol. function=carboxyl- or carbamoyltransferase activity; Cellular component=ornithine carbamoyltransferase complex; Biological process=amino acid metabolic process
  Homolog annotation: Hit_ID=Q8SA97; Match level="QueryCoverage=88%, HitCoverage=21%, E-value=9e-20, Identity=52%"; Hit description =Ornithine carbamoyltransferase
MAPPVDVAGLRPRMGDVEAPPKPRSSPSSVAEVESKPLGRARRRPLAEARAESEPWGRANPSPSPGSGGAEFAVFRDLARVRALGRAERSSPSSGT

SEQ ID NO: 48242 - protein, 167 aa, Zea mays
  Coding DNA Sequence Number=SeqID_4867
MGRGKSGCDLGPTLSLKDVHHPCWGGERGEPRLYLPRGPAGHLFFQLLVVATILQLCGGDVLQSCRGRRTVAAQLGCNIPPSSSFSWRGRERGPAGALWSGPLFGFDVWFSSLERGRERELSGRRVRPGTIAAAAEVAGKSPETCRPAGSPAWRSFIPAGTEPEFRL

SEQ ID NO: 48243 - protein, 424 aa, Zea mays
  Coding DNA Sequence Number=SeqID_4868
  Gene Ontology: Mol. function=zinc ion binding; Cellular component =nucleus; Biological process=ubiquitin-dependent protein catabolic process
  Homolog annotation: Hit_ID=Q5NAX7; Match level="QueryCoverage=62%, HitCoverage=76%, E-value=1e-152, Identity=93%"; Hit description =Putative ubiquitin ligase SINAT5
  Pfam annotation: Domain name=Sina; Domain location=81-280; Score =423.5; E_value=3.1e-124; Accession=PF03145.7; Description=Seven in absentia protein family
MDVDCVSLPDAPAGDVDGGAARPWPKAVTNGGVHELLECPVCTNSMFPPIHQCPNGHTLCSTCKARVHNRCPTCRQELGDIRCLALEKVAESLELPCRYYSLGCPEIMPYYSKIKHEAQCGLRPYNCPYAGSECGAAGDIPSLVSHLRDDHKVDMHSGCTFNHRYVKSNPREVENATWMLTVFHCFGHYFCLHFEAFQLGMAPVYMAFLRFMGDENEAKNYSYSLEVGANGRKMVWEGTPRSVRDSHRKVRDSHDGLIIQRNMALFFSGGDRKELKLRITGRIWKEQQTPDGASYRKRVALAPGRGNRLLCTASGASSSSSVVVTKEQEEGSPEPEIFSYKDDPNFRGCKGCGRDELQRGCNGQGRIQGGIAAVPGFGWWPIKAYRPCPGFVASGGRYRRQGQSMDDVASGRGKKKPSPAKKQA

SEQ ID NO: 48244 - protein, 81 aa, Zea mays
  Coding DNA Sequence Number=SeqID_4869
MGRREAEREGGSEVAGDGHERGLRPRLGDVEAPPKPRSSPSSVAEVESEPLGRARRRPLAEARAESEPWGRAKRSSSSSGA

SEQ ID NO: 48245 - protein, 180 aa, Zea mays
  Coding DNA Sequence Number=SeqID_4870
MAMASTGRGEAASSAHHPHPSPKLARPTASDGGKFDLAEMLEDADKTYLHSPRIVIQTTVSTYCLESSEIKLDNLQLLTGKDNFQKRLKYNRESLYTKKNLKGKCALGPFLSILVIECQHKCLNVNQCPWMNKVQIKSKVPSLTPYFFVNLKCKGKRLQVVEIPRKRDIERKSITLWYSS

SEQ ID NO: 48246 - protein, 713 aa, Zea mays
  Coding DNA Sequence Number=SeqID_4871
  Gene Ontology: Mol. function=signal transducer activity; Cellular component=membrane; Biological process=signal transduction
  Homolog annotation: Hit_ID=Q5NAW5; Match level="QueryCoverage=82%, HitCoverage=86%, E-value=1e-169, Identity=56%"; Hit description =Putative uncharacterized protein P0702F03.35
MRACTAHELPSLSDSVPRPAFVASKGGGFKKTIHHYYSTWLIYPVPVFTHPPSRSQKARPMDFHNIDDYFHENSPAQGGEGAAEASAEAILERVYRDTAFGSEKLLNLDMLVMEIARRASDIEPLMWDPRSISSESVGKAFEFDVLHGIVDSEVSELEKLAASIQTDIGNAETKALGGEPGSRVTDELCARKESLKQMQDVISDIRTQLATFENAIQPSHGKQGNSEGMGYENGHISGHTAMQAEDQRNVLQMLQQSIASKLDLENKLRDSQSVVEDLKMKLHHAEQESCFLEESIKELYERTLSAENASQLLLGTSKELVAKFNTTQSYLSASIRREDDLKSKLDENLMKLSGNKSTRETVLGDSDNNANQEPVQMRVLSRPEFQNLWNKVQQLEELLRDSGSQLQQSSLSRGADEEEQDTAQSGISAFGNVIADFKLAISNAESRAQNAETRCTQLTRTNVQLNGELNTLKSQGSDRAGLLETKLKESDTQLEHARASVDAIVEQQGMLRSSMSDMELVIEDMKEKYLKAETRAESAESKCALLTDTNLELSEELSFLRGRVERLENSLHEANQLKVSSAKDIASKTKTIMDLVAKLSLERERLHVQVVTLAKKNGALAQKCKENVSERTLLCKNVTTGEGVLRPVQVKEEVEADEVVIPDECTVRSIEPTTMTMVNWKYISAAVLALLAAAVVFQLLRANLMMTTAVNDC

SEQ ID NO: 48247 - protein, 107 aa, Zea mays
  Coding DNA Sequence Number=SeqID_4872
MARVTLAGVWGPPLRRWGRCRLGGASASRSPGGGEAVDAARAAAVAAAEARCAAVVAEKEARAAVQSATIAADKVGLAVEAVKYRRFVEENSLVTDFLFPFLWPHVE

SEQ ID NO: 48248 - protein, 355 aa, Zea mays
  Coding DNA Sequence Number=SeqID_4873
  Homolog annotation: Hit_ID=A2WMJ4; Match level="QueryCoverage=74%, HitCoverage=96%, E-value=6e-19, Identity=28%"; Hit description =Putative uncharacterized protein
MESAITLYLQGHYHPTDQAEAKRGAGNQQKLPFPSSLHSPLLFFRCSASHRIASPRRQRNSSPGRDLFHPPLSLRRFAPPSRGLPRMLPASHPLLYACVFRDTHLVAELDHAHSHSQSTATSADPVASDAPSPAPDDDLPALAAALVAAAPPHHRHLTHTAAGRAHALLLSPPLALAAVSRAPHLPASQLLLFLRRLRCLPEARMRDEMPRLALRLPLPPGDDAREANEVAAAEAHAEEEAARRDADLAARTTPKRDRASHRGRAGPSWTWRRQLWMVILADLLLLTILFAAWLAVCRGFSCIGRRLRLSILLDAASASCVPTSSANLAAQLVKVASSDGKMAASIAGHDDSNCI

SEQ ID NO: 48249 - protein, 397 aa, Zea mays
  Coding DNA Sequence Number=SeqID_4874
  Gene Ontology: Mol. function=protein disulfide oxidoreductase activity; Biological process=cell redox homeostasis
  Homolog annotation: Hit_ID=Q9LI27; Match level="QueryCoverage=100%, HitCoverage=100%, E-value=2e-66, Identity=60%"; Hit description =Peptide transporter protein-like
  Pfam annotation: Domain name=Glutaredoxin; Domain location=235-308; Score=34.2; E_value=4.9e-07; Accession=PF00462.15; Description =Glutaredoxin
MGCASSKASGDVAVADVYRPPPTSVSLFDISAVEEPWLIAKQNKAADDDDDDEEEEEEEETTDDDEKQPAAKTVVPLPLLDKLEGYELAPASWSEVSKALEDMKPVLDSKSPPAPAPSPKKKKTKKKKKKKTKTKQQQQQPMQPVVPAATDDGDAAAGGKKAPATSSVDDLPDSSRPAPPELAGRRVVKDNPFLTRDRESNKGAGGDGGPRWKRRDPFEGCPERRPPGAAGGGVVLYTTTLRGVRRTFEDCERAREAVEACAAAAGVEAVDERDVSLHGEYLRELRELLPGDGGAAPPPRLFVMGRYVGGAEECARLAESGTLREMMRWVKARGEACAAKDGRGCEGCGGARFVPCWECGGSCRVLLPPPDGGTPTTTTERCAKCNENGLMMCPICH

SEQ ID NO: 48250 - protein, 139 aa, Zea mays
  Coding DNA Sequence Number=SeqID_4875
NRGGRKGGGAYRRLDCFGEVVEDVGEVSGITTRGSRDAREDMGARNQTETHRLALSTRGGGRLKSGEVDLGPLVKSGLVRGLEKLHRPLAELAEALARLGGGWSGLAMVAEALAAIAGGIELAGAKERWLAGEGERGVK

SEQ ID NO: 48251 - protein, 451 aa, Zea mays
  Coding DNA Sequence Number=SeqID_4876
  Homolog annotation: Hit_ID=Q6QP51; Match level="QueryCoverage=34%, HitCoverage=60%, E-value=8e-17, Identity=38%"; Hit description =Putative growth-regulating factor 1
MAVAGGRKQPSRRQQAHAPSWDSERTLSHDVKTTRTGKGDTPKGILLREGSGPRAPLMIRGSKAGPSEGFNSRLRALGLRAHYWLAPKGFDSRLRRRARDDPGYIRYITKARTTLPSRSDRSHFAAPLTDLTRRQHRLRRFDCCATRQSEADSSQGSDSASAPEDDELHLAQPQGSDSASAPEDDELRLAQPQGSDSASAPEDDELCLTRPQGSNSALALADGLRLARPEARTRPRPRKTDSTSTSEEPPPRPTQGSDRPRHRGAIITLPLASSGYGEQDRRPIWLAPVSLTGRLAARRGRDGACRPLAPSHADACNPLMQAHPTWARDNTKAAGTPRGRNADNMLNMTCDTPQRGLGEQYIGNGFFAEYFLSSTRQRLCQVSFGTRQRKVVVTVTGNGDGAFAECTQQRVHQRGPLSVSLSSALGGIRQSLLLCRQAGAQHSAQKLYRYP

SEQ ID NO: 48252 - protein, 468 aa, Zea mays
  Coding DNA Sequence Number=SeqID_4877
  Homolog annotation: Hit_ID=A2ZBB0; Match level="QueryCoverage=10%, HitCoverage=10%, E-value=2e-09, Identity=57%"; Hit description =Putative uncharacterized protein
MDWDDSGALENFEAAKERFGAKYHGEPFEDPLLDPDMYIDEVDHLCEVDPELVADLDKVPDVDKVVELQLVANLGCGEPVADLRRAHRVAPPQRRPRPAAPPQAPAAPAVAPQRRPSPTTPFDALAAPPARAPDVPPPSPTPCQPTPPTRRRPRRALPRPVNLAFIKRRYRVEPEAQEHADRVLEKNAKKVCRDAFSNARLQVVNAYMKRRGHSINNFRQYSDVYLTVDQYMERHQQDEDDDEVVVNHTYGADGHIRLAKRMETYGQEMVKKYGEDYDWRGAPTIDAEVVHSLGGKAHGRYSMFTGVIDSTELRSRGGSLSQAGCGSSSRSRRSVSSMEEAMREQQEKFREELRQQQMAFLQQQLEYMAAYNAQAQQAMNQAQQQPFVFPQFQPLMPQWGLHAPPPPPPYQGFGVMGHNTPPPIIPAPGGAYAGEGAYAGDDPNPSHDFVNQFLTSGGSGHNSNDPDM

SEQ ID NO: 48253 - protein, 81 aa, Zea mays
  Coding DNA Sequence Number=SeqID_4878
MKINSKSVLFTLDGNRSSVTLTFSPSAKTKDEVQNKNDLVILEGNDINDELAPSDGVDYKLVDSDDESYDPANADTYEDYF

SEQ ID NO: 48254 - protein, 28 aa, Zea mays
  Coding DNA Sequence Number=SeqID_4879
MACGIELARAKGKWLAGEGCVQGNLARL

SEQ ID NO: 48255 - protein, 163 aa, Zea mays
  Coding DNA Sequence Number=SeqID_4880
MSSRSLMHRVFPPSKPPDGGYPPSFRLIVGGTQLRGSCFKDVHHPRWGGGRAEPELYLPRKFVGHPLLRRSRERALTGPAGGSDFDNAGLVDSGRRQPQRVELVGLAPGAPSCRRAAAAPCAREDRPRCRALLGRRSCSGAALPLHQYGASARRSVPHSSGRI

SEQ ID NO: 48256 - protein, 214 aa, Zea mays
  Coding DNA Sequence Number=SeqID_4881
  Subcellular localization annotation: CTP_CleavageSite=67; ConfidenceScore=5.33e-01
MELPSVLLKHAAPGSPAFGPRLPPPTPVGQEPSCPLLLSLHLPAAPCRSPSMAPFFPVLELRPPQPWCSARRARPLFLCALLLLLELALRSSSSPWIPQPHPSARSLSVRGAQLRSRLLHCVAARLEFVLVAVDWEQTRSRPYTSHRRSWLPRASFPFPHPRRGPLLDSLELICAPLPWLLSSRTSSFGLESCCAAGISKSLASSPDLCLTVVH

SEQ ID NO: 48257 - protein, 315 aa, Zea mays
  Coding DNA Sequence Number=SeqID_4882
  Gene Ontology: Mol. function=sugar binding
  Homolog annotation: Hit_ID=Q7XBE1; Match level="QueryCoverage=37%, HitCoverage=14%, E-value=2e-16, Identity=43%"; Hit description =Putative uncharacterized protein Z013I05_4
  Subcellular localization annotation: CTP_CleavageSite=53; ConfidenceScore=5.24e-01
MELPSVLLKHAAPGSPTFGPRLPPPTPVGQEPSCPLVLVRDCRPKRPMPAQIRSILGVSTSICLPQLHRIDMSLDTKLILGAIGKLFDDFDARWERRLPKLLTTQEASPVISILTPTVTVGATVIADNWGGGFNEGEYLFEQYCAAPYIVADNWGGFFGGEDAATNAEFAIDPPGDPERFVLPNTSTSQQRPVEALLWRRSFLCLSSVLLSHGALRAELGLCSFAPCSCSSSSPCARFLLHGFPSRAFQLAPSLFAVSSSDPACSTASLPDSSSSWWPLIGSRIGSAPTPPNAGDGCDERPFLFPILAVALCSIR

SEQ ID NO: 48258 - protein, 208 aa, Zea mays
  Coding DNA Sequence Number=SeqID_4883
MASGQTLLKRPSLTSPHEGREPAIKAKEPEVRSAGGTNGLVGGGNRFYRGSLTYGDHHLSTDDSGHLPTNTAPANGGRPKAHRQVLTPVLAEAVPEHEYRPRGVRRVVRPPGVADGAWRTWTWPARARRDRHPCGGRAAALRPSGRRWHRKQRQSRSGRGARHAAAASATDGEHPSPPITEGRSGPLPMQRWAPTFLTLLPSMDDEHP

SEQ ID NO: 48259 - protein, 502 aa, Zea mays
  Coding DNA Sequence Number=SeqID_4884
  Gene Ontology: Mol. function=acyl-[acyl-carrier-protein] desaturase activity; Cellular component=chloroplast; Biological process=fatty acid biosynthetic process
  Homolog annotation: Hit_ID=Q40731; Match level="QueryCoverage=70%, HitCoverage=91%, E-value=1e-179, Identity=86%"; Hit description=Acyl- [acyl-carrier-protein] desaturase, chloroplast precursor
  Pfam annotation: Domain name=FA_desaturase_2; Domain location=62-390; Score=827.9; E_value=5.5e-246; Accession=PF03405.5; Description=Fatty acid desaturase
  Subcellular localization annotation: CTP_CleavageSite=30; ConfidenceScore=5.30e-01
MALRVSPVSHGAAAAPLPPLARRRMARGVVVAMASTINRVKTVKEPYTPPREVHRQITHSLPPQKREIFDSLQPWAKDNLLNLLKPVEKSWQPQDFLPEPSSDGFYDEVKELRERANEIPDEYFVCLVGDMVTEEALPTYQTMLNTLDGVRDETGASPTTWAVWTRAWTAEENRHGDLLNKYMYLTGRVDMKQIEKTIQYLIGSGMDPGTENNPYLGFLYTSFQERATFVSHGNTARHAKEYGDLKLAQICGTIAADEKRHETAYTKIVEKLFETDPDYTVLAFSDMMRKKITMPAHLMYDGKDDNLFEHFSAVAQRMGVYTAKDYADILEFLVQRWKVADLTGLSGEGRRAQDFVCTLAPRIRRLDERARARAKQAPVIPFSWIYGRKSEGEHASLRSTTSSSHRADEGHIHRTRQNKPKAPTGRRPVRSPFALVLQDEGLAEVYGTPASSPPGEAHMGSVHGDGAREDKRDKGRVCNKVYLRVDLVTRGSREDWRGLRGK

SEQ ID NO: 48260 - protein, 112 aa, Zea mays
  Coding DNA Sequence Number=SeqID_4885
MAPKRANSKAAPSIDDAAKAVLLADKKGKALADTTPQEAFEDDAINSKRQHQDHPTPDGTIRTCSSEGAPQAPPPGFAPPEGEDTIEDGEVIDISAKDQLKLRALRIKNHHL

SEQ ID NO: 48261 - protein, 147 aa, Zea mays
  Coding DNA Sequence Number=SeqID_4886
MVVRRSLPVWVLGGGCGVVDLGDAEAVVVRPAPLDGAGFGHCGVVPSERCDGYLVAHDVLSRVGTAVVFGVGAGPEVGGPRRCLELWSQGPSLIEVVDPLESCGGGAALWYEWVSGLDVLLERRRRCRRSALQVVLDFALHERYILF

SEQ ID NO: 48262 - protein, 333 aa, Zea mays
  Coding DNA Sequence Number=SeqID_4887
MAMMANDEEVDDFGGLESSGTRAEDVRTGVGEQPAPPTGAGEDPAAAAVPDGEDTPVAPAQAAEDPAAPAAPLQVPTFRPAQATPTDDINFVAVANAMPVNENGDFACRNNVWAFAWMTCRKDFVRRTRNPVSTRGCLCLDYVRPFPLRLELAPALCSCGPYKYEVPFADFSWDDCVVAPCFGLDLVLVEGLQGENMVSVDEIFGDPYIKRKGVNPVARHSVVFRAHTTSDLAIGAFDDTVGLWVVYRGKDRLGADGTAEFPEVLAVELFAVVDSEFGRDSEATDDVLQEEFLCSLRCYGGDCPSLNPLCEIFNGDEGELEVPLSCGQWSNDV

SEQ ID NO: 48263 - protein, 144 aa, Zea mays
  Coding DNA Sequence Number=SeqID_4888
MGKHVPSLLMLLLSRGRVPLDSPTRWQDGRPSHSSNHVLQRTCKIMPQIRAHRLGVQCLTDTDCRRVVTALVPTITGMGDHVSGRVRGYVCRFGIKLGIAFQSWGRQILWGRLWCWIRGYLLSNSLLRHEDVFSVGEVAIYRMQ

SEQ ID NO: 48264 - protein, 143 aa, Zea mays
  Coding DNA Sequence Number=SeqID_4889
MGKSKKGGGSSHHSGDKRKREPTPPSKDFGDSEYSEEEFSSESEGSPVPASPPASSDDSDDSEGIAAEVWTYIRAVERAGLEGSDESEYSSDEENSSDSSEEGGGSDGDDNGGDGDGGGDSGKGCDGSGGSKGSSKGSNKASG

SEQ ID NO: 48265 - protein, 233 aa, Zea mays
  Coding DNA Sequence Number=SeqID_4890
MGCVKGKCALGPFLSILVIECQRMCFCVNLCKVVDKVQIMSKVLETGKEQLEMSWLEQPRLCSVWEHRTVRWCTGLSGGAPDSVRCARLARANSLLSGFHRRRTAIIHRTVRCAPDYPVNQRSAGPTVGCAICARHVAEPTVGRGHRTVRCAPDSVRCANGSQAPTVGFARKGKKSAPDSVWCAPDCPVRQATEGKICLPGMLSTAPSCLGAIKRTPRRMKEHTEHSLSIPKH

SEQ ID NO: 48266 - protein, 85 aa, Zea mays
  Coding DNA Sequence Number=SeqID_4891
MSLSFCHEVIVLGRREEYHVWATFLTAMTKDLAMTAVGGLRLPKVPLDLGQNHRVKKHKEYEGWCIALCVEELRHDSRKGNRLKE

SEQ ID NO: 48267 - protein, 139 aa, Zea mays
  Coding DNA Sequence Number=SeqID_4892
MVGGAEVSMDISVEDYLVSGVAIFDAHTRRGPVSEFFLNGGQGFWRDHGAGSESRQLTVVPAPTAAGSVAVATGAKGSSQDPWSRFCASGEIASATTAKDMAGSVAQQLKHAVAFAEHIASGALTSEFAAERRRLEGED

SEQ ID NO: 48268 - protein, 265 aa, Zea mays
  Coding DNA Sequence Number=SeqID_4893
  Gene Ontology: Cellular component=membrane; Biological process=plant -type hypersensitive response
  Homolog annotation: Hit_ID=A2XSK8; Match level="QueryCoverage=86%, HitCoverage=47%, E-value=6e-76, Identity=63%"; Hit description =Putative uncharacterized protein
  Pfam annotation: Domain name=NOI; Domain location=178-249; Score=8.4; E_value=0.0041; Accession=PF05627.2; Description=Nitrate-induced NOI protein
MANAIRLYPPDMQPEIPAFGDWETTGNTPYTQKFEDARKNKKTGILAQPNDPRRDLEPPRKSPLHPTVYKTNPQDQGPRNPPHRPRPELDNQRHSDRPTHRESAPRRHSNLQREQGSNAGTPRSPYRTAAGSASPMQPNNQSKPKHRSTGMQTPERRASSEGLGQHTPGRSRMKPGGYEPEEVAVPPFGEWDDANAASGEKYTGIFNRVRDDRLSPTSSARQPSTTRSEENKVQQQVINKLPVKINCLVINCDIQLSDLESWSDY

SEQ ID NO: 48269 - protein, 109 aa, Zea mays
  Coding DNA Sequence Number=SeqID_4894
MVLFFLSSFEGEVIRVHSFMGEVDSGVFGRIHHAVQSSLFIHYARDGSKAEHSSRAKGHLALEGRVERRNTLLPRMDLYVEYIRSFLRLRAQAPTVPNEIVIEAMIKGL

SEQ ID NO: 48270 - protein, 288 aa, Zea mays
  Coding DNA Sequence Number=SeqID_4895
MTLTSQSTRRKDPPLPLPATEAIWARHALLVAGAAVEAGMCLYPSAGCATGPSCRWPGSVHLLSGPLLLALVQLLVRISPWRGFHASDEVLGPFIRSDVDVWHQEQLLGSGWCFLEYGLDEGRVVGSPTKVFNYYRLSDFGDAVPHRLKPLEEQSESFIILAPDGFEVPWLRRLVEEGLEIGDEASTKVAPIIDAVPGRVDSQPAAQILLGVVLVNVGDLEVGRPLDGPETQIVRSVDGAPRVSPTVDGVTQESVGYLSQHLSDFTRRVHCTSKVGVQVLSEERVLSP

SEQ ID NO: 48271 - protein, 80 aa, Zea mays
  Coding DNA Sequence Number=SeqID_4896
MVANALWLRGRLGAGEHAADNDGPADYSVGRSSKSVAAANGAEGAKRAECTRENARGRRRANHDQFFYSEEEGAQRTFEE

SEQ ID NO: 48272 - protein, 172 aa, Zea mays
  Coding DNA Sequence Number=SeqID_4897
  Subcellular localization annotation: CTP_CleavageSite=27; ConfidenceScore=5.60e-01
MGQRLTRSTFTGGQVKSGDRGLASPVRQSLIPSSGSFTEACTVFSEGRAWLGRALLGRSTVAGNRVAAGTLSAGQTPVISGSGEVERARRSTVDVYGGFIDAGATTAPARLWHDAGHTGARTSVLWEGQRASKTWLFASVRVLPSAERPKRANLDLRPVRDFFPAPRATFLM

SEQ ID NO: 48273 - protein, 347 aa, Zea mays
  Coding DNA Sequence Number=SeqID_4898
  Homolog annotation: Hit_ID=A2XFR6; Match level="QueryCoverage=48%, HitCoverage=48%, E-value=4e-32, Identity=45%"; Hit description =Putative uncharacterized protein
MDPGTHMLCARFYPLEPSVTEVVSELRPSAPADPGLPSGSRGSSSGSPSHPSGECSHPGGQLRGTATDAHPVAESLAFAARSSMSAPPAPAFQAPAPGGDDPDDSGDDDDEDDDDEEGGDEHVHEEADYAQQDNFMGFGPVVEHYTSMFETGHFPNLLQEVLHTLGTYVCPLYETRRVSEPPRACYYTTRIHIRVMDAWDRGFRTLSAHESLTPLSTYAASVSDAARQTLWSLSHTYRQQLQNTRFRHLPQRLRGGSQTSIVPGEAGEDRLNTLAGVVAGLNTDLDSATLDLYRVHLELENAHARIAALEAQLQGLDPPEAQVPAMALSPPRKRLRYGEPGSVTRLL

SEQ ID NO: 48274 - protein, 321 aa, Zea mays
  Coding DNA Sequence Number=SeqID_4899
  Homolog annotation: Hit_ID=A2XFR6; Match level="QueryCoverage=44%, HitCoverage=40%, E-value=2e-19, Identity=35%"; Hit description =Putative uncharacterized protein
MRKTLTKMLMSTESSDSSVIFLWEIAHVISDMVCTVQTTRVNTNSIPTPRQAHVYPVVVEEVPVELHHLHVESGVILEDRSEEILATPTPLSESHAFVVGASSSAPPMPVARAPAPGGDDPDDSGDGEDDDDEAEEEENNNEEANDEQEDNFVGIWPVTKHYTSMFEMGHFPNMLHNVLHALATYVRPLYDTRRVSEPPRACYYLTRVHIRVMDAGDRGFRTLSAHESLMSLSTYAASVSNAAKRAMWSVNHTYRQQLHNTEYIHLPLHPRGESKTSVVPGEAGEDRLSTLVGVVAGLNSDLDSATLDLLRVHGELEEAHV

SEQ ID NO: 48275 - protein, 121 aa, Zea mays
  Coding DNA Sequence Number=SeqID_4900
  Homolog annotation: Hit_ID=Q5NA70; Match level="QueryCoverage=51%, HitCoverage=51%, E-value=2e-17, Identity=62%"; Hit description =Putative beta-1,3-glucanase
  Pfam annotation: Domain name=X8; Domain location=44-117; Score=46.2; E_value=1.1e-10; Accession=PF07983.4; Description=X8 domain
MRYLIHVGNEGSSSTSTFTLIITLPRARQIDRQQHTTNDELEKTWCIAKPSASNEILAQNLDYECSEVSCAVIQKGGPCYYPDSPVSRAAVAMNLYYAYSGRHPLELLLQQLRARRAVRPK

SEQ ID NO: 48276 - protein, 235 aa, Zea mays
  Coding DNA Sequence Number=SeqID_4901
  Gene Ontology: Mol. function=translation initiation factor activity; Cellular component=eukaryotic translation initiation factor 3 complex; Biological process=regulation of translational initiation
  Homolog annotation: Hit_ID=A0MLU6; Match level="QueryCoverage=31%, HitCoverage=16%, E-value=3e-30, Identity=87%"; Hit description =Eukaryotic initiation factor 3e
MAMCPMASTWCEIRVESRFKSYIKSMDKSWITSRPGTQQSSRQPRSATSSYQPLPAAVQSREAGTSTASYQLRSSPGLQGLQAISIGYSGRNLVIDQYDVPKVINYGVTIAKAIELPNALEHAGATLLQEVYVLSTLARDNSQYLNAIQTNAHHLIRYLATAVVVNKRRRNMLKELIKVIQQEHHSYNYPVTEFLECLYVNCDFDGAQEKLIECEQYDDLRLVAKSTVQQPTVGR

SEQ ID NO: 48277 - protein, 292 aa, Zea mays
  Coding DNA Sequence Number=SeqID_4902
  Subcellular localization annotation: CTP_CleavageSite=76; ConfidenceScore=5.33e-01
MPPPIHHPILEGVGACASSPYSSDTSPNTDSHSGYCTSTRMFHIMRAPSFSPSSDVPFVFPAFAMIFLPNLLPPPMVTAVSRPTLVDVGMGRVSHAFGLSSCVPSRRICWRLPRLGYLDYEESRSEILDHQGWAGKTLAFSRASRIDAWCGCLSVWSSSDWASFSACVLSPYISSGILPMSPPDAQVFVVSFSGNEQGSKAIERGQGGSGECGEPGHEHGTSIGALEGAGPRRGASAAAQLYSDEQSCTTEGRQGENRGEGRLVTSREGSRALERCPRHGGISGRQWRRKGQ

SEQ ID NO: 48278 - protein, 123 aa, Zea mays
  Coding DNA Sequence Number=SeqID_4903
MAAIGQRYYESEGGRAATSLFSNMNQVRDQVSTVRGYNGDPNRFTQLRISNHTTYVALNPCICQPFPQILHNVNRSALPESTVLLRPASSQEGTRYSHHLPRPVRGYLFTYGIAGFKLTLSHI

SEQ ID NO: 48279 - protein, 327 aa, Zea mays
  Coding DNA Sequence Number=SeqID_4904
  Homolog annotation: Hit_ID=Q5GAU8; Match level="QueryCoverage=9%, HitCoverage=23%, E-value=5e-08, Identity=84%"; Hit description =Putative uncharacterized protein
MTDAEKEVATERRMDSPPRCDCGDCAVIDEDHEKQFVCPNIDYRYGWRKCRFREWLYGPLSHWPEPEETGKCSWESYDDKGEVMRTIESKRLMGQKMRCGSQLVDSYINDRIRDMRRYAKSAFYDSPKRAEYRRLKAADEKRAQDAREWEAARAEKQMLDNLADRLKGKIGCGVNYLADEAHARYVQDKMATVELMEEEEDDDTSRLSELIALAEARLHGEEEDDTSRLSELIALAEAGLRAQEEEDEFMSQATEEVEAAYYKQKSDEAEAEDELFSQAADEAEANYYKRTVDKCDAGQCSKWNEVVVEDCATDGSKDELLIDCDSD

SEQ ID NO: 48280 - protein, 252 aa, Zea mays
  Coding DNA Sequence Number=SeqID_4905
  Gene Ontology: Mol. function=phospholipase A1 activity; Biological process=lipid metabolic process
  Homolog annotation: Hit_ID=Q6BTJ4; Match level="QueryCoverage=80%, HitCoverage=30%, E-value=7e-12, Identity=31%"; Hit description =Similar to CA1621|CaIFF6 Candida albicans CaIFF6 unknown function
MALSPLLLAERRRRGSRSDRSHFAAPLTGLTRGQRRLRRTDSEPLDRVRLTTAKSGPRRHGKLHFARPQGSDSGSAPEDDELRFARPQGSDSGSAPEDNELRSARPQGSDSGSAPEDDELRFARPQGSDSGSAPEDDELRSARPQGSNSGSAPKDDELRFARPQGSDSALTSADGLRLARPRGSDSTSASEDRLDLDLGGASTSPNPGLGPTTSQEAPSLPYPKLTQATGNKTGVPSGSLCYASNDGAPHAL

SEQ ID NO: 48281 - protein, 173 aa, Zea mays
  Coding DNA Sequence Number=SeqID_4906
MQAACNRTKWAHPFDSNTSSMEAQAHTSCNRRAGCYMQETAPPLAPLPYLLDCGTSTATRGNPAYDLTVPARHIDHGDRERGIPQKGSFSAKETGPEPPLLIRGLKAGPSEGFNSRLRALKLRTRYCSELRRPAPRKGSTAASGHSGFAPTTDQGFVGWPSKGSQPPQTQSEE

SEQ ID NO: 48282 - protein, 280 aa, Zea mays
  Coding DNA Sequence Number=SeqID_4907
MRGVIITCLPGRARWDAGLVPRSLSWLGVGLGEVEAPPRSRSSLSSGAEVEAEPLGRARRRPSAEARAKPEPWVGRGGVCRLPGLSPSPSPGSGEAEFVVFRGRARVRALGRARRSLSSSGAEPESEPWVGRGGVRCLLGLSPSPSPGSGEAELPMAPEAGLGCYQPHSVEWHDSRSGMGGAVFLSGWSVKRRSDGGHFGSVDLKAHVRIRCQATFALNAPAIRSVGVATWPRLLLGEDWASGEPKVCPLLEGALGQDVNPPGSAALARGWARARRDRVP

SEQ ID NO: 48283 - protein, 68 aa, Zea mays
  Coding DNA Sequence Number=SeqID_4908
MGIRVAGGMGFLLTLEKISLPMVALGTRGAHRGSKLIYSDEINWERELDAPVSALSVGRTLSWSAIRN

SEQ ID NO: 48284 - protein, 449 aa, Zea mays
  Coding DNA Sequence Number=SeqID_4909
  Gene Ontology: Mol. function=translation initiation factor activity; Cellular component=cytoplasm; Biological process=RNA metabolic process
  Homolog annotation: Hit_ID=A2X7I0; Match level="QueryCoverage=100%, HitCoverage=53%, E-value=1e-95, Identity=58%"; Hit description =Putative uncharacterized protein
  Pfam annotation: Domain name=MIF4G; Domain location=2-288; Score =40.5; E_value=5.8e-09; Accession=PF02854.10; Description=MIF4G domain
  Pfam annotation: Domain name=Upf2; Domain location=205-385; Score =159.8; E_value=7.1e-45; Accession=PF04050.5; Description=Up -frameshift suppressor 2
  Pfam module annotation: Pfam domain module=MIF4G::Upf2; Domain location=2-288::205-385
DQINIETKIKNIRFIGELCKFKMAPPALVFSCLKVHKGKYSQVHLIALLTASLSRYHDDFAVAVVDEVLEEIRVGLELNDYGMQQRRLAHMRFLGELYSYKHIDSSVVFDTLYLIIVFGHGTPEDLFGELRPNMSRYLSIEELVAALVELEENERSAPVEKVENERHSDNESHKRQARDAGPSVNGGSAANGIEENGKDHEIADSESYSDSGSIDGREDEDILSEDKSNDGSDNEGDDEDDGIPVGSDEDENVEVRQKVMKVDPKEQEDFDRELKALLQESLESRKSEARSRLPLNMMVPMNVLEGSSKDSRATESESGEETVDEEGGNAGGSSKVRVKVLMKKGHKQQTRQMLIPADSSIVRSTKQQEAAELEEKQSIKRRILEYNEREEEELNGASQMGNWGQGATNTSSIRSGGRGSWDGSARGGGRQRHHIAGSGGFYHSYGRRR

SEQ ID NO: 48285 - protein, 340 aa, Zea mays
  Coding DNA Sequence Number=SeqID_4910
MKRRCRSLQQWRNVRQGSESSAGEGLVALDSGEDDVEEEELLATRFLGSRRGGNHAERRLSPVATITACVLALELARVAETGKVCAKSHLGLLLLEFLLLDLGGELLRGMRRHCLGVVGGDMRAEGWRRRSWELNGGSLLAPDGCELAAEERVGEAASAAAAVPSGVRGGAREQESPGRRGALQPADWRSWRGREEEPQRPRRYSFRRHRSGAAEWAAVVLFMVLAVVVLLGAVAVLVVVLLLQPRVSYVVVWAGLAVLCAYPFRVPARGVLSLAAAMEAALRDGVVPFRVDVEARTRWKVAGIIGVDQWTRLACQLRFFWPNGTVLPFRCISKSKFLFF

SEQ ID NO: 48286 - protein, 359 aa, Zea mays
  Coding DNA Sequence Number=SeqID_4911
  Gene Ontology: Mol. function=nucleotide binding; Cellular component =myosin complex; Biological process=signal transduction
  Homolog annotation: Hit_ID=Q6UAL3; Match level="QueryCoverage=77%, HitCoverage=19%, E-value=3e-76, Identity=54%"; Hit description =Myosin heavy chain class XI E1 protein
  Pfam annotation: Domain name=IQ; Domain location=68-88; Score=17.5; E_ value=0.052; Accession=PF00612.18; Description=IQ calmodulin-binding motif
  Pfam annotation: Domain name=IQ; Domain location=91-111; Score=12.7; E_value=1.4; Accession=PF00612.18; Description=IQ calmodulin-binding motif
  Pfam module annotation: Pfam domain module=IQ::IQ; Domain location=68- 88::91-111
MEPKSNMPDKFIFLPSDFYNWNTIVIRYCAGASLAGDVDGEDLIGKTKVFLRAGQMAELAARRAEILANAARLIQRRIKTHLMRKEFIKLRKASVQSQKFWRARLAKKIFEYMKRDVASIRIQKHEARETGALKEAKDKLEKRVEELTWRLDVEKRLRADLEEAKSHEIEKLQSALQKMQENLKEAHAAIVNEKEAAKLAIEQAPPKIVEVPVIDNAKLEELTTQNKELEIHQICLKEELSTFKQKAEDLENKLIEFQKQSDELSQETQEQASKVIQLQELVERLESKIATLESEIELLHNNSALAIQAVVTPEMNQTTIIEEFDKGHQLEEVKTVNEQVVVPPVKNLSKQKSQQIQED

SEQ ID NO: 48287 - protein, 196 aa, Zea mays
  Coding DNA Sequence Number=SeqID_4912
MGDTRRLSALSSGERNSAGVGTFQPSFGFKDFHQPAWLYPPPPRRRSPKTATTSPWVGRSKPGCDLGPTLSIKDVHHPRWGGGRAELELYLPRGFVGHPLLRRSRERALAGPAGGSDFDNAGLVDGGRRQPQRVELVGLAPGAPSCRKAAAAPCAREDRPRCRALLGRHSCSGAVQPLHRYGASARRSVLHSSGRI

SEQ ID NO: 48288 - protein, 246 aa, Zea mays
  Coding DNA Sequence Number=SeqID_4913
MGRVFSNTLQGPPLRRGGWVPHVMQAGSEQKKPNRPAVRTTAQRLQVTLHFCPDQRAKGAAAMQAACNRSKWARFSDSQHAQHGAPGPRVMQPARRMLRACNYTATCATTAPPRLRNQYRDSRRPSARPSSASLARRGTGGAFGRRSGRRFAFAIMTATKKGPGKGDTPKRILPREGTRLRASLLIRGSKAGPPEGFDSRLRSRGPYTHYWSEVRRPAPRKGPTAASGYSGSAPTTDQGFEGCPPK

SEQ ID NO: 48289 - protein, 280 aa, Zea mays
  Coding DNA Sequence Number=SeqID_4914
  Gene Ontology: Mol. function=nucleotide binding; Cellular component =myosin complex; Biological process=signal transduction
  Homolog annotation: Hit_ID=Q6UAL3; Match level="QueryCoverage=80%, HitCoverage=16%, E-value=3e-64, Identity=56%"; Hit description =Myosin heavy chain class XI E1 protein
  Pfam annotation: Domain name=DUF1664; Domain location=15-121; Score= -34.8; E_value=0.072; Accession=PF07889.3; Description=Protein of unknown function (DUF1664)
MEQKSNMPNKFIFLPSDFYNWNTIVIRYCAGASLAGDVDGEDLEARETGALKEAKDKLEKRVEELTWRLDVEKRLRADLEEAKSHEIEKLQSALQKMQENLKEAHAAIVNEKEAAKLAIEQAPPKIVEVPVIDNAKLEELTTQNKELEIHQICLKEELSTFKQKAEDLENKLIEFQKQSDELSQETQEQASKVIQLQELVERLESKIATLESEIELLHNNSALAIQAVVTPEMNQTTIIEEFDKGHQLEEVKTVNKMAIGVPKKRNDKWMANQLLKLHLE

SEQ ID NO: 48290 - protein, 254 aa, Zea mays
  Coding DNA Sequence Number=SeqID_4915
  Homolog annotation: Hit_ID=Q5Z9G5; Match level="QueryCoverage=37%, HitCoverage=37%, E-value=2e-08, Identity=42%"; Hit description =Putative uncharacterized protein P0655A07.24
FDECQPILGKEKSSSRRQALGKEGHSSKLASLPSVKATTLGKEALLVPKYAFFIECYDLDTRQKPWALFTYRKPRPGAREQESPGRRGALQSADWRTWRGREEEEPQRLRRYSFRRHRSGAVEWAAVVLFMVLAVVVLLGVVAVLVVVLLLQPRAPYVAVRAASLYALVYWQTGALDDVQGAPLGDAGSAAMEAALRDGVVPFRVEGEARTRWKVAGIVGVDQWTRLACQLCFFWPNDTVLPFRCSSKSKLLFF

SEQ ID NO: 48291 - protein, 856 aa, Zea mays
  Coding DNA Sequence Number=SeqID_4916
  Gene Ontology: Mol. function=nucleic acid binding; Cellular component= nucleus
  Homolog annotation: Hit_ID=A2WP36; Match level="QueryCoverage=10%, HitCoverage=55%, E-value=1e-30, Identity=59%"; Hit description =Putative uncharacterized protein
  Pfam annotation: Domain name=IQ; Domain location=122-142; Score=27.0; E_value=7.2e-05; Accession=PF00612.18; Description=IQ calmodulin -binding motif
  Pfam annotation: Domain name=IQ; Domain location=80-100; Score=25.0; E_value=0.00028; Accession=PF00612.18; Description=IQ calmodulin -binding motif
  Pfam annotation: Domain name=WW; Domain location=321-351; Score=12.8; E_value=0.068; Accession=PF00397.17; Description=WW domain
  Pfam annotation: Domain name=zf-CCCH; Domain location=190-216; Score =43.8; E_value=6e-10; Accession=PF00642.15; Description=Zinc finger C- x8-C-x5-C-x3-H type (and similar)
  Pfam module annotation: Pfam domain module=IQ::IQ::WW::zf-CCCH; Domain location=122-142::80-100::321-351::190-216
  Subcellular localization annotation: CTP_CleavageSite=32; ConfidenceScore=5.23e-01
MDQRSMTLGIRTRLSSPPPAAHPSPPSAAAPSAAATPSHPPSPTPDAFTRLEESFGRLAEKWDQFVVMFHRYKEKTEKELQAAVRLQAAARGFLARRQVQSLRGEKHLAVASRATPWPSSHEQAVVRLQAAVRGFLVRRAVRKLHLLISSSLHQLAACTPNHQVSSTLFEPPAEVEIWVLNDEDYYPERPGEPDCPFYAKTGKCKFGAVCKFNHPKLEDIKTPSLIAKETIYRATTDAAAHIGGTDDSVPAKTHAPIAPAEAHNAKGLPIRPHPTIDPLQSLTNSPIPSLAITNEELTPPAGYIVTFVPSTSGVRGADLSLPRPRRNLVDGITGYLYYGNPDTNATQYERPATVPLPSWVLGFPTRTVYEPLAPTLAASTMPVVKAHKAYIFFRRRLLLIAVAAFLRSPSRSSSAAIATLRLVSRPSTFLPPAVATVGSSCAAVAALPDRHRGCRAPCKPRKSSRVYVSGYHRGSRPDPPTAIAAAVRADSAVARPPLRLPSQIPSRSAAVIAAAVRADPTVARPSSRSAFPLPSSAVVAVSSIPAGGSKLLCLRRPPSAPLASSAWCALLPAARRKGCRSRSAPPSAAPFLVAICAGGCHCVQSHQGSSRYPTRLPRPGPPSTRPTRAAVSCAPVLADDRRNAADIKTWQLNDGKVMTAMDSGALLHTLMQQTHVIEQNDMSIDEYYSAFDRLMSALTSMVPACIVDPCPAHKFIEKFFTYKFVMGVRADNTHNVLAAAQKPKSVFKPCDHYGKTNHRSELCFVKFPEKLTDFRARRAARGPGPSTRGSVAVAATLSACTSESARILDSGASFHVTSDQSKLASTTPVTDGASVQTADGILPLLLLRLLPSGIIV

SEQ ID NO: 48292 - protein, 193 aa, Zea mays
  Coding DNA Sequence Number=SeqID_4917
  Gene Ontology: Mol. function=ATPase activity, coupled to transmembrane movement of ions, phosphorylative mechanism; Cellular component=membrane; Biological process=metal ion transport
  Homolog annotation: Hit_ID=Q7XBD7; Match level="QueryCoverage=94%, HitCoverage=78%, E-value=2e-62, Identity=70%"; Hit description =Putative metal-transporting ATPase
MAAVNLLAESAAVRLRAPAPPGAGEELAARLTECGFLTTARRGGADAGAGESARKWREMAARKEELLLRIWDRVAFALPKRGTDMLELERSRELTRPSASHPTPCQLPHGDGEASDHLSYASRFIWLCTRRKALSWMSTAMSSSPVFPLTSSATQCSGSTSIYIILLWHVWAGEGLPTSAILQQGCLNEKFLG

SEQ ID NO: 48293 - protein, 721 aa, Zea mays
  Coding DNA Sequence Number=SeqID_4918
  Gene Ontology: Mol. function=binding; Cellular component=cytosol; Biological process=protein folding
  Homolog annotation: Hit_ID=Q5ZDK5; Match level="QueryCoverage=86%, HitCoverage=98%, E-value=0.0, Identity=59%"; Hit description =Tetratricopeptide repeat protein 2-like
  Pfam annotation: Domain name=TPR_1; Domain location=291-324; Score =27.3; E_value=5.5e-05; Accession=PF00515.19; Description =Tetratricopeptide repeat
  Pfam annotation: Domain name=TPR_1; Domain location=325-358; Score =21.1; E_value=0.0041; Accession=PF00515.19; Description =Tetratricopeptide repeat
  Pfam annotation: Domain name=TPR_1; Domain location=359-392; Score =6.9; E_value=0.8; Accession=PF00515.19; Description=Tetratricopeptide repeat
  Pfam annotation: Domain name=TPR_1; Domain location=486-519; Score =18.9; E_value=0.019; Accession=PF00515.19; Description =Tetratricopeptide repeat
  Pfam annotation: Domain name=TPR_1; Domain location=532-565; Score =2.8; E_value=2.5; Accession=PF00515.19; Description=Tetratricopeptide repeat
  Pfam annotation: Domain name=TPR_1; Domain location=566-599; Score =38.0; E_value=3.4e-08; Accession=PF00515.19; Description =Tetratricopeptide repeat
  Pfam annotation: Domain name=TPR_1; Domain location=600-633; Score =11.8; E_value=0.2; Accession=PF00515.19; Description=Tetratricopeptid e repeat
  Pfam annotation: Domain name=TPR_2; Domain location=291-324; Score =27.1; E_value=6.5e-05; Accession=PF07719.8; Description =Tetratricopeptide repeat
  Pfam annotation: Domain name=TPR_2; Domain location=325-358; Score =25.1; E_value=0.00026; Accession=PF07719.8; Description =Tetratricopeptide repeat
  Pfam annotation: Domain name=TPR_2; Domain location=359-392; Score =14.0; E_value=0.54; Accession=PF07719.8; Description=Tetratricopeptid e repeat
  Pfam annotation: Domain name=TPR_2; Domain location=437-470; Score =6.5; E_value=4.6; Accession=PF07719.8; Description=Tetratricopeptide repeat
  Pfam annotation: Domain name=TPR_2; Domain location=486-519; Score =28.5; E_value=2.5e-05; Accession=PF07719.8; Description =Tetratricopeptide repeat
  Pfam annotation: Domain name=TPR_2; Domain location=532-565; Score =8.5; E_value=2.6; Accession=PF07719.8; Description=Tetratricopeptide repeat
  Pfam annotation: Domain name=TPR_2; Domain location=566-599; Score =25.0; E_value=0.00028; Accession=PF07719.8; Description =Tetratricopeptide repeat
  Pfam annotation: Domain name=TPR_2; Domain location=600-633; Score =17.1; E_value=0.065; Accession=PF07719.8; Description=Tetratricopepti de repeat
  Pfam annotation: Domain name=TPR_4; Domain location=325-350; Score =18.9; E_value=0.019; Accession=PF07721.5; Description=Tetratricopepti de repeat
  Pfam annotation: Domain name=TPR_4; Domain location=359-384; Score =4.3; E_value=12; Accession=PF07721.5; Description=Tetratricopeptide repeat
  Pfam annotation: Domain name=TPR_4; Domain location=437-462; Score =6.1; E_value=7.4; Accession=PF07721.5; Description=Tetratricopeptide repeat
  Pfam annotation: Domain name=TPR_4; Domain location=486-511; Score =19.0; E_value=0.018; Accession=PF07721.5; Description=Tetratricopepti de repeat
  Pfam module annotation: Pfam domain module=TPR_1::TPR_1::TPR_1::TPR _1::TPR_1::TPR_1::TPR_1::TPR_2::TPR_2::TPR_2::TPR_2::TPR_2::TPR _2::TPR_2::TPR_2::TPR_4::TPR_4::TPR_4::TPR_4; Domain location=291 -324::325-358::359-392::...
  Pfam module annotation: Domain location=486-519::532-565::566 -599::600-633::291-324::325-358::359-392::437-470::486-519::532 -565::566-599::600-633::325-350::359-384::437-462::486-511
MKSIKDEEVMDPHRNILYYTYWITYRLGSCWVVVAAGGASSTRSQEQAVFVCVVLCLLAWRGEEEAAEYWELKGAGTGIAEAAWGDPAMSEADRIRHRTAALVLHDDEVRDKPDAKANVFADLGSPVSPLRARASVATSSSSSSGSAKSPAPSNAGMAGGRSHSGELVGECNPPRLMAHRRSGSGQLIFSGGSSRGSGGGGGDRGSTASSPILNALPSGNICPSGRVPATAAPPPPRSRPDVLGSGTGHYGHGSIMRGAGMAPARSSIDSSSFLGHSSRSPASFPASSGSLQEVTRLGNEWYKKGKYGEALRHYERAVALCPESAACRGNRAAALIGLGRLADALRECEEAVRLDPASGRGHSRVAGICLRLGMIDKARRHFTQAGHLQQSDPTDWQKLQEVEVHLGRCTDARKIGDWKSTLREADAAIAAGADSSQLLLALRSEALLHLHKLEEAESTLASFLKLDSALPSSLTAAELSGMLAESYVHIVRAQIDMALGRFDAAVAAAEKARDLDPGNAEIGMVLNNVRLVAKAREQGNDLFKAAKFSDASMAYGEGLKYDPSNSVLHCNRAACWSKLEKWEKAVDDCNEALRIQPSYTKALLRRAASYAKLERWVDCVRDYEALRKELPSDKEVAEALFHAQISLKATRGEDVSNMKFGGEVEIVSSVEQLRAAISSPENVRIVPTFKIYKGGVKVKEMICPSLHVLRYSVRHYSVSSS

SEQ ID NO: 48294 - protein, 126 aa, Zea mays
  Coding DNA Sequence Number=SeqID_4919
MAERYQLPRSCVPPMTRQKDGGHPPSGGLEGGASGRSSGRRFAFAETTAPKKGPGKGDTPKGILPREGTRLRASLLIRGSKAGPPKGSTAASDRVGPTPTTGQRFEGRPPEGFHGRLRLLGLRAHY

SEQ ID NO: 48295 - protein, 222 aa, Zea mays
  Coding DNA Sequence Number=SeqID_4920
MVVAAAAPIYTASIILSPKETLYNKEEGASWNHGGKDTTAFGGGPVEADIGVACSKWISCNATPHGLAATSAQRVVWLEQMMARPADPLVRRRVVEVIARSPQMWASRTERCGGGQPPRCLVALVQLRLPPQWSTPNICFTRRRARKSRAAACRWTVVAVCRGATTLSWTSLLGSRVEVMAAPDDGGGGGDEGAANVAAKATTAEREPKRCWHMISNCGHVT

SEQ ID NO: 48296 - protein, 125 aa, Zea mays
  Coding DNA Sequence Number=SeqID_4921
  Subcellular localization annotation: CTP_CleavageSite=66; ConfidenceScore=5.28e-01
MALPVDVAGLRPRLGDVEAPPKPRSKVVWRRPKRSPSPGVRRSGVRRLLGLSPSPSPGSGEAEVVRRRPKRSPSPRVGRSGVRRLLGLSPSPSPGSGGAEFAVFRDLARVRALGRAERSSPSSGT

SEQ ID NO: 48297 - protein, 386 aa, Zea mays
  Coding DNA Sequence Number=SeqID_4922
MKGRLIVGKLHALVRRFAFLTAGCPENEGVHYRGVVARCFFGWGASVFSGGFRIKVVPSGDLTAGELALVVVPPILPSSCCCWRNATPWGLALFHHHSTSRIFITQPGRNLRLVVIHKDDYQPCGGEKRAGLRPPHTLSFKDVHHPRWGGGRAELGPCPPHGLATRFFLQHSREKGVRQPCEGGELRVREAGRLRRRQLPHVWLLSLGGFGVASGAASCRLHGAWLSIHRTGDGRVVRGEDGSEDLYARAGATAIHRYGTGAQVAAVVGAKVVAAAEVAVAVGAEVVASAGEPLGASYPATLTGPWYGTRLSGYTGSGPPQETNVRNQAKRPHRLRTTPWNGVPFSGAGPQAVGPPNFRIGGPKLQAWLLNSDVVMSEQIEVVWVG

SEQ ID NO: 48298 - protein, 59 aa, Zea mays
  Coding DNA Sequence Number=SeqID_4923
AKVCHFLTLKPTKGINPEYGILQQVLPRLKKKTLQGYAGYNGSQDREHRYTTVQPLATE

SEQ ID NO: 48299 - protein, 288 aa, Zea mays
  Coding DNA Sequence Number=SeqID_4924
MAASGQATLAGHKLPRRLAACRLATPGRRDADWPRWPAAGHHTGGPHRAAATPTGRACAGRAPGRARRRVEPAYRRGRGPPRRAGLRCVPGGRAHAPGGARTMTCRGRSYAPLRRVARPCRVPGRHSCAREGRRAVRTAREEATMEERVGEGERERLRRGGEDEGTLDRGWAKRGARWAAEQAKGNWATQGRGGGRRVQDATQTEKVSPWTLRLRLRSACAPAVQLVDAADCGCAPAPSAQRSPEVQPSGCAGSHPTSAAGRREYERKKGVGRRELVHSSTSTVGRWA

SEQ ID NO: 48300 - protein, 36 aa, Zea mays
  Coding DNA Sequence Number=SeqID_4925
MVTRMMGFDYGNGKEEGVKVDLQEFQDFDEFEDLLG

SEQ ID NO: 48301 - protein, 38 aa, Zea mays
  Coding DNA Sequence Number=SeqID_4926
MVGFTDGDKDDGFDYGNGKEEGVEVDLQEFQDFDEFED

SEQ ID NO: 48302 - protein, 94 aa, Zea mays
  Coding DNA Sequence Number=SeqID_4927
  Homolog annotation: Hit_ID=Q5NKP3; Match level="QueryCoverage=98%, HitCoverage=19%, E-value=7e-17, Identity=89%"; Hit description =Putative uncharacterized protein 9C20.7
MEALALASLINDEKKLGDCQFDLWKQYYVTACVAVFGKLRRSRRLDAEALVLASLIDDEKKLGDCQFDLWKQYYVIACVAVFGKLRRSHRLDAV

SEQ ID NO: 48303 - protein, 79 aa, Zea mays
  Coding DNA Sequence Number=SeqID_4928
  Homolog annotation: Hit_ID=Q5NKP3; Match level="QueryCoverage=100%, HitCoverage=28%, E-value=8e-13, Identity=66%"; Hit description =Putative uncharacterized protein 9C20.7
MSCAFDDYYIKDYGVILAPEVTQRRTDNNDHSPSSGQESSVLTMSCVFDGYYIKDCGIISASEVTQRRTDNNDYSPSSG

SEQ ID NO: 48304 - protein, 389 aa, Zea mays
  Coding DNA Sequence Number=SeqID_4929
  Homolog annotation: Hit_ID=Q6QP51; Match level="QueryCoverage=17%, HitCoverage=35%, E-value=2e-21, Identity=70%"; Hit description =Putative growth-regulating factor 1
MEEAEGMRLRKPKQKASANGRVKNHRRPLFWGKRHLWQAKQALFHLRHDDRVKKGTGKEDISKRILLSEGSGPRALLLIRGSKAGPSEGGSKAGPSEGFDSHPRARRVRDGYVCYMAEARATLPSHFALSMTDLTGKQHRSPRSDCCATHQGKTDNSRVQPRAQQEAPPRPTLGLGLGRRSPPRPTPGLGLSLGLGRNRVLARPRPRPQEKSPLRPTLGSDQPHHRGYIITLPLASSGYEGTRPASHLARPGLRHFSDGHVIAYPGLKHFSDSHVGMVPRVRNADIVIIHRTVRCSTGLSGVPSEATVVRANGRLQRYSARLRAQKSEHAQKAHQTVNSDCPVHHRTVRWPRCQKLQRSEPNGLVTWLAHRTVFDGTPDYPPSNLIQEL

SEQ ID NO: 48305 - protein, 264 aa, Zea mays
  Coding DNA Sequence Number=SeqID_4930
  Subcellular localization annotation: CTP_CleavageSite=44; ConfidenceScore=5.12e-01
MASMVLRAAAAARLPSLRPRRNGSGVLTGLRIGTGHYGVRLALSSSAAASPKEFEVACLPVDDSRLGPGEDYVSDLRMADEEELDHFYRVLAIKTDMLFRAYPEHKPFAVSEEDKAVQERLKEFANECIDLLDDALRRIPAEKRRPLFSVFGNVYQVFASVKWYAEGGCAQWWMALQITEELEIMRKMVSSACGGTPLDRETVFDRKEALTGVDVQAALRGHGVESNLSVENTFPFYLVIFELIDNIYSNVKSDIDDMVFAFTA

SEQ ID NO: 48306 - protein, 571 aa, Zea mays
  Coding DNA Sequence Number=SeqID_4931
  Subcellular localization annotation: CTP_CleavageSite=46; ConfidenceScore=5.48e-01
MSPPSRHPILDKGVGAGASSPYSSDTSPDISRSGYCTSTRTFHIMCASLFSSLSDVSFVFLAFALFFLPNMMPRPRSQPRADRRSSTRGRLLAEGMTSTVCCLARSYCSPADPAGAARLHVRFGPVAYVMGHKLRGSGVLLWGSGLTGMCCLSLPRGALWPAHAVASGAVLHVAMRRRMGAASSCCRRGWDQSLIGGWTAAPALVAAITAGPPMAMPTVAPIPTADWPVTITPATAPRRRGIGASGAELRGRTAVGRLYASCAAVRLFDRWALNRGAVACPLRGGIRVKVVSFGDFTVGERALVVPGCSPPPVVIQKDDYQPCGGEKQARLRPPSCPQLQGCSSSMLGRRVRHTHGFSRVVGRTGGSHMASYVAGAVAVFLDVLTPLAKTGVRTYKRAEAAIAHQCRGGCRRWAVERAGSRYGTRLSGYMVSGPPPPGDKAVERAGPRYGTWLSGYTGSGPPQETNVHSLAPVPRPTVWDLAERLHGFRTTLWNGVPFSRAGPQAVGPPHFRIRGPKLQAWLFNSDVAMSERWKPYGPIVRVHGGRPIGLSYTSDLWGPEGSPEERRAFAP

SEQ ID NO: 48307 - protein, 142 aa, Zea mays
  Coding DNA Sequence Number=SeqID_4932
MVPPSDAGKGPSATPAPTGAGEDPVPATALMGADAKQVVAEPAAEDLGPSQVPTLGPAQATAAGNTDFVAASTVAPVDDNLFGSMSECFESDGESGSSFSWTEESSDESLDYFVALDVAAAESSPRVEGAGGLPSASTEYRP

SEQ ID NO: 48308 - protein, 318 aa, Zea mays
  Coding DNA Sequence Number=SeqID_4933
MSSSSSSVANASLADSSSEDTLSNLAAVELQPGHTVEFGVSRISSIRVQDMQQLGYFGDEVLQRFEVQVHQLTPNAVVALAKYVWTVTSYGEDDEDEGALRCTARMSSLRDLVEEFIGYGVWPLAHGWVLGEVSPRQMPTLGQQLVRSPTFSLDLRGRDLAAFIREVEDGAVRIVGRYALRTESLRSWDIRGSNVRLNRVFELNRLLYGGYPGDDATAVVDRREKKTAVMDKDRQDAAQKHWAITRAGDPMREVKRARGGTKSAAPRGSKPPLAVKPAVLGPSKSWRAAAFADHVASGALSSEFAAERQRLEGKIEHL

SEQ ID NO: 48309 - protein, 126 aa, Zea mays
  Coding DNA Sequence Number=SeqID_4934
  Gene Ontology: Mol. function=transferase activity; Biological process= embryonic development ending in seed dormancy
  Homolog annotation: Hit_ID=A2YHA1; Match level="QueryCoverage=53%, HitCoverage=13%, E-value=7e-27, Identity=64%"; Hit description =Putative uncharacterized protein
  Pfam annotation: Domain name=PPR; Domain location=51-85; Score=40.4; E_value=6.2e-09; Accession=PF01535.11; Description=PPR repeat
  Pfam annotation: Domain name=PPR; Domain location=86-120; Score=15.0; E_value=0.13; Accession=PF01535.11; Description=PPR repeat
  Pfam module annotation: Pfam domain module=PPR::PPR; Domain location =51-85::86-120
MGTSSREHKKHHEEREETNPEQKGAPPSYYSTYTKTKSQQGGLERGLPDVFTFNTLIDGYCERLKLDSALQLVERMWMYGIAPDVITYNSNLNGLCKAGKAKKVNDTFEEMYLNLVIRRGSNQLLE

SEQ ID NO: 48310 - protein, 54 aa, Zea mays
  Coding DNA Sequence Number=SeqID_4935
MGRACHLRALPRAFNAPQVVVRSFCFGLISPPFWHESPKTESLEPSKCYLPLWL

SEQ ID NO: 48311 - protein, 205 aa, Zea mays
  Coding DNA Sequence Number=SeqID_4936
  Gene Ontology: Mol. function=proline dehydrogenase activity; Biological process=glutamate biosynthetic process
  Homolog annotation: Hit_ID=A3C743; Match level="QueryCoverage=33%, HitCoverage=16%, E-value=8e-10, Identity=54%"; Hit description =Putative uncharacterized protein
MDVDGVARVVRHQPQQRACGHGGAWAHVRGPQPRLDDHRLHLRALARSMPRAAAGEAAILGIRDITSIVKVRGRQGRGVAADVVIGEVDGGDVVDAGVALVLDARVEADDVAVQCAEELGRPQPDGLSLCLCSTEFQVSNYMPYEPVKQIIPYLITCIEENKGLLSASSLDMPRARRSWGYYDCPGLIFEVTAIFTSSATDVYNL

SEQ ID NO: 48312 - protein, 58 aa, Zea mays
  Coding DNA Sequence Number=SeqID_4937
MGDDDDHNEGLRAGPTASWRLNVSDFHMPERPKEPPFVARVFLRSHDCTISVTISYKK

SEQ ID NO: 48313 - protein, 224 aa, Zea mays
  Coding DNA Sequence Number=SeqID_4938
MAGSRDSSDISPSNIIEPTWETLPADEQLQFEEHKERMIQEAKAKFLANFKVDRNNKVVRHRATDPASLQPTPDIPNPRCAQRCMYDVRPPHVIFIPVTLATTCPPPHPPAGFTGSTPRIPFGTPGYKGGRIERTQPCCRDTVASSPRSPLPAANKEAGWVKGSRRGGISDSIVVRTVEGAWGLPRARGKAAVAASPRIGRLWCRNCSPELGIRRSPWAELLCD

SEQ ID NO: 48314 - protein, 470 aa, Zea mays
  Coding DNA Sequence Number=SeqID_4939
  Homolog annotation: Hit_ID=A2XX24; Match level="QueryCoverage=95%, HitCoverage=74%, E-value=1e-127, Identity=55%"; Hit description =Putative uncharacterized protein
  Pfam annotation: Domain name=DUF674; Domain location=1-434; Score =120.3; E_value=5.8e-33; Accession=PF05056.3; Description=Protein of unknown function (DUF674)
MAKPEGPTIGVKLFVDKEKKKVLFAESDKEFVDVLFSFLTMPLGTIVRLLDKQSQMGCLDQLYKSVEDLNLEYFQTSACKAMLLKPLNAASGHCRRLKINVDGSVPRVVYVCKDTSCSALSDNAFSSFPGTVCKCGKVMESIGQCPKYDGDTETAAAAACSEDGVFVKGCLKFIVTHDLQVAPATTSLMMSLFEKFGVLDPAVLEQQVLQFSSEKITCLLKRLLTSKQPLTDHYFEAPVPQDDASLEALVQNLHPKQESEDQEMPGNLKIRVLQTKDDSALLYAEVGVDFVDSLFSLLSIPLGSAIKLYGQCSAKGCLGNVYRSIDGSVQEFVREECQSLLLDPKLPPFFGCCASKILQCGNMVKSIKLCEANPKQKGGCEKGEVYVSRKANFLVTDDLRVLPLSLASTVKIVSDSKIQTSNLVVKEITLTKSKVMELQRAVLLLSRNILSSVLLHPKKNKKLHHYHRMY

SEQ ID NO: 48315 - protein, 389 aa, Zea mays
  Coding DNA Sequence Number=SeqID_4940
  Gene Ontology: Mol. function=oxidoreductase activity; Cellular component=phagocytic vesicle
  Homolog annotation: Hit_ID=Q7FS90; Match level="QueryCoverage=59%, HitCoverage=39%, E-value=3e-92, Identity=79%"; Hit description =Putative aldose reductase-related protein
  Pfam annotation: Domain name=RRM_1; Domain location=84-151; Score =21.6; E_value=0.0015; Accession=PF00076.13; Description=RNA recognition motif. (a.k.a. RRM, RBD,
MALVCRAITDPGHLLAVFTNSFSEPESLRAGFRLADYAPVIAASPQPVMVAKKHGFAIKMILGLLSIFLLGYAQRFRTSMLSTVKVSNVSLKAAQRDIKEFFSFSGDIVHVEMQSFDELSQVAYITFKDKQGAETAMLLTGATIVDMAVIVTPANDYELPSSVLAALEPKDTKPSALQKAEDIVGTMLAKGFILGRDALDKAKALDEKHQLTSTATARVSSFDKRIGLSEKISVGTSVVNDKVKEMDQKYQVSEKTKSALAAAEHSVSTAGSAIMKNRYVLTGAAWVTGAFSKVTSAANEAGAKAKEKIAVEQEHKNAEGGPAQANISETHEAHRGLDGGFSRLHDSETPEDIPISTASVPAVTDEEPSKASPPAGVPEKPEAAHELVL

SEQ ID NO: 48316 - protein, 87 aa, Zea mays
  Coding DNA Sequence Number=SeqID_4941
  Subcellular localization annotation: CTP_CleavageSite=29; ConfidenceScore=5.08e-01
MPRNPRVESAHTHTRKATHKFLNQGNSTRTMAAGEVYRGRTTTRWRGDNCCLVADSAPERPQHTAPGNPAALATRACGIADDWEGEE

SEQ ID NO: 48317 - protein, 454 aa, Zea mays
  Coding DNA Sequence Number=SeqID_4942
  Gene Ontology: Mol. function=catalytic activity; Cellular component =nuclear pore; Biological process=transport
  Homolog annotation: Hit_ID=Q10R44; Match level="QueryCoverage=47%, HitCoverage=21%, E-value=2e-90, Identity=71%"; Hit description =Nucleoporin family protein, putative, expressed
  Subcellular localization annotation: CTP_CleavageSite=2; ConfidenceScore=5.12e-01
MDAGLASSVTALRTCTDVAHLAHTAPLARLPKPARRGRRKRRDLHPRPPRPPRTPRPALPPAIQPAPRHPARKPQFRRGRRSRRDPARRNPATAAANTANYPPTSRNSATAEATSRSSATQRRLRGRPIALSAAGAPPLPTTTTSARRSMSSPADPCPPPSPTAASWPGLPGRAFLAPTVHSRVQRRTIYDISSVSFWGLIQGNPLHNPLLRLERMCCGWLGVIFEWEGVIVEDDAELERQYCESWSRDDAQRQYIVELGIPEEWMHEALALYHEYYGDKQGALENLIQCGNWKKAHTIFVTSVAHSMFLSSNHQEVWRITSALENHKYEIVDWDLGAGIYIDFYVLKNSMQERNAMDDSGSLEEMSESCRSFFGRLNESLLVWGSKLPVESRACYSKMAEELCALLVDTPSETLNLPMGCLLTMLNAPVPDESRSSYLQDALSVFTEILCSDP

SEQ ID NO: 48318 - protein, 238 aa, Zea mays
  Coding DNA Sequence Number=SeqID_4943
  Gene Ontology: Mol. function=nucleoside-triphosphatase activity; Cellular component=integral to membrane; Biological process=protein catabolic process
  Homolog annotation: Hit_ID=Q8GS69; Match level="QueryCoverage=44%, HitCoverage=23%, E-value=1e-35, Identity=60%"; Hit description =Putative potassium-dependent sodium-calcium exchanger-like protein
  Pfam annotation: Domain name=Na_Ca_ex; Domain location=137-235; Score= 17.4; E_value=0.00078; Accession=PF01699.15; Description =Sodiumcalcium exchanger protein
  Subcellular localization annotation: CTP_CleavageSite=26; ConfidenceScore=5.24e-01
MGASSPSAGPGSTELRSAAAATSSVVAAAVANLPMDGFDQTVNVKVVMATNRADTLDPALLWPGRLDTKVEFPCPDWRQKRLVFQVLLLRVLMSCAGQSSQNHEKAKKVLLIVKPHYGFGEKGRPTVGEEGVVMSIILFYIITNELVELLVALGMILRINLSILKLTVLVWGDSMGDLMSNVALPVNGGDGMQIAMSGCYAGPMFNTLAGLGDMQPNKILGVGLIALYSNFLFIRVFK

SEQ ID NO: 48319 - protein, 49 aa, Zea mays
  Coding DNA Sequence Number=SeqID_4944
MAEEENGLEEEEGSVAAQYSRRRVPAVIRPRCATTGLCHARMIQQDLVE

SEQ ID NO: 48320 - protein, 123 aa, Zea mays
  Coding DNA Sequence Number=SeqID_4945
  Gene Ontology: Mol. function=actin binding; Cellular component =cytoskeleton; Biological process=cytoskeleton organization and biogenesis
  Homolog annotation: Hit_ID=Q6Z3N3; Match level="QueryCoverage=37%, HitCoverage=5%, E-value=6e-16, Identity=84%"; Hit description =Putative villin
  Subcellular localization annotation: CTP_CleavageSite=55; ConfidenceScore=5.57e-01
MATPSLSHGGCTPCLLALALSSQAWSSPKLRLPALSLTAALSSTCSSPPSPPLPMAAPPESLPLLYTYPGDDKEECLIGTWFGKKSIKEDRLITVSLASKMVESAKFQAVQLIADFYAVYRIA

SEQ ID NO: 48321 - protein, 156 aa, Zea mays
  Coding DNA Sequence Number=SeqID_4946
MTCGRTSPVVAAVLVALAVVAAAVGPAPKRRGQEIHLFEATVRFPDDGVDELDYNYRLLAKVLGRSHAWLMDLSILHSPPRLKQLYLPVFYPVFFLLDDLSVEAARRATYDSELGVFSALITNNQGRRLSSELNPYQSIYATVNYITILDIKELTT

SEQ ID NO: 48322 - protein, 47 aa, Zea mays
  Coding DNA Sequence Number=SeqID_4947
MARVACTLRGKRLDGGVSVLGEKTADFCCFCTKVVPKDVVPKDEPQQ

SEQ ID NO: 48323 - protein, 181 aa, Zea mays
  Coding DNA Sequence Number=SeqID_4948
  Subcellular localization annotation: CTP_CleavageSite=60; ConfidenceScore=5.25e-01
MAQQMLSLQVPMYMPSALQLGGPYMSLTFAILAKGRSSKRRRWVGCLDPSSRRGGCNGIRDSRVVDCNGGRLGPLCADPATVFPILAPRLGKHQRDQRVGKSLAFRQSGAAAVGISSTRAPVRPPQGGGAESPLCSGLLQGLRSWEEAIGVEGSLEFFAPLSPPSQSARFRGWRIILRHYR

SEQ ID NO: 48324 - protein, 112 aa, Zea mays
  Coding DNA Sequence Number=SeqID_4949
  Homolog annotation: Hit_ID=Q8SA86; Match level="QueryCoverage=35%, HitCoverage=4%, E-value=4e-08, Identity=75%"; Hit description =Putative retrotransposon protein
MARVRSIARVSREGDETEMTETAPISEVMRRSGLVVQEGATAKGYQGPMIGYHTKWPTGWTNEWFYMKVDGEGEAHDHGNESPKAELRHDSVFVQHAARVPLPTGLGIQGGG

SEQ ID NO: 48325 - protein, 62 aa, Zea mays
  Coding DNA Sequence Number=SeqID_4950
  Homolog annotation: Hit_ID=Q7XBD4; Match level="QueryCoverage=70%, HitCoverage=4%, E-value=5e-09, Identity=63%"; Hit description =Cinful1 polyprotein
MKHLRTSNQHLVYLKYTYHYRDQFGEPDDEWLEAIEAASDELLGVYTKAEDEAMGLFGSAFF

SEQ ID NO: 48326 - protein, 37 aa, Zea mays
  Coding DNA Sequence Number=SeqID_4951
HYGTGGYEIDGFGYDYGAGEDEAVEGDFQEFQDYDEF

SEQ ID NO: 48327 - protein, 106 aa, Zea mays
  Coding DNA Sequence Number=SeqID_4952
  Gene Ontology: Mol. function=carboxyl- or carbamoyltransferase activity; Cellular component=ornithine carbamoyltransferase complex; Biological process=amino acid metabolic process
  Homolog annotation: Hit_ID=Q8SA97; Match level="QueryCoverage=89%, HitCoverage=21%, E-value=2e-18, Identity=52%"; Hit description =Ornithine carbamoyltransferase
MAPPVDVAGLHPRLGDVEAPPKPRSSLSSVVEVESEPLGRARWSSSSFGAEPKSEAWVGRSGVRRLPGLSPSPSPRSGGAEIAVFRDLARVRALGRAERSSPSSGT

SEQ ID NO: 48328 - protein, 222 aa, Zea mays
  Coding DNA Sequence Number=SeqID_4953
MARVACTLRGKRPDGGVSVLLVGVNPGCPRDMPRTRKTARKFTGPIGVPRHQLAPRHEGSSSGSNDPIGDLEAQVEQLRTELRHRNRVWADDDQHINELVANVRRLQDELSERDLAVDWAIKSRSIAWDREAKARARVAELSAALDNLQVYCNTLHEKVHVLYSRLHPDVPTDPVAMGVGPSGTTGEGTDGELDLFRPPPSMNLADDRSPTTGNEETKDDEE

SEQ ID NO: 48329 - protein, 382 aa, Zea mays
  Coding DNA Sequence Number=SeqID_4954
MAPPVDVVGLCPGLGDVEAPPRSRSSLSSEAEVESEPPGQARRRPSAEARAESEPWGRAKRSSSSSGAEPESEPWGRAERSSSSSEAEPESERWVGRSGVHRLPGLSPSPSPGSGGAEFPMAPEAGPGCLSASLCRVAQQSERRRRRCPLVRPLCADGGYQLRFRSLEEFHAAGGRRGDDVEVLFPGSNVVGIGSATASDFVPPVTSNVDSTGPASALSAGADSKSLAEKAIAALPPELSAQATDPKRKARSQDPGWKFGWWPDTTKKDFVQCIFCSKIVPPKSKGSSSILSVLKVQHKPIKRSKLGFKGKEQKKPKRTLVWRTGLSGAPPDSVRCPRPYDFKLATFGFQKSHSAIIHRTVRCTSGAMARQRNGRLQWSPAL

SEQ ID NO: 48330 - protein, 58 aa, Zea mays
  Coding DNA Sequence Number=SeqID_4955
MAQVVYQVQSVYLRTQVKSIYNVKSMVVTKAGVPPKLRARELRLNGGKRNHLKGEKTI

SEQ ID NO: 48331 - protein, 251 aa, Zea mays
  Coding DNA Sequence Number=SeqID_4956
  Homolog annotation: Hit_ID=Q8S463; Match level="QueryCoverage=41%, HitCoverage=5%, E-value=2e-07, Identity=36%"; Hit description =Putative prpol
MAVALTPFGITVKKKEIGLLGLVIVSHLSPRGPGRFSEGPDERWYRTRSISDNAQHPNTDSTGSSSYGMGSSHFAGSPYHSSSHASFADFPTYGWEAPALSRQEMSATSVAREEPSVFNHIPFQPRFDTSAFTSMYADLPFPSGCLDSEEDGSGPGRDFSELRDPEAMLHLPFACDKLLSDGSNNYNTNEEGHDPTRECFHAGHEEHDERNQLGMPWEDDAPPPHTGEPREQGDAQTPRESHGPPRACPNR

SEQ ID NO: 48332 - protein, 381 aa, Zea mays
  Coding DNA Sequence Number=SeqID_4957
  Gene Ontology: Mol. function=metal ion binding
  Homolog annotation: Hit_ID=Q75I59; Match level="QueryCoverage=71%, HitCoverage=100%, E-value=1e-119, Identity=77%"; Hit description =Expressed protein
  Pfam annotation: Domain name=zf-C3HC4; Domain location=154-208; Score= 2.0; E_value=0.053; Accession=PF00097.16; Description=Zinc finger, C3HC4 type (RING finger)
MDDDDAGEERGSVSTAGGGRRAVSAMAVGGEQGGAAAGWRKVPGRGGVGAKIYGADPLTRHVQRGIPVRQTGANKIGAGTQKLGANDDGAELRPSVSPLSRMPTSAIQYMWGFASNAWASGLGKRSPPNCTSSSAACSDDEASSCTSREEGLECPICWESFNIVENVPYVLWCGHTLCKNCVLGLQWAVIKVPTVPMQLPFFVCCPWCNLLSLRILYKGNLTFPRKNYFLLWMVEGMNGERARSRPATHSEQHTPWLSSSSRANGNAGCSNPTRRHLPLPPPVDTTSPTNANHANHGVPVPLLNAERVQASLRKSLSFLVHLTAKFPLVFIFLLIVLYAIPASAAVLLLYILITVLFALPSFLILYFAYPSLDWLVREIFA

SEQ ID NO: 48333 - protein, 974 aa, Zea mays
  Coding DNA Sequence Number=SeqID_4958
  Gene Ontology: Mol. function=nucleoside-triphosphatase activity; Cellular component=mitochondrion; Biological process=protein metabolic process
  Homolog annotation: Hit_ID=Q4LDR0; Match level="QueryCoverage=92%, HitCoverage=92%, E-value=0.0, Identity=81%"; Hit description=Heat shock protein
  Pfam annotation: Domain name=AAA; Domain location=281-475; Score =62.9; E_value=1.1e-15; Accession=PF00004.20; Description=ATPase family associated with various cellular activities (AAA)
  Pfam annotation: Domain name=AAA_2; Domain location=680-849; Score =369.3; E_value=6.5e-108; Accession=PF07724.5; Description=ATPase family associated with various
  Pfam annotation: Domain name=AAA_5; Domain location=281-421; Score =10.8; E_value=0.00043; Accession=PF07728.5; Description=ATPase family associated with various
  Pfam annotation: Domain name=AAA_5; Domain location=684-840; Score =19.2; E_value=0.0001; Accession=PF07728.5; Description=ATPase family associated with various
  Pfam annotation: Domain name=Clp_N; Domain location=174-225; Score =57.5; E_value=4.5e-14; Accession=PF02861.11; Description=Clp amino terminal domain
  Pfam annotation: Domain name=Clp_N; Domain location=97-149; Score =60.6; E_value=5.5e-15; Accession=PF02861.11; Description=Clp amino terminal domain
  Pfam annotation: Domain name=Sigma54_activat; Domain location=654 -827; Score=-187.3; E_value=0.09; Accession=PF00158.17; Description =Sigma-54 interaction domain
  Pfam annotation: Domain name=Torsin; Domain location=636-884; Score= -155.5; E_value=0.0012; Accession=PF06309.2; Description=Torsin
  Pfam module annotation: Pfam domain module=AAA::AAA_2::AAA_5::AAA _5::Clp_N::Clp_N::Sigma54_activat::Torsin; Domain location=281 -475::680-849::281-421::684-840::174-225::97-149::654-827::636-884
  Subcellular localization annotation: CTP_CleavageSite=71; ConfidenceScore=5.54e-01
MAAAPPLSADVLSFLTSAPAAPTPVVAAAWGAARAGPVRGKAALRTTRGGRGGVLAPLVGRRPRRTPLSVRCNATSRDGRITQQEFTEMAWQAIVSSPEVAKESKHQIVETEHLMKSLLEQRNGLARRIFSKAGVDNTRLLDATKKFIQRQPKVLGEEPGSMLGRDLEALIQRARDFKKEYGDSYVSVEHLVLGFAEDKRFGTQLFKDFQITVKTLKSAIESIRGKQNVIDQDPEGKYEALDKYGKDLTAMARQGKLDPVIGRDDEIRRCIQILSRRTKNNPVLIGEPGVGKTAIAEGLAQRIVQGDVPQALTNRRLIALDMGALIAGAKYRGEFEDRLKAVLKEVTDSDGQTILFIDEIHTVVGAGATNGAMDAGNLLKPMLGRGELRCIGATTLDEYRKYIEKDPALERRFQQVYVDQPSVEDTISILRGLRERYELHHGVRISDSALVAAAVLSDRYISGRFLPDKAIDLVDESAAKLKMEITSKPTALDEIDRAVLKIEMERLSLTNDTDKASKDRLSRLEAELSLLKDKQRQLTEKWEHEKSVMTKIQSIKEEIDRVNVEIQQAEREYDLNRAAELKYGSLNALQRQLQTTEKELDEYQSSGKSMLREEVTQDDIAEIVSRWTGIPVSKLKQSDREKLLYLEEELHKRVVGQDPAVKAVAEAIQRSRAGLSDPNRPIASFMFMGPTGVGKTELAKALASFMFNTEEAVVRIDMSEYMEKHSVSRLIGAPPGYVGYEEGGQLTEAVRRRPYSVVLFDEIEKAHLDVFNVFLQILDDGRVTDSQGRKVSFTNSIIIMTSNVGSQYILNMDEEDGSSDSAYENIKRRVMDAARSVFRPEFMNRVDEYIVFKPLEREQINSIVKLQLARVQKRIADRKIKLDVSPGAIEFLGSLGYDPNYGARPVKRVIQQYVENELAKGILRGDFKDEDSIFVDTQVTVPSNGQLPLRKLVFQKVGEQSKPAAEGEKFLPAV

SEQ ID NO: 48334 - protein, 246 aa, Zea mays
  Coding DNA Sequence Number=SeqID_4959
  Gene Ontology: Mol. function=hydrolase activity, acting on acid anhydrides, in phosphorus-containing anhydrides
  Homolog annotation: Hit_ID=Q53PH9; Match level="QueryCoverage=38%, HitCoverage=8%, E-value=1e-25, Identity=62%"; Hit description=HUA enhancer 2
  Subcellular localization annotation: CTP_CleavageSite=59; ConfidenceScore=5.40e-01
MATLSSSLCSSFASLRTASIGHPRVIMSSTPRTAYQLGSDSVNKGQYPISTTHTAPGICTMLPVKYNFRQALPEIAQKITRLENEIPCLILLARLAHFLLHTDLAEHHKLGLDISELEKKIIYEMMRPERTLLYLVPGRLVRVRDGSTDWGWGVLAGITFTGDPAKNKKDLFGAIAMVLRVVGGKNSQLSLPTRYSLNTIFTSLIGLFWNTNYEFGKKRKHARIIDKKIAKKKSEAVEYQKLLPIG

SEQ ID NO: 48335 - protein, 32 aa, Zea mays
  Coding DNA Sequence Number=SeqID_4960
MSNRGKYATQSLWKFRKGRLTGSAFDKTANGK

SEQ ID NO: 48336 - protein, 185 aa, Zea mays
  Coding DNA Sequence Number=SeqID_4961
MNRHRHSRCHYKRNSGSVPAGGADGLDGGYAFSSCHHVSTDGGVRLSTNAAPASAGTPKRTGSNSSPSLAWLEDASSSELEDGFHHQKLEEEVASRPVWEVEPRLTSLSAPARMMKILEAEGGAEIPSRAESSPTRSKVLPLRHGGWVPRVMQAGQGQKKPNHHARCAQLPSGYEHSSTFAQTSG

SEQ ID NO: 48337 - protein, 363 aa, Zea mays
  Coding DNA Sequence Number=SeqID_4962
  Subcellular localization annotation: CTP_CleavageSite=41; ConfidenceScore=5.58e-01
MPSHSPHALRPSTFRAPGWGAPALLSSCCCWRSATLWKLVPFSHRSASRIFIRQPAASPRRWSPKTVTTSLMVGRSKPGYGLCPALSFKDLHHPCWGGGRAESELYLPYGPAGHLLLQHYGERALAGLAEGADFDNAGLIGRKRCQLQHAWFAGSGAASGATSHRWAECGYLPAVRAAVAPRAPGDRPRRRALLGRRSCSWVVLPLLRYDASARRSVLARPGGPEWGSAGGQMAAIVGAEVVAAEEVLVADEIAATICAPGLRLFGFDSLSSPLEWGCGRGPYRSSVCPEVIAAVVWPPGAEVVVAAAGVGGGEPPGILSSRRPSNVGGCSYLRGWNWSSVCNGTLSAGVCSLRLSGPEHRGI

SEQ ID NO: 48338 - protein, 241 aa, Zea mays
  Coding DNA Sequence Number=SeqID_4963
  Homolog annotation: Hit_ID=O48967; Match level="QueryCoverage=30%, HitCoverage=15%, E-value=1e-19, Identity=63%"; Hit description =Putative uncharacterized protein
  Subcellular localization annotation: CTP_CleavageSite=56; ConfidenceScore=5.30e-01
MVGPSPRSGEAEAPLRSRLSPSPGVGRGGDHRPRSRLSPSPRVESEPRGRARRRLSSEVKVESEPWGQARQSFLWRLRPDLVAVSLTLTGGTAVGAAQAALFSCQAILALNAPAIWSAGEAIWPRLLLREACPSWASGESKLCADGGYQLRLGVLEDGKKKKKKNRGNEKLHSAALVVAAATGGRGDRSKRSRPPRGNGDTCPVHSNGHHDAVECREIIDLVKRVSARHEQSSGDDSPPRR

SEQ ID NO: 48339 - protein, 106 aa, Zea mays
  Coding DNA Sequence Number=SeqID_4964
MWSLEGCCRMAHRTLSGAPATSVGRWVLTVGALTGGASGLSGGAPDRSCRLSVFGPYAPVERIARADVPMPYAVNLERMAAPQINYAYARDNETLFDIISVKIPSF

SEQ ID NO: 48340 - protein, 977 aa, Zea mays
  Coding DNA Sequence Number=SeqID_4965
  Gene Ontology: Mol. function=hydrolase activity, hydrolyzing O -glycosyl compounds; Cellular component=chloroplast; Biological process=carbohydrate metabolic process
  Homolog annotation: Hit_ID=O24421; Match level="QueryCoverage=84%, HitCoverage=96%, E-value=0.0, Identity=90%"; Hit description=Starch branching enzyme IIa
  Pfam annotation: Domain name=Alpha-amylase; Domain location=353-689; Score=-31.9; E_value=1.1e-07; Accession=PF00128.15; Description =Alpha amylase, catalytic domain
  Pfam annotation: Domain name=Alpha-amylase_C; Domain location=783 -886; Score=72.6; E_value=1.3e-18; Accession=PF02806.9; Description =Alpha amylase, C-terminal all-beta do
  Pfam annotation: Domain name=Isoamylase_N; Domain location=225-309; Score=106.6; E_value=7.6e-29; Accession=PF02922.9; Description =Isoamylase N-terminal domain
  Pfam module annotation: Pfam domain module=Alpha-amylase::Alpha -amylase_C::Isoamylase_N; Domain location=353-689::783-886::225-309
  Subcellular localization annotation: CTP_CleavageSite=17; ConfidenceScore=5.28e-01
MASFAVSGARLGVVRPGGSARSGGERRSAVDLPSVLFRRKDAFSPCKLVVSWFLSVELALEFAGTVLSCAGAPGKVLVPGGGSDDLLSSAEPVVDTQPEELQIPEAELTVEKTSSSPTQTTSAVAEASSGVEAEERPELSEVIGVGGTGGTKIDGAGIKAKAPLVEEKPRVIPPPGDGQRIYEIDPMLEGFRGHLDYRYSEYKRLRAAIDQHEGGLDAFSRGYEKLGFTRSAEGITYREWAPGAYSAALVGDFNNWNPNADAMARNEYGVWEIFLPNNADGSPAIPHGSRVKIRMDTPSGVKDSIPAWIKFSVQAPGEIPYNGIYYDPPEEEKYVFKHPQPKRPKSLRIYESHVGMSSPEPKINTYANFRDEVLPRIKKLGYNAVQIMAIQEHSYYASFGYHVTNFFAPSSRFGTPEDLKSLIDKAHELGLLVLMDIVHSHSSNNTLDGLNGFDGTDTHYFHGGPRGHHWMWDSRLFNYGSWEVLRFLLSNARWWLEEYKFDGFRFDGVTSMMYTHHGLQVTFTGNYGEYFGFATDVDAVVYLMLVNDLIRGLYPEAVSIGEDVSGMPTFCIPVQDGGVGFDYRLHMAVPDKWIELLKQSDEYWEMGDIVHTLTNRRWLEKCVTYCESHDQALVGDKTIAFWLMDKLGSEISRSPLSIDLVGLLAEDMYDFMALDRPSTPRIDRGIALHKMIRLVTMGLGGEGYLNFMGNEFGHPEWIDFPRGPQSLPNGSVIPGNNNSFDKCRRRFDLGDADYLRYRGMQEFDQAMQHLEGKYEFMTSDHSYVSRKHEEDKVIIFERGDLVFVFNFHWSNSYFDYRVGCFKPGKYKIVLDSDDGLFGGFSRLDHDAEYFTAVSPGSEYCGSLGSEYCSTQSASLILLPPYNILVDNDPFTDSYYRTGRMTTGRVLSRSMHPAEQPSYMHLQVQRTNRAQQRLLGKNFRGMCCWWTDTTATRDAARCCPRDHVAGRSAIQVDRLAYR

SEQ ID NO: 48341 - protein, 124 aa, Zea mays
  Coding DNA Sequence Number=SeqID_4966
  Gene Ontology: Mol. function=transcription regulator activity; Cellular component=nucleus; Biological process=regulation of transcription, DNA-dependent
  Homolog annotation: Hit_ID=Q32SG6; Match level="QueryCoverage=40%, HitCoverage=5%, E-value=6e-19, Identity=88%"; Hit description =Protein HIRA
MKLRRESQINNLSSLNLFITSFLGGLKRQQILSLCMMFPISSTFVCCYRYSKGYIYHVLKMWITLGCPCQPSCFSYDISLKYWLRIVDDCFPASNFASTFSFPQGGELGKLQIDISKFMARKPG

SEQ ID NO: 48342 - protein, 761 aa, Zea mays
  Coding DNA Sequence Number=SeqID_4967
MAERYQLPRSCVPPTTRRKDCGCPPSGGPEGGKTRRIREREDMVAFQGGHPPFKGDSPYLRPQPSWAESSPTRSKVLPLWRGGWVPRVMQAGPGQKKPNRRARCMQPPSGYRHSSAFAQTSRPTRHATGALVATCEQLHRHSHHCHASSTMEPAGRSSGHVVSQAYVPSRGSERALSHGVKMARPRFVPRMARARATAASRTTRPVALTPRRDRRRLWQEKQATLRLRHNDRVQRGTGKGDTPKRILLREGNRLRASLLIRGSKAGPSEGFNSRLRARGPRTHYWSEVRRPAPRKGSTAASGYSGSAPTTDQGGNDLVTESHQREASSPRTPSKGDRVRQITRSRQSRSDRSHFAAPLTGLTRGQRRLRRSDCCATRQSEADRQPGPASGTIGNSASPDPGLGLGLSPGRRRTPLRPTQGSDSGSAPEDDELRFARPQGSDSALASADGLRLARPRGSDSTSASEDRLNLDLGGASTSPNLGHGPTTSTGGAIITLPQADSGYEEQDRRPIWLAPPDKLQRSSDGHDTTRTGCQNLSGCHDGMALLQRVGRAGKRMGQALARGRSLPSAWTLVTPYCKRTRPGRGTNTKAAGFPPLSLSGCLPPSRSVSRRPIWAGARGDNLLVGPGTPPPSRNADRRIYGRGREVGAREGSSALEDGAASALGDGVGGVCGNGGCGVGLRGLRDGGCEVSGDGVWGGRAAGSTGSAGMTSAGRQGLRGWHLWVDSCGNGGCRRKCGVRGPFPSPVTRKRELIGKLTYPPE

SEQ ID NO: 48343 - protein, 202 aa, Zea mays
  Coding DNA Sequence Number=SeqID_4968
MNKRPAFKVPLQTELRFHLRRYEQPHTIGGPAEQQKTDERLVVARSSSGDDDDFCSGGPNSSSDDLRADAAAMRPSLVPSLVRQGRAEGRRVGGRSVGGPGYLVGGRTSSSCRGGRRRRERLRSHSGQRARHAAAASATSGERSSPRSLREGAGRRPRRGRPQLGTLPSPALMMKILEAEGGAEAAARLAFPRHRTGGHRLG

SEQ ID NO: 48344 - protein, 438 aa, Zea mays
  Coding DNA Sequence Number=SeqID_4969
  Gene Ontology: Mol. function=helicase activity; Cellular component =intracellular; Biological process=protein amino acid phosphorylation
  Homolog annotation: Hit_ID=Q8LML8; Match level="QueryCoverage=86%, HitCoverage=26%, E-value=1e-144, Identity=67%"; Hit description =Putative DNA helicase homolog
  Pfam annotation: Domain name=DUF889; Domain location=323-438; Score =6.1; E_value=6.7e-12; Accession=PF05970.5; Description=Eukaryotic protein of unknown function (DUF889)
MPDGYRHKRLYGEYIVSICMVLNKDNIDKSMLTEYFRANQLFDWASNYLYREFPEVARWWPDNSIDECLTEASGFHMPPSLRRLFTMILDFCEPTDVVGLWDKHLEAMSDDFYRTHSNSHVVEQLVLMDIRDMLQTMGKDIRLFPLPAIKDEHDNMADVVREIFEKMSILEDLEAEFVVSSLNHEQRHAYDVILSSMENISGGVFFVDGLGGTGKTILYKALLATVRRSGKIAIATATSGVAASIMPGGRTAHSRFKIPLNIKEGDVRRFTKQSGTSKMLRRSSLILWDEATTTKRQAIEALDKRMRDIMDRPDLPFGGKTVVFGGDFRQVLSVVRKGTRAQIINSTLHRSSLWDSMQHLRLVRNMRAQSDQWFSNYLLRIGNGIEETCNDANVRLPDEICIPYTGEDDDVDRLIEEIFPSLETNMHNRDYITSRAIL

SEQ ID NO: 48345 - protein, 106 aa, Zea mays
  Coding DNA Sequence Number=SeqID_4970
  Subcellular localization annotation: CTP_CleavageSite=69; ConfidenceScore=5.40e-01
MEVDGGLILKYYGGSYANHTIMDPRSRSDRTKSTSPRPSAKDPAATTRVRRSSPCYTARNVLRLPLPVKLGAKPSSTDCSRLRAIQWQVIPPTAPGALPHRIHASA

SEQ ID NO: 48346 - protein, 541 aa, Zea mays
  Coding DNA Sequence Number=SeqID_4971
  Gene Ontology: Mol. function=inorganic phosphate transmembrane transporter activity; Cellular component=integral to membrane; Biological process=phosphate transport
  Homolog annotation: Hit_ID=Q1KSA4; Match level="QueryCoverage=98%, HitCoverage=100%, E-value=0.0, Identity=86%"; Hit description =Putative phosphate:H+ symporter
  Pfam annotation: Domain name=MFS_1; Domain location=29-473; Score =70.0; E_value=8.1e-18; Accession=PF07690.7; Description=Major Facilitator Superfamily
  Pfam annotation: Domain name=Sugar_tr; Domain location=24-534; Score =44.8; E_value=9.7e-11; Accession=PF00083.15; Description=Sugar (and other) transporter
  Pfam module annotation: Pfam domain module=MFS_1::Sugar_tr; Domain location=29-473::24-534
MAGGQNMQVLSALDGAKTQRYHFTAIVVAGMGFFTDAYDLFCISLVTKLIGRIYYTVDGSPRPGSLPPHVSAAVNGVAFVGTLSGQLFFGWLGDRVGRKSVYGMTLLTMVVCSVASGLSFGRSPACVMATLCFFRFWLGFGIGGDYPLSATIMSEYANKRTRGAFVAAVFAMQGFGILAGGAVAIGVTALFRSRFPAPPYDVDPAASTPAEADLVWRIILMFGAVPAALTFYSRMKMPETARYTALVARNAERAAADMSRVLQVDIGNKEQPGAEEEATTGTEARLRGEQEEATTGPPFGLFSREFAHRHGLHLVGTASTWLLLDIAYYSQNLFQKDIFSAVGWIPAAETISALDELFHIARAQTLIALCGTVPGYWFTVAFIDIVGRFAIQAVGFLMMTAFMLGLAVPYRQWTRPGNQTGFVVMYALTFFFANFGPNATTFIVPAEIYPARLRATCHGISAASGKVGAIIGSFGFLYLAQSQDPAKTAHGYAPGIGVRNSLLLLAGCSFLGFLLTFLVPEPKGKSLEEMSRETEPGAAEP

SEQ ID NO: 48347 - protein, 368 aa, Zea mays
  Coding DNA Sequence Number=SeqID_4972
  Gene Ontology: Mol. function=transcription regulator activity; Cellular component=nucleus; Biological process=regulation of transcription
  Homolog annotation: Hit_ID=Q10S44; Match level="QueryCoverage=81%, HitCoverage=82%, E-value=1e-103, Identity=69%"; Hit description =Basic helix-loop-helix, putative, expressed
  Pfam annotation: Domain name=HLH; Domain location=189-238; Score =43.5; E_value=7.7e-10; Accession=PF00010.17; Description=Helix-loop -helix DNA-binding domain
MELDEETTFLDELMSLRREAAAAASAQWQAAAAYTGGGGQGMMMGDLLFYGGTTEAAATATSGGGMDQLSPFHQQEPLQVQAPPHPHSHEEFNFDCLSEVCNPYRGGGVAVITGAEAAAVPGRALAALHDAMVEDETSGHLQGQQYGAGGSPTFVFGGAAGESSEQTPVVVRGAAGGPHHRSKVHGGGAPSKNLMAERRRRKRLNDRLSMLRSIVPKISKMDRTSILGDTIDYVKELTERIKVLEEEIGASAEDLDLLNTLKASSSSGSNEMMVRNSTKFDVERRGNGSTRIEICCATNPEVLLSTVSALEVLGLEIEQCVVSCFSDFGMQASCSQEEEDGNNKRQVLSTDEIKQALFRSAGYGGRCL

SEQ ID NO: 48348 - protein, 205 aa, Zea mays
  Coding DNA Sequence Number=SeqID_4973
  Gene Ontology: Mol. function=carboxyl- or carbamoyltransferase activity; Cellular component=ornithine carbamoyltransferase complex; Biological process=amino acid metabolic process
  Homolog annotation: Hit_ID=Q8SA97; Match level="QueryCoverage=57%, HitCoverage=22%, E-value=1e-19, Identity=49%"; Hit description =Ornithine carbamoyltransferase
  Subcellular localization annotation: CTP_CleavageSite=46; ConfidenceScore=5.01e-01
MAPPVDVAGLRPRLGDVEAPPKPRSSLSSVAKVKSEPLGRARRRPSAEARAESEPWGRAKRSSSSSGAKPESEPWVGRSGVRRLPGLSLSPSLGSGGAEFAVFQDLARVRALGRAERRLSPSLSPGSGGAEFAVFRDLARVRALGRAERSGAALLSGQSVERRSDDGHFGSVGWGARVRIKLYADGGYQLRIRSLEGTPNYGPRQ

SEQ ID NO: 48349 - protein, 203 aa, Zea mays
  Coding DNA Sequence Number=SeqID_4974
MNKNTGIQSAITNGTLVPPPQVRTTPLDGGGPAEQQETDERRAVARSSSSDDDDFCSGGPNSGSTDLRADDAAKRPPPMPKLVRQGRAEGRRVGGRSVAGPGYLVGGRTSSSCRGRRRRREQLRSRSRPRARHGAAAGATDDDRPSLRSLSEGADHRPRRGRPQLGTLPSPALVMKILEAEGGAEATARLAFPHHQAGGHHLG

SEQ ID NO: 48350 - protein, 380 aa, Zea mays
  Coding DNA Sequence Number=SeqID_4975
MAERYQLPRSCAPPAMRRKDGGYPPSGGLEGGKTRCIRKREDMVAFQGGRPPFKGDYPYLRPQPSRAESSPTRSKALPCGAGAGSHMSCEPAQSRSQTAVRGVHNRPAVTSDPPLLPRPTGERGGRPCRRHAGGMQPRQVGALLRLPTRPAWRPRPTCHATGAPNASCMQPHHHLRHHRVSSIAEPIPRLEATQCTTQQRQPGATVSAAKNGPAVMAVAGGREQRSRRRPSSRPIWGQRENPLSRRKDNAPVFRSSNGSRTRNGRLANHSPRRINSAAGQATPLGPGKGDTPKGILPCEGTRLRATLLIRGSKAGPPKGFDSRLRSRGPYTHYWSEVRRSAPQKGSTAFSGYSGSAPITDQGFEGWPPKGSQPPQTPSEG

SEQ ID NO: 48351 - protein, 478 aa, Zea mays
  Coding DNA Sequence Number=SeqID_4976
  Homolog annotation: Hit_ID=O48967; Match level="QueryCoverage=10%, HitCoverage=10%, E-value=1e-17, Identity=83%"; Hit description =Putative uncharacterized protein
MGRPKGATWQRETTHLSKFGLPQRDTGPIYIKVRSPREVRTLAGSQNKENPGGVKVIQQAARLLGLLANRRVHSATRPETSSPTFGVPGSQSPGTSHSCCARCTPVHGSANIPDSIKGVSGGVVSSQGVVATPSKLHGFTRGHEAMAGRRRPTAQYDTFYLDQIKDAVIPAPTRGISISALALSKGRIDQRPPGRTQPQACGRGRPGILGKGTRAPPKHRWTRPRSRLRCDYAADTNGHPVPNGCPLGRSGLRRTGGSSPRGVLATQVSAAPAEKIRRNIKPVGVSAGVRYRHHGSRWKHHCDGNILSCGLVWTCTDLAHEPHPRISLLLGRTLCAVRGELRQCLPVARCGGPPPCSKAGAQGNPPEVHLPLHQAATGGQGDRNKRPRPQNDSSGSCPVHPHGRHSAAECREIIDLAKRVSERHEQSSKDGSPPRRRPGKEKVDDVEVAAAERDLEYQSPEGDLKDIFTRGSYFGEDN

SEQ ID NO: 48352 - protein, 323 aa, Zea mays
  Coding DNA Sequence Number=SeqID_4977
METVSLLIPPKCLPPPSQELHVEQQSPSALEAASKQKEPIIFETEVRRSIRLREKAKVGLPEPRQLLGSLLPDGVPPGSEIQAPPAIFRRPCARADRLALGRGPSGRQAGNPSSCTRSRTVRPCAADRPRLTREHRRLAPGHGPSGPGRGPFAPDQRAPPPVLLSDWRLQKGVNILFGDSAREEVAGLQNQAYMADSKDLNSASPNSNTRLTNLSAAEHERLKDDMKKIDEEVQRQADQVLKVADKWFLSHFRVDCHQKAVQEREINAEYMSVVLQQLPTIGDARRQNNCAKYIDNKWVSPAIFWYADGLISRTSVTTIFAKW

SEQ ID NO: 48353 - protein, 382 aa, Zea mays
  Coding DNA Sequence Number=SeqID_4978
  Homolog annotation: Hit_ID=Q6Z7V1; Match level="QueryCoverage=78%, HitCoverage=41%, E-value=1e-127, Identity=75%"; Hit description =LMBR1 integral membrane protein-like
MAPRSVTLSPWLIEPRKESKNDIKSFRGSKHWYVDVLFPDSKTNQLCQLAYDLFVSFNASFFMVDMFLFQSHLTHCSHAPNLVCRMVARYAPPISYNFLNLIRLGGNAKTTFEKRMGNIDDAVPFFGRGFNKIYPLIMVVYTLLVASNFFGRVIDFLGSWKRFKLQQEEENIDGLDPSGMIIVQKERSWIEQGCKVGEHVIPLARNFNGVNTDIESQNVPLVGNTVEMKVGAASSRNDGRAGQLKYANSRETIASKYTSIREQNRQSGKAVKKEISSNSVSLLEERSSEQWSNTGIPPTGVSATWASMKIGFQNFKANLGSKKFLPLRQDPGFVLNLSVSSPESLDDIFQRLKRRPANVLVDYLDDDDNNNTRDMDVHFQDQ

SEQ ID NO: 48354 - protein, 177 aa, Zea mays
  Coding DNA Sequence Number=SeqID_4979
  Homolog annotation: Hit_ID=Q8SA97; Match level="QueryCoverage=41%, HitCoverage=13%, E-value=2e-07, Identity=47%"; Hit description =Ornithine carbamoyltransferase
MEPSGATAVGAVESLLTSSCFRKGAESRHRHRVWGAPSLPIWRSEPDGTQPESEPWVGRSGVRRLPGLSPSPSPGSGGAEFAVFQDLARVRALGRAERSSPSSGTWSESEPWVGRSRVRRLPGLSPSPSPGSGEAELPMVPSAGPDCLSVSLCQVAPQSKWRRRCCPSIRPVSGAAK

SEQ ID NO: 48355 - protein, 345 aa, Zea mays
  Coding DNA Sequence Number=SeqID_4980
  Gene Ontology: Mol. function=transcription regulator activity; Cellular component=nucleus; Biological process=regulation of transcription
  Homolog annotation: Hit_ID=A2X9U0; Match level="QueryCoverage=97%, HitCoverage=99%, E-value=6e-89, Identity=58%"; Hit description =Putative uncharacterized protein
  Pfam annotation: Domain name=HLH; Domain location=135-186; Score =58.2; E_value=2.7e-14; Accession=PF00010.17; Description=Helix-loop -helix DNA-binding domain
MALEAVVFPKEHLAGTAKARSASSLACGFRTEEVEDNGGVVLQGEASDAPGAGAATTWECWDAALCPCSTPPAGAVEECWDDVRHRLSASPPLPPAPSAAVAAPSSGHGKAAAAARRRRRQRPKAVKNTEEVESQRRNHIAVERNRRRQMNEYLSVLRSALPPSYPQRGDQASIVAGAINFVKELEHLLQSLEAQKRRRQGCTEPPAPAPFAGLFTFPQYSTAATGVVAGSGDGAGSGGGACAAGARRGVADIEVAVAESHASVKVVTPRRPRQLLRMVVALQCLGLTVLHLNVTTTADQLVLYSLSLKMEDQCRLSSVDDIAAAVNDILGKISDERASRHLLAA

SEQ ID NO: 48356 - protein, 245 aa, Zea mays
  Coding DNA Sequence Number=SeqID_4981
MDRATDVCFLELQDTIDLPRSWHIPDLVTPISTKLQRPDGRDSGQGSVHSKDTISSRPSPASGRNSIPRQIHASPEGLLKQRTRLRLARGLARENSVACPAPTVVPLARVRPTAAKTDLEHHRKLRLARPQGSDSTSTPEDGLRLAQPLGSDSTSTPEDDSTSTSEDGLHLARPLGSDSASTSEGGLRLARPQGSDSTSTSEDGLRLARAPGLGLSLDLGGVTASLDLGLGPITSQGGHHYPTPS

SEQ ID NO: 48357 - protein, 98 aa, Zea mays
  Coding DNA Sequence Number=SeqID_4982
  Gene Ontology: Mol. function=kinase activity; Cellular component =ornithine carbamoyltransferase complex; Biological process=amino acid metabolic process
  Homolog annotation: Hit_ID=Q6QP54; Match level="QueryCoverage=78%, HitCoverage=36%, E-value=5e-15, Identity=52%"; Hit description =Putative kinase
MALPVDVAGLCPRSGDVEAPPKPGSSLSSMAEAEPELLGRARRRSFGRGQGGVRALGSGEADPSPSPRSGGAEFAIFRGLARVRALGRAERSSPSSGA

SEQ ID NO: 48358 - protein, 365 aa, Zea mays
  Coding DNA Sequence Number=SeqID_4983
  Homolog annotation: Hit_ID=Q6QP51; Match level="QueryCoverage=33%, HitCoverage=76%, E-value=1e-15, Identity=37%"; Hit description =Putative growth-regulating factor 1
  Subcellular localization annotation: CTP_CleavageSite=68; ConfidenceScore=5.22e-01
MQAACNRTKGAHPFDFDASSMEAQAHTSCGRKQQSSRQQAHVPSRDRGRALSHGVKTTRPCSVPRTARARTTAAPRTTRPIALTLRQDWRHLWQAKQATLHLRHNDRVKKRDRERGYSKRDPSPRRKRAPSPLLIRGSKAGPSEGFNSRLRALGLRAHYWSEVRRLAPRKDSTAASDHWGSAPATDQGFVGWPPKGSDSRLRARRARDDPGYVRYITKARATLPSHFAAPLTDLTRKQRRLRHSDCCATRQSEADSSQPWLRKTTNSASPDPRARTQPRLWKTTNSASPDPGLGLSLGSGGRRTSPRPSPGLGLSLDLGRRTRPRPRRSLRFARPRARTDHVTGRAIITLPLTSSGYGEQDQRTI

SEQ ID NO: 48359 - protein, 539 aa, Zea mays
  Coding DNA Sequence Number=SeqID_4984
  Gene Ontology: Mol. function=structural constituent of ribosome; Cellular component=ribonucleoprotein complex; Biological process =metabolic process
  Homolog annotation: Hit_ID=Q2RA11; Match level="QueryCoverage=87%, HitCoverage=78%, E-value=0.0, Identity=71%"; Hit description=CBS domain-containing protein, putative, expressed
  Pfam annotation: Domain name=CBS; Domain location=230-348; Score =75.7; E_value=1.5e-19; Accession=PF00571.19; Description=CBS domain
  Pfam annotation: Domain name=CBS; Domain location=61-179; Score=98.5; E_value=2.1e-26; Accession=PF00571.19; Description=CBS domain
  Pfam annotation: Domain name=PB1; Domain location=441-525; Score =49.2; E_value=1.4e-11; Accession=PF00564.15; Description=PB1 domain
  Pfam module annotation: Pfam domain module=CBS::CBS::PB1; Domain location=230-348::61-179::441-525
  Subcellular localization annotation: CTP_CleavageSite=33; ConfidenceScore=5.51e-01
MSSTAAVALNRRTRSRPPSAASSRRSDDPTAAVASTANGNGNVPTKAASPDHASGERTVKKLRLSKALTIPEGTTISEACRRMAARRVDAVLLTDAGGLLSGIVTDKDIATRVIAEGLRVEQTIISKIMTRNPLYVMGDTPAIEALQKMIQGKFRHLPVVENGEVIAMLDITKCLYDAISRLEKAAEQESALAAAVEGVERQLGGNFSAPHNLIETMRERMFKPSLSTIITENTKVATVSLSDPVCVAARKMRELQVNSVIITAGNLLHGIFTPRDVLMRVVAQNLSPELTLVEKVMTAHPDCATLDTTILDALHIMHDGKFLHIPVLDGDGRVAACLDVLQLTHAAISMVSLSMAHALSFLIHLSNLSPSEMVFPLKVEGGPGAATDVANTIMQKFWESALALEQPPEEDFDSHSELPLVMPSDARDGSSSIYRPAVDNLFVFKLQDKKGRMHRFTCGSESLDELISSVIQRLGMVDEKRVIQLLYEDDEGDKVLLTTNSDLTGAVFCAKSSGLKVFRFSDVDPFCSVIPYLSHCGAI

SEQ ID NO: 48360 - protein, 124 aa, Zea mays
  Coding DNA Sequence Number=SeqID_4985
MGRRETDPERGEGDRQKGKHAAFVLSYAQVGRAEAPPRPRSSPSSEAEAESEPWARARQSSSSSGAELSPSPRVGERSSSSSGAEAESEPWGRARRSSSSSGAKAESEPWGWARRSSSSSGAEA

SEQ ID NO: 48361 - protein, 236 aa, Zea mays
  Coding DNA Sequence Number=SeqID_4986
REKADLRRQLAAERREANEAIAKEQAAQAEAKLARAEGNLAKELAEHLQERLTALESRAKGAEAVMRAEAERTRTQLMDTYRELGARTGDFEVPDREPGLGCLQWVQEELQELPAVVGGFMSYASLVTCEGAMNALSREGCRHFEVFDQADEDFDRDVYKVEDLVVKDSAGALYDRMWGPHGREVVRERAETAMAQRRLRHMPRTRQTCQVLAPGADDEGRLQSVGLARRKGLGFV

SEQ ID NO: 48362 - protein, 145 aa, Zea mays
  Coding DNA Sequence Number=SeqID_4987
MAGMPTVFPGTRPPRNPDAKRNWEGSELGTCVLTTIPVVTRSAHDDPRICNGGVEFPAPQSGIPPGFATNRPATPGRTTTAYPNGENVARAGNPRSGAAMFLPTVWIPRRGYVEGSRERAAQGRRKSQHGAWYTLYPRCWDLSSA

SEQ ID NO: 48363 - protein, 103 aa, Zea mays
  Coding DNA Sequence Number=SeqID_4988
MKKQAARGQLTSGTALGLVCGPGKSTGPQEEVHGHVGRDWVASMQEFLVGVWTSPPSAALRRHHHYNLGESQCSALTILFGKPYTSRELPPLATSCTLFPTTC

SEQ ID NO: 48364 - protein, 78 aa, Zea mays
  Coding DNA Sequence Number=SeqID_4989
  Subcellular localization annotation: CTP_CleavageSite=61; ConfidenceScore=5.16e-01
MVVQGASLAEVQGKAASQTPPPTEARGKSPTAPAPTPGVGTPAPRVGDDAVSSAGWTGLTSCNAVDASPEVAHFTHKP

SEQ ID NO: 48365 - protein, 67 aa, Zea mays
  Coding DNA Sequence Number=SeqID_4990
MGGAAGRGLSCGGGATGCATGWRCWAALSGRRGEVRRGGGGAVGRRYGGGAWGGAAGMTLENYALLL

SEQ ID NO: 48366 - protein, 16 aa, Zea mays
  Coding DNA Sequence Number=SeqID_4991
MQQPILDAVKTLDICV

SEQ ID NO: 48367 - protein, 245 aa, Zea mays
  Coding DNA Sequence Number=SeqID_4992
MSSTSVSGGVGRKRSRSGSGIIADTTCGHHILRIDGYSHTKVVPTGAYLKSQPFTIGDMPPRTRKTARKSTGPIGVPRHQLAPRHEESSSSNDPIGDLEAQVEQLRTELRVWVEDGQRINELRADVRHLQDELAEWDLAIDWAVNSRSIAWDQEAKPRARVDELSTVVDNLQVYCNTLHEEVHELYSRLHPDVPADPVGMGAGSSGTAGEALGGELDLFKPPPSMNLADERSPTIDSEATKDDKY

SEQ ID NO: 48368 - protein, 211 aa, Zea mays
  Coding DNA Sequence Number=SeqID_4993
  Gene Ontology: Mol. function=hydrogen ion transmembrane transporter activity; Cellular component=integral to membrane; Biological process=proton transport
  Homolog annotation: Hit_ID=Q06572; Match level="QueryCoverage=53%, HitCoverage=17%, E-value=6e-40, Identity=69%"; Hit description =Pyrophosphate-energized vacuolar membrane proton pump (EC 3.6.1.1) ...
  Homolog annotation: Hit description=(Pyrophosphate-energized inorganic pyrophosphatase) (H(+)-PPase)
  Pfam annotation: Domain name=H_PPase; Domain location=1-200; Score= -518.7; E_value=0.0002; Accession=PF03030.7; Description=Inorganic H+ pyrophosphatase
MACCYSKEEMIGSSDKVVKTTWHDVSCQITKINMYKHQRLRKAALKEEEHLFVSVNGTITLLGLTDSMSSDNAGGIAEMAGMSHKICERTDALGDTGNTTSAIRKGFAIGSGAIVSLVLFGAFVSRAGVKFSTMTMKSVGSVALKMVEEVHKQFNTIPRLMEGTGKPDYATYVKIFTDASVGPCSQMLYTKNKATQLLMIRDIRPSKHYFP

SEQ ID NO: 48369 - protein, 160 aa, Zea mays
  Coding DNA Sequence Number=SeqID_4994
MGCCIARLAAHFDEQPAGTTTNSEEGAHGLGRGNRAKKVAVQGAWPKVKGVLCIGSRRPATEAPAMGGRKGHLLARGRRRGGVMDAMEGASARRGRRARLPALGLKGNKEGGTALGRGDELGAGRWRRHGRELAAAPGKKELSSLLQPRGRRDREEGSCA

SEQ ID NO: 48370 - protein, 132 aa, Zea mays
  Coding DNA Sequence Number=SeqID_4995
MVLPGGGGVFLVTAAQGLTWGGWEHGIGRGAPATTPFMAARDWFVHALNGFRPVRLTEFARAERRRKRETLTERAPRGSGRRSELSARASDRQAGPACQRQALSGLRGGVKALGRKEIQTFVAHHLQILFVH

SEQ ID NO: 48371 - protein, 81 aa, Zea mays
  Coding DNA Sequence Number=SeqID_4996
MVLPGGGGVFLVTAAQGLTWGGWERGIGRDAPATTPFMAVRDWFVRALNGFRPTCLTEFARAERRRKRETLTERAPRGSGR

SEQ ID NO: 48372 - protein, 86 aa, Zea mays
  Coding DNA Sequence Number=SeqID_4997
MRVEWGALSRIIRGSGCSSLSRRAVNGARSSPLQPNRILAEYVDVYSPLLYTPNPPSPGCQHCNHCSGEDEAVEGDFQEFQDYDEF

SEQ ID NO: 48373 - protein, 85 aa, Zea mays
  Coding DNA Sequence Number=SeqID_4998
MEVRCQTSFCQNEDGFPKLLKACTVRLGIRSQPEYDGREFIEHSTKKCVVTVYIGSSLHHVELLGLCFVAEGLIERSDPRMKLFV

SEQ ID NO: 48374 - protein, 100 aa, Zea mays
  Coding DNA Sequence Number=SeqID_4999
MGADRRARGVGRACTKRYPRSGSCDQDRTREIRPGRDKRLRAVLLFSAASSGWLGAVSRVLDGWGSGCGSPATSGGVGRARERAELCEMRRGSFPIPNSN

SEQ ID NO: 48375 - protein, 90 aa, Zea mays
  Coding DNA Sequence Number=SeqID_5000
MMLVDYTIVLDGPSVSVEGPTQLGIESVVDMTPVSGVTSDGSSDPSLWLRLLRELRTVARTTTGVVIVSVSIRVSSSSRDALWWCRDIFG

SEQ ID NO: 48376 - protein, 111 aa, Zea mays
  Coding DNA Sequence Number=SeqID_5001
  Subcellular localization annotation: CTP_CleavageSite=44; ConfidenceScore=5.61e-01
MGKSKKGGSSSHHSGDKRKHEPSPPRRTSATLSTRRRSFPPSPRDEENSSDSSGEESGRDGDDEGDSGDGGDDGGDGDGDGEDDGDGGKGDGGSGEGGSGSSKASGKAPLA

SEQ ID NO: 48377 - protein, 57 aa, Zea mays
  Coding DNA Sequence Number=SeqID_5002
MAGGNTLAGAKERWLAGEEIWSQEIWSVSLPKPEANPGFVVSRARVPMPSSGTRQRG

SEQ ID NO: 48378 - protein, 153 aa, Zea mays
  Coding DNA Sequence Number=SeqID_5003
MAVMGSTSKKMYLCQGVPRHQLAPRHEGSSSGSNDPIGDLEAWVEQLRSKLRHRNRAREQDSHRIAELSAEVSRLQYEISERDTTIDWAVNSRSFVCDCEARALARVAELGASLESLQVYCNTLHEEVHVLYARLHPGVPPDVAAMGARIGNS

SEQ ID NO: 48379 - protein, 21 aa, Zea mays
  Coding DNA Sequence Number=SeqID_5004
MTPWLIGPNSSSKILEFSFRI

SEQ ID NO: 48380 - protein, 169 aa, Zea mays
  Coding DNA Sequence Number=SeqID_5005
MWKDQVEHAKDVWALYPGQTAHLTVRCMNALYRLQAVRGEAMPQLMGLVEATKITLDNREDLVVDLSTELVEKDLQVEQMATQIQELEELVGARENTIKVLEDQLMNTQQQLEEANQHLDMHHQEIQDMEADEDVDIEGGVELEPASSLDTAGSGRPPPLESSVAPFAH

SEQ ID NO: 48381 - protein, 101 aa, Zea mays
  Coding DNA Sequence Number=SeqID_5006
MAKYELRSGSLCLRRRLQFPFNTPMTWFEIHLQNILVIAYERDVIKVPQGLPHPKQLRATIDLRQCTRLRRWKERPNFASLKPMTPRIFPRTGKSPMCSSY

SEQ ID NO: 48382 - protein, 313 aa, Zea mays
  Coding DNA Sequence Number=SeqID_5007
  Homolog annotation: Hit_ID=Q60EK4; Match level="QueryCoverage=36%, HitCoverage=29%, E-value=5e-08, Identity=31%"; Hit description =Putative uncharacterized protein OSJNBa0032D15.11
MARGRSQKNKKTPPKENNEEEEENERWRPNDESTSPKGLSSHFGSHICCVANENDSGSTNEDEEDERSLMQLYAHLSQEDKAVMLKFLKRARKQSKALHMLEDILNIKMQCFEELTKEHKELKCSHVNLVQSNSSFELEFPGTKDDTCQKLKEENERLRTSLTQLKGNYTTQPSQDNRDYMVKKLETGTTVACTKPFEEKVKDLRIVKRKEQNKKITTSAKSLNHASTQGNIQDNDQAILRAKKIIYESFFDRTSRVIRPTYSCPCLTDIRHPVDVPKSLDKLGIFPYLTRNVSPVLQTLQNIGDKEMRKRIT

SEQ ID NO: 48383 - protein, 123 aa, Zea mays
  Coding DNA Sequence Number=SeqID_5008
MAAVPGTARAGSAVVSGNGVRDGLCRAQCRLVRRRVAGLWDGASALGDGDGDGAAARSRRDGFLGSGTGRRRSGWGRAAGMARSWSDSGLVEARGWGVGAWGRGVGARGRGWRWRGGLRDRRG

SEQ ID NO: 48384 - protein, 157 aa, Zea mays
  Coding DNA Sequence Number=SeqID_5009
  Gene Ontology: Mol. function=protein transporter activity; Cellular component=clathrin adaptor complex; Biological process=intracellular protein transport
  Homolog annotation: Hit_ID=A2XBP1; Match level="QueryCoverage=41%, HitCoverage=8%, E-value=8e-26, Identity=92%"; Hit description =Putative uncharacterized protein
  Pfam annotation: Domain name=Prp19; Domain location=74-126; Score =18.5; E_value=8e-06; Accession=PF08606.2; Description=Prp19Pso4-like
MHLDAEKEMMSQRVTLLGKFIAVREPNIRYLGLENMTRMLLVTDVQDIIRRHQAQIITSLKDSDIRKTSCYFADIFLQEWDALMLSNFSLEQQLHTARQELSHVLYQVLSQDCLKRAMEVELKSIQENQTWEIADLPRDHKAIGLKWVFKIEECTAV

SEQ ID NO: 48385 - protein, 227 aa, Zea mays
  Coding DNA Sequence Number=SeqID_5010
  Pfam annotation: Domain name=zf-CCHC; Domain location=75-92; Score =12.1; E_value=0.023; Accession=PF00098.14; Description=Zinc knuckle
MCDDVQICNRCVLLVENVVMETCSNEVAKENEQLKQEVARLGKALYDKKVKAKQIQPSYDNTTAGVKKPLGGETVICRICHKEGHKSCQCKAKTRDKKKQKLKQKPTSKITNTYINKVDKKAATPYLIKKKKNGKVIANKANKQANKGKGAKHKLGAKGDYLNHEKHQEGLDPKRKVRSPKDFGEFCHTRVSGAPKPGREIITKCARTKSHTYDDSWYRNEYHVIYI

SEQ ID NO: 48386 - protein, 67 aa, Zea mays
  Coding DNA Sequence Number=SeqID_5011
MPLIKVYNNDSDPYGLKGHSIFKSVRPFIFGYAVIPKLHEWTFGDEAWSQQYRMTKSKTNDPKLDGY

SEQ ID NO: 48387 - protein, 205 aa, Zea mays
  Coding DNA Sequence Number=SeqID_5012
  Homolog annotation: Hit_ID=Q10EW2; Match level="QueryCoverage=27%, HitCoverage=10%, E-value=9e-17, Identity=78%"; Hit description=Auxin- regulated protein, putative, expressed
MMMGELDCLSENPKLMGIKLEEQEYFSRSLVETKKMQRDGPAERYPALKRSSSYNAESNRGGRKGGGAYRRRDCSGEVVEDEGEVSGITTGGPRDAREDMSARNWAGTHWIARSTRGGRIPKSGEVDLGPPVKSGRVRGLGKLHGLLAELAEALACPEDGWSGLATVDEALAAMAGGIALAGAKGKWLAGEGECGAKWGAPGKAL

SEQ ID NO: 48388 - protein, 726 aa, Zea mays
  Coding DNA Sequence Number=SeqID_5013
  Gene Ontology: Mol. function=binding; Cellular component=cellular _component; Biological process=negative regulation of apoptosis
  Homolog annotation: Hit_ID=A2YIA3; Match level="QueryCoverage=89%, HitCoverage=42%, E-value=0.0, Identity=71%"; Hit description =Putative uncharacterized protein
MVFLQRSRPVNPRKRPAPPPELEPEPEPPRPGPDASSAVDAAAALLADAGCTLLVPPHQPPSLPSPHSFAARLSRKLSAGGDASSPSAPARRLLEGLAAFAASSPARLRQLLLPTAPHEPSLARALLSVPALQPGLLALLLEKLPEHFGGDGALDGSPLQDDVGRLIVSQFRWLDFLADADAFVDKLVEVLSVAPHRLKKEIIGSLPEIVGDKSHAAVVAALEKLLQEDSEIVVAVLDVLSDLNLNEELQEQAVTVAISCIRTIAPDQTPHLLRFLLLSATPVNAGRIISQIREQLKFVGVVDPRAARSKKLKGKASANSTDGAILDTLRSGLRFKNHSTADWGSSPLKLFEIIFATMFKMLCEAFLKELKSVDHPRDHKVIDVWLIMLIYANGGALEKAAKKILKSKILHECIRETLFDQCIHGNTELVKEHFMSYLSVSDYLLACKEEKAREFAAYLFTALFEEFTDTYSRQELVGSLVTHIGSGVSYEVSSALDIMISLTSNNSEELIPISSHITGILDYLESFGEDNLRKVYDIFCRLALAAGFNTGSGGSSVANEVLMVVRKQVSNPDMKYRRMGIIGVLRIVSTIASTDVNAAVNCSSSQQPNCEEALELLKMSVNSCKFVTLLLIFLYDELAALLDSKVIHSSIHDWVGEHVAELFETPFLADLENGELPEKYLCDGIEGELWMKLDGNISPIPILLADPYVPIFTFNNILNCLGVEYF

SEQ ID NO: 48389 - protein, 723 aa, Zea mays
  Coding DNA Sequence Number=SeqID_5014
  Gene Ontology: Mol. function=binding; Biological process=negative regulation of apoptosis
  Homolog annotation: Hit_ID=A2YIA3; Match level="QueryCoverage=99%, HitCoverage=51%, E-value=0.0, Identity=54%"; Hit description =Putative uncharacterized protein
MQLNAFGTQVESRVDNVSQKARNETAVKLLKRLRNLILLEGLLNAFLKDYPLSLPELRYLGDCSGSASTSKFNIPKNMGEESINGASSKRQKGCKGKVSEKVNPDDKLKQPTILDAFKRAGVTVSQATNKASSQPSSSGMMSKDIEQDATDPGELGLIDLMAAPVKLDMQRYKFRTIRATCLSLLNYSECQGSSSYLQTELPTYLYLLRDLHNKLDNLNPSIKPFLSTSKAKYTPTHCHKSTQDFLDKIQPLFLVLRKHLDGAVSMIKDESESCSDDWSSHSSSAGNPDIPYVVVSKSSIVTAVCKEILGCYRKLLGIPDLLNQPNMSILKQLLQTLQPTENFDDVLSEFQPSLAPCNVDYLYCGACKILEDIMDSVSSFSYLLSSNVLITIQSIVNSVVVLLDKSGEPNGKNIHMGCSKAIIPFLRKRLGYSAHKLLSADFPSEDAGKGWQSKGDLIQKILQIYLRNSDSTSDLLAEIGRELPKHEENTGSLNKTIKQALKARGSVDTILQEIQKSVDAFVSLIGMCKSHEKVSMHAMAVKHGGKFIDTFLKAFNFLERHFEQHNDTIVKMVRVSHVPFGITDELQWLVSVADEIMLIQLKQLQKGTRIIQSICSDAKGNKRTMITSKVPPAKRSMERFLFQVKALLHSCSAEKEFQMGNLKHKDLQGHVVSSQAYGNVDEEDEEQTEVDSDLPADEHDNGNAMEEDAVEGSNETPMEEEEE

SEQ ID NO: 48390 - protein, 107 aa, Zea mays
  Coding DNA Sequence Number=SeqID_5015
MQLCIRQSRAVEGSDENGDICARIRNAAASARVREGNGKQGWVIGTVEQTRDCSPSVNRGNVRKKQASKKTSDLKHEDGSYLFEVAPQNGRSERRNAGASVSSTLSS

SEQ ID NO: 48391 - protein, 85 aa, Zea mays
  Coding DNA Sequence Number=SeqID_5016
MTRTLLAPLGRSRGRLCIWSSRKAARSGVWIEQHEQRQQRQQSLSRETMQRQLHSASDSESFYRAQLSAQIALRAHGLLDLPAFC

SEQ ID NO: 48392 - protein, 73 aa, Zea mays
  Coding DNA Sequence Number=SeqID_5017
MAGSAALPPCPAGGYEIDGSGYDYGIDCNLADGEYILVPEQGAAQEVAPDPAPEPAPEDLPATALEGKPRFYA

SEQ ID NO: 48393 - protein, 122 aa, Zea mays
  Coding DNA Sequence Number=SeqID_5018
MGKSKKGSGSSPRSGDKRKHEPTPPSEDFGDLEYSEEEFSSESEGSPAPVSPPALSDDSDDSQGIAAKGLDESEYSSDSSEEDNNGDGGDGGDDGGDGDGGGDGGSKGGHGSDSKGSNKASG

SEQ ID NO: 48394 - protein, 265 aa, Zea mays
  Coding DNA Sequence Number=SeqID_5019
  Homolog annotation: Hit_ID=Q6JAD6; Match level="QueryCoverage=84%, HitCoverage=30%, E-value=4e-90, Identity=73%"; Hit description =Putative uncharacterized protein
  Subcellular localization annotation: CTP_CleavageSite=60; ConfidenceScore=5.27e-01
MCYGTSDPPRRPHGGVAPGTAHVAALFRPPFSDGSRRSPADFTTAARFIYQLIRRTLLPRMGYREAATHIQLWLLGALVSHSEFDVVDFLICEIEDTVLDGLRARRQLPYAHYLCHIFAQLIWPPQFQGTLEASRLIFGSYRPAPEDPVSAPAPVIGTQAEDTTFHQFETQGATVHDDDDDDDDDDFGVPPPPSPPMPPRTHDHEVGSSSGAAPPTIDPALAVILQTLTQQQAHLAAVQQQMSERMLSMFQTIQDRQDTLQQQLL

SEQ ID NO: 48395 - protein, 152 aa, Zea mays
  Coding DNA Sequence Number=SeqID_5020
MAPGPTSGEDTSLQEPASKEADSWARAPASETGPLVSAEVKRRSTAGGGTLLSRRFSFFAHTETDAQGMKRQSTAGSDTLLSRRFAFFTHGDRRPRRSAVEAGASTDLDGSCAAGAVGAEEVIDTATTVVEPKEVEAVLTELGESVHQYAEA

SEQ ID NO: 48396 - protein, 247 aa, Zea mays
  Coding DNA Sequence Number=SeqID_5021
MAHRTVRCTPDMSGAPATSSVPLESDRWSSDLWATLDVRWRTGQLLFIVRCASMGKPDVCARCGAFNASAAREPLEIPEGGEFELESPGAPDTVRWHTGQSGTRCKPNSLSAAKAALLAEKKGKALADNTHREACEDKALSKRQRNDQPTPEGTLRTCSFGGQPQAPPPGFAPLEGEDATEDGEVIGVLAEEQLQVRALRIKNRNLQKHKEILEAKCQRVSAQAKVHQMIRDEEQRARELEQEIALM

SEQ ID NO: 48397 - protein, 646 aa, Zea mays
  Coding DNA Sequence Number=SeqID_5022
  Pfam annotation: Domain name=HR1; Domain location=209-279; Score=3.6; E_value=0.093; Accession=PF02185.7; Description=Hr1 repeat
  Subcellular localization annotation: CTP_CleavageSite=43; ConfidenceScore=5.56e-01
MRPGQRGSGGGGAAKATAPSGGQPPLAAKSAVPASSRAPEAVKAAAAGGSKSAKAAPASSRVPEAAKAAQGLPPPGKRVADFATDVSVDDYLVGSDEGQLVVVPPAAATAAAAVVPRAKGSALSAGGEIPTLTAVRDEAGAVSRRLKEMKEAQSQATDFADHAASGALTVVVYAEVERLRTQHADAVREKSAADSKCRKLADKVAALEGEKTDLRRQLAEERKEANEALAKAQAAQAEANLARAEGSLARQRAEQLEERLSALQSRVERAEASTRSEAERTRKQLMDSYHELGVRTADFEVPDREPGLRCLEWIQEELQALPTIAEGFMSYASLVTCEGAMNALSREGCRHFEVFDQADEDFELDIYKVEDPIVKESAGALYDRMWGPHGREVVRERAETARGQAARGERVEDFGALNSAQPESESNPVVAAPETAPEPPPETVEGVPDAPAATVAGGGPSPTAAPRADDPVQVAAEPAAEDPATAGSSQVQDFGPTHATATANFLAASTVDDGNKSDETASKFSDFGDSRSSVEWTEESSDEDLDYFAALDVAAAEASPHAADAGAAPGPSAGRRRRRVVAKCRVSEADGGRLRVSRAGRQELLSLPATVSSGEGELRSFFAGEELRIMLFNYREMGIIPKVEPM

SEQ ID NO: 48398 - protein, 294 aa, Zea mays
  Coding DNA Sequence Number=SeqID_5023
  Subcellular localization annotation: CTP_CleavageSite=29; ConfidenceScore=5.07e-01
MCPSTRRFAPRRQLPTTTEIQRRKRDNLAARNKGKVVPLLRCPTPRVTLNPSPVWHAVPALLEPEVAPARPPLLSTTTASRLSRTHRDLHNHLGFTLKLPPKILDATSNTATYDLLVACINCGINHLSNLILSHVTKEKRLRDRTEPDKRHAHFSKGFIYCSWDASWLYSGTRLVLHVCLQHTIMSHDGNWNVLVVLVFLDAGRHRWRPTKRADVDYARVGWFQVWHIAQAKPQEATAAEVCVVRGDYDIRIMVSSESDHEYTRAQSGRSLNETKDDYDEGLDDHEAMRRKASA

SEQ ID NO: 48399 - protein, 268 aa, Zea mays
  Coding DNA Sequence Number=SeqID_5024
  Subcellular localization annotation: CTP_CleavageSite=26; ConfidenceScore=5.81e-01
MSGPPPTTTSPSASTVPPPAASAPALASPVTAPTLTLEVITAFLSTNFSPPGHTSHTTLPSPLHALLTPPTSAPLPLPGSIRPPSAPAAPCLPIHMLPMPSSPSPIPSYAMAMGGPPVHHAFAANTDCNIRRSHPSGRLRLYHISMPPSPIPSYALSSTMVPEFTMATSPSPTPSFTAPMPMPLQWHCDDVFYGSMDGIRASTTQLQTVEVRQQMLEAAWWRSTSAHEGATSPCRTAIGKREHAESSEGCSVKAQKYRYSDDGTVAYP

SEQ ID NO: 48400 - protein, 310 aa, Zea mays
  Coding DNA Sequence Number=SeqID_5025
MARLRHTARKSVIPFLPSRLAERPLRRPVAGQSSHLERLHHRLHEEQEHRRQEQQGSSFSLQQEIESVRSCSPVLPLEAPPAPPLGAPASGVAAGGDPDDGGGDDSSSHDTDFSADQEPEGWVARPITRDAARGCHFHDALDTLLRRALNRRTWSIEYRCVGAEVCSEHYSISERDSAEAAMQDAARRALSHYCSVLDGVADGLNLKYYPRRPFGSTGGVIVSPVGEDNPRLSSTVNLAAVLNTELDHALDELSRARAEIALLRAERVERRHLDDGSPAPVGTQHPYRSPRRGHQTYGNPDCKTKINLEP

SEQ ID NO: 48401 - protein, 206 aa, Zea mays
  Coding DNA Sequence Number=SeqID_5026
MDSPALPRVIPAQVLANTIVVMNQQEAPAGVGEFLRDFGVPVVLWRLLQEVGYTEAPKYQWSRTVLRGQPWYEVVVRIPERARKPSWPYWMFHAEGMTPWEGAQVAALEVLTTICYQKREEIQATSMRLFPAVALSDPLVYHHQARLMESIPIGQDSVESASARVLMAVLELQLTRGHSRQKWQQLYTGSYAAFKMMETAKNRACT

SEQ ID NO: 48402 - protein, 41 aa, Zea mays
  Coding DNA Sequence Number=SeqID_5027
MGGLGARGAQAGAGRAGRYNCSGEDEAVEGDFQEFQDYDEF

SEQ ID NO: 48403 - protein, 310 aa, Zea mays
  Coding DNA Sequence Number=SeqID_5028
MGPDPTCHTSGAGPKREEASGQEDELPHKKRATVLRLFALPSSPQPMVKEANRHTRSMQPPHGCVPPQLRCNRWPNLWHGGPSPHVIHPARRSLGAGKPHCRSRQYRVFSRPSQKANEINFQNRCSDSSHPAHGPTKTLKYGGHGPVNRGAGVAVGMTIGGPAVTASTSAQEQRADHQSNSGPTCRLASSPEAGLGATVVMVAFSEATSSDPEGTGPLLYPERLRSPLGQGSNTATWLIVHDAMCPHGIYCVLSIPLADGARATLQTARLSSPLPKQAQEDGSSRRYQWLPLLCSWAHMSGLSTLVHVPL

SEQ ID NO: 48404 - protein, 305 aa, Zea mays
  Coding DNA Sequence Number=SeqID_5029
MDPQGDPVPPVYGAEACLPPETFLDSPRDLSVKAGGPDSLGAGSGERDPVPWGGPEPAWSLSLVPYPKACTLHYSVTGLGPNRGYLLGATAKLFLRYAGLQPRQIEPTYQGAGGAGGLASGGNHLCSGQPNQRRRPPQHQRQQPPPHRWLTGDGDRPPPRTNRSSLPPSYGVRTRPSKNATATSAAYNALYDPLGRRRSSAPRMQQTCARRDCRKCGGRTAAPRLAAAGGTGIVATAIQAKEPDTRQLTAPAAGRPRVAEVRILRKAGEHPSPPNAGGRSGSPAHAEGRTPTRLAFHPSEDDEHP

SEQ ID NO: 48405 - protein, 234 aa, Zea mays
  Coding DNA Sequence Number=SeqID_5030
MSWGHIACQKGRQAARPLRNKCGDCAAQSPYVMHRPLAYVTDNKPCGSIRPLAEWGAEALRIEPEHASIPDPCLGHDTSSPGSLLRVVRSSLDGVRTLSNGSGLLYFGGPGCAYRGLVPSGSDDVASENATITAHEIPLGLFSARLRVAAQTSCLYTVVRGTPNPRTEGIELMKEIHAASSPSAKSFGSLLFSFVVLYITKRYKVNSSFKEKGTEIAVPSYNFKSINFALNVFN

SEQ ID NO: 48406 - protein, 129 aa, Zea mays
  Coding DNA Sequence Number=SeqID_5031
  Subcellular localization annotation: CTP_CleavageSite=44; ConfidenceScore=5.17e-01
CCVLRWHSESSPPPLGKLPIPPRPRAALPRPSDPAEATARTGPMAATARHSSSPVHTQRGPGAPLAWPGTPPVAPCSPARTRRGLRPPACPRRGPWPVQPPRPRLGCPFPRPGLARPYLRSPALAVIIR

SEQ ID NO: 48407 - protein, 60 aa, Zea mays
  Coding DNA Sequence Number=SeqID_5032
MTRGRAGLSMSLVCGGVLLFQPAVNGRVEETSFVSFTDRWRSQNMAYMGEQSTKLTWPQR

SEQ ID NO: 48408 - protein, 165 aa, Zea mays
  Coding DNA Sequence Number=SeqID_5033
MAPKRPNSKDAPSIDDAAKAALLAEKKGKAHANNTPQKAFEDDAVNNKRQRQDHPTPEGTVRTCNSEGAPQAPPPGFAPPEGEDTIEDGEVIGISAEDQLKLRALRIKTNHLQKQKEILEACKVQGNQDQQSGFLIMDFVRRKIKLFNFNRDEENAQTKTSISTN

SEQ ID NO: 48409 - protein, 119 aa, Zea mays
  Coding DNA Sequence Number=SeqID_5034
MSKQRNQQSRRGQKITSSRVRTLSKNLIRPLPVQDLKDEGFRRLALLIADARLRVSAETVKLNFRLELQATPTHNLDNGLCLELQVLREWVSLEVMTSTWLTVVPFSGGAYTSYSKVSS

SEQ ID NO: 48410 - protein, 273 aa, Zea mays
  Coding DNA Sequence Number=SeqID_5035
  Subcellular localization annotation: CTP_CleavageSite=26; ConfidenceScore=5.06e-01
MVGRSLAGLSVSGTDAVIDLPRPRVGLMSAGDSRPRPRGDQPSRLPEPDSRRRPWRRWPRRGDDVVLQSGGLRTASPSEARSDLAEGVVDAEGAAAPFKRQDPGLQDRIVLNVCASESCFSRKVMSEVSVSRRRRSPSARSALPLTRTLTRPWGSVTDAVEKARRIASAEELPNVKTCSVRGITYPNVSYLSQKVMSEVSISRRCRSPSARSALGAYVYSVIFRIHFRSSQKARKTFWQKGSFFEEKIRRRGGSHLLAPEGGSGFAEARPTLP

SEQ ID NO: 48411 - protein, 232 aa, Zea mays
  Coding DNA Sequence Number=SeqID_5036
  Homolog annotation: Hit_ID=Q6J9V9; Match level="QueryCoverage=28%, HitCoverage=33%, E-value=5e-07, Identity=44%"; Hit description =Putative uncharacterized protein
MNKNTGIQSATRHASRLKTEEAKPPCAMRTTAQRLQAALHFFPDQRAKGRTAMQAACNRAKWAHFSDSQHAQHGGPGPCVMQPARRMLRACNCTATCATTAPPRLRNQYCDSRKGGVSGRGSERRSAFAIMTASKKGPGKGDTPKRILPREGTRLRASLLIRGSKAGPSEGFNSRLRARGLHTHYWSEVRRPAPRKGSTAASGYSGSAPTTDQGFEGWPPKGSQPPQTQSEG

SEQ ID NO: 48412 - protein, 155 aa, Zea mays
  Coding DNA Sequence Number=SeqID_5037
MAGFSLPAIPCPISNALPYYMVLRPRRIGLGLSYLETRRRELRPRLGVGRPEPRHHLGSLLPDGVPPGSEIQASSAVFRRPCARADRPALGRGPSGRQAGNSGSCTRSRTVRPCAADRPRLTRKHRRLAPGRGPSGLRARTVRPCAESTAAGSLE

SEQ ID NO: 48413 - protein, 243 aa, Zea mays
  Coding DNA Sequence Number=SeqID_5038
  Subcellular localization annotation: CTP_CleavageSite=70; ConfidenceScore=5.14e-01
MVLAQFDLGTRHSDTGTLVTLQLPVPSLKPRDVHTQKTKQGRTPRRRRAPPPTHADRPTPTIPDGDPHIVVTLRTSPTPSATSSEQSRRRGTPKISLPLNLAKVDPIYQVYHPKVSYYNLADGEYVLIPEQGTVREEDQEQASEAAIEDLPAAPAIEGKPRYGGYKCGHCTAAAGVSGALYAKAVRPGREWGIDGDSCHVRGRSTLTCRALQDMVDGVTWPTTLPPGWTVEWDVAPAGEEHEE

SEQ ID NO: 48414 - protein, 131 aa, Zea mays
  Coding DNA Sequence Number=SeqID_5039
MAPSYRPWPPLPHAWLGLGPISARRPPPRHGGSPASAPVPITGGNENDGFGIGYGNGKWYSFHMERVVSIATTAQEKMKPWKETSRSSKITTSSRRGLAATPSRLPVKAACIYVSFPHFDYCKDYVDVSDI

SEQ ID NO: 48415 - protein, 38 aa, Zea mays
  Coding DNA Sequence Number=SeqID_5040
MRVEWGGNEIDGFGYDYGAGEDEAVEGDFQEFQDYDEF

SEQ ID NO: 48416 - protein, 71 aa, Zea mays
  Coding DNA Sequence Number=SeqID_5041
MGKPVPSLLILLLSRAWIKQSHYLREADDSNRVFILARFEVLPREKHNGLRLGLPLNVLVGTQRVLLVWLG

SEQ ID NO: 48417 - protein, 253 aa, Zea mays
  Coding DNA Sequence Number=SeqID_5042
MPPAPPQGILAAGGDPDGDDNDNAGGSSSHNTELSEEQMLEGWIARPINRDTAHGCHFHDALDTLLRRAFDRHTWSIDAAHCVVYQHCRGLYPDQWEATCLYYPLLSGVADGLDQKYYPPRSTDSAGGVIVSPFGEGNPRLNIMVNLVVVLNTELYHAHDELGKMSENWRRVARRAPQEQQDPQEEAAQQQLPLPPPMMIEQMFLMQTQAVQANGQTLAPMQQCSRCSSNHPHLNPKCKFICHRCLETSGHNS

SEQ ID NO: 48418 - protein, 157 aa, Zea mays
  Coding DNA Sequence Number=SeqID_5043
  Homolog annotation: Hit_ID=Q8SA86; Match level="QueryCoverage=38%, HitCoverage=6%, E-value=1e-07, Identity=51%"; Hit description =Putative retrotransposon protein
MARIRSTARLTNEGEDTEATETASISEVMRRSGLVVQEGEEVIPEKAHAITEAASDDDEDDGILSPSKPKEIIPKPRDDEVVVFKSFLRQGLWFPLYEMVYHTPLEVCQITTLVDDQAESVESGATIPKDRPTTKQLGRTIHHGSSHRVPFTHQPHY

SEQ ID NO: 48419 - protein, 128 aa, Zea mays
  Coding DNA Sequence Number=SeqID_5044
MAGQASRKPRRGRSKASREIRAGENGGWAGSTRENTPNRGPSRAGVDNHGRSGTSTRRVQGASTARRAGERTRDTGRMEEHAWEEPFGWTRSEQPNAWVGEDPGARKEALGWPARVRQEARARDTQEN

SEQ ID NO: 48420 - protein, 114 aa, Zea mays
  Coding DNA Sequence Number=SeqID_5045
  Subcellular localization annotation: CTP_CleavageSite=62; ConfidenceScore=5.14e-01
MYGSTTGMARNRSVLVRRRVFSSAAGVPAKPRRPSPIQRHVINPVHALQQGCELRRPWTGLSGEAGFDSSLGELHWGVHTRLQGSDGVGKGWASRSTAAGARVAANTPRMGKRR

SEQ ID NO: 48421 - protein, 89 aa, Zea mays
  Coding DNA Sequence Number=SeqID_5046
MNNGRGASTCKVDIAVEHCVERVACAVEQQHRYVWVAGGRWSWRAQWPLPVLKGYWALGSCPWGFLRVRLREQWPEMASALNKIEHGPR

SEQ ID NO: 48422 - protein, 154 aa, Zea mays
  Coding DNA Sequence Number=SeqID_5047
  Subcellular localization annotation: CTP_CleavageSite=31; ConfidenceScore=5.27e-01
MAPPLLQLPLFPMVVLSQATASPCLRPSPSMAQVRAPPSLLAGHWLGTQCLAPALPWHTGPLPSVLDVDPSKVVAFDLIQAPRRSCPHRLSSSSSSIRSPPHSDGRASCLCQAEALTSRTRIGRSGYPKISGRVIRIIKISGFRKSYPKLYRVL

SEQ ID NO: 48423 - protein, 23 aa, Zea mays
  Coding DNA Sequence Number=SeqID_5048
MGITVFSGEVIPLCRRLGSKAYI

SEQ ID NO: 48424 - protein, 81 aa, Zea mays
  Coding DNA Sequence Number=SeqID_5049
  Subcellular localization annotation: CTP_CleavageSite=69; ConfidenceScore=5.22e-01
MAPSSLAGTWIFDLVGGGGGTAIAAKSSRGPPYTDHSPTALAPFGSSSNDPGTAHTSTLSQLHANDLTVQGEASNRFPLQI

SEQ ID NO: 48425 - protein, 373 aa, Zea mays
  Coding DNA Sequence Number=SeqID_5050
MEPKLSSVGVRDLRRVVMPTPVLVVLLDARHDLHRVIIPTPVRTPIASIAVPPARGRCACRSDGGPHGKGAGQSRPLAFPDSPSKQAPAPDLQLMCRFPVSETPRVCNCRRWTMKRWIKEMEEVAAMATNSRSIMPSRAIHKGKPLSVSLASRRSPPLSSRTPGSVIDLAEGRERPGKETVGCQREIGRDAGSTASTLARVVARCPRCSLGSSPSCARRVLGVVGVGGKLECCQFLDGAGAAAVPQTIVDRILCDNVVGKISSLAFAILASSCSIGWRKGWCTWLRERCSPAGLRREGTAPPPCRPEEEEVTLVVRIVMNERDHIYAYRFDASPWTVRSLACSCDRVEVWAVPGSLDEDLTNHKTYRFAVAGF

SEQ ID NO: 48426 - protein, 183 aa, Zea mays
  Coding DNA Sequence Number=SeqID_5051
  Subcellular localization annotation: CTP_CleavageSite=70; ConfidenceScore=5.21e-01
MEETHLHVFDASCPRQSTLARAPACPAPRPSQASAMARARAYKTLPGFDCTLPRTLKPRRSLARRRLPVRSVSAAAQSLCHRRPADRAIPNPVQSSEKTVHTSVKLPEQGIGVCFAGEASPRSPELSTPPEYVDRHTRRRRRHPPARMDRAIPAIPDVKLYLDVTARVSPSQPHPSSDLPRRR

SEQ ID NO: 48427 - protein, 175 aa, Zea mays
  Coding DNA Sequence Number=SeqID_5052
MTRCLHFQTPFLPAIGQTLNTATHLLNRLPTKELVLTVDVVPDTSPVPSSVRAALVDPHWRRTIEEYAVQVGNHTWDLMSSTRHQRGHWQVDLLPQADLGWLARPLQGPLGPSMLHSVPRSGLRRDLQRTIVALQREFAMKNLEPLHHFLRITYRSLTGALQYLTFSWPDIAYVV

SEQ ID NO: 48428 - protein, 338 aa, Zea mays
  Coding DNA Sequence Number=SeqID_5053
  Gene Ontology: Mol. function=hydrolase activity, acting on ester bonds; Cellular component=intrinsic to endoplasmic reticulum membrane; Biological process=intracellular protein transport
  Homolog annotation: Hit_ID=Q67TV0; Match level="QueryCoverage=57%, HitCoverage=20%, E-value=3e-75, Identity=66%"; Hit description=GPI inositol-deacylase PGAP1-like protein
  Pfam annotation: Domain name=WW; Domain location=22-52; Score=34.1; E_ value=5e-07; Accession=PF00397.17; Description=WW domain
MSSGSGSSGRAALLCAPGDSSLPKPWHGLVDCITGYLYYWNPYNNVTQYERPMASPLPLMGPWVPDQAYFDDLFARLNAISMALSSNMPAPAVWPLSLAPAPTFSWAAMPTNCVRPQGRLHHQLHGRRRQGQPYQDRSRLASLDGIVPSTHGFMVAHTLLSIIDPVDRQPFSSTQKRVFVFTKMLQSAVPQSLSSMTHVPASLSRNLPANENQDAGELHKKDSLSCPSSTEWTSDGLEKDLYIQSNSVTVLAMDGRRRWLDIKKLGSNGRGHFVFVTNLAPCSGVRIHLWPEKHHSPVQNELPASKKIVEVTSKMVQIPAGPAPKQMAQLITIGIVFS

SEQ ID NO: 48429 - protein, 67 aa, Zea mays
  Coding DNA Sequence Number=SeqID_5054
MANARDEILPTTLSQRIRSTMEGERTDNAGPRGSARLRCADAVALLLSGPHKSAFPPTRLGSGTRIQ

SEQ ID NO: 48430 - protein, 42 aa, Zea mays
  Coding DNA Sequence Number=SeqID_5055
MAGRIKLAGAKGRWLAGEEIWSQEIWSVSLPKPEANPRFCRV

SEQ ID NO: 48431 - protein, 165 aa, Zea mays
  Coding DNA Sequence Number=SeqID_5056
MEHRPGLERLLETTHPELDGKLFVNTQQAPTWRANCRRFDPGGSLDRRGSGKAESVFRGRGGVQALGSGEAELPMAPEAGLGGCQPHPDGWHNSRSSAGDAVFLSAIRPRLLLREACPSWASGESKVRLLLEETLGQGMNLLGLLFLPEARLGRDEIVSLEWTEP

SEQ ID NO: 48432 - protein, 211 aa, Zea mays
  Coding DNA Sequence Number=SeqID_5057
  Subcellular localization annotation: CTP_CleavageSite=68; ConfidenceScore=5.51e-01
MSSSSLMRRVFPPSKPPDGGYPPSFRLIVGGTQLRGSWYLSAIVRLQGFSSCSPAVSPRRWSPKTVTSSLMVKESEPGCDLGPTLSFKDVHHPRWGGGRAEPALYLPRGSVGLPLPRRSGERVLTGPAGGPDFDNAGPVDGGRRHLQRVGLVGLAPGGPSRRRAAAAPCAREGHPRCRAPLGRRSCSGVVLPLHRDGALARRPVPHSPGRI

SEQ ID NO: 48433 - protein, 22 aa, Zea mays
  Coding DNA Sequence Number=SeqID_5058
MAYGNILGFDDSLVDPNIISST

SEQ ID NO: 48434 - protein, 37 aa, Zea mays
  Coding DNA Sequence Number=SeqID_5059
MAMMGSTSEKDVPLSGYETAEFSCFCLKVVPKKEANQ

SEQ ID NO: 48435 - protein, 378 aa, Zea mays
  Coding DNA Sequence Number=SeqID_5060
MAQRLTRSTCSDGVPNSGEHDCAILVAGVLDSSSGKLHGLPVELSKGLDRAKEGGKGFGHGGCPRAALAGRGEVAGAMSELQGVWRGTEDATGKLARHWGGLYSRGAGVVTGRPRAREGFNGRFEHLSVQILEKPPWAGSIHVQGMGVSRACPHPCLGGRGAAVEEEVAPSLGSRRGACKRACWDSLAITDCGEYGGAARHPSPRSRSVARSGPDHRSASGPCHEAHRRERYRSIADVRGEASEIKEQEAEACHPTKAVKRSAEAYAGSSSCPHCTQETTQKGVEVVQPTPMAPVEPGTVAAEVVLTRPTSLTKSITISFGKETEAGDTSSGSASPMVSDLLRAIPNTPKVVPSSWVRVNEEVGPSEPPRGSFEEIII

SEQ ID NO: 48436 - protein, 289 aa, Zea mays
  Coding DNA Sequence Number=SeqID_5061
MTSHGSSDEGNAQSHTDGLAREGFPRILWEVLQGAGYTTPPQYAVQLFEKHRVPRCRMRMTLEPHPLQPGWRSLDSESFEYRAEDTIEAIALHGLTTLCGFHPLELSTHPIGLFPAEKEDDPMWKDRVEHAKDIWAIYLGQTAHLTVRCMNALYRLQVMRGEAMSHLMALLEATKITLDNREELVVDLSTEMVEKDLQVEQLSNEIQELEELVGTRENTIEVLEDQLINTQQQLAEANQHLDMHHQEIQDMEANEDVDIEGGEEPAFSLDTAGSGRPPSPESSVASFAH

SEQ ID NO: 48437 - protein, 198 aa, Zea mays
  Coding DNA Sequence Number=SeqID_5062
  Gene Ontology: Mol. function=aspartic-type endopeptidase activity; Cellular component=chromatin; Biological process=chromatin assembly or disassembly
  Homolog annotation: Hit_ID=Q75HA0; Match level="QueryCoverage=58%, HitCoverage=33%, E-value=2e-08, Identity=29%"; Hit description =Putative uncharacterized protein OSJNBa0056E06.12
MAQQNEILRQLAQRQPPPQHYVGGDHQSHPVAATYQEFLNTQPPLFTRAEDPLDADVWLRVVESKFPLLHGVCSEYAGYHADTDEKKRDRFRRGLSTKLRDHLNTVKANSYNELVNMAISQEDCITARRAEKKRKTPVAGPSAQSQCFRIVSDTQNRGPQQQQGRWVIRPQQQQQAPNRSQPPSAEEQPAAAAVPSGK

SEQ ID NO: 48438 - protein, 191 aa, Zea mays
  Coding DNA Sequence Number=SeqID_5063
MGRGRRGHGWPCRADGKRKRAPSPPSVDFGDSEYSEEASSKSNRSPAPASSPASSEYSDDSMGLSTTARAYWRSIKRVGLGGLDESGISSDEADSSEEWSRGNNDDEGDDSSGSGDDKGDGGKGSGDDDSVDDSKGDGGDGSSDNSKGDGGNGSRDGGKGDGDGSGDSNKGDDDNGDGDGSGKANGIMPLV

SEQ ID NO: 48439 - protein, 142 aa, Zea mays
  Coding DNA Sequence Number=SeqID_5064
MAPKRASSKAAPSIDEAAKAALLAEKKGKALADNTHQEAYEDDALSKRQHNDQPTPEGTLHTCSSGGQPQEPPPGFAPQEGEDATEDGEVIDISAEEQLQLQALRIKNRNLQKQKEILEAKRQRVSARPTAHSRVLEANRPQ

SEQ ID NO: 48440 - protein, 314 aa, Zea mays
  Coding DNA Sequence Number=SeqID_5065
MEALWSWDICGSNVRLNRVFELNRLPYGGYPGDDAAVAVDRRGKKPVVVTEEVPSQEAVPGTKKRKIGSDVGQLAVVPTPVVATSPTATAADFVDHVASGALTLELAAEVERLQAQHANAVWEKSAVESKSRRLMERLAAAEAEKGELRWQLVEERRDANKAIADMQAAQADAKLARAEGSLAHQRAEELEARLGSLRNHVDKAEASTRVEVERTHAQLVDAYRELGARTAAFEVPDQEEELGVLPTIVRGLMSFASLVTCEGAVNALSHEGCGHFEVFDQLDEGFEREIFRVEDPVLKRSAEALFDRMWGPHS

SEQ ID NO: 48441 - protein, 125 aa, Zea mays
  Coding DNA Sequence Number=SeqID_5066
MRPGKVLATRAWRQWSGLGRGKKHGPPASVKEGMIATKADLGHRCGVHVGSEEEAGKGGVAWTKVEDDVPTNRSIRKRSSEGKETSTREASTAGTGTKAEHNQDAHARRSESYVMERRSSSLVHP

SEQ ID NO: 48442 - protein, 311 aa, Zea mays
  Coding DNA Sequence Number=SeqID_5067
MAQGNVPIPRAAGEDIFTSRMAPVMDKDRKDAARKRQAITRVGDPMPGVKWERGGAKSTAPSSSKPPPAAKPAVPGPASLRRLRHASRQLKHVAAFTNHVASGALTSEFAAERQRLEGRIERLRAQHTDAVRNKSPTENKSRRLAERLAAAEAEKEDLRRRLAEERRDANKACAEAQSAQAEAKLARAEASLARQHAEEMETRLGSLCDRLDKTEASTRAEVERTHTQLVDVYRELSARTTPFEAPSQKVGLCFLGWLQEELEVLPTIVTGLMSFASLITYEGAVNALSCVGCGHFEAFDQSDEGFEREIF

SEQ ID NO: 48443 - protein, 170 aa, Zea mays
  Coding DNA Sequence Number=SeqID_5068
  Homolog annotation: Hit_ID=Q8SA86; Match level="QueryCoverage=75%, HitCoverage=12%, E-value=8e-08, Identity=33%"; Hit description =Putative retrotransposon protein
MGRRVSLPVVLSPLVQRLRRRHRAKGGVFAFAPTVSILNRQAIQSVKEDQKAIKKQKIVVEPKDSAPKKGKFARISPIKTKVQDVPDKATGAVSPSFADISEIMKVMTEPIPFALLSPLRSDLTSLLQSKETALATERKAGGQKKWWMMNVTQAIEQTPPLASMKKSYYA

SEQ ID NO: 48444 - protein, 117 aa, Zea mays
  Coding DNA Sequence Number=SeqID_5069
MSIFVDNCHNSLQKGRGRWDVQTPIIEDHVVSHCPWSSACAYVDFIVDGSQGGVTGLGMAEPADEVERGAKIAYRALVLSSLVPRRERASSTVFVAPDLPLESDGGASTEEGDRMSL

SEQ ID NO: 48445 - protein, 163 aa, Zea mays
  Coding DNA Sequence Number=SeqID_5070
SDSSAKASVSGRYPWKLSRNLSRRLRQESMDNGGNLVYQVKAGPSRTMMKDLAIVDYGEATLAQNKIFNPIKPRTTAVIGHGITTRRAEHGRRLNVDERVEQCRAVAGVLHVLARFVQVLQMQHLRGIHTYREEAPRTELLGSRRRLGEGERRAAAAGLQVAN

SEQ ID NO: 48446 - protein, 252 aa, Zea mays
  Coding DNA Sequence Number=SeqID_5071
  Subcellular localization annotation: CTP_CleavageSite=61; ConfidenceScore=5.40e-01
MVAFQGGHPPFKGDSPYLRPQPSWAKSSPTRSEVLPLRRGGWVPRVMQAGPEQKKPNRRARCMQPPSGYEHSSAFAQTGGRKGGQPCRRHATVPSGRAPPTSNAPSMGAHAHASCNRRASRYVQATAPPLTPLPRLLDCGTSTATRGNPAYDPAVPARRDGTEKGGYPKRILLREGNRLRASLLIRGSKAGPSEGFNSRLRARGLHTHYWSEVRRPAPRKGSTAASGYSGSAPTTDQGFVGWPSKGSQPPQT

SEQ ID NO: 48447 - protein, 278 aa, Zea mays
  Coding DNA Sequence Number=SeqID_5072
  Homolog annotation: Hit_ID=Q6QP51; Match level="QueryCoverage=14%, HitCoverage=17%, E-value=2e-08, Identity=76%"; Hit description =Putative growth-regulating factor 1
  Subcellular localization annotation: CTP_CleavageSite=88; ConfidenceScore=5.46e-01
MALSPSSLRKGDEGAYDKSRVKAPSTQGTRSRLARAQPRAGTVDPGGFTPSPRASSSNGRTFDSPEANSGKLCSEATLARSPRQPTVSQEHSMQGSPDTLPSRALLSRQGQSDRSHFAPPLTDLTGKQRRLPCSDCCATRQGLGLCLDLGRRSPPRPTPGLGPRLDLGRRSPPRPTSGLGLNLDLGSRSPPRPTLGLDLNLDLGRWSPPRPTPGLGLNLDLRGVTASLDLGLGPTTPRGGPSYEGVAAREDGLTDRLSLSLADAWTPPPPGSKRQQTV

SEQ ID NO: 48448 - protein, 119 aa, Zea mays
  Coding DNA Sequence Number=SeqID_5073
  Subcellular localization annotation: CTP_CleavageSite=48; ConfidenceScore=5.06e-01
MTVGGGCLSYGAPDSPVHTGHVRCASHVTNAVGFRPLELLTTGPAWMSGAHRTCTVQCPRSGPLRFPEAGEFLRRLFLGAPDTVRCTPDSPVNYSGVPLEIPEGGKFELESSGAPDTVW

SEQ ID NO: 48449 - protein, 55 aa, Zea mays
  Coding DNA Sequence Number=SeqID_5074
MVMNLDVAVDGEVVAGGGGAAEGLGVVVGDRRLPDTRLSRASGPRGVYKAIGQGY

SEQ ID NO: 48450 - protein, 268 aa, Zea mays
  Coding DNA Sequence Number=SeqID_5075
MVGRSESGCDLGPTLYFKDLHHPGWGRGRAEPELYLPRGFVGHLLPQHSRERALTGLAGGSDFDNAGLVGGKRRQLQRVGLAGSAGSSSAPGAPSRRKSGCRAARTGGPPKTSRATRVAFVFWGCPAFAPVQRLCAEVGASLVREDSSGDLPVGRWLPSSAPRWWRLKKSSSPTGSPPPSALRASDSLALIACPRPSSGDAGEGIVAAASTLRPSPLQFGHLERRSLSLLLGRAAVSHTEPYRPAGPPMWGVVRTHGGGTGVPFVMAP

SEQ ID NO: 48451 - protein, 436 aa, Zea mays
  Coding DNA Sequence Number=SeqID_5076
  Gene Ontology: Mol. function=phenylalanine-tRNA ligase activity; Cellular component=cytoplasm; Biological process=tRNA aminoacylation for protein translation
  Homolog annotation: Hit_ID=Q2QPD4; Match level="QueryCoverage=94%, HitCoverage=93%, E-value=0.0, Identity=84%"; Hit description =Phenylalanyl-tRNA synthetase class IIc family protein, putative, expressed
  Pfam annotation: Domain name=FDX-ACB; Domain location=346-436; Score =125.4; E_value=1.7e-34; Accession=PF03147.5; Description=Ferredoxin -fold anticodon binding domain
  Pfam annotation: Domain name=tRNA-synt_2d; Domain location=107-333; Score=122.8; E_value=1e-33; Accession=PF01409.11; Description=tRNA synthetases class II core domain (F)
  Pfam module annotation: Pfam domain module=FDX-ACB::tRNA-synt_2d; Domain location=346-436::107-333
  Subcellular localization annotation: CTP_CleavageSite=49; ConfidenceScore=5.77e-01
MATLPMASPAAAIPSSATRPVASPSSRSHRPLTRFFSVAPAPVGAKGLRAAASAVEVGGVKIAREDVVKEDDPTNNVPDTIFAKIGLQLHRRENHPLGILKNTIYDYFDKNFTGQFDKFDDLCPLVSVKQIRTSSGTMNFDDVLVPSDHVSRSYNDTYYVDDQTVLRCHTSAHQAELLRDGRTHFLVTGDVYRRDSIDSTHYPVFHQMEGFRVFSPDEWSGSGLDGTAYAAAELKKTLEGLARHLFGAVEMRWVDTYFPFTNPSFELEIYFQDDWLEVLGCGVTEQEILKRNGRRDHVAWAFGLGLERLAMVLFDIPDIRLFWSNDKRFTSQFSEGKLGVKFKPFSKFPPCYKDMSFWINGAFTENNLCEVVRGIAGDLVEEVKLIDNFTNKKGMTSHCYRIAYRSMERSLTDEEINNLQLNVREAVKDKLKVELR

SEQ ID NO: 48452 - protein, 292 aa, Zea mays
  Coding DNA Sequence Number=SeqID_5077
MGSTRIAFVLLLEERNFIEEGDHRFDGGEKQAELRPLPRPQLQGSSSSLLGQGRAEPELYLPYGPAGHLFLQHSGERALTGLAEGADFDKAGPIGRKRHQLQHAWFAGSAGFGVASGATSRRWAECGYLPRRTSGCCAACTEGPPKTSHAARAAFVFLGCPALAPARPLRAEVAGEGFSADETVSATHGLTSGSLALIACPRPSSGDAGEGLVAAASALRSSLLLFGRPEQRSLSLLMERSAASQPEFVVPQALRCGGCSYPREWNRSSVCNGTLSAGVCSLWLSGPEYPGI

SEQ ID NO: 48453 - protein, 516 aa, Zea mays
  Coding DNA Sequence Number=SeqID_5078
  Gene Ontology: Mol. function=microtubule motor activity; Cellular component=microtubule associated complex; Biological process =microtubule-based movement
  Homolog annotation: Hit_ID=Q2R2P7; Match level="QueryCoverage=51%, HitCoverage=50%, E-value=1e-67, Identity=49%"; Hit description =Centromeric protein E, putative, expressed
  Pfam annotation: Domain name=DUF567; Domain location=18-199; Score =140.7; E_value=4e-39; Accession=PF04525.3; Description=Protein of unknown function (DUF567)
  Pfam annotation: Domain name=Kinesin; Domain location=235-461; Score =40.0; E_value=7e-18; Accession=PF00225.14; Description=Kinesin motor domain
  Pfam module annotation: Pfam domain module=DUF567::Kinesin; Domain location=18-199::235-461
MAKVHPNAAESVQAEAEGELPTVLTVWRKSLLFNCDGFTVYDARGDLAFRVDCYAGSFRRRRRADVVLMDATGKPLLTVRRKTRFGLAERWVIYDGDADDGTTAGATPLLSVRRRRIGACCKTLALARPRPRSAAAGTDAPSYVVEGSYGRRACAVRDARGGAVVAEVQRKEAVGDDVFRLVVAGPRLGAPLSMALVIALDDMFRGGWSARSLLRMSSPAYNSRRAIEKISIAVRFRPPNLVVANTSPASSGEGSDREWRIDDTRISLHRAAGPVPGASFAFNHVFDGAANNEQIYGTVVRELIGALVGGFNGTAFVYGQTSSGKTFTMNSSDADPVIIPRAVRDVFDTVRQADDREFLIRVSYMEIYNEEINDLLTLEGQKLKIHESLDVIESSGKDQTDGGDVIRISVLNLVDLAGSERIIKTGATRGRHAPSGAALQGGWVFGGVSAKHHGFRGSRAATSALDVAGGPLDVGGCCCLGTSAELMIVETFDTRLVEAVFPMLTICFCCNARAPT

SEQ ID NO: 48454 - protein, 249 aa, Zea mays
  Coding DNA Sequence Number=SeqID_5079
  Gene Ontology: Mol. function=oxidoreductase activity; Cellular component=endoplasmic reticulum; Biological process=electron transport
  Homolog annotation: Hit_ID=A2X547; Match level="QueryCoverage=73%, HitCoverage=33%, E-value=3e-64, Identity=68%"; Hit description =Putative uncharacterized protein
  Subcellular localization annotation: CTP_CleavageSite=40; ConfidenceScore=5.69e-01
PPPLPSPPCAQPLPPPSPPCAQPPPSPLMSLRFGSFPVVVGSSAKVAEVLVKTQDLAYLDQSRMACDKHTVYNYSGMLWSHYEPYWRQLRKLWVTELLSARQLHLTERVRAEEVRAMLRDLHPATSTSTAAVVLKERLLMATLNVISRMVLGKKYVGEDGAGSDAAATPEEFRWMIEEIFFLNGALHVGDMVSWLGWLDAHGYVGRMKRLAQSSTGSSSTCCASTASGGDGRAACSCPGTWSTCCCICV

SEQ ID NO: 48455 - protein, 85 aa, Zea mays
  Coding DNA Sequence Number=SeqID_5080
  Subcellular localization annotation: CTP_CleavageSite=40; ConfidenceScore=5.18e-01
MALLFGGFFLKKGNDKEKQKTRTNRRFRSYLNAQFSWPTPASQVPPGNLLTPGNEDSEDAVASFVDGLLNSGGASGSNQPAPFDQ

SEQ ID NO: 48456 - protein, 123 aa, Zea mays
  Coding DNA Sequence Number=SeqID_5081
MRVEWGALRFAVVPSMGLGVCGSLCQGWIAPWEGVRCQRFNTNQSKEQVRSQKKGAKREPKAALVWRTGQCPVHQGASARTLHLRVSQAQLRYNSPDSVRCPPDCPVHQRSNGYLRANVDSAK

SEQ ID NO: 48457 - protein, 154 aa, Zea mays
  Coding DNA Sequence Number=SeqID_5082
MAARRTAGSSGEAQVTGADRDAVVDEQGAAPACEREKRARGGRDNSGRGEKGALVVGFYRGRGETERALREKNGRSSMAVGNQIAIDGVSHNDVRYGLEERAVGRRGRVGRGRGQVWTSKRRGVEMAEAARLSSGGGASCTEKMSRGAMWAHTQ

SEQ ID NO: 48458 - protein, 278 aa, Zea mays
  Coding DNA Sequence Number=SeqID_5083
  Homolog annotation: Hit_ID=A2XFR6; Match level="QueryCoverage=66%, HitCoverage=53%, E-value=5e-26, Identity=37%"; Hit description =Putative uncharacterized protein
MSPDHKITSLCRWSVIFSTANTSSSSPAPGGDNLDDLRDDDEDNDEEEEEEENVNEEANNEQEDNFVGIWPVTKHYTSMFETGHFPNLLQDVLHALGTYVRPLYETRQVSEPPRACYFITRIHIRVMDAGDRGFRTLSAHESLMLLSTYAASVSNAARQALWSLSHTYQQQLHDTKYRHIPLHLRGESETSIVPGGAREDRLNTLVGVVAGLKTDLDSATLDLSRVHLELEDAHARIVALEAQLEGKDPLEAQVPAMALSPPRKRICYGEPRSITSLL

SEQ ID NO: 48459 - protein, 371 aa, Zea mays
  Coding DNA Sequence Number=SeqID_5084
  Gene Ontology: Mol. function=transcription corepressor activity; Cellular component=nucleus; Biological process=regulation of transcription, DNA-dependent
  Homolog annotation: Hit_ID=A2ZNE9; Match level="QueryCoverage=69%, HitCoverage=16%, E-value=1e-63, Identity=52%"; Hit description =Putative uncharacterized protein
  Pfam annotation: Domain name=PAH; Domain location=128-174; Score =50.9; E_value=4.5e-12; Accession=PF02671.12; Description=Paired amphipathic helix repeat
  Pfam annotation: Domain name=PAH; Domain location=45-91; Score=48.9; E_value=1.7e-11; Accession=PF02671.12; Description=Paired amphipathic helix repeat
  Pfam module annotation: Pfam domain module=PAH::PAH; Domain location =128-174::45-91
MARSPPPPPPSPAQGNGNGSGSGSLTARDALAYIKAIKDNFQDKRHMYEQFLQVMRDFKSNRLDSAGVIARVKTLFHGYPDLVLGISAFLPKGHAIRPQDLSEDKEPVDYPRAINLVNRIKIRFQQEEHVYKSFLGILSMYRMDNKPIQDVYDEVTLLFHGHPDLLEEFTHFLPDTPIPPPEAGTTSKVRNDDKNAITHSAMRAQTVQRERALPSAADSDSSVDCLDLEHDIQKECIEKDKVHNACHDQHRGDYKRNRKNDEYENEDLDSEQSGLKSQRKVEGTGDDTPGIATMSSFNCNEGDNDPEEESKVRNDDKNAIMHSAMRAQTVQAYPFRDSLPQLRYPKKNLKFPLFVDLLMALLFLTHWNCNR

SEQ ID NO: 48460 - protein, 295 aa, Zea mays
  Coding DNA Sequence Number=SeqID_5085
  Gene Ontology: Cellular component=nucleus; Biological process =regulation of transcription, DNA-dependent
  Homolog annotation: Hit_ID=A3AZ02; Match level="QueryCoverage=98%, HitCoverage=19%, E-value=7e-13, Identity=30%"; Hit description =Putative uncharacterized protein
RERALPSAADSDSSVDRLDLEHDIQKGCIEKDKVRNACHGQHRRYYKRNRKNDKYENEDLDAEQSVPKSQRKVEGTGDDTPGVATMSSFNCNEGDSDPEKESKVRNDDKNAIMHSAMRAQTVQRDRALPSAADSDSSVDRLDLEHDIQKGCIEKDKVRNACHGQHRRDYKRNRKNDEYENEDLDAERSGPKSQRKVEGTGDDSPGIAAMSSFNCNEGDSDPEKERYNEREKFERVLTFNSKEGAAHEASTFPSKEKYNLCKPISELDLSNLSSTFCKQKDCVKDLESPTCRTTAT

SEQ ID NO: 48461 - protein, 391 aa, Zea mays
  Coding DNA Sequence Number=SeqID_5086
  Gene Ontology: Mol. function=phenylalanine ammonia-lyase activity; Cellular component=cytoplasm; Biological process=phenylpropanoid metabolic process
  Homolog annotation: Hit_ID=A2X7F7; Match level="QueryCoverage=32%, HitCoverage=18%, E-value=5e-46, Identity=74%"; Hit description =Phenylalanine ammonia-lyase
  Pfam annotation: Domain name=PAL; Domain location=42-369; Score= -167.4; E_value=1.1e-07; Accession=PF00221.10; Description =Phenylalanine and histidine ammonia-lyase
MEKASIAADRAVAVARRAELFHRLRCSYCDYGDVGPPPPPKTTRLLHGSPTPAAANPAAPQTARSTPAAANPARLRPPQTTRLLHGSPTPTAANPAAPQTARSTPAAANPARLRPPQTLPHRKPPRPQTHRTKSAPDALQTPQTKPRVPVPKEGLAMVNSTAVGSGLASTVLFEANILAILAEVLSAVFCEVMNGKPEYIDHLTHKLKHHPGHIEAAAIMEHILEGNSFMKLAKKLGELDPLMKPKQDQSKTNLQQIGLKGKAKSPKQPYNSFKHAPAPEAIPNVIGWIAISFAKGTKMVYKHLATLYFVFVFDSSENELAMLDLVQEMEESGFAITSINGRINMAVWGPLNRTIVTARVDATIRIWDSEVRITWYYVPTNSIDGRYNLVI

SEQ ID NO: 48462 - protein, 288 aa, Zea mays
  Coding DNA Sequence Number=SeqID_5087
  Subcellular localization annotation: CTP_CleavageSite=36; ConfidenceScore=5.06e-01
MPLAPPPPMCAPSLSISICFPRNNLLPPFSHLLCPKCDPVDGCRDHPSPKPRPLFSRSRLIVDASPKELQMARLRHTARKSVIPFLPSRLVERPLRRLVTGKSSHLERLHHCLHEEQEPEGWVARPITRDAARGCHFHDALDTLLRQALDRRTWSIEYHCVVFQHSRGVYLDHWEVTCLVRRLENSLRGAEVCSEHYFISKRDSAKAAMQDAAWRALSHYCSVLGAVADSLDLRYYSRRPSGSTGGVVVSRVGEDNPRLRSTVNLAVVLNTELDHALDELSRAGAEIA

SEQ ID NO: 48463 - protein, 27 aa, Zea mays
  Coding DNA Sequence Number=SeqID_5088
MKDAKPIKTPMGTNGHRDLDTGGIFLC

SEQ ID NO: 48464 - protein, 211 aa, Zea mays
  Coding DNA Sequence Number=SeqID_5089
  Homolog annotation: Hit_ID=Q2QSG2; Match level="QueryCoverage=35%, HitCoverage=4%, E-value=2e-07, Identity=40%"; Hit description =Retrotransposon protein, putative, Ty1-copia subclass
MKGMANALGDLGKVISVRTLILNVLHDLNEKFAHMKVHIKRSMSFPSFDDVRADLILEIDSSVPKPPPTTAIVVALPSGNEERYPRSKTVFENWAEEKAILVHKRLNSLLFLIFGAHVVHVPSAVQQSQRSRAHGAKDELDKERGASGEYSAKIAYQRFLAGSVEFELVAPGLETSMFQDWWSMAEGLVPVLHRERSMRMPGFGNWQVLRL

SEQ ID NO: 48465 - protein, 673 aa, Zea mays
  Coding DNA Sequence Number=SeqID_5090
  Gene Ontology: Mol. function=nucleic acid binding
  Homolog annotation: Hit_ID=A3AZK0; Match level="QueryCoverage=16%, HitCoverage=13%, E-value=1e-32, Identity=63%"; Hit description =Putative uncharacterized protein
MAGSVREMPEAEHHLRVKKSRGSLRSYLTVVLGPHVGYPLRRDTNEDVHNTYGARFCQESRRRQGPPVIRRTRGRTSPHFPSVQGTPPPVIRAPRISYPAINALLYQRKVAEDPPHPPPHAVVDGRCDLLPICSTINALLHPLPLLPLRHHTTFPKRADPRIRHQRCAHPPPPLLCDADINALLPTPLMARADPVSFRQHRANSGVSFCHQQKVPRILGKQERGRGGQGHNREAKLIQSGPFCRPHLDGFTVPPPHRDHGEGAGWLALGSPQPATRRDKVSHPQPPPLPYSRPISPPSGGFVCGLQAGGATLFCWPSTPAPQWGQLRRIYNRPAPLADLAVGTDHVAAYDASGKVVLWWRGGGRFPARADGAFRSLVSGDDFSCAVQANASAAIRCWGPQGSAVQAVPGGINLERMPLPGHQPINGACCIASTSGLVNELASDCPASASPHSLALPPDTGTQSPLLSLKHISVVFQVIANGVGLLDPGAESNYGVLALRAPLEKYGLDEEKACNELLSFSDYSGSPQEKSNGQWVISKRVDADLVPSSGNDHDHSGYDENKNCITHSSNIDDTNIADEGYNLEPATNGYPMTHVHDLDSSSADENGPPTSTGQDIVVLSDSNDDVLMVLSPGAVNCGSMHNNTGNLFPLTIVFTSPVARTLSPLEARNLCSVA

SEQ ID NO: 48466 - protein, 26 aa, Zea mays
  Coding DNA Sequence Number=SeqID_5091
MAMMDSTSEKMYLCQLYLDSLKPAYP

SEQ ID NO: 48467 - protein, 26 aa, Zea mays
  Coding DNA Sequence Number=SeqID_5092
MAVMGSTSEKMYLCQLYLDALKPAYP

SEQ ID NO: 48468 - protein, 91 aa, Zea mays
  Coding DNA Sequence Number=SeqID_5093
MNQPRQEKNLFSGNLADEGTDAEIFGDIMRPESGTRRSPCHETRSRRWERLQKNGSSGKGGIPDDVIVGKLKSRLSRKQDNAEKILFSDGI

SEQ ID NO: 48469 - protein, 168 aa, Zea mays
  Coding DNA Sequence Number=SeqID_5094
MASPRLWTLRAIGGCSLGQLIIFYLSLILQVIYDTPSTVGGTRGAPSTLHANDDTRTRFGAEKNMIGTTTSLHGVRPPELSRQRLRLVALPGDGRDTTTTTPLPGTDIIIDDRRTRVEYRRSLHASGPFNGPLSSKSPTSTSTSLSRIREVGWPSTPPLPELLGQLKM

SEQ ID NO: 48470 - protein, 73 aa, Zea mays
  Coding DNA Sequence Number=SeqID_5095
MAGGIKLVGAKERWLAGEGFELGIKVNIPDLWLKKTLGDTGVSQPSPLKGISSRDSGQSPPRVKRRVRLIGNG

SEQ ID NO: 48471 - protein, 290 aa, Zea mays
  Coding DNA Sequence Number=SeqID_5096
MVTSSSMAGESKPGHGLCPSLSLKDFHHQGWGGDDRGEGRLLSVALAAAPVPGSRTRVASEPLSAPASATAAGRGSSADEIAGAAHGPTSNSTAFCPSLPHEFGHGRGPPGSSIRPEVIVAAVRPPGAEVVVVAAAGAGDGVPFVGLLLLRRPPPASGVVHTRGDSPVVCLNRFTKRELPRAKVTSEHGQRQSWLEKEDLVGRSLAGSSVSGTDAGIDLPRPRARLMSLEDSWPRPRGDQPSRLLGLDSRRRPWRRWPWLGDEVVLQSGDPRTASPSEARSNLAKGVVNA

SEQ ID NO: 48472 - protein, 157 aa, Zea mays
  Coding DNA Sequence Number=SeqID_5097
MVVLLSQAVTPCEQVLTERYSGKRPEPPMAGQGVRRTCAKRYPRSEPFDLNRTEGIRSGKQTAAGGAALLRGGEVTGVEACNTPDRGVPEPTSECRRVPQPRWVEREGEREVGKARRPETGVREVGIPRPSCSSRAQVRRKERIQVYNGGYSRVLRV

SEQ ID NO: 48473 - protein, 105 aa, Zea mays
  Coding DNA Sequence Number=SeqID_5098
  Gene Ontology: Mol. function=carboxyl- or carbamoyltransferase activity; Cellular component=ornithine carbamoyltransferase complex; Biological process=amino acid metabolic process
  Homolog annotation: Hit_ID=Q8SA97; Match level="QueryCoverage=99%, HitCoverage=19%, E-value=9e-20, Identity=52%"; Hit description =Ornithine carbamoyltransferase
MAPPVDVVGPCPRLGDVEAPPRSRSSLSSVAEVESEPLGRARRRPSAEVRAESEPWGQAKRSSSSSGAEPKSEPWVRRSGVCRLPGLSPSPSPGSGGAEFAVFRG

SEQ ID NO: 48474 - protein, 46 aa, Zea mays
  Coding DNA Sequence Number=SeqID_5099
MAMMGSTSEKMYLCQVKKQQTFVVSVPRWSQKKKTKSKVAGGRVPP

SEQ ID NO: 48475 - protein, 170 aa, Zea mays
  Coding DNA Sequence Number=SeqID_5100
MDADDPDSNALRDEVKVDLDMLRALMRDRVDREVEGADIVAVDQRAPSVGNVKLLEKLTQPARLSHAISNSPVFGLNMTGIMNVETDLLDNMHDVGPGEGEILKSVDKVAVDSGVTHRSTVTRELGHACPPGSNRACNLACQHARGYLGYTVAAGEIGPERRSTTIPRKW

SEQ ID NO: 48476 - protein, 89 aa, Zea mays
  Coding DNA Sequence Number=SeqID_5101
MAVVEESASLRDCLEAWTTGDGGWELTSPRDNETASTRSRLLGGMETKDGSRLGVVGCGRWQMGLERCSTIFQGFTVLSAVAHGVDDAS

SEQ ID NO: 48477 - protein, 169 aa, Zea mays
  Coding DNA Sequence Number=SeqID_5102
  Gene Ontology: Mol. function=1,3-beta-glucan synthase activity; Cellular component=1,3-beta-glucan synthase complex; Biological process=1,3-beta-glucan biosynthetic process
  Homolog annotation: Hit_ID=A2XC08; Match level="QueryCoverage=98%, HitCoverage=12%, E-value=9e-65, Identity=72%"; Hit description =Putative uncharacterized protein
MEHADKENIAARFAQMWNEIVTSFRDEDLIDNREKELLLVPYVSDRTLGVVQWPPFLLASKIPIAVDMAKDSNGKDRDLRKRLDNDYYFKCAIEECYASFKNIINGLVQGEPEKRVINKIFVEVEKCISEDKVIADLNMRALPDLYFKFVELVNYLMLKEESQKTPAVL

SEQ ID NO: 48478 - protein, 1031 aa, Zea mays
  Coding DNA Sequence Number=SeqID_5103
  Gene Ontology: Mol. function=telomeric DNA binding; Cellular component=telomerase holoenzyme complex; Biological process=mRNA catabolic process, nonsense-mediated decay
  Homolog annotation: Hit_ID=A2YTS3; Match level="QueryCoverage=99%, HitCoverage=74%, E-value=0.0, Identity=54%"; Hit description =Putative uncharacterized protein
MDSASAAPSSTRDLAERLLTRNNELEDQLRKSAQSKVPSDPNIWLQMRDNFEKIILIDHDLSEQRDVEYLLWQLHYKRIEDFRRNISAASSLASQSGKSNTNPDRVKRIKSAFKSFLSEATGFYHDLMLKIKSNWGLPLNYFPDSLDNANNSVRDDMKTVQLKKDLARYKSLNGDGDSASREYTAASSYYKEAASIYPSSGNPHHQLAILASYSGNEVVAVYRYFRSLAADTPFATARDNLIILFEKNRQSYGQLPDNSKVPSTKTLPPRPSGWGRGRGEVRFQPKDVNAETAERERECNNGDTLKTFYIRFVRLNGILFTRTSLETFGELFSSVSNDLQILLSSGLEEDLNFGSDAAENALAAVRLTVILIFTVHNVNKEPDRQSYAEIVQRRVLLQSAFTAAFDFVGRILRRCSELHDIASSFYLPAILVYIEWLASHPELAVDSEMEEKHANARSFFWSQCISFMNKLILTNLASVNDDDDEACFSNMSIYEEGETGNRFALWEDLELRGFLPLLPAHTILDFSSKHTFGSTKEKKARVQRIFAAGKSLLNFVQIDQLRIYFDSSSKKFVMAKNPPVSKTNTPLHESPDALKTSGTEMDYEAARRFDSVSSNMGTLQSKVQFCPDGDDDEEIVFKPTASEKFPKAPSDLLVNGYTHPVPMSTAGWPTNASLVPVQSTGSMTATGWPPNGGSNAFPSTASLSAAGNYNINQSLPRSSVGWAVNGEQSVIPSIAPRFELVQPVEEPVSSWTSSGAQHVGTQHKHTGLTFPDVVSEPLVSASMVQRFSSTDYSKFLSEQEMLLVNGLNTVNLTGNGYLKQRLQPGLSGLQSMGYSSQTPIEPGGTTANSMHNHLKITGENVPSTLDSVVPSIAPLGGMPMKFTEAPLTASKKNPVSRPSKPVGPPPGFDHVAPKRQDDSIPVEKLQIPQVDDYSWLDGYQQSIDHVHNLRTVYSGVSDSTAFATPFPFPGKQQLSGMHAQGATNEKTWQDFRLFEPSKQNMLQNYHQRNQQNGQIAEQEPANSVWSSSYHV

SEQ ID NO: 48479 - protein, 186 aa, Zea mays
  Coding DNA Sequence Number=SeqID_5104
MEGARHGGALARSQGVARVRGGCDGHGGGGAVPRRRAEASRIQASRRGRRTWDLAPSRKTKEWSSAAMEFLPLRTYRKRRGACAEEADHGVEKGTEHMGSGRHGRRGRLHARHGRKLAWASAMEELLRTEEERIPALNAVEKRGAGQRRWEQKAWAPWLGARWRGQLAGGCCCREARRKKLAAGNF

SEQ ID NO: 48480 - protein, 162 aa, Zea mays
  Coding DNA Sequence Number=SeqID_5105
MHGSPGWPPSQQNQPENLPTPTTPLLPLPLSGKIIIPTTIKPPVWALARPMPPPLLHLGTYAQPADCHVDPPRQHIFLLPTGPTSTIPQRTCPTSHARLAVQPLNQPGPGKAFLASPMCTSDQSFGSHDNGAQICFAFPYALHPQIWQTQQCRPGPHIAFPY

SEQ ID NO: 48481 - protein, 408 aa, Zea mays
  Coding DNA Sequence Number=SeqID_5106
  Pfam annotation: Domain name=zf-CCHC; Domain location=244-261; Score =23.5; E_value=0.00043; Accession=PF00098.14; Description=Zinc knuckle
  Pfam annotation: Domain name=zf-CCHC; Domain location=359-376; Score =24.2; E_value=0.00033; Accession=PF00098.14; Description=Zinc knuckle
  Pfam module annotation: Pfam domain module=zf-CCHC::zf-CCHC; Domain location=244-261::359-376
MSILGMSTTSEVTKCKEYIVLATPPAKDQMEQFKKAHAQFLQATSQVVARLQQVDLAEFIAHEQTTDNHMTSTTTSPSIVDLEKLLHAQALVIQNVSQLTSSYQQVLASRNVTRNETTDEQKDAHQQTNDLGTCCCCEYYGIPCRQISTNESETTKQKNRILFSGIKSQWSSQEQLTADTLSDDEVPGFPKRKHHKDAQLQKEANECYIDGWTITSTQLQPRRRISSKKQKWKHGKSQEITSRKSCYQCGREGHYFRNCSEERSLSDTPEIKLSQSPNMECEQKCTEISTNIVKNNKRNRKMFGYMGSPPQPQAKALKHMDTQMGESSQAQPFEIQTPNQPSPPVGQAKLTRKELKARGACFYCKNEEHIIRECPKKRLDRLKKKTVKQDPNNNPEDQPATSTMMKIA

SEQ ID NO: 48482 - protein, 404 aa, Zea mays
  Coding DNA Sequence Number=SeqID_5107
MAARRAGRAVLSSLARSLGLRKPKGQAGSGAKNRHRALFGGYKDQGEDGSNVPPGPDAGFKNAKRNGRSSNGSRTRNGSPANYSPCRFNSATGQAALLAGATGDASPSPKQPRQKRLRASLLIRGSKAGPPKGSTAALDRVGPTPTTGQRLAPEGFTVASDAERGMTRAHRRHHVRCPLRVTWCSPPSSLRKGDVGAYVKKPSLSLIALSPCAEGRRLGGCYRKPGSGRTVDSVNIPARELGPRPCTRATASSHEGTTRPAEALRKALRPRRSETTPPRPRGLHPAGALARTHRNKMQPRKAGPLAKKCDESLQASANTPFEARGLLSGTIIRGTLKTPNSQLGSDSGWASEDGELRSARPRARTRAKPRKTANSAPPDPGLGLGLSPGRQRTPLRPTQGSDSG

SEQ ID NO: 48483 - protein, 467 aa, Zea mays
  Coding DNA Sequence Number=SeqID_5108
MGIDSHLNTCVDTQSPKYLEMAQGHISLSDAHQALRERAGIIRQLDVGVLRGNGARLHLRREVNARRVPRWGAGAVDSLDSRRDPSLGEVAIPLRWRLSPSPGVGRGGVRRLPESRSSPSPGVGRGGVCRLPEPRPSPSPRVGQGGVRRLPEPRPSPSPRVGRGRVRRPPEPRPSPSPGVGRGGVRRLPEPRPSPSPGVGRGGVRRLPEPRPSPSPRVGRGEVHLPRPRRGAEPWGRARRSFLCRPRLDLAVVDLTLASGTAVGAGQAALYSCQVGRWSGEVSAVTSALSTGARVRIRCQAILALNAPAIWSVGVAIWPRLLLCEDWASGEPKMHKVQHKPRKKLHSDSNKFGAKDLRVCCQWHTRQCPVPQAEQQSNQPLLGFSRARSTIIHRTVRCAPDMSATRQRVPMLKLLQTPNGVLMWHAPNSEQYLSGVPTDSKNSQRLVIKEGNQVQGRLYYIAHKELI

SEQ ID NO: 48484 - protein, 112 aa, Zea mays
  Coding DNA Sequence Number=SeqID_5109
MAERTPGSRCCYAYLAWSPSPQAIQANGAHPCASPTTDANQSAIAETVRYHRGVRRRESVSAHRRPLSSSRLRFVRSLGVRARRDFSGRRRRRLDESASGTSVNPSRVKEVG

SEQ ID NO: 48485 - protein, 91 aa, Zea mays
  Coding DNA Sequence Number=SeqID_5110
MECQHSATDNSNREKVPSGTGKAKLRVHEHQSMLSRIIQKPLSCFTWSHVISFGTMGNLAVDVGQHEGTGQTKSLALIYFYAKVKTVLAHG

SEQ ID NO: 48486 - protein, 165 aa, Zea mays
  Coding DNA Sequence Number=SeqID_5111
MEEALWVALVGVSEATVLPGVAAATNDLTNGARACFEDCSSRNFFKWYLTLPERLPLLPLANRLTPSPPVLRTPPGDPASPTASGGPSIAPGPGGCAARRARPAEAAWGGRHREGVGRPTEAAWMSGAQRGVVWVKRRFRGEGSTMSAGLVGGIGERTIVRDRTD

SEQ ID NO: 48487 - protein, 882 aa, Zea mays
  Coding DNA Sequence Number=SeqID_5112
  Gene Ontology: Mol. function=oxidoreductase activity; Cellular component=mitochondrion; Biological process=metabolic process
  Homolog annotation: Hit_ID=Q7XIR1; Match level="QueryCoverage=16%, HitCoverage=38%, E-value=7e-53, Identity=70%"; Hit description =Carbonyl reductase-like protein
MSLDTKLILNAISELFDKFDARWSMRDAARETSRRVPVPTQCTVVGADVVADNWGNLFDSAVDSDEQRYEEPINADNWGGFFDGADASANAEFVGHWDNPSSNPDATAYVTPEVAVESVHPAARGRFFNDDSGAPLDSDDDSSVHGGHGSVMSHLLEREADTAFLPHSDQRDGVEAWFILRRCTPASFNVASTDPNNEVSSAVTADALAKAAPALFASRAPRPSLKYLELLLPAEIDFDHIDLPTAAAAGHIVAQVTGNNAVSVVEDQLRCTLLLTRNFLSSHHQAVSKEWDMVAVVHPVCNLGEKVDAICTGQIEHLLLQHLKPSPTSIGAKAVFDEMQQSTNSATTTPASSALTTTTTTTMAAPATWLDAQPAVSTCSSASSAQEDTPIPLLFLRGGLGMMDNVLPANSTFLSTNISLSSMECLREFMLHLKLGTARFTICDESVVNLWSSPVERVVQQQTWLQLELTNSGLDLWPISWQSQQVYFGTHHGFAAWPRSHGTILVFDFSNTLSWNNSMSIAASCSTNTLFAKDDGDSMNRCFSWCWKPPWLHPGVCRSLHMINKFSKQYFVGLSLLITREKFMSGRIMLALLPLLKLFTSGGARIVNASSLASELKRMPNEKLRNDLSNIDIWDEDRIQAVLNTFLEDLRSGRLEEAGWPVMLPAYSLSKMVINLYTRIIARRYPEMRINCVRPGFVTTDISWNLGVLTPKQGARGPVMLALLPDDGPTGWYRDEMGDKMGSLLFFKMVKYSSLVEGFCGVQFSFPNIQLCKSWSQELATNTESHLLPEMLEAANGYICHELHLMLTSIGVTHMIDCVKYLIGVIDLLTPWDPGIVVFNLKFLMLWLEGKPNLKKGGMSVLMRWKTVWWLMAGRVRLVCII

SEQ ID NO: 48488 - protein, 153 aa, Zea mays
  Coding DNA Sequence Number=SeqID_5113
MEGRGMSILKDGAKAMIVTNKGENATKVRIGKTPFSNRDGKDDISKGRHKITSWKDLEITKVRKVKGKNTPKDRVRTRLATRQRKKRNEQERDRCKIKHHGKDQGMTRVKVITDKHNQGCILDKTCEASKKGKQSMVKYVRHYPQTAMKKRWL

SEQ ID NO: 48489 - protein, 279 aa, Zea mays
  Coding DNA Sequence Number=SeqID_5114
  Gene Ontology: Mol. function=ATP-dependent helicase activity
  Homolog annotation: Hit_ID=A2ZI24; Match level="QueryCoverage=46%, HitCoverage=23%, E-value=4e-34, Identity=59%"; Hit description =Putative uncharacterized protein
MDKEKKRNIKEKAQNSFPFIFPNRGPFPPLPGPLGHPGPRAFAFPPHPARAPGPLRAPTAQLPRVPGSLLQRAWPAHPAWPSAQAPTPRPPGQRPLPGPATATHPVRSRERVWPSCLAPAWASVVPALAPPGPPATLSNCASSLGTLRDVRSHSAKNRPTAPQPRWRRATGVDEGHGDFDRLSKFLVVCLNAIRDAVAPEKGGGSIHGAGDRGMELWRCCSTQAPSDVLDASGACATVTQTAWLVSTACDIVARKERHGMVVSCPFLLYLVSSQDKAAQ

SEQ ID NO: 48490 - protein, 46 aa, Zea mays
  Coding DNA Sequence Number=SeqID_5115
MELGVCGSLCQDDDEENGYDYAIDNGKEEGIEADLQEFQDFGEFED

SEQ ID NO: 48491 - protein, 326 aa, Zea mays
  Coding DNA Sequence Number=SeqID_5116
  Subcellular localization annotation: CTP_CleavageSite=19; ConfidenceScore=5.03e-01
MQAACNHTKGAHPFDSDASSMGAQAHTSCNRRARYYVGETAPPLAPVPRLLDCGTGAATRGNPAHGPTVPTKHIDHGSVSRGRRRDGRYGQKWASSNGDGRRAEAAVKSSAGSRPLLGQRESPLPRREDDAPVFRSSNGSRTHNGCPANHSSRRINSAVGQAAPLAGEGPGKGDTPKGILLHEGSGPRALLLIRGSKAGPSEGSDSRLRALGLRAHYWLALEGFDSRLRARRARDDSGYVRYMAEGSGYAPEVKAPFTQGTRSRLARAQPRAKAADLGGFTSRPRVPSSNGRTFGSPEAQASRRSNLGQIATPTDRIAGAFNARID

SEQ ID NO: 48492 - protein, 348 aa, Zea mays
  Coding DNA Sequence Number=SeqID_5117
  Subcellular localization annotation: CTP_CleavageSite=44; ConfidenceScore=5.65e-01
MATTSSYSPHALRPSTFRAPGWGAPTLLSSCHRWRNATSRKLVPFSHRSASRIFIRRPGCIPSPVVTQDGDHQFSGGEKQARRGLCPALSFKDVHHPCWGGGRAEPELYLPHGFVGHPLLQHSGERALTGLAEGADFDNVGLVGRKRRQLQRVGLAGSAGSGAASGATFHRWAERGYLPVVRAAVAPRAPGDRPRRRVLLGRRSCSWAVLPLLRYDAPVWRSVFARPGGSEWGSAGGQAAAVVGAEVVAAEEVLIADEITATIRAPGLRLFGFDSLSSPLEWGHGRGARHISVRPEVIAAAVWPPGVEVVVAAAGAGVSEPPGVLSPRRPSNVAGLFVPAGVEPEFRL

SEQ ID NO: 48493 - protein, 214 aa, Zea mays
  Coding DNA Sequence Number=SeqID_5118
  Homolog annotation: Hit_ID=Q6QP51; Match level="QueryCoverage=95%, HitCoverage=82%, E-value=3e-08, Identity=32%"; Hit description =Putative growth-regulating factor 1
  Subcellular localization annotation: CTP_CleavageSite=53; ConfidenceScore=5.52e-01
MDAIQVKAPSTQGTRSRLARAQPRAKAADPGGFTTRPRIPSSNGCTFGSPEAQASRRSNLGQIATPTDRIENSAACPAPTVVPLDRVRLTAAKSSLGRHRKLRLVRSQSSGSTSTLDDGLRLARPQGSDSASTSDDGLRLARPQGSDSASTSDDGLRLARPQGSDSTSTSEDGLRLARPSGPDLASTSEEPPRRPDLGARTEHVTGGHHYPTPR

SEQ ID NO: 48494 - protein, 199 aa, Zea mays
  Coding DNA Sequence Number=SeqID_5119
MGLAAPATGARAELGRDLGKEGRLGSSAACWPVGRPRQGQAAVQGLLAATPGGAAGLGRTTEGKGSTRGLAERKRTARPGDREDYSSGKENDVTRGCREGPSRGREDGEGKRGERTHREPPCAGTTASTRFDLGKETRNYVTAGWLYKREHGRRLPNSSSTVLRPSKRGDCEYDEALFCAWAHQTVWCATGAPTVDSNG

SEQ ID NO: 48495 - protein, 756 aa, Zea mays
  Coding DNA Sequence Number=SeqID_5120
  Gene Ontology: Mol. function=signal transducer activity; Cellular component=nucleus; Biological process=regulation of transcription, DNA-dependent
  Homolog annotation: Hit_ID=Q2R2W1; Match level="QueryCoverage=80%, HitCoverage=97%, E-value=0.0, Identity=83%"; Hit description=Adagio -like protein 3
  Pfam annotation: Domain name=F-box; Domain location=343-391; Score =29.5; E_value=1.2e-05; Accession=PF00646.24; Description=F-box domain
  Pfam annotation: Domain name=Kelch_1; Domain location=438-486; Score =17.2; E_value=0.026; Accession=PF01344.16; Description=Kelch motif
  Pfam annotation: Domain name=Kelch_1; Domain location=490-538; Score =7.2; E_value=0.41; Accession=PF01344.16; Description=Kelch motif
  Pfam annotation: Domain name=Kelch_1; Domain location=543-591; Score =12.3; E_value=0.1; Accession=PF01344.16; Description=Kelch motif
  Pfam annotation: Domain name=Kelch_1; Domain location=595-647; Score =3.0; E_value=1.4; Accession=PF01344.16; Description=Kelch motif
  Pfam annotation: Domain name=Kelch_1; Domain location=656-704; Score =0.9; E_value=2.4; Accession=PF01344.16; Description=Kelch motif
  Pfam annotation: Domain name=Kelch_2; Domain location=438-486; Score =17.8; E_value=0.04; Accession=PF07646.6; Description=Kelch motif
  Pfam annotation: Domain name=Kelch_2; Domain location=491-538; Score =22.9; E_value=0.0012; Accession=PF07646.6; Description=Kelch motif
  Pfam annotation: Domain name=Kelch_2; Domain location=542-591; Score =13.7; E_value=0.72; Accession=PF07646.6; Description=Kelch motif
  Pfam annotation: Domain name=Kelch_2; Domain location=596-647; Score =17.5; E_value=0.05; Accession=PF07646.6; Description=Kelch motif
  Pfam annotation: Domain name=Kelch_2; Domain location=656-704; Score =33.5; E_value=7.6e-07; Accession=PF07646.6; Description=Kelch motif
  Pfam annotation: Domain name=Kelch_2; Domain location=710-751; Score =0.7; E_value=38; Accession=PF07646.6; Description=Kelch motif
  Pfam annotation: Domain name=PAS_3; Domain location=201-302; Score =2.5; E_value=0.058; Accession=PF08447.2; Description=PAS fold
  Pfam annotation: Domain name=PAS_4; Domain location=181-300; Score =4.4; E_value=0.077; Accession=PF08448.1; Description=PAS fold
  Pfam module annotation: Pfam domain module=F-box::Kelch_1::Kelch _1::Kelch_1::Kelch_1::Kelch_1::Kelch_2::Kelch_2::Kelch_2::Kelch _2::Kelch_2::Kelch_2::PAS_3::PAS_4; Domain location=343-391::438 -486::490-538::543-591::...
  Pfam module annotation: Domain location=595-647::656-704::438 -486::491-538::542-591::596-647::656-704::710-751::201-302::181-300
MSKTPAEPLRARAASPPSSDVFGTSRWSDRDKTGRDTLRSIRHQTKACDGVIPQCVLVQLRGPLPGPPDPADALPRLRGPTLPPPREIFFATPSGQIPNISPTWQQNLISIFLPHPTQPRTHAEEGESGCGGAGGRPRMFDDAGAVAVKRMRLWEEDEVEVEEEGMEVDAEPGWPWGTPAAGLSRAAAIVVADAAEPDFPVIYVNAAFESATGYRAHEVLGRNCRFLQFRDPRAQRRHPLVDPMVVSEIRRCLNEGIEFHGELLNFRKDGAPLYNRLSLIPMHGDDGYVTHVIGIQLFSEANIDLSSVSYPVYKQQTNNRPSIQDLNSASHEHAPKVQSADHCGILQLSDEVLAHNILSRLSPRDVASIGSVCTRMHELTKNDHLRKMVCQNAWGRDATVKLEMSTKMVGWGRLARELTTLEAASWRKFTVGGRVEPSRCNFSACAVGNRLVLFGGEGVNMQPMDDTFVLNMEAARPEWRRVKVSASPPGRWGHTLSWLNGSWLVVFGGCGQQGLLNDVFVLDLDAQQPTWREVASEGPPLPRSWHSSCTLDGSKLVVSGGCTESGVLLSDTFLLDLTKEKPAWREIPTSWSPPSRLGHTMSVYGTTKLLMFGGLAKSGSLRLRSSDAYTMDVGEDSPQWRQLATTGFPNVGPPPRLDHVAVSLPCGRIIIFGGSIAGLHSPAQLFLVDPAEEKPTWRILNVPGKPPKFAWGHSTCVVGGTRVLVLGGHTGEEWILNELHELCLASRPDDDDDDRY

SEQ ID NO: 48496 - protein, 148 aa, Zea mays
  Coding DNA Sequence Number=SeqID_5121
MARGEPAEGAWTGWSRAMGLAAPATGARAELGRDLGKEGRLGSSAACWPVGRPAAGASRRAGAPSRDAGRGRRTWPHNGGKGIHARSRREETNCSAGGQRGLLVGEGERRDAGLQGGSVEGERGWGREERGEDSPGTAMCWDDSFYAI

SEQ ID NO: 48497 - protein, 603 aa, Zea mays
  Coding DNA Sequence Number=SeqID_5122
  Gene Ontology: Mol. function=aspartic-type endopeptidase activity; Biological process=DNA integration
  Homolog annotation: Hit_ID=Q94GR9; Match level="QueryCoverage=94%, HitCoverage=30%, E-value=2e-13, Identity=26%"; Hit description =Putative gag-pol polyprotein
  Pfam annotation: Domain name=zf-CCHC; Domain location=168-185; Score =27.0; E_value=7e-05; Accession=PF00098.14; Description=Zinc knuckle
  Pfam annotation: Domain name=zf-CCHC; Domain location=518-535; Score =24.2; E_value=0.00032; Accession=PF00098.14; Description=Zinc knuckle
  Pfam module annotation: Pfam domain module=zf-CCHC::zf-CCHC; Domain location=168-185::518-535
MVGLQMMMMLVMTMVMVAFGAIYAQEVNGLGLTQISQPDVVRKILSVLPIDKYGHIVTVLHQMDLSVTTPTQILGKINSHEMYMHINDKDEPSSKRKDLALKANQERKGKAKIQIEEESSSDDDLDANIALMVRKTTKMLKKLNREGIKFDSRKKKFFSSKRKPISEMDCYNCGELGHLAHQCNKPKKNKFKGKKEDDNDDENKEKRFFKRKDEKEKRFHKKKNRKAYIVGDWLTDIESSSGSSSSEEENDEKVVAIAGDFSSPPPSPSSTSHLCLMARGERKVQNDIDITDDSDSDSDEEFASPSYDELADLLKEYTQIIRKSKAKYAKDKCDKLNEANRELQDRLVKIKQDYTKIKFDHDNLLVENELLSCKTHEAINLVVKIDVATSCDDLSQGEQTSLHDELTEKVEVLTLDNQKLKRYLTDATTRGNVAIENNDFNNELAVDNERLKNEVKKLKSENEHLATSVQKFNKGQYLQNELLMNTVMKNNKSGIGYNAFVQKKATTQYKPKQTHKPIKCFECRKEGHFAHNCKAKPPTPLTKHSRPFAFNAHYVLRKVANGKVKVTFLGPPNKSRPRQIWVAKSLIERVTDPMQYRALRTQA

SEQ ID NO: 48498 - protein, 98 aa, Zea mays
  Coding DNA Sequence Number=SeqID_5123
MAKGDGRGGGPQGLRLAVQVPGGLPQRYPGCGGAEEGDDSIHGAAAKGAPLIRDTLIRDGLFTNDDEEDGYDYAVGNGKEEGVEADLQEFQDFGEFED

SEQ ID NO: 48499 - protein, 500 aa, Zea mays
  Coding DNA Sequence Number=SeqID_5124
  Gene Ontology: Mol. function=aspartic-type endopeptidase activity; Biological process=DNA integration
  Homolog annotation: Hit_ID=Q94GR9; Match level="QueryCoverage=83%, HitCoverage=20%, E-value=2e-11, Identity=22%"; Hit description =Putative gag-pol polyprotein
  Pfam annotation: Domain name=zf-CCHC; Domain location=1-18; Score =27.0; E_value=7e-05; Accession=PF00098.14; Description=Zinc knuckle
  Pfam annotation: Domain name=zf-CCHC; Domain location=372-389; Score =28.0; E_value=3.4e-05; Accession=PF00098.14; Description=Zinc knuckle
  Pfam module annotation: Pfam domain module=zf-CCHC::zf-CCHC; Domain location=1-18::372-389
MDCYNCGELGHLAHQCNKPKKNKFKGKKEDDINDEKKENRFFKRKDGKQKRFHKKKNGKAYIVGDWLTDIESSSGSSSSEEENDEKVATIVGDFSSPPPSPSSTSHLCLMARGERKVQNDIDITDDSDSDSDEEFASPSYDELADLLKEYTQIIRKSKAKCDKLKNENESLNAKYDIVMKANAKDKCDKLNEANRELQDRLVKIKEDYTKIKFDHDNILVENELLSCKTHEAINPIVKIDVATSCDDLSQGEQTSLHDELTEKVEVLTLDNQKLKRYLTDATTIGKVAIENNDFNNELAVDNERLKNEVKKLKSENEHLATSVQKFNKGQYLQNELLMNTVMKNNKSGIGYNAFVQKKATTQYKPKQTHKPIKCFECGKEGHFAHNCKAKPPTPLPKHSRPFAFNAHYVLRKVANGKIHFCLRITQIHSIRESTLGFRESWNRALPNEPNKPNATKDGFCVIALSAKMVDNDGDGDGNGPVCLGFFKLLATKSSYGRVNA

SEQ ID NO: 48500 - protein, 173 aa, Zea mays
  Coding DNA Sequence Number=SeqID_5125
  Gene Ontology: Mol. function=phosphotransferase activity, alcohol group as acceptor; Biological process=cAMP biosynthetic process
  Homolog annotation: Hit_ID=Q9ZVF8; Match level="QueryCoverage=21%, HitCoverage=5%, E-value=1e-12, Identity=89%"; Hit description =Putative uncharacterized protein At2g01460
MKIDDWIKVRQCGIRYYLSLGDQRIVDKYFIIRPKAEFEHPRGARPGFTVRVDVPHLGRVDPAPLGVGMDVAPRLMELRCPDVTTSLVESASQETTASPLPETLVALLSEVPTVETAQSGVAVRPVRPGSTTRPTPRLPTQESLDFASITTCCQSPPAEAPGSPRQSLAGDHA

SEQ ID NO: 48501 - protein, 729 aa, Zea mays
  Coding DNA Sequence Number=SeqID_5126
  Homolog annotation: Hit_ID=A3BQI5; Match level="QueryCoverage=27%, HitCoverage=18%, E-value=7e-12, Identity=28%"; Hit description =Putative uncharacterized protein
  Pfam annotation: Domain name=zf-CCHC; Domain location=143-160; Score =9.8; E_value=0.051; Accession=PF00098.14; Description=Zinc knuckle
  Pfam annotation: Domain name=zf-CCHC; Domain location=162-179; Score =19.2; E_value=0.0019; Accession=PF00098.14; Description=Zinc knuckle
  Pfam module annotation: Pfam domain module=zf-CCHC::zf-CCHC; Domain location=143-160::162-179
  Subcellular localization annotation: CTP_CleavageSite=82; ConfidenceScore=5.59e-01
MSFPLPPLPLPSLPLPSPALPPPADAPAPPTHSLTPVILPWSAATQPATPASVSSPLSAQSVADIPGGRSKAQRWCEQEFPSAASRSDLRRSYKEALVDGRFTASGADDGDGGWVKVVGRRRRSPCSPLPLRPPRPVPADLRGRCFNCFSPSHHAAECGSLVRCFHCRLPGHRVRACPRRKRTLHHPAKVLVWRLVPRKVERVASSSQEGRAKVLVWRPIPRKVVPEEVSLCDMEGVSRVGDDGDGMKKTKRTRRGQRRRRMDREDLGAPARGSSLASSLPSVVPPPRSYILKRSRLIDQAEEDFHRALFVNVLGQEGSDCAVVILEALASKYGLEADALQIRRAASNSYLVFFPSVDHVVRALAGGNSISIPPLRLHLRRWSRQASASGGGALPVLMDVELGGIPAHLWGIDTAEHLLGGHCIVQGLHPDAVDGTDLSVLKLKAWGFSMDCLPSRCDLHVEEPTSIGEDGSCFPRTLIYSISVKVTTPVVLPVEEQPLFSSPDDDDDRDSKHQRQRQHVTDHQFSSVRISVHARLGPRITPGGGGGTVDAAPLPNSSVDELQAPVPSFPGCPPSPVLGAPFIDNTGLLPASVGVSDVSTGGKAADITLEPFSGNALVPLVSSFNLEEQSASRILVSSWDYKIRAKPPCFKVYVRKKIPVQIALSEEIGTSTPLQKFKDGITKQINGILPAPIQPVKRKRKLIPSNFNLRRSRRVAKIPPELGSPSAAK

SEQ ID NO: 48502 - protein, 252 aa, Zea mays
  Coding DNA Sequence Number=SeqID_5127
MRVLRIQERTTLSIRYQEGTCEQPTLMRTWSLWAYRCKGEKDKVALASVSGEGWVEDDWNQRPHVLNIGRLGVEDSDDRGFVRRGSYIVVVVGGEGSSHKLPLCLRELSTMLKRRFNNHGSSTFLLPNKISSPFVLSSNSGGGLGGGESSIQCRVCNNQLVKGHGREEHHQHWAWANGGPDREALVVELTRGGGTIVVSSPVAPARARGSFACSTLVHDSGTCARGDDEERSRGGKHAMGKGGSLVMEKAPY

SEQ ID NO: 48503 - protein, 126 aa, Zea mays
  Coding DNA Sequence Number=SeqID_5128
MNGLKKNLMVITNNIWGAVDEALGATQGLRAEICLGLLLLQVLVPPLTQTQTYVRTRKRSRNAAATAQDIHEEHDNSPAEDEQEQQEQETVRQMNDDEDEGEQESGGRGAAVGYLDWMNKYLLSIS

SEQ ID NO: 48504 - protein, 395 aa, Zea mays
  Coding DNA Sequence Number=SeqID_5129
  Subcellular localization annotation: CTP_CleavageSite=59; ConfidenceScore=5.48e-01
MGQGRPLGLPTSSSPETPCSAPSEGNMRLGGCSRKPGSGQTVDSVNIPARELGTRPCTRATASSHEGTTRPAEALREALRPRRSQTTPPRPRGLHPAGALARTHQNKTQPRKAGPLAKKCDKSLQASVNTPFEARGLLSGTIIRGTLKAPNSQLSRSDRSHFVAPLIGLTEGQRRLCRSDCCATQQSEADRQSGPTSGTIGNSAPPDPGLGLGLSPGRQRTPLRPTQGSDLGSAPEDGELRSAQPRARTWAQPRKTANSAPPDPGLRLGLSPGRWRTPIRPTPGLGLSPGFSRRSPPRPTLGLGLSPSFSRRSPPRPTQGLGLDLGHGRQTRPQPRRSLHIAQPRARTDHSCNRLHATPGLLPSVKTKINVEPEIWSTKRKHGDEALAKPVTTTF

SEQ ID NO: 48505 - protein, 109 aa, Zea mays
  Coding DNA Sequence Number=SeqID_5130
MPVRGQINRTIVILRENPVNVIVHPCWIPLQLRASSNNGIAAAETPRGWPGAGKEWGSGGISGQGEWRLVGVAPEMVPTLPTKPSTKETSKTIKTMCIGDERVQKSMPQ

SEQ ID NO: 48506 - protein, 220 aa, Zea mays
  Coding DNA Sequence Number=SeqID_5131
MNALSREGCRHFEVFDQADEDFERDIYKVEDPIVKESTGAIYDRMWGPHDREVVRERAETARAQVQDFGPAHATATTNFLAASTVDGGNKYDGSASEFSDFADSGSSVEWTEESSEEDLDYFVALDVAAAEASPHVADTEDVPGPSTGRRRRRAVAKRRVSGAEGGRLRVSRAGRQELLSLPAAASTGEGELRSLFAGEELRIILFNYREMRIIPKVEPM

SEQ ID NO: 48507 - protein, 25 aa, Zea mays
  Coding DNA Sequence Number=SeqID_5132
MGTNGHLDLDTGGSKPTLRRFTLGP

SEQ ID NO: 48508 - protein, 125 aa, Zea mays
  Coding DNA Sequence Number=SeqID_5133
MGRRETEREGGKKPEGDRRKRGNPRPSCLSRAQVGCACSRGLQASTREGASGLRERYPVLPRAANPLRKERIQVYNGRCSNVLTSKYMPSWQPERFWHPVRVVSWPSEERWSLAEGQLSGLSSPC

SEQ ID NO: 48509 - protein, 62 aa, Zea mays
  Coding DNA Sequence Number=SeqID_5134
MKNDFEARYATYIANAMLKFQDREAIMPPYNFKAFRFYKFKGGKYDKTKKCVPLDIHHHWPE

SEQ ID NO: 48510 - protein, 44 aa, Zea mays
  Coding DNA Sequence Number=SeqID_5135
MGMPKVLLLLVLFIQIINVLTISASARPFKAEAGTMIQMAFFLQ

SEQ ID NO: 48511 - protein, 120 aa, Zea mays
  Coding DNA Sequence Number=SeqID_5136
MADKGKGKGIVICDPRMSDISQKEIARKASDEKAKKSEDTGGQAQLMNQTHQPSPNIQCVWELDPDCFLSPNMSTTIWIVVVPASASALNGLADAETVPVGELGLIGCVVACRGRCVLII

SEQ ID NO: 48512 - protein, 165 aa, Zea mays
  Coding DNA Sequence Number=SeqID_5137
  Homolog annotation: Hit_ID=Q7XGW8; Match level="QueryCoverage=41%, HitCoverage=4%, E-value=3e-07, Identity=37%"; Hit description =Retrotransposon protein, putative, Ty1-copia subclass
MVDCADCNAVSRAEVKSQSAKSERTGLSGVPPDCPVPQEDRRLQRSIAPNPNGRLTWHSPDSEQCSVRCTTRLSGYGLIRDMYSRLNLIINELNSIGINDLGNADIVRKIIRLLPQQRYGSIITILHNMEDLNTMTPTIVIGKIAAFEMSRKNGSTRGANFFKTI

SEQ ID NO: 48513 - protein, 120 aa, Zea mays
  Coding DNA Sequence Number=SeqID_5138
MSPGRGPSGPKLRTVRCDAGKTPLLRPGRGPSGPKTRTVHDAAEGTARRYSTYCVVQIGAAEGTAGDEVADLQNQAYMADSKDLNGASPNSNTRVSYPRRQKARVAFRICSQRPLAALGL

SEQ ID NO: 48514 - protein, 176 aa, Zea mays
  Coding DNA Sequence Number=SeqID_5139
MDGTSSSTGGDEVASGTDYTVISGNDDRLRIRREVNARRVPRWGAGAVDSLDNRRGAASCLAMPAPPPPPLAGKVTGQTRMLLFRHVGKTSSVPPPAVGLTAAIVVVARRRKEYHVVAAVEGHELKTPETEHRPGLERLLETTHLELDGKLFVNMQQAPTWRANCRRFDPGGSLDR

SEQ ID NO: 48515 - protein, 466 aa, Zea mays
  Coding DNA Sequence Number=SeqID_5140
  Gene Ontology: Mol. function=Rab GTPase activator activity; Cellular component=intracellular; Biological process=regulation of Rab GTPase activity
  Homolog annotation: Hit_ID=Q84YM9; Match level="QueryCoverage=39%, HitCoverage=86%, E-value=1e-73, Identity=72%"; Hit description =Putative uncharacterized protein OSJNBa0086N05.106
  Pfam annotation: Domain name=DUF567; Domain location=16-197; Score =237.7; E_value=2.5e-68; Accession=PF04525.3; Description=Protein of unknown function (DUF567)
  Subcellular localization annotation: CTP_CleavageSite=71; ConfidenceScore=5.22e-01
MAAPYYGGPPAAPAPVAVVSPQFCAPYVVPLTVTKKAISLSDGDFTVTDANGATVLQVKGAVFSIRHRRVLLDAAGQPILTMLEKVFSMHNRWEVFRGDSSNESDLLFTAKKSSIFQLKTEMDIFLASNTAQQVCDFKIKGSYFERSCAFYLGNSSSMIAQMNRQFTVTNVLLGRDTFGVTVFPHVDYVFVAALVVILDEIHRERLFLSIIYFPFIGDLASGAGQAQENSGIEIHCDDEEEGSENAEHNNNLESPKEVDASVESREANGKSEDLKDVTNLDKLQEKTGSSSSTEAIKALEGLMETNRDFEELKYLNGSSEELEEENNGNMEKLVELFLDKGLLDELKPIKVESQRRVRAALSIIDKMMIYRVVKGGNGANDIHGNDGAQLTSIEEEGRTAEVSDDGDPAEVESCVAEKVELGHETTHDSTCTALDGGNDGSYFPWREELESEREMCPWAISKYFGD

SEQ ID NO: 48516 - protein, 1100 aa, Zea mays
  Coding DNA Sequence Number=SeqID_5141
  Gene Ontology: Mol. function=hydrolase activity, acting on acid anhydrides, catalyzing transmembrane movement of substances; Cellular component=integral to membrane; Biological process=metal ion transport
  Homolog annotation: Hit_ID=A9NIX0; Match level="QueryCoverage=61%, HitCoverage=66%, E-value=0.0, Identity=53%"; Hit description =Putative ATPase-like zinc transporter
  Pfam annotation: Domain name=E1-E2_ATPase; Domain location=267-489; Score=256.1; E_value=7.4e-74; Accession=PF00122.11; Description=E1 -E2 ATPase
  Pfam annotation: Domain name=Hydrolase; Domain location=493-722; Score=106.5; E_value=8.2e-29; Accession=PF00702.17; Description =haloacid dehalogenase-like hydrolase
  Pfam module annotation: Pfam domain module=E1-E2_ATPase::Hydrolase; Domain location=267-489::493-722
  Subcellular localization annotation: CTP_CleavageSite=50; ConfidenceScore=5.17e-01
MMSACPPQIGTSLSRMQKWLTEPPILSLISGRRRCRLLSLPCRENFCVLRAPTAIYVLLLTFPPPLAFLQLQSLILARTGAAAAMGSVEERLLPPPPARSADAGAGGAKSGKWEKTYLDVLGVCCSAEVALVERLLKPIDGVRAVTVVVPSRTVIVEHDLAAVSQSHIVKALNKAGLEASVRAYGSSGVVARWPSPYTVASGALLLASLFAPLLPSLRWLALAAACAGAPPMVLRALAAGLALDINALMLVAVAGAAALGDYAEAGAIVFLFTTAEWLETLACTKASAGMSSLMSMVPPTVVLAQTGEVVGVRDVGVGAVVAVRAGEVVPVDGVVVDGQSEVDESSLTGESFPVPKQPQAEVWAGTMNLDGYIAVRTTALADNSTVARMQRLVEAAQNSRSKTQRLVDSCAKYYTPAVVAVAAGVALVPLLLGPRGAQDPKRWFQLALVLLVSACPCALVLSTPVATFCALLRAARMGVLIKGGDVLESLGEIRVAAFDKTGTITKGEFSVHGFHVVGDKVGMSQLLYWVSSIESKSSHPMATALVEYAQSKSIQPEPTSVTDFRIYPGEGISGAINGRQIFIGNTRIMARSSCYAAGAGPEMEGQQGASIGHVIVDGDHVAAFSLSDDCRTGAAEAIRELRSMGIRSVMLTGDSKAAASRAQRQLGGALEEVHSELLPADKVALVGDLKARAGPTLMVGDGMNDAPALATADVGVAMGLSGSAAAMETSHATLMSSDLLRVPAAVRLGRRARATVAANVIASVGAKAAVLALAAAWRPALWVAVLADVGTCLLVVLHSMLLLWDPAGAGWRRRGGGGDPEACRATARSLAMRSQLAEASNGAAGTAQGRRPGGGTKAGCHCCRETSEPSEQDHTAVVVDIPAPSAERPGVVAPTAATGCCSSSAREACATPTTVTTVNSAPRGCCGGIGEGDTRENARTSCCTDARDSPKKAGQQCNARAPITQQEPVAVLSGQARTGQRRIAGGAWISLPGGTPSGTFGAEWFGNLARPVLVDQIEGLSIGLVLEASTCQEQMFGVPPRWGTVASQMDMMVCPTFDLGHMVEVRGHRGFLAMSDHPLECSGPSGDVTNRPRLDTVKVA

SEQ ID NO: 48517 - protein, 245 aa, Zea mays
  Coding DNA Sequence Number=SeqID_5142
  Gene Ontology: Mol. function=protein serine/threonine kinase activity; Cellular component=cytosol; Biological process=protein amino acid phosphorylation
  Homolog annotation: Hit_ID=A9PGJ5; Match level="QueryCoverage=41%, HitCoverage=21%, E-value=4e-30, Identity=63%"; Hit description =Putative uncharacterized protein
  Pfam annotation: Domain name=RIO1; Domain location=1-141; Score= -66.4; E_value=0.0016; Accession=PF01163.13; Description=RIO1 family
MSPSTATARPHLRDQRHHGLGSEAQVGRPQQFPELSQNAHLLQQVGAVRHPGLRQVLQEPQLLLDTRSRTHDLPNGRPFPPLFNFKQEIDDDEKITVIDFPQMVSVSHRNAQMFFDRDIECIYKFFNKRFNLRSVKNEEQAGFENDDEGNSRPSFLSVEKGAGSLDKELAASGFTRKEQVDMEKYTEEVVEGHDSSSDDEVGDVVPLVSLKIDQDSSDEPDCDLTQVIQRRLELFLKRLVVFPSE

SEQ ID NO: 48518 - protein, 57 aa, Zea mays
  Coding DNA Sequence Number=SeqID_5143
MESHDLRAEWESRLVGGYEVDGFDYDYGTGCQHCNHCSGEDEAVEGDFQEFQDYDEF

SEQ ID NO: 48519 - protein, 942 aa, Zea mays
  Coding DNA Sequence Number=SeqID_5144
  Gene Ontology: Mol. function=hydrolase activity, acting on acid anhydrides, catalyzing transmembrane movement of substances; Cellular component=integral to membrane; Biological process=metal ion transport
  Homolog annotation: Hit_ID=A9NIX0; Match level="QueryCoverage=65%, HitCoverage=63%, E-value=0.0, Identity=57%"; Hit description =Putative ATPase-like zinc transporter
  Pfam annotation: Domain name=E1-E2_ATPase; Domain location=213-438; Score=239.6; E_value=7.1e-69; Accession=PF00122.11; Description=E1 -E2 ATPase
  Pfam annotation: Domain name=Hydrolase; Domain location=442-631; Score=94.8; E_value=2.6e-25; Accession=PF00702.17; Description =haloacid dehalogenase-like hydrolase
  Pfam module annotation: Pfam domain module=E1-E2_ATPase::Hydrolase; Domain location=213-438::442-631
MEEQPVAKILAGSAGARRLAFPLALGPCPWPSEMPGPAVEAAARGGGCCGKTAGKWEKTYLDVLGICCTAEVALVERLLAPINGVRAVTVVVPSRTVIVDHDTAAVSQFHIVKVLNKAGLEASVRAYGSSAGAPGRWPSPFIVACGVLLAASLFAPLLPPLRWLAVAAACVGSQPMLLRAFAAAGKLTLDINILMLIAVAGAVALGSYTEAGAIVFLFTVAEWLETLACTKASAGMLSLMSSVPKTVVLAETGQVVGMGDVAVGTVVAVRAGDVVPVDGVVVGGQSEVDESSLTGESFPVPKQAQSEVWAGTINLDGYISVRTTALAENSTVAKMERLVEEAQNSRSRTQRLIDSCAKHYTPGWYDDRAVVVLAAGVVLVPVLLGAPDLEHWFRLSLVLLVSACPCALVLSTPVATFCALLRAARMGLLVKGGNVLESLGEVRVAAFDKTGTITRGEFSIKDFLVVRDKVQMSQLLYWVSSIESKSSHPMAAALVEYAQSKSIQPKPEDVTETCIYHGEGIYGAINGKHIYIGNERIMARTGAAEAILQLRSMGIKSVMLTGDSEAAAKHAQEQLGGVLEELHSGLLPEDKVRLIRGLQARHGATLMVGDGMNDAPALAAADVGVSMGLSGSAAAIETSHATLMSGDVLRVPKAVRLGRRTRRTIAVNVASSVGAKAAVLALAVAWRPVLWVAVLADVGTCLLVVLHSMLLLRDAARARRRCGGASKACCATACKAPKTACCATASKACGATTVKPVATRPQPAGAGKKADRPGGDKHGNGKDDCHRCCHKQSKLPEDAVVIAIPVRAVEHRKDAAAHEKAEGNAAGGCCGGAPASAACCAEAHGGEDEVCIVISARSPCCSTARSRSASPKDAMCCGSGGKDGGAISALEHAGLRPTLAGLEHTNKSTTWNWSTPNTSWLDSLPKNTATWGFTASARAGER

SEQ ID NO: 48520 - protein, 134 aa, Zea mays
  Coding DNA Sequence Number=SeqID_5145
  Subcellular localization annotation: CTP_CleavageSite=47; ConfidenceScore=5.60e-01
MASPAAFGPHHHRSALPGAAAPVPGLPPRRGGAHPQPSPRRRSAPVPGAAAPVPARPPSPAARGPRPAPGGARPRPLSRPGPRLGRPWPIQPSRPRLGRPWPVQPPRPRLGRPFPRPGLARPYLRSPALAVIIC

SEQ ID NO: 48521 - protein, 232 aa, Zea mays
  Coding DNA Sequence Number=SeqID_5146
  Gene Ontology: Mol. function=kinase activity
  Homolog annotation: Hit_ID=Q6QP54; Match level="QueryCoverage=32%, HitCoverage=26%, E-value=1e-09, Identity=48%"; Hit description =Putative kinase
MAPPVDVVGLCPRLGEVEAPPRSRSSLSSKVEVESEPPGRTRRRSSAEARAESEPWGRAKRSSSSFGAEPESEPWGRAEWSSLSSGAEPESEPWGWAERSSSSSGTEPESEPWGRAKRSSSSSGAEPESEPWGREERSSSSSGAEPESEPWGRAERSSSSSGAEPESEPWGWAERSFPWRLGPNSAAVSLTFSSGSAVGAAQVALSSCQTGQWSGEVTAVTSALSTGGRASG

SEQ ID NO: 48522 - protein, 153 aa, Zea mays
  Coding DNA Sequence Number=SeqID_5147
  Subcellular localization annotation: CTP_CleavageSite=9; ConfidenceScore=5.52e-01
MSSRSLMCCVFPPSEPPNGGRPQSFRLVVGGTQLRGSRYLSAIVRLQGFSSCSPAASPRRWSPKTVTTSPWVGRSKPGCDLGPALSFKDVHHPCWGGGRAEPELYLPRRFMGQPLLQHSRERALTGPARGANFDNAGLVDELFVRARVAFHGR

SEQ ID NO: 48523 - protein, 464 aa, Zea mays
  Coding DNA Sequence Number=SeqID_5148
  Homolog annotation: Hit_ID=A2X3N2; Match level="QueryCoverage=96%, HitCoverage=96%, E-value=1e-137, Identity=51%"; Hit description =Putative uncharacterized protein
  Pfam annotation: Domain name=XH; Domain location=331-464; Score =240.1; E_value=4.9e-69; Accession=PF03469.5; Description=XH domain
  Pfam annotation: Domain name=XS; Domain location=114-220; Score=36.8; E_value=1.4e-09; Accession=PF03468.5; Description=XS domain
  Pfam annotation: Domain name=zf-XS; Domain location=43-83; Score =85.0; E_value=2.4e-22; Accession=PF03470.5; Description=XS zinc finger domain
  Pfam module annotation: Pfam domain module=XH::XS::zf-XS; Domain location=331-464::114-220::43-83
MDCSSDESSELSETDIDDYADKSYSDLKSGKFVARLGSDRFRCPFCPGKKKQDYRYSELLQHAVGVGASNRAAKVKANHQALAKLLKEDHADAAATLPAWQAIALSNAPKPAQDQEAFVWPWTGVLANVPAGQAQEGGATLMEQLAEFKPVQITAVCGADGYAGYVVVLFTKDWIGFKNALAFQNCFKSRRLEMRNMQSAVREHTRRVFQETEELRNQLVEKESNIQRRSRELNELVAQTDMERRKLEEERKKNADQNDSLNMARIEQQRADERALQLLEKHKKEKEDALNRILQLERQVDEKQKLELDIEQLKGKLEVGLTDMLGPRSNIGIKRMGELDEKPFVLSCKQRYGQDAEMKAAELVSLWQEHLKDPNWHPFKIVTTGSTKEQIIDDKDEKLAGLKKQLGEKVYEAVATALLEINEYNASGSYVVSELWNNRENRKASVTEAIQHVLKQWKAQRRRR

SEQ ID NO: 48524 - protein, 324 aa, Zea mays
  Coding DNA Sequence Number=SeqID_5149
MEGFMAYASLVTCEGAMNALSREGCRHFEVFDQADEDFERDIFKVEDPVVKESAGALYDRMWGLHGREVVRERAETARAQAARGERVDDFGALNSMLSDPEPTPGTAGNAPGAPASAAAGEDLPPEVAEGAPDALAAAAPSAEDPAAVAAEAAAETTAEAPATSGSSQVQDFGPAHTTATTKFLAASTAEDGNECGGSASECFDCADSGSSVEWTEESSEEDLDYFAALDVAAVEASPCVADAGDAPGPSTGRRRRRAIAKHRVSGAEGARLRVSGAGRQELLSLPAAVNTGEGELRSLFAGEELRIMLFNYREMGIIPKVEPM

SEQ ID NO: 48525 - protein, 102 aa, Zea mays
  Coding DNA Sequence Number=SeqID_5150
MALLDPPKCFQSEVAPNLVRNLLGWGASAFTGRIRVGASPLGDLAAGEFVLFISNLPCGLALLISSFFVLLLEELGLQPQHFTPASSFRRPSSPTSARCSWG

SEQ ID NO: 48526 - protein, 173 aa, Zea mays
  Coding DNA Sequence Number=SeqID_5151
  Pfam annotation: Domain name=Transposase_28; Domain location=1-148; Score=-44.3; E_value=0.0022; Accession=PF04195.3; Description =Putative gypsy type transposon
MALLDPPECFQSEVAPNLVHNLLGWGAPTFAGRIRVSASPLGDLAAGEFVLFVSNLPCGWALPISSFFVLLLEEFGLQPQHFTPRFILQETIFAYLCKMICRIWPRKLSHVPRPPESQFQILGHPSQSGGACRLTVQNQAKRLHGSGPPQGTCVHSLESDPKFPDPQGYSSRY

SEQ ID NO: 48527 - protein, 31 aa, Zea mays
  Coding DNA Sequence Number=SeqID_5152
MTSLLRNILKNSGSSPSVYVSIWFPAQNFNS

SEQ ID NO: 48528 - protein, 191 aa, Zea mays
  Coding DNA Sequence Number=SeqID_5153
MRKRYLKTMAWIKGERMNKKTRNKKYHRHLQLQSMPLYKEAIRGRAAQKPYVRLRPLAYVTGSRPRGSIKSPPERGAEAYANPGDLAVSGPDPAQGVRDPSQGSGHARGGSGPYPEGTDNGPRAHLRGGYEPVGSAHKEDDSWARAPVSDTGLLVSTEAPVLEASPLLSTEMKRRGGSLFAWWFAFFALGD

SEQ ID NO: 48529 - protein, 153 aa, Zea mays
  Coding DNA Sequence Number=SeqID_5154
  Gene Ontology: Mol. function=metalloendopeptidase activity; Cellular component=periplasmic space; Biological process=proteolysis
  Homolog annotation: Hit_ID=Q83QC3; Match level="QueryCoverage=73%, HitCoverage=11%, E-value=2e-60, Identity=100%"; Hit description =Protease 3 precursor
MIWDTSNGWQIQDRVPVEHTLDAVNIADRYDAKAVKERLAMMTPQNARIWYISPKEPHNKTAYFVDAPYQVDKISAQTFADWQKKAADIALSLPELNPYIPDDFSLIKSEKKYDHPELIVDESNLRNHQHFKASKFSANTFNTRASAFNTRHK

SEQ ID NO: 48530 - protein, 102 aa, Zea mays
  Coding DNA Sequence Number=SeqID_5155
  Gene Ontology: Mol. function=ATPase activity, coupled to transmembrane movement of substances; Cellular component=integral to membrane; Biological process=transport
  Homolog annotation: Hit_ID=A3BPQ2; Match level="QueryCoverage=38%, HitCoverage=3%, E-value=2e-09, Identity=75%"; Hit description =Putative uncharacterized protein
MGSIHDMGSSMSYYIVGKSLDVAGNNMGNNEATVHELSKEWGRGVGPHFRALPPSSVPRSCLSFKVVVNGTERDCESGIGTERLRPIDFLERNGSESEENIL

SEQ ID NO: 48531 - protein, 247 aa, Zea mays
  Coding DNA Sequence Number=SeqID_5156
  Homolog annotation: Hit_ID=Q6J9V9; Match level="QueryCoverage=50%, HitCoverage=43%, E-value=2e-58, Identity=91%"; Hit description =Putative uncharacterized protein
MGIFRKRILLSEGSGPRALLLIRGSKVAPCGARQPPQSTRAPSPLLIRGSKAGPSEGFDSRPRACRVRDDPGYVRYMAEARATLPRYPRTFSRPAGTICNGIPPEGGTEPLDRIKWVRVQQITCRVKLSHGLPRVQPRVQQGAPPRPTSGLDLSLGLGRSHILARPQPRPHEKSPPRPTSTSDRPRHSLSLGRSHILARPLASASTSASGGVTSSPDLSLGLRRSLRLARPRPRTDRATGDTSLPYP

SEQ ID NO: 48532 - protein, 156 aa, Zea mays
  Coding DNA Sequence Number=SeqID_5157
  Homolog annotation: Hit_ID=Q8GTL7; Match level="QueryCoverage=28%, HitCoverage=21%, E-value=5e-07, Identity=65%"; Hit description =Putative gag-pol
MSGVVPAPEATTGVASQQRANPKRTDDASTLAKDLLGVSLVPKITGDHDEDNHLGMLEDDDAPVPASRVEIPRGASYGPSPCEGVRTHSSSNSARCRPSSTKKWSDLCSSDKTSSRSGQAEHSPEERVIRPGTSNAVSLTMPGQGCPQPSAGPART

SEQ ID NO: 48533 - protein, 133 aa, Zea mays
  Coding DNA Sequence Number=SeqID_5158
  Subcellular localization annotation: CTP_CleavageSite=58; ConfidenceScore=5.56e-01
MSGAPRKRGLRNSPASGSRGSRSAKIHRTVRCAPDCPVYQRSNGSFRRQRLPAVHLMRAQRAQTSDMPIPVHRTSNSTCPVCTGHPGGPTSQKLQRSESNGSDDVAGAPDCPDHHFLTIVEGTRCERVTLLLY

SEQ ID NO: 48534 - protein, 389 aa, Zea mays
  Coding DNA Sequence Number=SeqID_5159
  Homolog annotation: Hit_ID=Q6J9V9; Match level="QueryCoverage=16%, HitCoverage=33%, E-value=2e-07, Identity=44%"; Hit description =Putative uncharacterized protein
  Subcellular localization annotation: CTP_CleavageSite=61; ConfidenceScore=5.43e-01
MNKRPALKVPLQTELRVPPPQVRTTPLDQGGLRSNRRPTGGSLSPAPAATTTAPASGGRTAAAMASGRTLLQPCPRPRRRSRGDDKYKEPEARSADGGGDPVGNGLLAPPPPRHRRQGPSALRQIPTQILPDEWGTDLRVEAPYRCKGRTAPEHEHRPGSARHLGRSSQAHGATTAFAAGGGTGSEAGEPNALRLTTPAVDQPRVVGVRPSRRASERPLPRTLNERLTHETAREVELRLSPASTLARMMNILEAEGGTKIAARLASPHPGPGGHRLGGSERRFAFAIMTVSKKGPGKGDTPKRTLLREGNRLRASLLIRGSKAGPSEGFNSRLRARGLHAHYWSEVRRSAPRKGSTAASGHSGSAPTTDQGFVGWLTKGSQPPQTQSEG

SEQ ID NO: 48535 - protein, 77 aa, Zea mays
  Coding DNA Sequence Number=SeqID_5160
  Homolog annotation: Hit_ID=Q6J9V2; Match level="QueryCoverage=46%, HitCoverage=12%, E-value=2e-10, Identity=91%"; Hit description =Putative uncharacterized protein
MGISLWILGRKAGANGCREGKRARRRRSTKVTLQAQQATLEENQSLLRQTQEEVKGLHTKFEETNALLRAVLKLQKD

SEQ ID NO: 48536 - protein, 29 aa, Zea mays
  Coding DNA Sequence Number=SeqID_5161
MEAKSRMEQAGNNAIIVKLPEGKQERTRK

SEQ ID NO: 48537 - protein, 24 aa, Zea mays
  Coding DNA Sequence Number=SeqID_5162
RHYGTGGYEIDGSGYDYGDESFWN

SEQ ID NO: 48538 - protein, 272 aa, Zea mays
  Coding DNA Sequence Number=SeqID_5163
  Subcellular localization annotation: CTP_CleavageSite=40; ConfidenceScore=5.07e-01
MVDVAFSADRVPSFAAIAHLPPPAIKTGVDFEKRIAPGCRGSRSRGGRGRETRSSSLFFGRGPRSSVIGWQGDTTKEHHQADLLASSIVRTSRSPAREAGGSEDGDPAKVTADQDEMVAAIVNPTEKAAAATDPTKAMKGKATGRSNRARAYAEPGKRGWAALGPMAVDQAADEAGGRELTGAPSRARRSRGGEGLAAVGRWPEVGSRCRREARPGQPPGGARASPGDRDGRQGASTMGLKEAPSGTPCVWEEGRAAPRKELEEALVKTWAR

SEQ ID NO: 48539 - protein, 153 aa, Zea mays
  Coding DNA Sequence Number=SeqID_5164
  Subcellular localization annotation: CTP_CleavageSite=63; ConfidenceScore=5.23e-01
MMVLASVATTSFVILLLFSLPSCLHLRATPFSAEGVGAGASSPYSSDTSPDTDSRSGYCTSTRTFHIMCAPSFLPSSDVPFVFPAFAMFFHPNLLPPPTVATASRPTLVDAGTGRVDHALGLSLCVSSRRIWWRLSCLGYLSDEESRSEILDN

SEQ ID NO: 48540 - protein, 242 aa, Zea mays
  Coding DNA Sequence Number=SeqID_5165
  Subcellular localization annotation: CTP_CleavageSite=75; ConfidenceScore=5.02e-01
CEDNARYVPRWGAGVVDSLRTDSRRGAASYLATIAPSPPPTARRVAGQTRMLLFRHGGKTSSSSPPPSELTTIVVAVALRGEEYHVVAAIEGHELETPEAEHRPGLKRLLKTTHLELNGKVFVNMQQAPYLARQLSAFRTRGSLDRPVNLSQRAPAQMGWRKMEHKGKMRLVLSRTRDPSLASPTLRARQSTAAINHRRPSPFPRRRWSSTVPSATPRRSATVDPGCRRAIAATEESPESAL

SEQ ID NO: 48541 - protein, 159 aa, Zea mays
  Coding DNA Sequence Number=SeqID_5166
MAGGRLLRRAGGWFPPPEAGRGGGQPTRAGGRAPTRLALRPSKDAGERADSHAVGTQPRQVGAPLRLPTHPAWRPRPTRHATGAPVTTCEQLHRHSHHYHASSTEEPVPRLEATLRMTQQCQPGAMVNTAKNGLAVMAVAGRQEQRSRRQPSLGPIQGQ

SEQ ID NO: 48542 - protein, 372 aa, Zea mays
  Coding DNA Sequence Number=SeqID_5167
MNKNTGIQSAITNGTPVPPPQVRTTPLDGGGPAEQQKTDERRAVARSSSSDDDDFCSGGPNSGSTDLRADAAAKRPPPMPKLVRQGRAEGRRVGGRSVGGPGYLVGGRTSSSCRGRRRRRERLRSHSRPRARHGAAASATDDDRPSLRSLSEGAGHHPRRGRPQLGTLPSPALVMKILEAEGGAEAAARLAFPHHQAGDQRAKGAGSHAGGMQPRQMGALLRLPTRPAWRPRPTRHATGAPDASCKQLHRRSRHYRASSTAEPIPRLEATQRTTQQRQPGATVNAAKNGPAVTAVAGGQEQQSRRQPSSRPIWGQRENPLSRREDNAPVFRSSNGSRMRNDRPANHSPRRINSAAGQAAPQAEEAGDTSPSP

SEQ ID NO: 48543 - protein, 272 aa, Zea mays
  Coding DNA Sequence Number=SeqID_5168
MKSRMALGSRSPEKSQPESGSSSSSEPGGLCEDNARYVPRWGAGVVDSLRTDSRRGAASYLATIAPSPPPTARRVAGQTRMLLFRHGGKTSSSSPPPSELTTIVVAVALRGEEYHVVAAIEGHELETPEAEHRPGLKRLLKTTHLELNGKVFVNMQQAPYLARQLSAFRTRGSLDRPVNLSQRAPAQMGWRKMEHKGKMRLVLSRTRDPSLASPTLRARQSTAAINHRRPSPFPRRRWSSTVPSATPRRSATVDPGCRRAIAATEESPESAL

SEQ ID NO: 48544 - protein, 273 aa, Zea mays
  Coding DNA Sequence Number=SeqID_5169
MFSPEAPTPVKTTRRTPGGPRAPQSTELKHAFLRKPFWIPRKSRQPIGMNYLHTSKGRGIAGSERLASGGDHISTDGGGHLCIDNSPAAAIISACTPLRKGPRPRLPTGDDNEAIKAKEPEVRRQVALTVSPAEATTSAVGSLTSGGDHLSTDNSGHLCASAVPANGGRPGAHEEVLAPVLTTGVRTRPSKNAAAAPAAYDVLYVPPVRLATREKPWVWPTRARRDRRPCGGRTAPPRPAQAVGGSAGGGTKATQAEEPDMRQPMAPQTADPA

SEQ ID NO: 48545 - protein, 166 aa, Zea mays
  Coding DNA Sequence Number=SeqID_5170
  Subcellular localization annotation: CTP_CleavageSite=26; ConfidenceScore=5.27e-01
MRGGGFLSVLGSLHCSSGALGPVRVRGSRYVCPERTPSQAQSGAPSLLPPPGAAHSGTPSSIATVLGAPTSLLPPTGAAHPVLPPLELRCSQVPPPWSLLPARRIRCSLLESSCAPTSLLPPTSAAHPVLPPPELRIIEEQRRRLAPEMVEMLLCMKDWELGEARG

SEQ ID NO: 48546 - protein, 101 aa, Zea mays
  Coding DNA Sequence Number=SeqID_5171
  Subcellular localization annotation: CTP_CleavageSite=42; ConfidenceScore=5.20e-01
MNVCELTLAVSHPPTQVKNRKITFTWESRQCPRFESNTAKTRAIARRTSESAVRRGELGAEIAVTRAPAMAPPSLVGAPPVFEPWLGRSGWTVGSVLDGGD

SEQ ID NO: 48547 - protein, 59 aa, Zea mays
  Coding DNA Sequence Number=SeqID_5172
MEIGLRLKTDVILLLFVRLNLSRLQTSIPKKELVMAPRRPTGRAYEGGPHLVGVYVCVT

SEQ ID NO: 48548 - protein, 105 aa, Zea mays
  Coding DNA Sequence Number=SeqID_5173
MPTSSSSAAAMPSADASSEETLSTVAAEELRASDTVDFGVSRMSSVRVQDMQQLDYFGGGVTRVPGTEEVPEPEGELVVFEAFFAAGLRLPAHRFVGEVLRRFNI

SEQ ID NO: 48549 - protein, 105 aa, Zea mays
  Coding DNA Sequence Number=SeqID_5174
  Subcellular localization annotation: CTP_CleavageSite=46; ConfidenceScore=5.21e-01
MAWPDVRGQRSATCPRGLALARCGPARALPARPCARASGMPTTHLCAALVRVRRAEHVRLPLDVVVYPRRCPGLKRFLECLSIRTGSLSDHPGEQYNHEGGMRRP

SEQ ID NO: 48550 - protein, 60 aa, Zea mays
  Coding DNA Sequence Number=SeqID_5175
MGKKEKCANLLEVDCVVEDPNSFEEDPQETFEQGKWILPLHFLLYPEGDEEDFDEDVDEY

SEQ ID NO: 48551 - protein, 114 aa, Zea mays
  Coding DNA Sequence Number=SeqID_5176
MRVLVEMGILLRVTLSCSSKPVVRQMTAWWRWELGDHREDLVGDPTEVCKRSRGIHRAGVAKDHLIVSTWFLRGPRGSDTLARVLQRGLVESADSSIPQEKLEESSKPCFTFRT

SEQ ID NO: 48552 - protein, 228 aa, Zea mays
  Coding DNA Sequence Number=SeqID_5177
MAPKKASSKADEAAKAALLAAKKGKALALTHSTHQEATEDDVLRTCEDDALRTCDPEGQPQPPPGFTPPEGTDFTEDGKILGVSAEEQLQLRALRIKNRNLQKQKEILEAKRQRVSAQVSHPGFRGPKPGREHKHQESLAGPPSQQNPPEGLPTLTTPLLPLPLSGSGLGLDFQRSQGPRRNKSQDTDKPPDELRDGFLESQGLFNKITIAKGYREILAARSTTEGTD

SEQ ID NO: 48553 - protein, 534 aa, Zea mays
  Coding DNA Sequence Number=SeqID_5178
  Gene Ontology: Mol. function=transferase activity, transferring glycosyl groups; Cellular component=nucleus; Biological process =biosynthetic process
  Homolog annotation: Hit_ID=A7P210; Match level="QueryCoverage=73%, HitCoverage=96%, E-value=1e-164, Identity=73%"; Hit description =Chromosome chr19 scaffold_4, whole genome shotgun sequence
  Pfam annotation: Domain name=Glycos_transf_1; Domain location=323 -507; Score=181.1; E_value=2.8e-51; Accession=PF00534.11; Description= Glycosyl transferases group 1
MAKAQLFYNYCRNKHEVILRSTNGTLSLSPVWEVVADDAEAVDAGLGGQDAVAALPLTWRWVDPIASGSAEAHEAFVKDVEDGENEGWGCSGGVGAGMAAVVAMHPCQTEDGGGQGQSMGGAWWHQQVQKGVAVAARMQHILPHYGQGGAERLIVDAACQLAAHDHDVHVFTSHHDKKRCFEETLSGLFPVTVHGDFLPRHVFYRFHAVCAYLRCIFVALCVLLRWPFFDVILVDQVSVVIPLLKLMASSKIIFYCHFPDLLLAQHTTMLRRLYRKPIDMIEESTTGMADLILVNSKFTAATFARTFSGLHARGIEPGVLYPAVSVEQFHEPHAYKLNFLSINRFERKKNLDLAISAFALLRSAAWTLPGDALQEATLTVAGGYDKRLKENVEYLEELKRLALTEGVSGQVNFVTSCSTSERNELLSNCLCVLYTPKDEHFGIVPLEAMAAHKPVIACNSGGPVETVVNEVTGFLCDPSPAEFSKAMLKLVNDHDLAVRLGEQARDHVVQKFSTKTFGDLLNSYVLNIYHERME

SEQ ID NO: 48554 - protein, 888 aa, Zea mays
  Coding DNA Sequence Number=SeqID_5179
  Pfam annotation: Domain name=MAP7; Domain location=382-549; Score= -77.0; E_value=0.039; Accession=PF05672.2; Description=MAP7 (E-MAP -115) family
MEVVELVPCARNKWGNWYEFWFYVAEGTVEDHLGLPVAEMCSHYYSAYPQFEVAEEDADEGALRCAADLSSGRNLVEEFVAYGVWPLAHGWALGEVCPRQMPSRGGMLDGAVRIVGRYVSKTEGQRSWDIRGSNDRLNRVFELNRLPYGGYPGQDDVDRRGKKPAVEIGDDPAPAAAPSSKKRKLGTATGGLRISDGFARELMRTCAAPGGRMSSPELQESSARMLKVTGGWWPKNVPIPRAAGEDFFTSRMVRDWRVFPYGRNIAAVVSVVMDKDRQGATQKRQAVFRLPEARPKRSRGTAKAAAPGGSQPTLAAKSAAPGSSRVPEAAKAAAAGGTKSVPAGAAKARELPPPGKRVADFATDISVDDYLVGSGEGQLVVVPPAVATAAAAVVPRARGSALSAGGEIPALTAIKDEAGAVSRRLKEALSQAADFADRVASGALMAVVSAEVERLRAQHADAVRREANEAFTKAQSVQAEANLARVEGSLARQRAEEWEERFNALQTRVERVEASTRTEAERTRKQLMDSYHELGARTADFEVPDQELGLRCLEWLQEELLALPAIVEGFMSYASLVTCEGAMNALSREGCRHYEVFDQSDEDFEREIYKVEDPVVKESAGALFDRMWGPHGREVVRERSDTARGQAARNEKVEDFRALNSAQPDSESNPVAAMSEVAPAPPPETVEGAPDAPAATAVGGGSSPTAASRTEDPVKMAAEPAAEDPATAGSSQVQDFGPAHATATANFLAASTVDGGNESDESASKFSDFGDSGSSVEWTEESSDEDLDYFAALDVAAVEASPRAVDAKVVPGPSAGRRRRRVVAKHRVSEADGGRLRVGRAGRQELLSLPAVASVGEGELRSLFAGEKMRIMLFNYREMGIIPKVEPM

SEQ ID NO: 48555 - protein, 794 aa, Zea mays
  Coding DNA Sequence Number=SeqID_5180
  Homolog annotation: Hit_ID=Q6Z1K3; Match level="QueryCoverage=20%, HitCoverage=34%, E-value=3e-13, Identity=31%"; Hit description=Zinc knuckle domain containing protein-like
  Pfam annotation: Domain name=zf-CCHC; Domain location=170-187; Score =8.2; E_value=0.088; Accession=PF00098.14; Description=Zinc knuckle
  Pfam annotation: Domain name=zf-CCHC; Domain location=189-206; Score =23.7; E_value=0.00039; Accession=PF00098.14; Description=Zinc knuckle
  Pfam module annotation: Pfam domain module=zf-CCHC::zf-CCHC; Domain location=170-187::189-206
  Subcellular localization annotation: CTP_CleavageSite=90; ConfidenceScore=5.70e-01
MAPLPFPPDRSYPLTLSSTPDASSPSSTSPTLETTPIPAANHLSSSPASAGPSACGRSKAQRWRDDSAAGAASVGAAPADAVPAGAGAIPAAAGAGAVPAGAVPAAVGVASSQNRRSYRDALVSSQRPVSRLAVDRAGGGWETVQSRRDRRLARRPPLPVPRPVPVDLRGRCLNCFSADHRVARCSNRVRCFFCRRPGHRVSECPRRQTNLAAPVRRLVWRPISMEAPAAVTGVDHAMAGGSTLGGSDAVISGKRRTRRGQRRRRSGPSGGLGGDPLLLSSGNLSPAAQDGPRPVRFIGRSRMIDHAELELRHALIVSVVGQEGTGCATEVREALASRFDLDADALRLRRAAPGSFIVLFPSEELAGQVFSGGPSLFVPPLRLHIKRWTRQAFASGGSVLSSLIDVELRGIPAHLWGLETAEVLLGPYCLVQGLHPDSISGEDLSVIRLSAWCRSPVELPKVLDLHAVEPAVPDEDGVWIPRSLVFPVLVKIIGPEGVLVEEQLQPPPSDPSDDEPELSRRARRVQRLGDQASLPRASVHSRLGPRLHSSSTRVGPSDDVGLLDASMDNSDAVAASVSSDSLAKPVDAPTLPCAAVEMLAAPVVLALCDVMVPDYSPDGASADLAAELREDSVLAVSCVVSASSARWNLKPPVFRVYSRRLRPSILDDQDGPLVQSGLDNSMVISSPLCEFQCLVTKPVDALLPTPQIPKRRKKPLPSNFIPRRSRRVAKFPPELGSEATAQVCRHLGFCDDNEVISVQDAGNYAKLFVSGLSSVHIAALAALFGWTVPLNGPV

SEQ ID NO: 48556 - protein, 1406 aa, Zea mays
  Coding DNA Sequence Number=SeqID_5181
  Gene Ontology: Mol. function=ATPase activity, coupled to transmembrane movement of substances; Cellular component=integral to membrane; Biological process=transport
  Homolog annotation: Hit_ID=A3AWV6; Match level="QueryCoverage=98%, HitCoverage=98%, E-value=0.0, Identity=78%"; Hit description =Putative uncharacterized protein
  Pfam annotation: Domain name=ABC_membrane; Domain location=262-532; Score=80.9; E_value=4.2e-21; Accession=PF00664.14; Description=ABC transporter transmembrane region
  Pfam annotation: Domain name=ABC_tran; Domain location=1184-1367; Score=142.3; E_value=1.4e-39; Accession=PF00005.18; Description=ABC transporter
  Pfam annotation: Domain name=ABC_tran; Domain location=606-777; Score= 135.2; E_value=1.8e-37; Accession=PF00005.18; Description=ABC transporter
  Pfam module annotation: Pfam domain module=ABC_membrane::ABC _tran::ABC_tran; Domain location=262-532::1184-1367::606-777
MERGGLHYWPALAGILPNKQVQQLFIQGGFLDDPSGSTILHHMQEWQDLYSPCFWMVTFALIQLMFIMSILAQFLFKKFRWWRQRLKGSAPESNKQHQEHKITDIKLDISYKACKACCLLILGSHVLRAVFLQLHERISDCKYPPFIICEVRGKTGIRFTDSSVTEALLNPSVGQQAEVKRPCPYGRANILELVTFSWMNPVFSIGYKKPLEKNEVPDVDGKDAAEFLSDSFKKIIGDVEHRHGLSTLSIYRAMFLFIGRKAIINAGFAILSASASYVGPSLINDLVKFLGGERQYGLKRGYILAVVFLSAKVVETIAQRQWIFGARQLGMRLRAALISHIYQKGLRLSCSSRQKHTSGEIINYMSVDIQRITDVIWYTNYIWMLPIQLSLAVYVLHTNLGVGAWAGLAATLAIMACNIPLTRMQKRLQAKIMVAKDNRMKATTEVLRSMKILKLQAWDMKYLQKLESLRGEEYNWLWRSVRLSALTTFIFWGSPAFISSITFGSCILMGIPLTAGTVLSALATFRMLQDPIFTLPDLLSVFAQGKVSADRVAKYLEEEELKCDAVTQVPRNDTDYDVEIDHGIFSWELETTSPTLTDVELKVKRGMKVAICGIVGSGKSSLLSCILGEMPKLDGTVRVSGRKAYVPQTAWILSGNIRENILFGNTHDKEKYENIIQACALTKDFELFANGDLTEIGERGINMSGGQKQRIQIARSVYEDADIYLFDDPFSAVDAHTGSQLFKDCVMGILKDKTVLYVTHQVEFLPAADLILVMQDGKIVQKGKFDELLQQNIGFEAIVGAHSQALESVINAESSSRIQSGNQKSADSEDEFDTENETDDQLQGITKQESAHDVSQDISDKGRLTQEEEREKGGIGKKVYWTYLRAVHGGALVPVTIAAQSFFQIFQVASNYWMAWASPPTTATTPTVGLGLLFSVYIALSMGSALCVLFRSLLVSLIGLLTSERFFKNMLHCILRAPMSFFDSTPTGRILNRRYYIPTARELARLSQIQRAPILHHFAESLAGASSIRAYAQKDRFRKANLGLVDNHSRPWFHNVSAMEWLSFRLNMLSNFVFAFSLTLLVSLPEGFINPSIAGLAVTYALNLNSQLASIIWNICNTENKMISVERIMQYSRIPSEAPLIVDHYRPPNSWPDAGTINIRSLEVRYAEHLPSVLRNISCTIPGRKKVGIVGRTGSGKSTFIQALFRIIEPRGGTIQIDNVDILKIGLHDLRGRLSIIPQDPTMFEGTVRGNLDPLNEYPDHRVWEILDKCQLGDIVRQNPKKLDSIVVENGENWSVGQRQLFCLGRVLLKRSNVLVLDEATASVDSSTDAVIQGTIREEFRKCTVLTIAHRIHTVIDSDLILVFSEGRIIEYDTPSKLLENESSEFSRLIKEYSRRSHGFSGTANN

SEQ ID NO: 48557 - protein, 157 aa, Zea mays
  Coding DNA Sequence Number=SeqID_5182
  Subcellular localization annotation: CTP_CleavageSite=62; ConfidenceScore=5.04e-01
MPSSLAPREIRRRDRWHIAVVRTSWGRRRVRALGIRCRSVSLDSPSRHRNPPSRACPQIRRRASGIRRRERVPRSVIAPQMLERRWRWPSQRRTGQPPLSPGLGCAAVVRLLQERRHRLLACLGASLSLVPGGAPPSVACLEVTPLLAPRITAARTP

SEQ ID NO: 48558 - protein, 257 aa, Zea mays
  Coding DNA Sequence Number=SeqID_5183
  Homolog annotation: Hit_ID=A0EVH6; Match level="QueryCoverage=45%, HitCoverage=33%, E-value=1e-07, Identity=37%"; Hit description=Milt putative polyprotein
MAGSKDHTKISTTNIIKPAMEALPADDQRPFEDLVMRDEKEVMRQWNEQRDKEEAELLHKLSERRKEAADKYLSHFTVDRHQKIVRQGEIDMESLLPPLQGPASQPLGTRQVLDATGPSEHHLRQSGYTADRPACFAGPSDPMQTRTQNTQVAPYMAGPSGYNPEQFGPITDRPTHHAGPSGYVADRPPSYVGPSGYGMNRPTYYAGPSDSTRVHVQTAQVAPYMTDPSGYNPGPFGLIADRPVLYDRRSGYETTHG

SEQ ID NO: 48559 - protein, 147 aa, Zea mays
  Coding DNA Sequence Number=SeqID_5184
MARHRAGRSIAPLPVTGAADGGVGGGRGRWGAPVMGVPDGGAARPRRGRAPRPGQTGGREAATWAPRRGGRRWWPEQEQPAAENLARAALAAGAARAGCAPGRGFGVGAGGAIRHRAIAAGGRSSSRVEEARAPEKGEKRAYWSGRA

SEQ ID NO: 48560 - protein, 124 aa, Zea mays
  Coding DNA Sequence Number=SeqID_5185
MEVLDLDHLNVRQVANSSSLVPTVDSEIDAGHVSTPTVGRGTGQSGAHPKRKATNQLIQQPLQPRLFGQTEDNLEFPNERAMAPWPLGAIKEALGCLYQYTKHSKSTLQLRDSVTTSFSDSREI

SEQ ID NO: 48561 - protein, 218 aa, Zea mays
  Coding DNA Sequence Number=SeqID_5186
MDAYSRRVGRRERGWSPTQARTGPDAGTDRRLPPASGRGRGPTPAAVRPGAGAIWPQHGRARSQASPDSDLGGGTRSLVATGEPNPGDHERTRPAWLRRGLLGVRAGEDSAGHPTRAQAGLLGLQVGTSSELLCHGGQGARPPECGGLVRRTIGPGALLRAVRPRRERGRPWRRRPLCVAGVALGAGAADPRETATAVALPLAAAGLAPGGGGYAYGG

SEQ ID NO: 48562 - protein, 272 aa, Zea mays
  Coding DNA Sequence Number=SeqID_5187
  Gene Ontology: Mol. function=metal ion binding; Cellular component =cytoplasm; Biological process=response to stimulus
  Homolog annotation: Hit_ID=Q5GA20; Match level="QueryCoverage=81%, HitCoverage=74%, E-value=1e-115, Identity=93%"; Hit description =Putative uncharacterized protein adh1D
MSGSYFLGKTLDIISENPNFSKSEIPTPPPYNHDAISVRTHVLDIRFCALCEEACSHLPKISSKETHPKIAQVLLERQKYDMALLVLKCTGHGSFSATENFKKDDISSLSEAVTVVRVRIECRLLTEAFMYHRSYCSKVKEQHSADMTHAEDALKNSWVYHVEMMVTEFCAICIKRNLVDKMIDLPWDSEEEKHLHKSLFDSAHEMPMKPNGSLLVVYYLRRYRYLEAYEVDRSLQKFEQKILENTTEEIASKIRAIARWRESLVFCFITHV

SEQ ID NO: 48563 - protein, 198 aa, Zea mays
  Coding DNA Sequence Number=SeqID_5188
  Gene Ontology: Mol. function=metal ion binding; Cellular component =cytoplasm; Biological process=response to stimulus
  Homolog annotation: Hit_ID=Q84R51; Match level="QueryCoverage=90%, HitCoverage=96%, E-value=2e-86, Identity=74%"; Hit description =Putative uncharacterized protein OSJNBb0016H12.21
MTNLCVHVRLVVYIHVLSNALEQLASIDLIELCKEARIERCRATRDLSSCGRYVHHVLNSCGHASLCAECSQRCDVCPICRSPISDNGNRVQLRLYYKCLEAGLISKQHDDRFQEKEDHGNPVSMDVQRLHSLFDVAVQNNLTSLICHYITDVCLDENAVSSDPLLAFLLDEVVIKDWCKKAVNALITEIGVICIQKL

SEQ ID NO: 48564 - protein, 734 aa, Zea mays
  Coding DNA Sequence Number=SeqID_5189
MGGLGVSDSFARELMRTCAAPGERMSSPELRESSARMLRVTGGCWPRNVPIPCAADEDCFTSRMVRKWRVFPYGWNIAAVVSAVMDKDRQGAAQKRQAAVRPHEARPKRQRGTAKAAASGGGKPPLAANGVAEVAKAARALPLSGRRVADFGTDINVDDYLGGSDEGKLAIVAPAAAIATAAIVPKARGEALGAGGEVSALAVVRDEAGAATRRLKEVTEALSQVADFASRTASGALTAAVSAEVERLRTQHADAVREKSASDSKCRKLTDKVAALEKEKADLRRQLAGERREANEAIAKEQAAQAEAKLARAEGNLAKELAEHLQERLTALESRVKGAEAAMRAEAERTRTQLMDTYRELGARTGDFEVPDREPGLRCLEWVQEELQELPTVLGGFMSYASLVTCEGAMNALSREGCRHFEVFDQADEDFERDVYKVEDPVVKESAGALYDRMWGPHGREVVRERAEAARAQAARGERVDDFGALNSALPDPEPTPAEAVSGVAWEPTPKSAEDAPDAPTSAAAGEDLPPKVAEGAPDAPAAAVPSAEDPAAVAAETTAEAAAEPTAEAPAALGPSQVQDFGPAHATATTEFLAASTAEGGNEYGGSASEFFDFTDSGSSVEWTEESSEEDMDYFAALDVAAAEASPHAADAQDVPGPSTGRRRRRAVAKRRVSTEEGARLRVSRAGRQELLSLPAAASTGEGELRSLFAGEELRIMLFNYREMGIIPKVEPM

SEQ ID NO: 48565 - protein, 59 aa, Zea mays
  Coding DNA Sequence Number=SeqID_5190
MGKSVPSLLMLLLSRVTALVPTITGMGDHVSGRVRGKVCGQVHSGTRLTDLPYFSVSTR

SEQ ID NO: 48566 - protein, 226 aa, Zea mays
  Coding DNA Sequence Number=SeqID_5191
MESRPLQPGWRSLDSETVGFRADDTTEVAALKALTTFCGYHPLNMMMHPLGLFPIEKRDDPMWCNRATKITLDNREDLVVKLYSELVEKDIQVEQMNQRILTLEQQAFNDLCQYAGYHADSDKNKRDHFRRGLNTKHHERLNTVRADSYNELVNLAISQEDCIVAHRAEKKRKSPMSGFPTPAQRFQIVTNNQSMGFHQQPGRWVIRLPQQQQVPNHFPAPAPRNN

SEQ ID NO: 48567 - protein, 203 aa, Zea mays
  Coding DNA Sequence Number=SeqID_5192
  Subcellular localization annotation: CTP_CleavageSite=44; ConfidenceScore=5.48e-01
MAMIGSTSEKMYLCQQAFEHGQKNTSTCSTRSARARARPRPTPRASRHAKPRSRLLLAPAPINHPQASTVLLRARSTSPEPEITGVCPAHGVPTATRAPATVDRPAEPFPSHARPLEETVHASVKLPEQGIGPCFAGEASPQSPDFARLPKTETGRNTRRRRDHPPAHVDRTIPTTCAIESYTAVNARTSRSQPRPSPDLSHR

SEQ ID NO: 48568 - protein, 151 aa, Zea mays
  Coding DNA Sequence Number=SeqID_5193
MPRFTAIDGGEVLSFPHLNCCPTTMMIESRRGERIWDPRYSNFMVPVGRSGAGNGLHESSMRFHHGRAWLLEGWADGLGQPAGDEPVPHGLAELTNPPGPHFNSLARARVTGPGGRGGAWAGEGAAGVDVLVLVLMSASGVILPSWTPDYD

SEQ ID NO: 48569 - protein, 123 aa, Zea mays
  Coding DNA Sequence Number=SeqID_5194
  Homolog annotation: Hit_ID=Q7XBD4; Match level="QueryCoverage=32%, HitCoverage=4%, E-value=1e-08, Identity=77%"; Hit description =Cinful1 polyprotein
MSEDKKVVAESKLSLSEEMNLGFLESIAKTNTEKITREILEGLSVSHPGFGDTKTRGEHKHQDQKSMAQICTREGVHQIDFPPHISGSTVHPSSNPSRKVNRDAILPAGSEIHGQPSPKPPTI

SEQ ID NO: 48570 - protein, 38 aa, Zea mays
  Coding DNA Sequence Number=SeqID_5195
DVWFTGGDEDDGFGYDYGNGEDEVGEEDFQEFQEYDEF

SEQ ID NO: 48571 - protein, 89 aa, Zea mays
  Coding DNA Sequence Number=SeqID_5196
MEGGERRSGWEMKAEGAVVEEAGEKELRLAQPQASASEEDLRLARPQASASGGVTTSPEPSLGLRRNLRLARPGPRTDYATGDTSLPYP

SEQ ID NO: 48572 - protein, 46 aa, Zea mays
  Coding DNA Sequence Number=SeqID_5197
MARVACTLHGKRLDGGVSVLSPFLDSQIQHILESLLDTSRLDCDWY

SEQ ID NO: 48573 - protein, 128 aa, Zea mays
  Coding DNA Sequence Number=SeqID_5198
MARTRAYKTPRDLDRTPSHELDLTGAQTHRRLPVHGVSAAARSPCHRRPANQALPNPVRPSEKTEHTSVKLPERGIGVCFAGEASPRSPDSTRPPASVDRVILCAIPRFLVHTASTSPREAHCAIGLN

SEQ ID NO: 48574 - protein, 98 aa, Zea mays
  Coding DNA Sequence Number=SeqID_5199
METCALLFCLGTREKTEREKDLNMLDSNYRRTPTCDGHHGHMRARIGMFKHNMESLSSLLSYGFRIIVIFVDECPSGQGVTLHKIVTAIGGGVSVAKA

SEQ ID NO: 48575 - protein, 195 aa, Zea mays
  Coding DNA Sequence Number=SeqID_5200
  Subcellular localization annotation: CTP_CleavageSite=58; ConfidenceScore=5.06e-01
MSPLFIFLQLLVPTIIGFLAPVWFSFWAASGRQKQKLEPNGLPLSTRCLRLRFQFPVQPSTLTNLNPHQMDSADSIADKAIGRMQEIADKIFSVARETIRPRRGLTSFEATKLCVALEDIACMLEQDSLVLQENLDNVNNVNNPGESSYEPSALSSPPPADEYLNPDWDFAEHFENFCGLQYDSDQMPSFSDNEV

SEQ ID NO: 48576 - protein, 169 aa, Zea mays
  Coding DNA Sequence Number=SeqID_5201
  Pfam annotation: Domain name=zf-NADH-PPase; Domain location=42-73; Score=4.8; E_value=0.1; Accession=PF09297.2; Description=NADH pyrophosphatase zinc ribbon domain
MECCYQVLIRSYQATVVNCNQQVEPVKDWMSDCVEKQKPARRRNMWSSGCKGRMELAEWQYRKYCTSDAKKALVGITGEKTLDKLTDQPENLIPLDIAEVPDLLASRDNSDLAKDDPYDPTTTSKPEAPMQSLNQLPVVTDLADARSARSRRSFPVRNRRMNKKKMRAI

SEQ ID NO: 48577 - protein, 31 aa, Zea mays
  Coding DNA Sequence Number=SeqID_5202
MASQLELPDNLSNVHNRNKDIHPQEDDRGYH

SEQ ID NO: 48578 - protein, 201 aa, Zea mays
  Coding DNA Sequence Number=SeqID_5203
  Pfam annotation: Domain name=Transposase_28; Domain location=1-164; Score=-31.6; E_value=0.00023; Accession=PF04195.3; Description =Putative gypsy type transposon
MALLDSPECFQSEVALNSVRNLLGRGALAFAGRIHVGATPLGDLAAEEFVLFVSNFSCGLALPISPFFLLLSEELGLQLQHLTPRSILRAAIFAHLWEMFVGVVLLSTAPGRKGVVRRPSGGGKRGGKRAELRLHLSCLHLFGFNGLNVASNDEGSFALAHVSRRPLPLASCSTRLPPVPLFPVAAIVFKVRRVEAGYQHT

SEQ ID NO: 48579 - protein, 69 aa, Zea mays
  Coding DNA Sequence Number=SeqID_5204
  Subcellular localization annotation: CTP_CleavageSite=44; ConfidenceScore=5.37e-01
MGAAGQSAAGTDVAVGVTEGGLAVITSASVRKRRTNRQPGFGPTCKLVSSLEVGPGATVGTLKQGYPLL

SEQ ID NO: 48580 - protein, 151 aa, Zea mays
  Coding DNA Sequence Number=SeqID_5205
  Subcellular localization annotation: CTP_CleavageSite=63; ConfidenceScore=5.33e-01
MDSTKTNAYRSMAAQARSTGWRHCGGGGITSSDSSSARTPHSRRLPRTGSRHVGEPPAWVLTVNEALSVWFDCGGGGTIGRRCSTTAALDLGYGGQGSRAGHCFIPGRPPPSTSPASRATRNPLVNYHTEKHGEEESYACMVCPAEQWDDV

SEQ ID NO: 48581 - protein, 267 aa, Zea mays
  Coding DNA Sequence Number=SeqID_5206
MTQWLSRGSAKYKTCLLHVVASQRTRVALNSSQAERGERVDDFGALNSALPDPETTPAEAATGVAPGSTPETAEDAPGAPASAAAGEVLPPKVAEGTPDAPVAAVPSAEDPAAVGAEAAAEAAAEAPAAAGPSQVQDFGPAHATATTEFLAASTAEDGNEYGGSVSEFFDFTDSGSSVEWTEESSEEDLDYFAVLDVAAAEAVPHFADAPDVPGPSTGRRRRRAVAKRRVSVEEGARLRVSRAGRQELLSLPAAAGAGEGELRSLFA

SEQ ID NO: 48582 - protein, 67 aa, Zea mays
  Coding DNA Sequence Number=SeqID_5207
MEPGGGTAVGAVESLLTSSCFCKGAESRRRHRVGRCGSSSEAEVESVFHGRGRVRAPGSGEAEFVVF

SEQ ID NO: 48583 - protein, 102 aa, Zea mays
  Coding DNA Sequence Number=SeqID_5208
  Homolog annotation: Hit_ID=A3AZ41; Match level="QueryCoverage=44%, HitCoverage=21%, E-value=5e-13, Identity=71%"; Hit description =Putative uncharacterized protein
MEARSSSCLLGVRHPSISRPPSSEHEHQRSPYCPYLCSPFLLLFTPRAITGRPPLPPYARTGVLPWLHAKIVDPMLQVIRRGAEPKQLAFSAALGITIGIFP

SEQ ID NO: 48584 - protein, 317 aa, Zea mays
  Coding DNA Sequence Number=SeqID_5209
  Pfam annotation: Domain name=MAP7; Domain location=117-282; Score= -67.0; E_value=0.011; Accession=PF05672.2; Description=MAP7 (E-MAP -115) family
MSYMANGAGDFVGSSMAGGQSRTGVGAQLAGEKVALWHKYGYTKEEKRNEGGKGELVGVGAKAKTLPFARSLRRLAAPTKARWSAQLPFVVSIARRRPDSEESKFQHLAPTVRATNKPPAMAPKRASSKAAPSVDEVAKAALLAEKKRQGPRRQHPQEACEDEALNKRQRHEEPTPEGTLRTCSSGEPQAPPPGFAPPEGEDATEEGEVIGVVAEEQLHLWALRIKNHNLQKQKDILEAKCQRVTVQAKVRQMIRDEEQRARELEQEIALMQTKGQHDLQHGPPLQQRAPAGDLFIPQRGPFIPQAAAFQGINYLDE

SEQ ID NO: 48585 - protein, 232 aa, Zea mays
  Coding DNA Sequence Number=SeqID_5210
MASDTNAHERGGYTRGRRAVDERGRSPVNALRVSELDAPVVRGMGTGLSVSSAQLLGRGAQGRSFAGEWEDAAAAALGADALLWENTDMGGGTRASGPAQPSPGHGERAARRRAVERRKGGRAHLGEAQRGAAHASSATCTATAAALRAGRGSDGGNGEAESEVEARRGGCFFLRVVTPSDFAHSDGVPPAESYNSVHRALETVTSSSWPGNYCCRRILHKSDRLSAGDKPS

SEQ ID NO: 48586 - protein, 212 aa, Zea mays
  Coding DNA Sequence Number=SeqID_5211
MGAVPGRSSIANSTFRSGGMPGREDEVPADSASGTNLLLTDCSSDSAAGAEGTAFEIAVAEMDAGAEMWGRSIARQLQKLVSVLTDGHRPLLECQELLLRHCLRACWNMVMAEIVSEFFPRDGVRVGMGGKHACLYASKASEAKVVAAAAAVEWWPESDQWLELPKSTLGTSARWSSGAVVVVAVAGVPHPAGLATPAEHAFLLCACFLTST

SEQ ID NO: 48587 - protein, 104 aa, Zea mays
  Coding DNA Sequence Number=SeqID_5212
MQDAARRALSHYCSVLGGVADGLNLKYYPRRPSCSTGGVVVSPVDELSRARAEIAQLWAERVEHRHLEDGSPAPVGTQHPYRSPQRGHHAYGNPDCRTKINLEP

SEQ ID NO: 48588 - protein, 86 aa, Zea mays
  Coding DNA Sequence Number=SeqID_5213
  Subcellular localization annotation: CTP_CleavageSite=76; ConfidenceScore=5.30e-01
MTMLEDNTAILDGPSAPVKCLVQQAATPAVGCSVVVQGAPPAGAQGNSSSQTLSPAEARKKSPATPAPVVDAPAPRAGGGAASPSG

SEQ ID NO: 48589 - protein, 53 aa, Zea mays
  Coding DNA Sequence Number=SeqID_5214
MGLSVCGSLCQGGDEDDDFGYDYGNGCPRCNHCSGEDQVVEEDFQEFQEYDEF

SEQ ID NO: 48590 - protein, 156 aa, Zea mays
  Coding DNA Sequence Number=SeqID_5215
MPVPPPPPSAGKVTGQTRMLLFHHVGKSSSILPPAGGLTVAIVVVVWRRKEYHVVAAVEGHELKTPEVEHRLGLERLLETTHLELDGKLFVNTQQAPTWRANCRRFDPGRSLDRRVNCRCVSQPRWVGARRNTRGENSKGKPQPRVVLRPGRMRLQ

SEQ ID NO: 48591 - protein, 55 aa, Zea mays
  Coding DNA Sequence Number=SeqID_5216
MELKASSGGSLGLVLLCKALFPMRDMVAGVTWSSILPPGWTVEWDPASAEEEHEE

SEQ ID NO: 48592 - protein, 258 aa, Zea mays
  Coding DNA Sequence Number=SeqID_5217
  Gene Ontology: Mol. function=iron-sulfur cluster binding; Cellular component=integral to membrane; Biological process=lipid metabolic process
  Homolog annotation: Hit_ID=Q5JM88; Match level="QueryCoverage=76%, HitCoverage=49%, E-value=6e-81, Identity=77%"; Hit description =Radical SAM domain-containing protein-like
  Pfam annotation: Domain name=Lipid_DES; Domain location=7-45; Score =78.5; E_value=2.1e-20; Accession=PF08557.1; Description=Sphingolipid Delta4-desaturase (DES)
MEAEEGVMATDFFWSYTDKLHASRRREILAKYPQIKELFRPDPWAFLKNPAETTCSKYATNIQQRMEKHLFTPEELKVRQRMMTISTVGVPNTIKMLASHKLQSTLAVSLHAPNQKLRETIVPSTKSYPLGALMDDCKSYFLETGRMVSFEYTLLAGINDEKKHAEELAELLRMCGGGYHVNLIPYNPIEGSEYKRPYRKVVQTFVDALEARKITINVRRTRGLDANAACGQLRNEFQKNPLLEIEPSPSTERTLVTA

SEQ ID NO: 48593 - protein, 266 aa, Zea mays
  Coding DNA Sequence Number=SeqID_5218
MARGGAGARMRVGGFVGSFSRRTLALLPVRGVHGRGHLPAHPPPHTAGGVGGGGPRRSHVQDLRPDPPAVAATGSAAFGGGRISDRIRPPWPRPDPLRLGAAGSPTGSARRGRDRIRCVWGGKEAGGASRVRVAGVGVESACGDSGGHAQGGAGCGRAGHAQPSIRGILRALLARWICRSCWRGALRTRPIWGLQVLAILRALLALWSATATRKATGTAGVAGAGTAGATAVLACGREEGGGDCGRGEGIAGGARDGRTQNCGRLH

SEQ ID NO: 48594 - protein, 211 aa, Zea mays
  Coding DNA Sequence Number=SeqID_5219
  Subcellular localization annotation: CTP_CleavageSite=51; ConfidenceScore=5.53e-01
MSSRFLMHHVFPPSKPPDGGYPPSFRLVVGGTQLRGSWYLSAIVRLQGFSSASPAVPLRRWSPETVTTSPWVGRSRPGCDLGPTLSFKDVHHPCWGGGRAEPELYLPRGFVGRPLLRRSRERALTGPAGGSDFDNAGPVDGGRRQPQRVGLVGLAPGAPSCRKAAAAPCAREDRPRYRALPGRRSCSGAVLPLHRYGASVRRSVPHSSGRI

SEQ ID NO: 48595 - protein, 281 aa, Zea mays
  Coding DNA Sequence Number=SeqID_5220
MEAQAHASCNRRAECFVHATAPPLAPPPRLLDCGTNTATRGDPDHDPAAPAWRDGGASGRRSERRFAFAITTASKKGPGKGDTPKRILPREGTRLRASLLIRGSKAGPSEGFNSRLRARGLHTHYWSEVRRPAPRKGSMAASGYSGSAPTTDQGGNDLVTESHRREASSPRTPSLGDRVRQITRSSPETPCSAPTEGNMALSPLLLAERRRRGVCKKVESVPNRPLALCGGSGAALANPAPAEPLTASTYQPENLGPDRTPGLHPARMRERPDQPKHYARH

SEQ ID NO: 48596 - protein, 283 aa, Zea mays
  Coding DNA Sequence Number=SeqID_5221
  Homolog annotation: Hit_ID=Q8SA97; Match level="QueryCoverage=50%, HitCoverage=22%, E-value=1e-07, Identity=34%"; Hit description =Ornithine carbamoyltransferase
MALPVDVAGLCPRQGDMGAPPKPRLSLSSVAEAESEPWGRARRRSFGRGQGGVRALGSGEAEFRRLPGLSPSPSPGVGRGGGRSAEARVESEPWGRARRSFVVFRVLARVRALGSGGAEFAVFRVLARVRALGSGGAEFAVAPLARPDCLSDSLCRVAPQSKWRRRRCPSVRLAWILTAKGSICAPGIDNTFSEARPSLGRRRDPRVSALKDNVITKPGPLPPGSSPRIRPEQAARPVTPGPRPAVLQGHQPGPRPRQPTPPLFALTPLPLASAHRRVAEGFL

SEQ ID NO: 48597 - protein, 269 aa, Zea mays
  Coding DNA Sequence Number=SeqID_5222
HLERLHHRLREEQERQRQHREQQGSSSPPQQEVESVRPRSSVAQLEAPPAPPRDVPAVGGATGGDPGGDPDDDDSDHSTESSEPQEAEGWVARPITRDAARGCHFHDALDTLLRQAFDRHTWSIEYRCVVYQHSRGRYPDRWEATCLVRRPEDDLWGAEAVSEHYSISERDTAEAAMQDAAWRALSQYCSLFGGVADGLNPSVLPPPPYWQHREARTEIAELRAELAERHHQEGGSPAPVGTQHPYRSPPRGHHTYGSPVCKTMIDLDP

SEQ ID NO: 48598 - protein, 885 aa, Zea mays
  Coding DNA Sequence Number=SeqID_5223
  Gene Ontology: Mol. function=unfolded protein binding; Cellular component=endoplasmic reticulum lumen; Biological process=protein folding
  Homolog annotation: Hit_ID=Q5Z9N8; Match level="QueryCoverage=93%, HitCoverage=99%, E-value=0.0, Identity=76%"; Hit description=Heat shock protein 90
  Pfam annotation: Domain name=HATPase_c; Domain location=157-313; Score=53.2; E_value=9e-13; Accession=PF02518.17; Description =Histidine kinase-, DNA gyrase B-, and HSP90-like ATPase
  Pfam annotation: Domain name=HSP90; Domain location=316-881; Score =1142.4; E_value=0; Accession=PF00183.9; Description=Hsp90 protein
  Pfam module annotation: Pfam domain module=HATPase_c::HSP90; Domain location=157-313::316-881
MRKWALSSALLLLFLLTTLPDPGMSPPAGDLQFFKFKSLSALVSIYCAVPAYQKHTYKWKFNLLILVKFQSCSDPASTAAKKLQVNAEESSDDLANPPKVEEKLGAVPHGLSTDSEVAQREAESISRKTLRSSAEKFEFQAEVSRLMDIIINSLYSNKDIFLRELISNASDALDKIRFLSLTDKEVLGEGDTAKLEIQIKLDKEKKILSIRDRGIGMTKEDLINNLGTIAKSGTSAFVEKMQSGGDLNLIGQFGVGFYSVYLVADYVEVVSKHNDDKQYVWESKADGSFAISEDTWNEPLGRGTEIRLHLRDEAKEYLEEDKLKDLVKKYSEFINFPIYLWSTKEVDVEVPADEDETSEEEDSSPETTEEETEEDEEKEKKPKTKTIKETTSEWELLNDMKAVWLRSPKEVTDEEYSKFYHSLAKDFGDDKPMGWSHFTAEGDVEFKALLFIPPKAPHDLYESYYNSNKSNLKLYVRRVFISDEFDDLLPKYLSFLRGIVDSDTLPLNVSREMLQQHSSLKTIKKKLIRKALDMIRKLAEEDPDEYSNKDKTDEEKNEMEEKKGQYAKFWNEFGKSIKLGIIEDATNRNRLAKLLRFESTKSDGKLASLDEYISRMKPGQKDIFYLTGSSKDQLEKSPFLERLTKKNYEVIFFTDPMDEYLMQYLMDYEDRKFQNVSKEGLKLGKDSRLKDLKESFKELTEWWKKALESESVDSVKVSSRLHDTPCVVVTSKYGWSANMEKIMQAQTLSDSSKQAYMRGKRVLEINPRHPIIKELRDKVAQDNEDEMKHDADSFVRWFVKQQQQSEELKQTARLVYQTALMESGFNLPDPKEFASSIYKSVHKSLDLSPDAAVEEEDEAEEQPEVEEKEPAAKEGSEPSFDKDEL

SEQ ID NO: 48599 - protein, 91 aa, Zea mays
  Coding DNA Sequence Number=SeqID_5224
  Subcellular localization annotation: CTP_CleavageSite=42; ConfidenceScore=5.32e-01
MAVGRLLSHGAPDGPVRHWTLSGAPATSASRWGSTVGALTCGASGLSGGAPDRSCRLADVHQLARPGGSLATQLAHQVATSGAGEERADDI

SEQ ID NO: 48600 - protein, 146 aa, Zea mays
  Coding DNA Sequence Number=SeqID_5225
  Subcellular localization annotation: CTP_CleavageSite=51; ConfidenceScore=5.63e-01
MGAIQVKAPSAQGTRSRLAPAQPRAGTVDPGRFTPRPKVSSSNGRTFDSPEAQLGQASWRSNLGQIASPADRIENITACTAPTAVPPARVRLTAAKSDLGCHRKLRLARPQGSDSTSTSDDGLRLARPQGSDSTSTSDDGLRLARP

SEQ ID NO: 48601 - protein, 92 aa, Zea mays
  Coding DNA Sequence Number=SeqID_5226
  Subcellular localization annotation: CTP_CleavageSite=16; ConfidenceScore=5.19e-01
MAGAVLDQLASSSSPRSAHGVRVHARTAAAGGGGRAFTFHRFTPRLVGLGYTPDADGPDDTSLHSALRSQAVAGTLGLWGPGSARSPANRSA

SEQ ID NO: 48602 - protein, 321 aa, Zea mays
  Coding DNA Sequence Number=SeqID_5227
  Gene Ontology: Cellular component=chloroplast
  Homolog annotation: Hit_ID=Q94FY8; Match level="QueryCoverage=75%, HitCoverage=69%, E-value=1e-17, Identity=78%"; Hit description =Probable tocopherol cyclase, chloroplast precursor
  Subcellular localization annotation: CTP_CleavageSite=81; ConfidenceScore=5.78e-01
MNLAVAAALPSVTPRTGVVLPRSSRRHCPRGVVPRAASSSVSSFTSPSAAAAPIYTPTPQDRSLRTPHSGGAAYPDLDFCRGFKKYRRDLVVGHLPHRPPNKEAACSCDDGHGVALEATSSGGTSHRTDPTALRNGQKLSLSRVNASGVGEGGWEGVAAADGAAAGGGEDNLELIPGVMDLRSMGISVFSGEVISLCRRLGSRLASIQCNVFPGASGEVSLTAAGGLRKIGLGDTYESPSLVQFVILRFPNLTWRASGCEGQWLDGGKEMREKVLDYPGPGAKLKELDPLKGLSEQVCKLVLGVDLARLDAPFHQAVSDEV

SEQ ID NO: 48603 - protein, 44 aa, Zea mays
  Coding DNA Sequence Number=SeqID_5228
MAVHARRRGAGYWMKGDHYVNWNMERPPGKTVLPQGFNGTPLAD

SEQ ID NO: 48604 - protein, 52 aa, Zea mays
  Coding DNA Sequence Number=SeqID_5229
MARVACTLHGKRLDSGVSVLSARKYRYRTYQVIRSIYRVARGPLDKDNCRWA

SEQ ID NO: 48605 - protein, 181 aa, Zea mays
  Coding DNA Sequence Number=SeqID_5230
MALDKEGNLGTGKAIFAECCCQGTRQRDWQRGPLEDSLPSAGPPRHSAKESSFAECLRELSAQGLAVGPTGPVFAEGHDSRHSAKLASLSSAKEDTRRITRLMLSYKTLLKSGSLPSARCFAECFLSGTRQSLALGNDGVCQEQDSRHRHTLDDGRQTPVNHSVKLTAIIFAERRVLALGK

SEQ ID NO: 48606 - protein, 49 aa, Zea mays
  Coding DNA Sequence Number=SeqID_5231
MTLDWAAQDEVHPGLISEVDDEAGRHNGAHRRMGCLRTNPRVVGVGDGP

SEQ ID NO: 48607 - protein, 98 aa, Zea mays
  Coding DNA Sequence Number=SeqID_5232
MEKQKSLKSWLSNCLPLSTKQGYWCPLVFGHDEVDYAVALAVIGYLEPLWAADGWHANDMVEYVGGQGLASGGCLGQCVGLLIFGSVHMLQGGDTKCP

SEQ ID NO: 48608 - protein, 574 aa, Zea mays
  Coding DNA Sequence Number=SeqID_5233
MKGPFGAVRMSSGRDLVEEFVGYGVWPLAHGWALGEVCPRQMPSRGGMLVRSPAFALDLHGRDPAAFVREAEDGAARIVGRYVPKTEGPRSWDIRGSNDKLNRVFELNRLPYDCYPGEDTADRRRKKPMGGTEEGPSQEAVPATKKRKLGTILGRKGVSDNFAVELMGTCAAPGGRMSSPELRESSARMLEVTGGRWPKNLPIPWAEGEDMSTSRIAHGLRIFSYGRNIAAVVSSVMNKDCQDAAQKRRAVIRLPDPRREAKRAWGSVKAVAPGGSQPTLAAKPAAPGSSKVPESTKAVVTDRTKSAPGGAAKVRELPSPGRRVADFGMNISVDDYFVGSGEGQMVVVPPVVAATASTAVVGVRGDAFCASGEISSAAAVKDEVGTHVLPAKGGVAAVVAAAKTNVSAEVERLRAQHADAVREKSAAESKNRRLAEKVAALEAEKTDLRRQLVEERREANQAIAEAQAAQAEAKLARAEGSLASQRAEEWEVRFNGLCSRVDKAEASTRSEVERTRAQLVDSYRELGRGLLTSRCPTERRAFASSSGCKTSRWYSRPSWKVSCPLPPSSSVKGL

SEQ ID NO: 48609 - protein, 104 aa, Zea mays
  Coding DNA Sequence Number=SeqID_5234
MESHDLRAERESRLVGGDENVGFGIDSDDGKWYSFRLERVVRIATTAQEKTKPWKETFRSSKITTSFRRGLAATPSRLLVKAACIYVSFTHFDYCKDYVDVLDI

SEQ ID NO: 48610 - protein, 117 aa, Zea mays
  Coding DNA Sequence Number=SeqID_5235
MPEQGAAQEVAPDPAPEPAPEDLPATALEGKPRRLPSSRDLRRGLPFRLWWVRVRSLHDGQSRNSASAFGNQTPQPNSCMSRGSLEEMVAGITWPSTLPPGWTVEWDPASAEEEHEE

SEQ ID NO: 48611 - protein, 523 aa, Zea mays
  Coding DNA Sequence Number=SeqID_5236
MQGHSVPTHINRPHRFPVSREGLTALALGCWIWGYLLSSSLLRHEDVLSVSKITVYRNAMNIPSPYANSNRGKEKGGAAYRRRGRSDEGWGWLGETLAVTSRYGSTSEMAGIARSTRAGGCPRRRRVYRPNHGELVQSEGTVSFTGSRSDCVHKESKDGGVVYPVHASPRAGLGWEWLYWPIYGDRGIGRPRTRCARANGDELTPKAELRGKQEAADRNIVETRTPGREETDVMVLLYFLVGLTTELPYLPFSPAAAGLESVARFGHPCFLTRTAQAEPVAARAGCRRPCNNTGSPRTPGCIAPPWAPLSGLSQHASCVPVSRLRRVSRQPPPRFFSVGGPWFGPHASAIRPQSRREAGHGSTPPARDIYDPTPRCCWRATCTVSAIPPAFLVVHVVRAGAGGIAKLHRTSGQVAPAPLPTETSPRAPGTAAGREDLVQPPNTRQVSPPPKATAFRRWQLPSLAPARDKDRDPPKASRKKKRTTGRDGTADSSRDVRCGLRPTDGPRHPAQRGRATYCNVHYA

SEQ ID NO: 48612 - protein, 57 aa, Zea mays
  Coding DNA Sequence Number=SeqID_5237
MESHDLRAERESRLVGGNEIDGSGYDYGAGCQHCNHCSGEDEAVEGDFQEFQDYDEF

SEQ ID NO: 48613 - protein, 69 aa, Zea mays
  Coding DNA Sequence Number=SeqID_5238
MHDFLLALALLGCSGWLLGQEGGVPGCSDADIDFLPAGYSDGTATAAEETASGTAAAGSDTDAGAGGLA

SEQ ID NO: 48614 - protein, 168 aa, Zea mays
  Coding DNA Sequence Number=SeqID_5239
MQDAAQRTLSQYCSLFSGVADGLDLKYYPRRSTGNAGGVIASPVGEGNPRMNNMVILAVVLNTELDHTLDEFGKVRAEVAELRAECAARHYLDGGSPAPIGIQHPYRSPPVVASTMMSENRRRGARRAQPEQQAPQEEAAPQQHLPPPPPMTIEQMFLMQTQAVQAIG

SEQ ID NO: 48615 - protein, 175 aa, Zea mays
  Coding DNA Sequence Number=SeqID_5240
MMLVDYTMVLDGPSVSVEGPTQQGVESVVEVTPASSVTSDGSRPSDPPLRLWLLQELRAMSRTATCVIVVSVRVSSSSGDALWWCRGHLWLRCKGRRPLRLHLMLRRGGIVLLLLLLLLASALLLLVQVTMQSLQVVGLTWHRAMQWTLRQARRQKGDHRLTCSTPKTSHLQKTS

SEQ ID NO: 48616 - protein, 98 aa, Zea mays
  Coding DNA Sequence Number=SeqID_5241
MERAGVRWKDPRWRLPPQRSRRWGARAFCFLRDGAADLIFFLLLLEEHDLVGVALFRRCSVSRMFISLAVVESELGYSSILRMSWWPTSMYWSSPGMP

SEQ ID NO: 48617 - protein, 78 aa, Zea mays
  Coding DNA Sequence Number=SeqID_5242
MSKKEGMLQDVNSKSEPSWESAGPLGMQPGPPGRRRPDAATWPTTGDLSQQVEPDIWPLRRGPHRGLRRKLRYLSIKY

SEQ ID NO: 48618 - protein, 149 aa, Zea mays
  Coding DNA Sequence Number=SeqID_5243
  Subcellular localization annotation: CTP_CleavageSite=43; ConfidenceScore=5.48e-01
MKQWHDDVDHLLGMAHSSSARPRPRSSQRQHKASASVRSPSVRAAPTKDLRVELNHTRAVEDAQASLERPEDRRDELNRRRAGEDARISLERERELKGKCALGPFLSILVIECQHKCFCVNLCKVVDKVQIKSKVLETEEMELEKRWLC

SEQ ID NO: 48619 - protein, 52 aa, Zea mays
  Coding DNA Sequence Number=SeqID_5244
  Gene Ontology: Mol. function=serine-type peptidase activity; Biological process=proteolysis
  Homolog annotation: Hit_ID=Q5SN67; Match level="QueryCoverage=82%, HitCoverage=9%, E-value=9e-14, Identity=79%"; Hit description =Carboxy-terminal proteinase-like
MKDSKRQRNIGKYVTPNHKDINGNGIEPDYNHLLDFNEARDYLSRCEIKELS

SEQ ID NO: 48620 - protein, 280 aa, Zea mays
  Coding DNA Sequence Number=SeqID_5245
MKDFHCTPMRGINHQKRERLKGKCALGPFLSILVIECQRKCFCVDLCNVVDKVQIMSKVLETGKIDLEMKWLCSAKVSSVWVHRTVWWCTGQCPVRQADSGELTALGSSTAVYDYNSPDCPLCTGLSREIELEKRWLCSAKVSSVWVHRTVRWCTGQCPVRQAGSGELAALGKKLTVYGYNSSDCPDARTTWTKELRKSNTSKEDIKKIKKSPPKEACAPCGPYDKGAPDCPLAHRTVRCPHAGLSGAPGNYSPTASSRWHPEHAHPTVTCSDRSQTGNG

SEQ ID NO: 48621 - protein, 94 aa, Zea mays
  Coding DNA Sequence Number=SeqID_5246
MEKAEPHPITHREIELTMLVVIVTFGVLLNLEKTPTNLHEERHHSHAEGNPPSSSEQPLPCVVELDVYHLEEVVPHVTSEERITVADDGGGEVV

SEQ ID NO: 48622 - protein, 29 aa, Zea mays
  Coding DNA Sequence Number=SeqID_5247
MELVEGKLGRFAMIRGEEPTQPFFRLKTL

SEQ ID NO: 48623 - protein, 197 aa, Zea mays
  Coding DNA Sequence Number=SeqID_5248
MTKDASNNVPSRHQLQGAKATGASEEDMGIGPGKSIAYSVVKTRATLQERVKSPFRSKKRLPKQKPGRISRSRSYILLRATLSTDQNMWATNLQPLLLQQAIQKLPGLSSHRHLHYNLLIPEASSQKGANTHNSNVTSGRSPKLIYEAQKSFLRECRANINEATKVIPKGAQRKFFAQKSFLRECRAKVDEATKSRS

SEQ ID NO: 48624 - protein, 30 aa, Zea mays
  Coding DNA Sequence Number=SeqID_5249
MEMVGGNCFVPLLLSPSLLTVLMAHEVLDF

SEQ ID NO: 48625 - protein, 420 aa, Zea mays
  Coding DNA Sequence Number=SeqID_5250
MPSSSSSADATPPAAASSEETSSDVMVEELRAGDSVEFGVSRMTSARIEDMQRLGYFGGEVARAPGTEEVPEPEGELVVFKAFFVAGLRLPAHRDGQGSPRGGAKTPGDCEGSRSSAEKTAGNGEGGGLRRRQAAAAGEGSDEGPLTLVVPGAAIATAAPAPKAGGEALGAGGEVSALALVRDEAGVATRRLKGATEALSRATEALSQVADFTSRTASGALTAALSAEVERLRTQHDDAVREKSASDSKCRKLAEKEELQELPTVLAGLMSFTSLVTCEAAMNALSREGCRHSEALDQADEDFGRDIFEVEDPVVKESAGALYDRMWGSYGCEVVRARAEAARAQAERGEQVVDFGALNSALPDPETTPAEAATGVAPGPTPEIAEDAPGAPAPAAAGEDLPPKVAEGAPDAPRSCYAER

SEQ ID NO: 48626 - protein, 93 aa, Zea mays
  Coding DNA Sequence Number=SeqID_5251
MAHAGAGEQAGEERPVLASAGDGSQREEQDALGWDGARERSHWPPGQDAHSHRGRRGALSAARRHEDGSQELGQIQMGEDPWKSMSMQTHLHP

SEQ ID NO: 48627 - protein, 327 aa, Zea mays
  Coding DNA Sequence Number=SeqID_5252
  Homolog annotation: Hit_ID=Q6J9V9; Match level="QueryCoverage=51%, HitCoverage=60%, E-value=1e-30, Identity=44%"; Hit description =Putative uncharacterized protein
MSCNQRAGYDVREVTPPLAPMLRLLDCGTSTATRGSPAHDPTVPVKGTGKGDVVERILSGEGRQSPQSTRSSSPLLIRGSKAGPSEGFNSRPRARRVRDDSGYVRYIAEAQATLPRYPRTFPRPAGMICNGIPPEGGIEPSDPVEGVWVWQITRRLGGCSHTRLWPKLLTASTNQLDNLEPDHAPGLRPGRMRERSDRPKHHEKHSDLRGVKPLLRGLGGYTRRENSIARSAPVAVSATPSTTDNKSRSTTEFSLGHNRKLRLARPHAPASGGGLPHRPTLGSSLGRRSPPRPTPRLGFDPGLRKNRVLARPHPRPQEESPPQPTLG

SEQ ID NO: 48628 - protein, 281 aa, Zea mays
  Coding DNA Sequence Number=SeqID_5253
MHCALPPFDPPDGVLQRRLALAVVGGTRPRGDRHLSAIAWLQGFSLCSPAAFPHQWAVWWGEASRAAASAPPSASRIFVILAEAEGELSQGSTSRMGQQVVSSFSIQGRRRSPTLRRGELRQRRTGRPQASSAPACLARWLSWLCRGLLPLPPAAWSSWGPALAGHRGFEWGSTGESLGVRHPAGPLVWRLLLLSFWNPRLLCDEPELEAAVLARTDAESAQKETSSVREMAASQAEEDVVAAAGAWPRHLLARCWRPPLGGGPFARVAVRGRARFRRGWT

SEQ ID NO: 48629 - protein, 135 aa, Zea mays
  Coding DNA Sequence Number=SeqID_5254
MDKAVQAGHILMKRPDVVVPDDIVADVLTVSRSVTKAPSSEYVSYRETCNHYDFVIVKIVTQLSRCEEHCIQQLLDLRVSDLGGLEDFTDEVKFPAVAPQAVENLLEIVDEVFQVHGFDHHIVNVSFHLLAPVVG

SEQ ID NO: 48630 - protein, 56 aa, Zea mays
  Coding DNA Sequence Number=SeqID_5255
MAMMGSTSEKMYLCQHTLKSLFLSQVKKQQTFVASVLSWYQRKNTRSEVAGGKDPP

SEQ ID NO: 48631 - protein, 83 aa, Zea mays
  Coding DNA Sequence Number=SeqID_5256
MAMGADDGYKIPESRVSLARLLADDGIGTLCAQPLAGIGPHTGTQSGRTGSGPYQIPTTNARAIKRGPTRTAGSVIYDQGLML

SEQ ID NO: 48632 - protein, 107 aa, Zea mays
  Coding DNA Sequence Number=SeqID_5257
MDASLVIPPVIFLWMDVPVLLSWHTYAMHPALPLGDGCDTAPLLASVLLSSLLISASLFFSSSRVLLLSFSSLPSAASVEPLFVEAKLRQQMHRCRSSDVEATTQRG

SEQ ID NO: 48633 - protein, 65 aa, Zea mays
  Coding DNA Sequence Number=SeqID_5258
LSYERVGRAGEWADDNTKAAGSPYFSPPFVSRLAPTHLGWDTQRQFTRRSRDPPGVETPIGITVK

SEQ ID NO: 48634 - protein, 499 aa, Zea mays
  Coding DNA Sequence Number=SeqID_5259
MEAQAHASCNLRAECFVHATAPPLAPPPRLLDCGTSGASGRRSERRFAFAITTASKKGPGKGDTPKRILPREGTRLRASLLIRGSKAGPSEGFNSRLRARGLHTHYWSEVRRLAPRKGSTAASGYSGYAPTTDQGGNDLVTESHQREASSPRTPSPGDRVRQITRSSPETPCSAPTEGNMALSPLLLAERRRRGRLGGCSHKPGFGQTVDSVNIPARELGTRPYTRATASSHEGTTRPAEALREALRPRRSKTTPPRPRGLHPAGALARTHRNKTQPRKAGPLAKKCDESLQASANTPFEARGLLSGTIIRGTLKAPNSQLPQKTTNSAPPDPGLGLGLSPRRRRTLLRPTPGLGLHPGLIRRSPPRPNQGLGLDLSHGRQTRPRLRRSFHIAQPRAQTSPRQQEAPSSPYPRADSGNGEQDRRPIWLAPPDRQSWRPAYSVTTTALSPLTEARGRQQGLNSSDSCPPARLQHSSDGHDITPAGCQNLSSCHNGMYLGR

SEQ ID NO: 48635 - protein, 97 aa, Zea mays
  Coding DNA Sequence Number=SeqID_5260
MAACRHSEARCTTRTRNGHEHDELLTSEWSTRVGGWGQQTRRALARIVVLDPRRWSEQAEMSQGRLDDRGRRRRASRATPRRSIRNGPLFPRDPRRP

SEQ ID NO: 48636 - protein, 36 aa, Zea mays
  Coding DNA Sequence Number=SeqID_5261
MELEQRKAARVDKGAGAVAVEKDQGTVGDLFSNAKN

SEQ ID NO: 48637 - protein, 179 aa, Zea mays
  Coding DNA Sequence Number=SeqID_5262
  Pfam annotation: Domain name=LRRCT; Domain location=58-83; Score =17.1; E_value=0.065; Accession=PF01463.15; Description=Leucine rich repeat C-terminal domain
MGMEPKGRTVVVQLDACRVAVHPFDHRFLRRWESACNRGTVTCLACGGSPSSCFGSARMTCGSQPPCRGGRTLEVVSGDFACDAKGCKRGGARPHGDRYPSAIVRLQVFSSCNPTAFPHQWAVWWGEASRVTASAPPSASRIFVILAEAEGELSRGSTSRMGRQAVSSFSIKGRRLKGN

SEQ ID NO: 48638 - protein, 94 aa, Zea mays
  Coding DNA Sequence Number=SeqID_5263
MVGSGGERYRGRSGWWPDSGRWPDSGRWSSELGRSAAGRRRSGRLSSDGARAELEGGPRRGVNRAELAAAGSGAWGGRREELEAAPEKGQAAAA

SEQ ID NO: 48639 - protein, 168 aa, Zea mays
  Coding DNA Sequence Number=SeqID_5264
  Subcellular localization annotation: CTP_CleavageSite=64; ConfidenceScore=5.57e-01
MALHKLCDDGGPQLSYGSRATSARTRPLQTAVPPPGSVAPPTATTSRQQGAKTSPAATLAWRTRAFLEKVGRAGPRTGQTLSWGRSLPSPAWTLVTPLLQAHLTWARDEHEGRGTSTSLTLDSGHLASPPFALAHALDPSGLGHAAHSLVGFGTPCLETPTGINHFNP

SEQ ID NO: 48640 - protein, 158 aa, Zea mays
  Coding DNA Sequence Number=SeqID_5265
MDPQLSIIDSDRRTFAVMKTWSLFYNHTLESLFLSRVRKRQIFVAFASRWYQMRKNKTEVREDSVLHLGSFAYSLPGGVCASHGPRKDDLTIYWALGPFVRSFTLLVDPGDIYLPQSPLCCDLMEEEDSSLCLWPDSLEWVIPELADLSPPVTISLLA

SEQ ID NO: 48641 - protein, 152 aa, Zea mays
  Coding DNA Sequence Number=SeqID_5266
MGVGKGRLDGWKCLLNALRLFSDRGWRSSPPSPRELRLPSLPPASSDDSDDSQGIAAEVWSYIRAVERSGLEGSDESEYSSDEEDSDGGGEDEDNDDDDDDDGDDGDGGGSGRGSGDGGRDGDGSGSRDSTKGGSSKGSTKGGGSSRGRASG

SEQ ID NO: 48642 - protein, 310 aa, Zea mays
  Coding DNA Sequence Number=SeqID_5267
MMTASKKVRHVIRFRILFHFLFLSLATGTGKGDTPKRILLREGSGPRALLLIRGSKTDPSEGFNSRLRALGLRAHYWSEVRRLAPRKGSTAASSHSGSAPTTDQGFVGWPPKGSTTASEHAERGMTLESHQREASSPRTPSKGDRVRRITRRKLRLARPQGLAPVSALEDGLRLARPQGSDSASAPEDDGLRLARPQGSDSASAPEDHGLRLARPRARTQPRRWTTDSASPDPRARTQPRPRKTVSASPDPGLGLDLDLGRRTPPRPTPGVGLSLDSGRRTRPRPRRSLRLARPRARTDHVTGGPSLPYP

SEQ ID NO: 48643 - protein, 85 aa, Zea mays
  Coding DNA Sequence Number=SeqID_5268
METPDGRAGQNGNGDTIPTAMARMKLQCTTLVVSASRDRGVPKADESGALAVGGYKRPRGRKERIQVYNGGVAECYVSSGGELAP

SEQ ID NO: 48644 - protein, 56 aa, Zea mays
  Coding DNA Sequence Number=SeqID_5269
MPLMGLSVCGSLYQGGDQKGGFGIDYGNGCPCCNHCSGEDEAVEEDFQEFQDYDEF

SEQ ID NO: 48645 - protein, 105 aa, Zea mays
  Coding DNA Sequence Number=SeqID_5270
MARLRRGARRVLPHPEPFFLPARHLGAVCPTCVPRRDEGHEGCTLIIAIYVNKRKGIWSVKDKKSDNITMLAHSYSIVIEEIETILNYKCTFNLTEGKSTSVTQK

SEQ ID NO: 48646 - protein, 131 aa, Zea mays
  Coding DNA Sequence Number=SeqID_5271
  Subcellular localization annotation: CTP_CleavageSite=90; ConfidenceScore=5.07e-01
MQSACNRAKWVRPFDSNAPSMEAQTHTSCNRRAGCYVRATAPPLAPLPRLLDCGTSGQEQRSRRQPSLRPIQGQRENPLSRREDGAPVFRSSNGSHTRNARLANHSPHRINSAAGQAAPQAGEASDALPSP

SEQ ID NO: 48647 - protein, 92 aa, Zea mays
  Coding DNA Sequence Number=SeqID_5272
MWAVRQTKIGARLSPDLGRILHWNSHELGSPRCREEISHRRQGKIHCNLADGEYILVPEQGAAQEVAPDPAPESAPEDLPATALEGKPRFYA

SEQ ID NO: 48648 - protein, 113 aa, Zea mays
  Coding DNA Sequence Number=SeqID_5273
MRRKDGGYPPSGGLEGGKTRCIREREDMVAFQRGSSGPVVRQAHVPSGGGKRTLSHDVKTTRPCSVPRTARARATAAPPTTRPVALTPRRDRRRLWQEKRATLRLRHNDRVKK

SEQ ID NO: 48649 - protein, 263 aa, Zea mays
  Coding DNA Sequence Number=SeqID_5274
MVTSSLMVGESEPGYGLCPSLSLKDFHHQGWGGDCSVPGSRMRVALEPLPAPASATTAGRGSSADEIARAAHGPTSNSTAFCPSLPHEFGHGRGPLGSSIRPEVSAAAVRPPGAEVIVVAAAGAGEGAPFVGLLLLRRPPPPPPPSSGVVRTCGDSPVGCLNRFTKRESPRVKVTRAELARKGNLVGRSLAGSSVSGTDAGVDQPRPQVGLTSLEDGWPRPRDPRTASPSEARSDLAEGVVDAEGAAAPFYRQDPSLQDRIVL

SEQ ID NO: 48650 - protein, 216 aa, Zea mays
  Coding DNA Sequence Number=SeqID_5275
MALPREECSALVPAKSCHWRAPPARLSSALDPLGEFVDGDQQVREASGCLLQGTDEVQTPHGERPSDRYRLEGLSGQSPSFGLVKGQLSSEEIFQVRGLPVQVWRLLGEAILVGDEGFGLGEGFGILHAFHIALLEVRVVGDGHELGVARSSQHCVIGPSEPDYLESEGFLSEIGGSSEADGQVKLPKGQNTLAWDDPVERCCTGPDHGQIDPQEP

SEQ ID NO: 48651 - protein, 50 aa, Zea mays
  Coding DNA Sequence Number=SeqID_5276
MGKPVPSLLMLLLSRVIALVPTITGMGDHVSGRMRGKVCCQVQSGGFELQ

SEQ ID NO: 48652 - protein, 474 aa, Zea mays
  Coding DNA Sequence Number=SeqID_5277
  Subcellular localization annotation: CTP_CleavageSite=78; ConfidenceScore=5.08e-01
MPGAGRVPYRRTCPWHKPPRESGQWCLNPKRTPNTAPANRSMGLLIVSVIPQRGKQSLPAVVSELGTRIGVASFAASRCDKRGGQHDSVMREFVERGKNALTRWVPRAVRSGARQQPDPLGFAAAATTNAEIPGWKMHSSGRGATDAGKATPHGSDQTLAFTDRQADREENKAYQVSADPADRAVVSELGTRIGVASFAASRCDKRGGQHDSVMREFVERGKNALTRWVPRAVRSGARQQPDPLGFAAAATTNAEIPGWKMHSSGRGATDAGKATPHGSDQTLAFTDRQADRWARLLALHQPGCSPSLMVIQKDDHQLRDGEKRAGLWPPSYPQLQGCSSSSLGWKAIRAGSCLCVGSGPLLPSVFEGEGRLPSVALSVAACLAPRPERLWRCSQCHLLPLRRSVAAHPPHGCRSHNTPYAARAVFVFWDCLFLAPVVRTGVRTCWCALGRPPFADVVLARRWPLSSVLEWWSP

SEQ ID NO: 48653 - protein, 230 aa, Zea mays
  Coding DNA Sequence Number=SeqID_5278
MALRHEDSSSGSNDPIGDLEAQVEQLQTELRHRNNVWVEDGQRINELRTNIRHLQDELVERDLALDWAVNSRSIAWDREAKARAHVAELSTAVDNLQTLSEWELDLLEQQMPFRTRAHDGAGTSHGQEDTPNPPPVPSTLAEAIATLVTATTDNTRFLREMAGQQLQQQGRRAYLQGPRETSYLDFSETRPPLFVKAEDPLEADEWVRVIEQESRLIRCSETQKPLFTAQ

SEQ ID NO: 48654 - protein, 103 aa, Zea mays
  Coding DNA Sequence Number=SeqID_5279
MTSGQTLLRQGARPCPRPRGEDMQKAVELEVSPQVAPAISSAEKPLPAASVGGGKGWTAMQAVCNRTKGAHPFDFDASSMEARPPRHVTGAPVTTWEKLQTNL

SEQ ID NO: 48655 - protein, 67 aa, Zea mays
  Coding DNA Sequence Number=SeqID_5280
MEPGRGTAVGAVESLLTSSCFRKGAESRHRHRVGQCGSSSEAEVESVFRGRGQVQAPGSGEAEFVVF

SEQ ID NO: 48656 - protein, 141 aa, Zea mays
  Coding DNA Sequence Number=SeqID_5281
MVISFVFPKGGFLLRGYMEAGANPVNLSLIFPNPHGGFNVAEFQLDVVLLPRRWAEQRLLHTHGISVDNDEIRNSRGMRIALSSMLTIAPLKRKAIPNHPFATSRYGAGPCATGAASREGAIQVGYRQLPDIRKTEVVERT

SEQ ID NO: 48657 - protein, 104 aa, Zea mays
  Coding DNA Sequence Number=SeqID_5282
MAVLERRSRLPAVAQLAVAFWLAATSACLCRSVIPDPDLEPGRPSSGDDDSATATPPYPSVLSFPSVSSSPAAPPAEADLPTTDTVVPGVPAAASTAAGRHPSS

SEQ ID NO: 48658 - protein, 112 aa, Zea mays
  Coding DNA Sequence Number=SeqID_5283
MTMGTSVTWPRLGLRSRGTLGHFRDQRERFVMESHWREAPSPWTLSNGSGSSKSHAGKQHYSPCSDYCANHQGKTNDVATLTAMTPIVDPSNRHIIVLEYPINGATSHCPSK

SEQ ID NO: 48659 - protein, 110 aa, Zea mays
  Coding DNA Sequence Number=SeqID_5284
  Subcellular localization annotation: CTP_CleavageSite=89; ConfidenceScore=5.01e-01
MAHRSFSGPPETLSPPFYPLCPWIHGLFPTIEFAVAPSFSLPNSGDPGTTLARARLNPTAVERSGAARSRLFPRSDPLRPMQIEWLGPRCSGGDAGNMEEFEEFQEYDEF

SEQ ID NO: 48660 - protein, 136 aa, Zea mays
  Coding DNA Sequence Number=SeqID_5285
FTAIRCTRKSIYYTHNYTQVSLHNLLRRKLDHLTLRDMPTRTRGQDAAGTSGGRDVTPNPPPVPPMLAEAIAALVNATADNTRFLREMAGQQQFQQQAARGFQQGPRETTYLDFSETRPPVFVKAEDPLEADEWIR

SEQ ID NO: 48661 - protein, 76 aa, Zea mays
  Coding DNA Sequence Number=SeqID_5286
MQRCKPNVGLTACPRCCGRENGSSGVCMDGRHNCNAFYEGLYATAELQVALNMSDDRKRAMYDGFDSVTHGHSEYE

SEQ ID NO: 48662 - protein, 491 aa, Zea mays
  Coding DNA Sequence Number=SeqID_5287
  Homolog annotation: Hit_ID=Q7XBD4; Match level="QueryCoverage=42%, HitCoverage=21%, E-value=1e-07, Identity=26%"; Hit description =Cinful1 polyprotein
MAEIRSAAEGARVGGQALTGGTGSVNDRGGERADRAGPALEAKRTATRVRGGPSRSIKIGRGGVRTVRSRSDGENQTGKDERLRVALTGGLGRQARVREAGRKDEGATANSMAGKRPRIHGQRGENGGEKASGGPEKLREAWSGLQRAGWPGTRARVSGGGWRCGQSAREGEAERIETRPNPHCPCGVRTRGPATWAELHRGLSLLWTVSLVCPAGPADTDFVRAARGRCRRAKGGVFAFAPTFALRGASSTKSAGAKDHREMVKTMLSLKVAPRGPGHTVEFGTSRIFLGHVLEMQRLGYFVVAFAKYVWAVSSYGGQPAMEVFTKNYCLHWQKRKIGDKIAQFRSCTFTPRTGKTLTEVVEIVLCARNKWGNWWDFWFYVAPGDVEGLLSLPLAILCSHCYVAFPRFEVAKEDEGALRYAARLSGGRDLVEEFIAYGVWPLAHGWALGEVTPPVGCLPWAARWCEVQPSQWIYVVPMQPRLCVKSRPRP

SEQ ID NO: 48663 - protein, 63 aa, Zea mays
  Coding DNA Sequence Number=SeqID_5288
MSYASLVTCEVAVNASSREGCRHFKVFDRVTEDFDRGIFQMMNDEEVEDFSGLESSMTRAKGV

SEQ ID NO: 48664 - protein, 256 aa, Zea mays
  Coding DNA Sequence Number=SeqID_5289
MKSRMALGSRSPEKSQLKLGSSSSSEPVGLEVETAVSQSQVDHIWYPGRSGYALAKALTEVGSLGGSKLNLKGTGWKTDGSDTRRCLRCKDNTRHVPRRGASVIGSLWSDSRRGAASCLATVAPSPPPLARRVAGQTWVFLFRHGGKSSSSLPPPGEPTTVVVVVLRGEEYHVVAAIAGHELETLEAEHRPRLKRLLKIVHLELNGKVFVNTQQDPYLARQLSVFWTREDPQPTSEFDAGCPCPDGLMQDETQEGG

SEQ ID NO: 48665 - protein, 342 aa, Zea mays
  Coding DNA Sequence Number=SeqID_5290
  Homolog annotation: Hit_ID=A2XFR6; Match level="QueryCoverage=48%, HitCoverage=48%, E-value=7e-31, Identity=44%"; Hit description =Putative uncharacterized protein
MDLGTHMMVRTLQTTRVNTSYAPPPRQIHVYLVVVEEVPVDLPHIRVEHGVILEDSSKEQLSMPTPLAESLAFAARSSTSAPPAPVVQAPAPGGDDPNDSRDDDDEDDDDNEDEEEQVNEEANYTQQDYFMGFGPIVEHYTLMFETGHFPNLLQDVLHALRTCVLPLYETRRVSEPPRACYYITHIHVRVMDGGDRGFRTLSAHESLTPLSTYAASVSDAARRTLWSLSHTYRQQLHNTRFRHLPLRLSGGSQTSIVPGGAGEDRLNTLAGVVAGLNTDLDSATLDLSRVHLELEDAHARIAALEALLQGRDTPEAQVPAMALSPPRKRLRYGEPRSITRLL

SEQ ID NO: 48666 - protein, 212 aa, Zea mays
  Coding DNA Sequence Number=SeqID_5291
MGRDIHPKTSHQSSKSNHWTYKLWDFNIYATCSEYDSKENSTIHPVPTTVPTTRPRAQQGAPPRPTSGLGLSLSLGRRSPPRPTSGLSLRRRSPPRPTPGLDLSLGLRKRSLPRPTSGLALSLGLGRSHNLARPQTRPQEKSPPRPTSASDRLRHRGYIITLPLASCLRLRRNMTSVPFRLLRQQAKKRQEDPGPQRQLRFYRAQALLRLPC

SEQ ID NO: 48667 - protein, 405 aa, Zea mays
  Coding DNA Sequence Number=SeqID_5292
  Pfam annotation: Domain name=zf-CCHC; Domain location=154-171; Score =13.0; E_value=0.016; Accession=PF00098.14; Description=Zinc knuckle
MVNCAQRSTAMNSEQWTEQKSELQSQNAPDCLVCLQTVRCRKRTKDFNSQLLQTTMVGLRGTHWTLNSVMSGAPLDCLEPTSSRPYAFACDERKGKKKAPTPSSSSEEEEEEESDDDEDNQPSTSSSKDKETIQRVRKVENLLFNIDREKQRNRGWFACGEKGHFRDSCPNMVEPTKGRSKGKALTSVKTWDDCSSEYEPLRTRSHRSSSRSSRSSHKCLMARGKMSIPSSSDDSSGDDEGEGKPSVDELAEAIKCFQDKHARMRFAMENEKLKQEVTRLGKALYDKKEHKSFQCKAKTGDKKKLKQKPTSKISNTYINKVDKKAATPYLIKKKKEWKGDSNQGQQASHQRKGGQTHLGAKGNYFNYEKHQEGLDPEREVRSPKDIEEFGDLAKLSCLSWDASYW

SEQ ID NO: 48668 - protein, 48 aa, Zea mays
  Coding DNA Sequence Number=SeqID_5293
MVEALMCMQAWARADMLGHGSHALNALMTCLDDEDEATGGMKSEIIDP

SEQ ID NO: 48669 - protein, 295 aa, Zea mays
  Coding DNA Sequence Number=SeqID_5294
  Gene Ontology: Mol. function=oxidoreductase activity, acting on the aldehyde or oxo group of donors, disulfide as acceptor; Cellular component=mitochondrial alpha-ketoglutarate dehydrogenase complex; Biological process=metabolic process
  Homolog annotation: Hit_ID=Q2QWT6; Match level="QueryCoverage=81%, HitCoverage=52%, E-value=1e-103, Identity=76%"; Hit description=2 -oxoisovalerate dehydrogenase alpha subunit, mitochondrial, putative, expressed
  Pfam annotation: Domain name=E1_dh; Domain location=150-294; Score= -93.5; E_value=0.00016; Accession=PF00676.11; Description =Dehydrogenase E1 component
  Subcellular localization annotation: CTP_CleavageSite=71; ConfidenceScore=5.68e-01
MASLWLARASSQLARRAAARRPPPRPARHGSGQPTSSWFLGSVPQAALGSPALDTSRRGFCSVRRFAGESSAAAAAAAVVDEEPESGFAAGDQQAVDFPGGKVSFVAEMNFLPESTRERINCYRVLDDDGRTISGSRFQEVSRELALKMYSEMVTLQIMDTIFYEAQRQGRISFYLTSNGEEAINIASAAALSMDDIVLPQEFANQCFGNKLDYGKGRQMPIHYGSNRLNYFTVSSPIATQLPHAVGAAYSLKMDKKDACAITYFGDGGTSEVDESSPATDQSLASAIISSLPDR

SEQ ID NO: 48670 - protein, 304 aa, Zea mays
  Coding DNA Sequence Number=SeqID_5295
  Gene Ontology: Mol. function=glutathione transferase activity; Cellular component=cytoplasm; Biological process=metabolic process
  Homolog annotation: Hit_ID=Q10N45; Match level="QueryCoverage=47%, HitCoverage=49%, E-value=6e-20, Identity=44%"; Hit description=IN2-1 protein, putative, expressed
MYTKKAETWILLAGASDWFDSNGYLRRGADVVGSGVDFRPGLPGLQPRSWPNNERNRPIAQCPSHQPSAYPNQPSPSVEEPPRVPDPDTVTLRHPPATAACRHRASTPLPRRPRPHAQLSEARAPEHHRRLPHARTSPSRLERLEAGAAARRGRAGQPVIERAELRSALGLLETTRWVCRPAWYKEKVYPENKVPSLEHDNQVKGESLDLVKYIDSNFECPSLLPEVSAEKLNEAEVLAKSMLSNLMRRRSQPSLFGATRRGEDSDQVVIRHGPIYRVDKMEYYTPLPGERQRKTPKVASGRLR

SEQ ID NO: 48671 - protein, 85 aa, Zea mays
  Coding DNA Sequence Number=SeqID_5296
MGVWADPHHVVARHRRAIIAGESSSIMLALFVSAGNASRIVFGLRALAGSWGRRCFHRGGVAAPPVLTGKEEGSLTLDPGMDGYC

SEQ ID NO: 48672 - protein, 153 aa, Zea mays
  Coding DNA Sequence Number=SeqID_5297
EDQPQELYSFGKLQRLVRYNSPDCPVCIGLYHAAPEQRLDSLRRLFPGHLMTARRAQRATATILQRRTTNTSYAVCSGPAGEHARQKLQQSDRNGSYDVATVDLISGVCRAVQCSIEQTASHNEQVGGGGYKYPNHPTINASKFSTSQLLQEL

SEQ ID NO: 48673 - protein, 52 aa, Zea mays
  Coding DNA Sequence Number=SeqID_5298
MARVACTLRGKRLDGGVSVLTVKKQQTFVASVPRWYRKKRIKTKAAEGKALR

SEQ ID NO: 48674 - protein, 128 aa, Zea mays
  Coding DNA Sequence Number=SeqID_5299
  Subcellular localization annotation: CTP_CleavageSite=44; ConfidenceScore=5.57e-01
MGGGLLAAASALRSVLPLFAPPEQKSSSSLLLERATARRSSVFCCSAGPPPSSGVVRPCGGGTGVPFVMALWMPVFFVHCGCRGQNMDVCASESCFSRKVMSEVSVSRRRRSPSARSALPLTRTFTRP

SEQ ID NO: 48675 - protein, 157 aa, Zea mays
  Coding DNA Sequence Number=SeqID_5300
  Gene Ontology: Mol. function=kinase activity; Cellular component =ornithine carbamoyltransferase complex; Biological process=amino acid metabolic process
  Homolog annotation: Hit_ID=Q6QP54; Match level="QueryCoverage=68%, HitCoverage=38%, E-value=2e-32, Identity=65%"; Hit description =Putative kinase
MEHRPGLERLLETAHLELDGKLFVNTQQALPGAPTVGVSRPGGPWADEGLRAAVVTEHAGRHHCLSGGASQTGRQSGSLWPESARGRVMMAPPVDVAGLRPRLGDAEAPPKPRSSLSSVAEAESEPLGRARRRSSAEARAESEPWGRAKQSSSSSGT

SEQ ID NO: 48676 - protein, 154 aa, Zea mays
  Coding DNA Sequence Number=SeqID_5301
  Subcellular localization annotation: CTP_CleavageSite=78; ConfidenceScore=5.45e-01
MAAWLARPRLGMALRPPWRRGSLARGLARPAPGVLRRPSLAAGARPWPHRGFSVVTMRLMVLGFDSGNASPLQPNRTLAEYVDVYSPLLYTPTPPLPQVVSIATTTQEKMKPWKETSRSSKTTTSSRRGLAATPSWLPVKAAFIYVSFSHFDLL

SEQ ID NO: 48677 - protein, 125 aa, Zea mays
  Coding DNA Sequence Number=SeqID_5302
  Subcellular localization annotation: CTP_CleavageSite=38; ConfidenceScore=5.13e-01
MAELRPPRPSQGQASCTAALCSAQGRGRTAGGQAAPPRHAARKTGAGAGPQMRGGRGAPRAGEAGADRAGGPSRRAPGHRVGAPPRRDVVGSRGRGRKKGRGPGLTTGGRRAAASGESGAGRGAA

SEQ ID NO: 48678 - protein, 145 aa, Zea mays
  Coding DNA Sequence Number=SeqID_5303
MAPHKLCDDGGSQLSYGSRATSARTRPLLQLSLRQAPLLLRQPRHHASKGPGKGDTPKRILPCEGTRLRASLLIRGSKAGPPEGFDSRLRSRGPYTHYWSEVRRPAPRKGTTAASGYSGSAPITDQGFEGWPPKGSQPTQTPSEG

SEQ ID NO: 48679 - protein, 227 aa, Zea mays
  Coding DNA Sequence Number=SeqID_5304
MGMQSHREKGSVFAFAPTFALRGTSSTKSTDKPHRGVWHFEDFLGPRAKDARFEVQVHQLTPNVVVALAKYVWAVASYGRQPSVEVAEDDEDEGALRYAARLSCGRDLVEEFISYGVWPLAHGWVLGKVCPRRMSTLGDRLVRSPAFIVDLRGRNLATFVHKVKTEVVKIVGRYVPKTETLRSWDIRGSNVRLNHVFELNRLPYAGYLGDDDADVADRRGKKGGGSG

SEQ ID NO: 48680 - protein, 476 aa, Zea mays
  Coding DNA Sequence Number=SeqID_5305
MKIFPYRRNVAAVVSAVIEKDRQDATQKRQAFERVGDLRREVKMARGSVNSAALGSSKPLLGAKSAALGPSKSLPAVPTQERRPPSPPRAAETEMGGAEVSMDISVDYYLVSGITMFDAHTGRGPVGEFFCNEVWVSDDPWSRFCARGKIALAAAAKDVAGSVAQQLKHMAAFAEHIASGTLTSEFAAERRRLEGRIERLRTQHTEVVRDNLATENKSCNLMEKLLAAEAEKEDLGRRLSAKKEDADKACAEVQAARAEVKLACAKASLALQHAVEAESSHRSLRGYLDKAEASTSTGLVRVPPPFDASGEEVGLRFLGWLQEELELLPAIVMGLMSFASLITCEGVANALSHEGCRHFEVFDQSDEDFDRRSFQVEDEVLKRSAGALYDRMWGPHGRETVPERSDRAMEQMANDEEVNDFRGLESTEPLAEDARAGEQPAPPTGASEDPVDFVFVILKVGCCASSDVWACASNPY

SEQ ID NO: 48681 - protein, 244 aa, Zea mays
  Coding DNA Sequence Number=SeqID_5306
MAAWQPELVPFTAAVYPEQRGLRGEMLAARSSRPRRKSRRGKVVGEFLSLGNFQKPARYNSPDCPVYTGQCPVLLEDAALELRSLGNSRRLLRYNSPDMSGVHRTVRCNCGATATSRQRSPATAINARQSAQASGTPMLAHRTLYSTCPVRHRTSRRAQKTELQRSNPNGFGVVAGAPDMSGATDEEGRLEESGAAFTSALISSGTTTPGLLIKIRPARMALSMALSRWALRVMEVSSATLTAN

SEQ ID NO: 48682 - protein, 38 aa, Zea mays
  Coding DNA Sequence Number=SeqID_5307
MDRQPEPNLTRHCHPSYCVALRRLWWRGEHGAKGWGGE

SEQ ID NO: 48683 - protein, 94 aa, Zea mays
  Coding DNA Sequence Number=SeqID_5308
  Subcellular localization annotation: CTP_CleavageSite=49; ConfidenceScore=5.37e-01
MSDSAGKATTATDPDGKTRSSQRDGRSSRKGRSNVDPAGKAAAATDPTKAMKGVGGEARLAGQGPAPDLARDDDDAGAGRSLKGEALLGISASS

SEQ ID NO: 48684 - protein, 120 aa, Zea mays
  Coding DNA Sequence Number=SeqID_5309
MGNREPSRGVARALPHLDAREMGLRRRAPWIRSLAGDLGEVATVGKLAGDRDRHGGWRQIAGRPRACARRAGSQTAGEEAERGRASAVVEETWRRWRGREGPGWGGGEGHDLVEAEHQGE

SEQ ID NO: 48685 - protein, 239 aa, Zea mays
  Coding DNA Sequence Number=SeqID_5310
  Gene Ontology: Mol. function=protein dimerization activity
  Homolog annotation: Hit_ID=A2Y191; Match level="QueryCoverage=23%, HitCoverage=7%, E-value=1e-11, Identity=59%"; Hit description =Putative uncharacterized protein
MDVKENIPADDLARREELEIFEGSMGCEQMRRFFQPLSRGSNTGANNNVNNTATVGGTFNPDNIVADPALRRQIYEYDKDVQDQVRRAYVLNGPCQPKGLDFPRRQYGQSSRPFKEECSACCQSVHDFFEYIHLIVTTTSSSCKRRDDLKEKHHQNILEKLERGEILSGRGSSTGFISENVVKQLGLSVHACSPMQIKSSMRVLPLSAFDAILDYDWLMQYIPIKCDWKQKILQFKDGV

SEQ ID NO: 48686 - protein, 151 aa, Zea mays
  Coding DNA Sequence Number=SeqID_5311
  Subcellular localization annotation: CTP_CleavageSite=44; ConfidenceScore=5.56e-01
MGGGLLAAAPALRSVLPLFDPPEQKSSSSPLLEQVTARRSSAFRCSAGLPPRSGVVRTCGGGTGVSFVMAHASVFVHCGCRGLNMDVCAGESCFSQKVMSEDPLFEVVKKHERSSAEKRSFFEENFDAEGVSPLLAPEGGSGFAEARPTLP

SEQ ID NO: 48687 - protein, 365 aa, Zea mays
  Coding DNA Sequence Number=SeqID_5312
MGLGVCGSLCQGGDEDDGPGYDYGNGKWYSFCLERMARLRHTARKSVIPFLPSRLAERPLRRPVTGQSSHLERLHHRLHEEQERRREELEQQGSSFSLQQEIESVRSCSPVLPLEAPPAPPLSAPAAGVAAGGDPDDGGGDNSSSHNTDLSEEQELEGWVARPITRDVARGCHFHDALNTLLRQTLDRRTWSIEYRCVVFQHSRGVYPDRWEATCFVHRSENSLRGAEVCSEHYSISERDSAKVVMQDAARRALSHYCSVLRRVADSLNLSTGSMVVSPVGEDNPRLSSTVNLAVVLNTKLDHALDELSRAHAEIAQLRAERAERRHLEDGSPALVGTQHPYHSPQRGHDAYGNPDCRTKINLVP

SEQ ID NO: 48688 - protein, 369 aa, Zea mays
  Coding DNA Sequence Number=SeqID_5313
  Gene Ontology: Biological process=cell wall catabolic process
  Homolog annotation: Hit_ID=Q10SU7; Match level="QueryCoverage=89%, HitCoverage=86%, E-value=1e-94, Identity=60%"; Hit description=LysM domain containing protein, expressed
  Pfam annotation: Domain name=LysM; Domain location=53-96; Score=25.5; E_value=0.00019; Accession=PF01476.11; Description=LysM domain
MGVKQVLVRPRYGDGDGDDDGGTSSSSSTGRCDEDVVDQSPPPMSSCGRYLLHRVCRFDTLAGVAIKYGVEVADVKRANGLNADLQMFAHKTLRVPLHGSHQPAAAPPSLPSYSPRNHADRVASPFTGQITSLEVGRFGHTPLRTGDVGRAVFHREWTTRRPPKNAASMDPFLKPPRSTVSPSMSLLQGYYGLPPTPQENLTYEGTEMATYAQGHHRKARSLSSSEHGDGADDAEKPIRRRQKADSELTTGREDNGGCLLPRAGQGLALRPKSGSRPDGNGSQLDLSATWVPSYGDGLHTVKKSSSTPEFQDSDSISIASEWLKSKWNLKPDAFTLTLPPLPLLDSIPKPLLDNIPNSIAAWRNKAAKD

SEQ ID NO: 48689 - protein, 315 aa, Zea mays
  Coding DNA Sequence Number=SeqID_5314
  Gene Ontology: Mol. function=olfactory receptor binding; Cellular component=integral to membrane; Biological process=protein insertion into membrane
  Homolog annotation: Hit_ID=Q10P18; Match level="QueryCoverage=96%, HitCoverage=96%, E-value=2e-91, Identity=56%"; Hit description =TB2/DP1, HVA22 family protein, expressed
  Pfam annotation: Domain name=TB2_DP1_HVA22; Domain location=4-127; Score=8.7; E_value=0.00012; Accession=PF03134.10; Description=TB2DP1, HVA22 family
MDPSCIYLINSRLAFGYAYPAYECYKTVELNKPEIAQLIFWCQYWKGVSISYAVAILTSVNNLPNLGLFPVSRILVALLTVLERFGDFIISWLPFYSKAKSVFFVYLWYPKTKGTTYVYRTFFKPYISQHENEIDWNLLELRARATNTVVLYFHKAASAGQSTFFDILKYVVAQSPSQKSRQCLHQETKPVQSSPKIKCQTLARSGSVASTKPLVAASAPKPGGSPKKGEVKPTADLVQTPTTCADSPKPEPSAPSLPGAEGVDKMAINEASGDALEGAEELDPALEEETPMEETICVTRAKLRRRTATEVPAGN

SEQ ID NO: 48690 - protein, 76 aa, Zea mays
  Coding DNA Sequence Number=SeqID_5315
MVPVVKGKCALGPFLSILVIECQHKGLNVNQCPWMNTVQIFNKGTPRRMEENTKHSYNLSKHQDIDLAHSIHCDSI

SEQ ID NO: 48691 - protein, 134 aa, Zea mays
  Coding DNA Sequence Number=SeqID_5316
MKHKTAALKLTQGFLSKDLKWERQEIFFYLRPVEPPLGRLNRPWQAWQPVCQSDWQTDAQTDLQTEVRGVRDQLNCPSGPVQLVLTREFRRENPSSTARRQVQLRKKLNSAEVKFSWKAQLQLKKFSCFSARTL

SEQ ID NO: 48692 - protein, 61 aa, Zea mays
  Coding DNA Sequence Number=SeqID_5317
MANRWWAWSGMVVWLVDRWAGLGEARISGLGIPSCQERRTLDSPGLGYVTRSLRPSSPVKF

SEQ ID NO: 48693 - protein, 134 aa, Zea mays
  Coding DNA Sequence Number=SeqID_5318
  Homolog annotation: Hit_ID=Q8S474; Match level="QueryCoverage=46%, HitCoverage=7%, E-value=1e-07, Identity=53%"; Hit description =Putative pol protein
MTSKRYQDPIDVSEGIKGSHSANKKIKFWIQQRSKEITEGPLVWEHRTVRPARYNSPDMSGVHRTVSGAPRRSGLRNSPASGISNGSSAIIHRTCPVCTGQSGATSEQRLFGANGYLRRIKCAHCARRCQACPY

SEQ ID NO: 48694 - protein, 321 aa, Zea mays
  Coding DNA Sequence Number=SeqID_5319
  Gene Ontology: Mol. function=hydrogen ion transmembrane transporter activity; Cellular component=integral to membrane; Biological process=proton transport
  Homolog annotation: Hit_ID=Q7F1V0; Match level="QueryCoverage=72%, HitCoverage=48%, E-value=1e-110, Identity=85%"; Hit description =Putative heme binding protein cemA
  Pfam annotation: Domain name=CemA; Domain location=96-320; Score =62.9; E_value=1.2e-16; Accession=PF03040.5; Description=CemA family
  Pfam annotation: Domain name=IQ; Domain location=34-54; Score=21.3; E_ value=0.0036; Accession=PF00612.18; Description=IQ calmodulin-binding motif
  Pfam module annotation: Pfam domain module=CemA::IQ; Domain location =96-320::34-54
MQDSLRIVEQGLLQIKAAVQHEQQQLALSARLQTSATVDIQAAARGFLARRRVREMRRQILEAALVMVDCGTRGATLPCRPAISSGTEPLSPSASMAKFLALLIVVPWVIDFLVHDYVMMPFLERYVQKVPLAAELLDVRRSQKLQMVKDLNIEKARYRLEVEIGKSPPLSDEEVWHELREKAIELRDDWRLENRNAFANIWSDTVYGIVLFLLMCFNQSKVAMLKFTGYKVLNNISDSGKAFLIILVSDILLGYHSESGWHTLVEVILEHYGLEADEAAVTFFVCLVPVAFDVYIKYWVYKYLPRLSPSVGNVLDEIKRH

SEQ ID NO: 48695 - protein, 134 aa, Zea mays
  Coding DNA Sequence Number=SeqID_5320
MAAPSGVVHGDGDAVNEDDVTKFGIVPGDGHAGVQDVLTKLAGDATHGDGDAGCQDGVTKVACDAAHGDGDTGCQDGVTKVTCGAVHGDGNTGCQDTAAKLAAEAMGSDRNPSYLIPDVMVARSVRDWRGISMD

SEQ ID NO: 48696 - protein, 43 aa, Zea mays
  Coding DNA Sequence Number=SeqID_5321
MGTNGHLDLDTEGKSVDQKLWGESEYRGDYVRRKTKWSKGSRI

SEQ ID NO: 48697 - protein, 72 aa, Zea mays
  Coding DNA Sequence Number=SeqID_5322
MTIPTGKSLYPCPYPLGIGQISGKTRRSNFVPKPVPDGSDIRRISEPTGKIAIPKDEVLVDDAGEDDADHGQ

SEQ ID NO: 48698 - protein, 127 aa, Zea mays
  Coding DNA Sequence Number=SeqID_5323
MRGKANCCCLARVQLSVLHLGDGRAARRWLLSPVLEWGLPLVRLPTAAVASADETIGASYAPDLRLFGFNGWFSSPVRGHERGPYSSSVCPEAIVATVQPPEAKVVVALLAQWSPASYSEPVIPQAF

SEQ ID NO: 48699 - protein, 152 aa, Zea mays
  Coding DNA Sequence Number=SeqID_5324
  Subcellular localization annotation: CTP_CleavageSite=83; ConfidenceScore=5.79e-01
ENSAVHPAPATASHQGKADNGKSRPPSSSASGATGSSVSPDPGLGLNLGLGRRSPPRPTLGLGLNLGLGRRSPPRPTLGLGLSHGLGGVAASPDLGLGLRHSSDDHVGTSTGLKALPRRPRYYLYRAQGTSLPATLAPSYTPIVQLGISLCL

SEQ ID NO: 48700 - protein, 34 aa, Zea mays
  Coding DNA Sequence Number=SeqID_5325
MAPRRSDWWRTRSIIDWLLGVVRPYGMDVWLVGS

SEQ ID NO: 48701 - protein, 110 aa, Zea mays
  Coding DNA Sequence Number=SeqID_5326
MPGIPRDVAKHSLDIRAGARCNTLGFKGQSQDLKSILGAKKSTGRCHLDRIELLVVAPLEPPVLLLWGGETARWIKGTTCLALEIPVTRVILQILVTALLVVAIQTNKRY

SEQ ID NO: 48702 - protein, 267 aa, Zea mays
  Coding DNA Sequence Number=SeqID_5327
MAHQTVRWCTGQGTVHCPVRATSAHRWGLERLTVEVLCLLAAPDTPMCSDFAALTSNLSTVHFYYTPQSTVGAVNRCSVGSPDMSGAHRTVRRIIVEWLSEKPKSGQLGRCSAWAPDTVRVFGTLVKECEGFYVPKENNAVHPAPATAPATRERLTTTSHDLPRVWPWAQPGAPPRPTPASVSTSASGEGIRLARPWASASTSASGEGLRLARPWASTLATASEESPPRPTSASYQLRYRGSIIALPLASRLRLRRNKTGVPSKLLR

SEQ ID NO: 48703 - protein, 141 aa, Zea mays
  Coding DNA Sequence Number=SeqID_5328
MAPKKASSKADEAAKAALLAARKGKALALTHSTHQEAAEDDALRTCGLEGQPQPPPGFAPPEGADLTEDGEVLGFTPPEGADLTEDGEVLGVSEEEQLQLRALRLKNRNLQRQKEILEAKRQHVSALAKVRQMIRDEEQKA

SEQ ID NO: 48704 - protein, 259 aa, Zea mays
  Coding DNA Sequence Number=SeqID_5329
  Gene Ontology: Mol. function=sequence-specific DNA binding; Cellular component=nucleus; Biological process=regulation of transcription, DNA-dependent
  Homolog annotation: Hit_ID=Q7X5W7; Match level="QueryCoverage=76%, HitCoverage=27%, E-value=1e-58, Identity=63%"; Hit description =Homeobox transcription factor Hox7-like protein
MAKYGLRPRTLKGELFALLSKAGSCGLKVSVLAKSSEIIDLNVSSPLELEQLISLALSSDITLFEKIAPSAYRLRVDPQIKGEEDSMSDSDDSGSVDEDEDASRSDDGSDGSQKLKFLENESRLARRKEKNAHGSPNKCSEIDESYSGEKWLLALMEGEYSDLSIDEKLDCLVALIDVVSGAGSVPRLESNTLVVETLATIDVQTGPKLREHQGQKIFGEAVRKLRARRDVENTDVPDNNALTDEVKIELNMLSVLVLD

SEQ ID NO: 48705 - protein, 192 aa, Zea mays
  Coding DNA Sequence Number=SeqID_5330
MTDGVRLGLQVLWFGGDLVGHGRGMRTFVSHPMEDESTRTKEEQGPSGRRDRAHSGAKAAGGGYFLVSLDTFPPSPDASRVSGYFRLIRRLPLFLYPSASSNFFLLAPSASSFSRRRSKAHRRPLSHGTIAVGSSDFGSSVSLLPCALCPSVAWWGRRKVVGKEKRYRWKMALPQRRSGEQLAMEWDAQRRR

SEQ ID NO: 48706 - protein, 133 aa, Zea mays
  Coding DNA Sequence Number=SeqID_5331
MARGLLQMDILTKMREPTQNSTYFYDEQVSVSPGNRSSNLSPVPPIGCSSPLWLGAHDTVDAQLQEVRGQVDGLAADIRTMHERLDSTVTSTTACFNQLDLAQTATRTTLDTILARLDALTTRMEQDYGGDTE

SEQ ID NO: 48707 - protein, 177 aa, Zea mays
  Coding DNA Sequence Number=SeqID_5332
  Subcellular localization annotation: CTP_CleavageSite=30; ConfidenceScore=5.06e-01
MQRVNASWRFTFSGSVAHHSGEVEAPPRSRSSLSSEVEVESEPLGRARRRPSAEAKAESKPWGRARRSSSCSSSSGAEAESEPWGRARRSSSSSGAEPKSEPWVGRGGVRRLPGPSPSPSPGSGEAELPMAPEAGLGRCQPHSVVWHNSQSGAGGAVFLSDWSVERRSDCGHFGSVD

SEQ ID NO: 48708 - protein, 193 aa, Zea mays
  Coding DNA Sequence Number=SeqID_5333
MGKEVRAETSVSSTGGGRRGHLRKGIRVAAEEERGGGAYLRRDCSSEVVEGVGEVLRVTVMCGLPSGMVGVGRSTCTGGELVGGEESSQTRAIRFKQMGQGASPGIKEGVCARNLRMTHRIARSTRAGGRPKSGEDELGSSVRSCRVRALGRLHGALAKLTERPAQLGRDWSGLAMVAEAWAVMAGGGKAHWS

SEQ ID NO: 48709 - protein, 334 aa, Zea mays
  Coding DNA Sequence Number=SeqID_5334
  Subcellular localization annotation: CTP_CleavageSite=51; ConfidenceScore=5.10e-01
MQDATRHALSQYCSLFSGVADGLDLKHYPNRSTSRTSCVIVYRWCYSLSFSCFAPSSQFQSNIAMGVCVMCAASCASSRDDSFKCSSVDRTIWLKSPKNSQEKPLSSGWLVEASVPLSVFWVRPRTQGCPSSRLILAQFRCTGLLCGKCSCFSGVFTSLTAACCLFSSLSFYSTVGKSKKGGSSSHHSGDKRKREPTPPSEDFGDSEYSEEEFSSESEGSPVHASPPASSDGSDDSQGITAEVWTYIRAVERAGLEGSDESKYSSDKENSSDSSEEGGGDGDGGDDDDDGGDGDGGGDGGEGDGKGGDGSGKGGSGDGGDGSKGSSRGSNKASG

SEQ ID NO: 48710 - protein, 294 aa, Zea mays
  Coding DNA Sequence Number=SeqID_5335
MMARLRHTARKSVIPFLPSCLAKRPLRRPVTAGERVCEELLPCAPARGAPCTTTERPSFGVAAEGDPDNGGGDNSSSFSTDLSADQEPEGWVARPITRDAARGCHFHDALDTLLRRTLDRRTWSIEYCCVVFQHSRGVYPDRWEATCLVCRPENSLRGAEVCSEHYSISEQDSAEAVMQDAARRALSHYCSFLGGVADGLNLKYYPCRPSGSTGGVIVSPVGEDNPRLSSTVNLAAMLNTELDHALDEISEDVHLFSVVEEFYTLFLMLQDLQDVRKQAQRRKACSAGASSTAG

SEQ ID NO: 48711 - protein, 111 aa, Zea mays
  Coding DNA Sequence Number=SeqID_5336
MRVVWDALGQVIRGVLCWVLVFGHWETEASVMAPIFSLRDLGTGIVPWIFPETLLGFGMLYGLYAMVISNIRIVRTLGKSHVVAFGDLCLGKEEGAEADLQEFQDFDEFED

SEQ ID NO: 48712 - protein, 48 aa, Zea mays
  Coding DNA Sequence Number=SeqID_5337
MRVGSGYGHRPTAFSKGRGCLWCNLCSSKEEGAEADLQEFQDFDKFED

SEQ ID NO: 48713 - protein, 169 aa, Zea mays
  Coding DNA Sequence Number=SeqID_5338
MRETELGQVLRRHDGTRGEWGEAWPLTRGHCTGGARGQGRLGRTREPLAHGGQATGGERTGRLDAEHGIAQHWSREQGLGGLPIGRRGTHVAAPMRTPVGAVPSWMQGTRGRGLATGHGQHRPTCLRAGVRDVVVASVGVCEEHVAMARRGMGEERVGRERKKDLVHTW

SEQ ID NO: 48714 - protein, 233 aa, Zea mays
  Coding DNA Sequence Number=SeqID_5339
  Homolog annotation: Hit_ID=A2YIC9; Match level="QueryCoverage=24%, HitCoverage=38%, E-value=9e-17, Identity=67%"; Hit description =Putative uncharacterized protein
MEKDALECDICCLPFQSEVFLANKTIEKGKLVIDVKYFFYVHSETRDICEEISCPANGDFVLSHEQTLPEFTPPAHFTLVSGLSLHSNYGSTCVSSTITTLTISVKWPVALDRPMITQDRTPGKRKPPQSKFASVNHSLRLIELPKFGLDMEQRVVQVAADVEVGYSIDATVFDGRKVIGLGCLFLSVCESARMSTVVPLESKTKCLVTQILGMFAAREEEKPEKAKAFQTVL

SEQ ID NO: 48715 - protein, 122 aa, Zea mays
  Coding DNA Sequence Number=SeqID_5340
MGDTRRLFASSLEDHNSVGVGTFLPSFGFKDFHQPARLYPPPPAGGHPRRRPPAPGWGEVSRAAILVPPSASRMFIILAGVGAGLSRRSTSRAGPWVTLSHGIRGRGRSLALRAARNSTTRG

SEQ ID NO: 48716 - protein, 169 aa, Zea mays
  Coding DNA Sequence Number=SeqID_5341
  Gene Ontology: Mol. function=carboxyl- or carbamoyltransferase activity; Cellular component=ornithine carbamoyltransferase complex; Biological process=amino acid metabolic process
  Homolog annotation: Hit_ID=Q8SA97; Match level="QueryCoverage=55%, HitCoverage=21%, E-value=1e-09, Identity=43%"; Hit description =Ornithine carbamoyltransferase
MALPVDVAGLCPKQGDVGAPPKPRLSLSSVAEAESEPWGRARRRSFGRGQGGVRALGSGEAEFRRLPARVRALGSGGAEFAVFRVLARVRALGSGGAEFAVFRVLARVRALGSGGAEFAVAPLARPDCLSDSLCRVAPQSEWRRRRCPSVRLVSGAAVTSALPGGRVSG

SEQ ID NO: 48717 - protein, 163 aa, Zea mays
  Coding DNA Sequence Number=SeqID_5342
MARARAYKAPRDLDRTPPHALDLTGAQNHRRLPVHGVPAAARSPCHRRPASRTLPNPVQPSEKTVHTSVKLPKRGIGVCFAGETSPRSPDSTRPPASVDRVKENRKDCNLADGEYVLVPEQGAAQEVAPDPAPEPAPEDLPATALEGKPRFMHNLLFMLFYYT

SEQ ID NO: 48718 - protein, 83 aa, Zea mays
  Coding DNA Sequence Number=SeqID_5343
MGIGCLRGGNWNKDYGVVPRLLSSRDLRRGLPFRLWWVQVRSLHDGSRGSLQDMVDGVTWSSILPPGWTVEWDPASAEEEHEE

SEQ ID NO: 48719 - protein, 225 aa, Zea mays
  Coding DNA Sequence Number=SeqID_5344
MSSLGRHRKLRLARPQGSDSASAPEDDELRLARPQGSDSASAPEDDELRLARPQGSDSALASADGLRLARPGARTRPRPRKTDSTSTSEEPPPRPTQGSDRLRHRGAIITLPLTSSGYGEQDRRPIWLAPEGPGHSNGRLATRGNGTARISLSLSPTRTLVTPYCKRTRPGRGTNTKGAGFPFTPVSLWFPPFALRLAPTYLGWGTRRQFTRRSRDPRGRNADMI

SEQ ID NO: 48720 - protein, 96 aa, Zea mays
  Coding DNA Sequence Number=SeqID_5345
  Subcellular localization annotation: CTP_CleavageSite=39; ConfidenceScore=5.21e-01
MDSHALVQYLFKFNQAKNNSVGCGGNHRYFGFKGSGACRGFSAEGGKRGSRNWLWLWRRPVESGLHETESYRQNMGREYFGIFLEHEPCLRDGMVG

SEQ ID NO: 48721 - protein, 330 aa, Zea mays
  Coding DNA Sequence Number=SeqID_5346
  Gene Ontology: Mol. function=nucleic acid binding
  Homolog annotation: Hit_ID=Q60EK4; Match level="QueryCoverage=85%, HitCoverage=55%, E-value=2e-17, Identity=26%"; Hit description =Putative uncharacterized protein OSJNBa0032D15.11
MARRRSQKNKKTQENKEVTLEILLSDCSNYVSWSTRVINAFRAVDPQLEQILDKSIIPPNYARENASEKDLRCIRLNYLAYDILSKSLSKEDYHAFIIKYDKPICDVHDIWIRIKSKFNKSKHDSSFCASTSLGICDTNPCKEEEENERWRPIDESTSPKGLSSHFDSHICCVANENDSGSTNEDEEEERSFVHLYARLSQEDKAVMLKLLERAREQSEARQRLEDILSIKMQHFDELTKEHEELKCSHVDLVQSKSSFELEFAGTNDDSYQKLKEENERLKKSLTQLKGKCIAQPSQDNCDPVVKKLETGTTVVCLSSLEENVKDLRMQ

SEQ ID NO: 48722 - protein, 89 aa, Zea mays
  Coding DNA Sequence Number=SeqID_5347
  Homolog annotation: Hit_ID=Q94EE7; Match level="QueryCoverage=49%, HitCoverage=12%, E-value=3e-07, Identity=66%"; Hit description=F-box family protein-like
MGGSLAGHRTSKPIVVQTCHGPSLWPPRTDRAVQQAARQQEECPCGEAESADQFERLHDAVLLDVLNRIGDVKALGRCALIKTQLVPMV

SEQ ID NO: 48723 - protein, 290 aa, Zea mays
  Coding DNA Sequence Number=SeqID_5348
  Homolog annotation: Hit_ID=Q6YZI9; Match level="QueryCoverage=26%, HitCoverage=35%, E-value=3e-09, Identity=48%"; Hit description =Putative uncharacterized protein P0562A06.5
MRTAWTRSTRGRSADGGYRQAFEPVLGGPGPDHPPGDVDLLPRRLALPGARNGQHGEPPPQRAVRDGDDLWQADAPRGSAGTAARSSPGSSGSRGRRRETPWPAPQRVAPRWRALSPWPATSCRLLHLPALLDGVELAQRARALLSDIARRHMELDTVVFVICCTSGTELQNASSAERLDVADAIEDVEQHCVVEPLELVGGLGLAARALLLLSRRLHPTEVASSQAHISGSGRGARVLVLPPPPGSPPSAAISPSESGTAAPGDDGAEDGSRAEETYSHGGRLISVHNN

SEQ ID NO: 48724 - protein, 407 aa, Zea mays
  Coding DNA Sequence Number=SeqID_5349
MRRKDDGYPPSRGLEGGKTRCIREREDMVAFRRGPTRHATGALTASCMQLHRHLRHHRASSIAEPIPRLEATQRTTQQRQPGAAVNATKDGPAVMTVAGGREQRSRCQPSPRPIRGQQENPLSRCEDNAPVIRSSNGSRTRNGRPANHSPRRIYSATGQAALLAGEAGDASPFAAPSLPTDQRFEGWPPEGFDSRLRSRGPYTHYWSEVRRPAPRRVPRPPQATRAPRPLLIRGSKAGPRRVHSRLRRRARDDHGYVRYITKARAALPSSPETPCSAPIEGNMALSPLLLAERRRKGPSTYQPENLGPDRTPGLRPARMREQPDQPKHYARLHPAGALARTHRNKMQPRKAGPLAKKCDESLQASANTPFEARGLLSGTIIRGTLKTPNSQLVIPISIKLLRPDGCD

SEQ ID NO: 48725 - protein, 249 aa, Zea mays
  Coding DNA Sequence Number=SeqID_5350
  Homolog annotation: Hit_ID=Q10SC2; Match level="QueryCoverage=25%, HitCoverage=7%, E-value=2e-14, Identity=64%"; Hit description=FHA domain containing protein, expressed
MAVTLRFVSISQPRRASFLDTLLLPVPVPVPVPALLQKIRTHPADAPTGPSGHHPRKSPRFIPGGPHAKARTRPRHELHIARAAHCRTPQGGGTGRAVPVRERGTNPSTLPARKYPHVVTFASRSAAPPPRHAARPAAGGGALRARAMAPDPCADLAVTPKTSAKDEASCSVAPPTPPKVTPDEVRAVARKFADQPIQETEPDVWAVLTAISKKARLRPQVPAPLPRPPLNPNPKTQALPIFLSFFVFA

SEQ ID NO: 48726 - protein, 204 aa, Zea mays
  Coding DNA Sequence Number=SeqID_5351
  Homolog annotation: Hit_ID=Q6QP51; Match level="QueryCoverage=24%, HitCoverage=22%, E-value=2e-13, Identity=73%"; Hit description =Putative growth-regulating factor 1
MQAACNRTKGAHPFDFDASSMEARTHTSCNRRTGYYVQETAPPLAPLPCLLDCGTSTATRGNPAHDPTVPTEHIGHGSVSRGRRRDGRYSQKWVGSNGGGRQAEAADRRHLWQKKQATLRFRHNDRIKKGTGKGDTPKGILLREGNGAPSPPTDQRFEGWPLRRVQQPPQSTRAPHPLLVRGSKAGPSEGFNSRLRPLGLRAHY

SEQ ID NO: 48727 - protein, 158 aa, Zea mays
  Coding DNA Sequence Number=SeqID_5352
MRRPPSGRRGRRKPGRRLRHAGGDDARRRSAPRYRSPRRPQGQRTPLPPNATGKGDPRTHAEGTGKGGYPERDPSPRRNRAPSPPLLIRGSKAGPPRVQQSPQIAWARHPLLVRGSKASPPKGSMAASGYSGSAPITDQGFEGWPPKGSQSPQTPSEG

SEQ ID NO: 48728 - protein, 76 aa, Zea mays
  Coding DNA Sequence Number=SeqID_5353
MRKSTGPIGVPRHPLAPRHEESSSSSNDPIGDLEAQVEQLRTELRHRKSVWVEDGVTPGFRGTKTRVRAAHDREHG

SEQ ID NO: 48729 - protein, 35 aa, Zea mays
  Coding DNA Sequence Number=SeqID_5354
MAHRTVSGASGRAALEQLTLGFLQGTLRYNSLDYP

SEQ ID NO: 48730 - protein, 576 aa, Zea mays
  Coding DNA Sequence Number=SeqID_5355
  Gene Ontology: Mol. function=oxidoreductase activity, acting on single donors with incorporation of molecular oxygen, incorporation of two atoms of oxygen; Biological process=response to oxidative stress
  Homolog annotation: Hit_ID=Q2QRV3; Match level="QueryCoverage=100%, HitCoverage=93%, E-value=0.0, Identity=91%"; Hit description=Alpha -dioxygenase, putative, expressed
  Pfam annotation: Domain name=An_peroxidase; Domain location=39-572; Score=471.6; E_value=1e-138; Accession=PF03098.6; Description=Animal haem peroxidase
MPVLIGLLYLNTRRTLLEKYNLLAVGSSHGALIDPKDQFMYRTGDGKYNDPDNAEAGSQYTFFGRNMKPVDQEYELMSPDPFVVATKLLARREYKDTGKQFNILAAAWIQFMVHDWMDHMEDTKQIEITAPNEVANKCPLKSFKFYATKELPTNSDGTIKTGYYNVRTAWWDGSAIYGNNDKKAEKLRTYVDGKLVIGDDGLLLHEENGVALLGDVRNSWVGVSILQALFVKEHNAVCDAIKEEHPNLSDEELYRYARLVTSAVIAKVHTIDWTVELLKTKTMRAGMRANWYGLLGKKIKDTFGHIGGPALGGLVGLKKPINHGVPYSLTEEFTSVYRMHSLLPSTLKLRDPTGQPDANNSPPYLKDVDIGELVGLKGEGQLSKIGFEMEILSMGYQACGALELWNYPSFFRDLIPQNLDGTNRSDRIDLAALEVYRDRERSVPRYNEFRRRLFLIPIKCWEDLTSDKDAIEAIRAIYGDDVEKLDLLVGLMAEKKIKGFAISETAFNIFILMASRRLEADRFFTSNFNEKTYTKKGMQWVKTTEGLRDVINRHYPEISAKWMKSSSAFSVWDADY

SEQ ID NO: 48731 - protein, 95 aa, Zea mays
  Coding DNA Sequence Number=SeqID_5356
MAVLSHGGDALSHLSLYVFLGVLAMAERGVHACILIHAEGNRFLVELVEGPTITGKIQGPISSGDNRCVHMHDGAERLTLDRCGLLPDSIWLSGF

SEQ ID NO: 48732 - protein, 172 aa, Zea mays
  Coding DNA Sequence Number=SeqID_5357
MGDQLRWLTPRDIKSREDMAQWIMLATGLRIYRTRVQDVGDAYGPARPPSPRRRRRPPPVLPRRNAARPHAPSPLRGRLAPSPLRARRAPFPPPAIGRPAPSRPGPLQLRRRSPHCAPAPRRGTARPCSSGDTDPHCAAASPPPPPSAREPQAPALSTAVPRRSRTELRLAS

SEQ ID NO: 48733 - protein, 218 aa, Zea mays
  Coding DNA Sequence Number=SeqID_5358
MREFLALGYKPDRRRFSLYSRRIYTVLGTATIESVDRREGVWRVEWGVGVDLAHDWRSGIRGESIACAAGSADAWDPPGGLSLALSIRGPTRLPLLHARATHSDHAGPLLSSTRTRTVFFFPAKIARHEQTSPFPTDRSSNFVMREFLALGYKPDCRRFSLYSRRIYTVLGTATIESVDRREGVRRVEWGVGVDLAHDWRSGIRGEPRCFAWIASGSP

SEQ ID NO: 48734 - protein, 88 aa, Zea mays
  Coding DNA Sequence Number=SeqID_5359
MYRRRGNEGSGLARVAKSDRCCLSDSKAAACSSPQAKSFAPHNVLRKGRLCSADLEMNLFRVANLPVSRWTSLADCEGVGDLFSNASN

SEQ ID NO: 48735 - protein, 233 aa, Zea mays
  Coding DNA Sequence Number=SeqID_5360
MRDKLVAENKSRNLMEKLSAAEVEKEDLVRQLPAEKEDADKACAEAQAVRAEANLALQRATEAEASHRSLRGYLDKAEASTRTEVDRAHALLVDAYRQLGACTAPFDAFGKEVGLRFLGWLQEELEMLPAIVTGLMSFASLITYEGAANALSHFDHEIFQVEDAVLKRSAGALYDRMWGPHGRDTVRERSDRAMEQMVNDEEVDDLGGLESTMPLAEDARARIGEQTAPANWC

SEQ ID NO: 48736 - protein, 22 aa, Zea mays
  Coding DNA Sequence Number=SeqID_5361
MKHLRTSPQQPRLPKTAQDERG

SEQ ID NO: 48737 - protein, 53 aa, Zea mays
  Coding DNA Sequence Number=SeqID_5362
MGLGVCGSLCQGGDEDDGFGYDYGVGCPHCNHCSGEDEVMEEDFQEFQEYDEF

SEQ ID NO: 48738 - protein, 464 aa, Zea mays
  Coding DNA Sequence Number=SeqID_5363
  Gene Ontology: Mol. function=hydrolase activity; Cellular component =cytoplasm; Biological process=mRNA catabolic process, nonsense -mediated decay
  Homolog annotation: Hit_ID=A2YJX0; Match level="QueryCoverage=64%, HitCoverage=79%, E-value=1e-74, Identity=53%"; Hit description =Putative uncharacterized protein
  Pfam annotation: Domain name=DCP1; Domain location=116-206; Score =65.8; E_value=1.4e-16; Accession=PF06058.4; Description=Dcp1-like decapping family
MREPSPRPSWGLSQVLDRRWGSEGWGCWGGASADYRRRAATAFRRRFSFLKARPRRPLVCVFVGVVEALRHSAWLGGVGAIVALGVCLLSEFGVVDLLLVVKNRSCLMWGVLRLGNDGAPRSYSLRRCLDVGIVELLWQNAQPRFQFIVMNRRNTDNLVEDLLGDFEYQLQAPYIMYRNAAQEVIGIWFYNSQECQEVANLFSRILNAFSKVPPKPKIPPVQSEFEEVEAAPVLVDGPLEPQTSNIMSTTTHIQEDPLSAFFSAAANAGGNSAVAVARQPIQLFGATPVATHAATSITTIQSPGLHYLLPSQASSVSGMPADAHGSIGRSTNLVNPSLFSPLTSSQTTMVCTNSVVAIAPPQHPQTAQQPQSAPLLQPFLLPTASPSPPYGTPLLQPFPPPNPSPSLASAPVLSPALSRDKVRDALLRLVEHRLPLDMAPDTLNYKEKIPFYPCVGCSETGYPK

SEQ ID NO: 48739 - protein, 154 aa, Zea mays
  Coding DNA Sequence Number=SeqID_5364
  Gene Ontology: Mol. function=hydrolase activity
  Homolog annotation: Hit_ID=A2YJX0; Match level="QueryCoverage=40%, HitCoverage=15%, E-value=1e-22, Identity=85%"; Hit description =Putative uncharacterized protein
  Pfam annotation: Domain name=DCP1; Domain location=19-101; Score= -38.8; E_value=0.069; Accession=PF06058.4; Description=Dcp1-like decapping family
MAHGGGAGKAKVTPNLAVDGEGTRTLNRTVLQRLDPAVEDILITAAHVTLYDFDTDVNQWSRALKHCSGKAPASSSSGRYGRLLFDPAQLHPPPPVFTPAVAGAARRKSGEQRGGRRRDCSLTHFPPFFHPLHSSLFLEVAGDLIRAGKAGSAG

SEQ ID NO: 48740 - protein, 222 aa, Zea mays
  Coding DNA Sequence Number=SeqID_5365
  Gene Ontology: Mol. function=zinc ion binding
  Homolog annotation: Hit_ID=A2YHZ5; Match level="QueryCoverage=29%, HitCoverage=24%, E-value=5e-09, Identity=41%"; Hit description =Putative uncharacterized protein
MREQCAQKSEQASEAHRTVNSACLVPPSCQSSNGQNRQNPNGWVMWLAHQTVSGGAPDCPLFSRGELCNELRRLANDKTSLYMSECITEGGVAEMFMDINKGNKDTVKSFGSSKENSEQITKEIENFKTFYSSPVKSGQKDVKNVNEGDDDLKKGEQEVKRAKSKVMRRIYESCKGEYAKVFEYQDEGLLNVVANLFPNIEHRMCTRQIYANWRKTHRDKDF

SEQ ID NO: 48741 - protein, 20 aa, Zea mays
  Coding DNA Sequence Number=SeqID_5366
MRLGLGLRAVSTQEGHLALT

SEQ ID NO: 48742 - protein, 38 aa, Zea mays
  Coding DNA Sequence Number=SeqID_5367
MRVEWGDNEIDGSDYDYGIGEDEAVEGDFQEFQDYDEF

SEQ ID NO: 48743 - protein, 220 aa, Zea mays
  Coding DNA Sequence Number=SeqID_5368
  Gene Ontology: Mol. function=kinase activity; Cellular component =ornithine carbamoyltransferase complex; Biological process=amino acid metabolic process
  Homolog annotation: Hit_ID=Q6QP54; Match level="QueryCoverage=20%, HitCoverage=15%, E-value=5e-10, Identity=79%"; Hit description =Putative kinase
MALPVDVAGPRPRPGDVGAPPKLGSNLSSVAEAESEPLGRARRKSFGRGQGGVRALGSGEAEFVVFRGRARVRALGSGGAEVVRQRPGRSPSPGVGRGGVRRLPGPSPSPSLGVGRSGVCRLPGLSPSPSPGSGGAEFAVFRVLARVRALGSGGAEFAVFRVLARVRALGRAERSGAVLLSDWSVERWSDGGHFGSAGGARVRIKLYADGGYQLRIRRLE

SEQ ID NO: 48744 - protein, 49 aa, Zea mays
  Coding DNA Sequence Number=SeqID_5369
MGGGLLAAASALRSVLPLFGPPEQKSSSSLLLEQGCLCERELLLAEGDE

SEQ ID NO: 48745 - protein, 212 aa, Zea mays
  Coding DNA Sequence Number=SeqID_5370
MAERYQLPRSCVSPTMRRKDGGYPPSGGLEGGKTRCMRERENMVYFQGGHPPFKGDYPYLRPQPSRAESSPTRSKALPCGAGAGSRMSCKPAQSRRSQTAARGAHDRPAGPGKGDTPKRILPREGTRLRASLLIRGSKTGPPKGLKAASDRVGPTPTTGQRGSGAALANPALAEPLTASTYQPENLGPDRTPGLRPARMREQPDQPKRYARH

SEQ ID NO: 48746 - protein, 27 aa, Zea mays
  Coding DNA Sequence Number=SeqID_5371
MKQTPNRDLAGDEARSHLKPDDDVEGQ

SEQ ID NO: 48747 - protein, 102 aa, Zea mays
  Coding DNA Sequence Number=SeqID_5372
MKTRFQIRREKKGKSFDPLVIEEFNWDNEWADSSHVHPQGLGQGTLDPYLHSFSNVSYNHDSLQDVCMLQSARGIHSTWKKGNWKDKSSKTDINKVSRCTKD

SEQ ID NO: 48748 - protein, 160 aa, Zea mays
  Coding DNA Sequence Number=SeqID_5373
  Gene Ontology: Mol. function=phosphoprotein phosphatase activity; Biological process=actin cytoskeleton organization and biogenesis
  Homolog annotation: Hit_ID=A2Z4K6; Match level="QueryCoverage=58%, HitCoverage=9%, E-value=7e-41, Identity=88%"; Hit description =Putative uncharacterized protein
  Subcellular localization annotation: CTP_CleavageSite=70; ConfidenceScore=5.68e-01
MTGKKAPVPPPPPPQAPKPPGVVPPPPPPSSKISNAPAPPPLLGRGRGNTTGPTKGRGIGLAQQSNPPKKASLKPLHWVKVTRAMQGSLWADAQKQGNQARSPDIDLSELESLFSTAVVTSTSEKGATRRGSAINKPEIVHLLLVILPYWLTCDEQTIVR

SEQ ID NO: 48749 - protein, 204 aa, Zea mays
  Coding DNA Sequence Number=SeqID_5374
MSSYTYLKQVQCIQNDFIALKVTIILPRRCYPKDDEATFVLARRNQSHLYYIIGVMYKITNYNKPYDENDPLQPLLTGRRHPRPRRTHPHGIPLAVPVIDLPPAEAVMNTKVLAIVEEAVSDHRGFILHRLGMDRGLPLLAGGPRLLFRGGLPKSRGRALDLLDCSALQETPDSVVDTTSFNGGWFWHHLEQDCRRSKVLTSPV

SEQ ID NO: 48750 - protein, 280 aa, Zea mays
  Coding DNA Sequence Number=SeqID_5375
MDAHQSNYGVWELLISETVCNKRDSYTPVSVIFTRKNYSSRGVGMFVQSSVQTFPLYMSTKAPRPWNSQRKPAKKRKKTTIIKYMRRNICGVAVESLPFNGWQPDSETPGTASLYVQKVFQSRFCTAANYTAVATLSSTDVETGSKIGEYTRREPLGEDVGELQRGGDAENPNVTDSDTFTDEVQVDLHVLRALMLHGISGEVDRADVVAVDKGGTLNGVVELLEKLAQPGGLCAGARDDRLPLGGLGDEVGTQEHGITGSRPACVRTASPVSVGVDHEL

SEQ ID NO: 48751 - protein, 219 aa, Zea mays
  Coding DNA Sequence Number=SeqID_5376
  Homolog annotation: Hit_ID=Q6QP51; Match level="QueryCoverage=17%, HitCoverage=17%, E-value=7e-10, Identity=76%"; Hit description =Putative growth-regulating factor 1
MTLGTSDTWPRLGLRSRGTLGHFQDQQERFCNGIPSEGGIEPSDPIEWDRVWQITCRTHEGTTRPAEASRKALRPHRSQTTPPRPRGLHPAGRSDRSHFALPLTDLIGKQRRSPLSDCCATRQGEADSSRVQPQAQQETPPRPTLGLGPRHGLRRRSPPRPTPRLGPRLGLGRWSPPRPTPGLGLNLDLGRWSLPRPTPASASGGVSASPNLGLGPTAP

SEQ ID NO: 48752 - protein, 102 aa, Zea mays
  Coding DNA Sequence Number=SeqID_5377
MELYLYFLLSSATVKTPDPARESTEFVGVCHVWELVGDPARAAHVPMTGCADSVEFGRGDMDGGKSQQTRLLRRPRFPDFADAGIEIGRHEARRWSRHAWPT

SEQ ID NO: 48753 - protein, 242 aa, Zea mays
  Coding DNA Sequence Number=SeqID_5378
  Subcellular localization annotation: CTP_CleavageSite=31; ConfidenceScore=5.60e-01
MKPWKETSRSSKTTTSSRRGLAATPSRLPVKAAVLGAFGLRRYLRTRVGITVNSTPVLFTLIWHLLLRHTCIFISFQAEASGVAAGGDPDDGGGDDSSSHDTDFSADQEPEGWVARPITRDAARGCHFHDALDTLLRGALNRRTWSIEYRCVVYQHSRGVYPDRWEATCLMSENRRRGGRRAQQERAAQQDEVPQQQHLPPPPPMSIEQMFLMQTQAVQAIGQTLAAIQQQQQQHQQAPPQP

SEQ ID NO: 48754 - protein, 437 aa, Zea mays
  Coding DNA Sequence Number=SeqID_5379
  Gene Ontology: Mol. function=transferase activity; Biological process= paclitaxel biosynthetic process
  Homolog annotation: Hit_ID=A2Y2R9; Match level="QueryCoverage=95%, HitCoverage=88%, E-value=1e-159, Identity=68%"; Hit description =Putative uncharacterized protein
  Pfam annotation: Domain name=Transferase; Domain location=1-410; Score=217.7; E_value=2.8e-62; Accession=PF02458.6; Description =Transferase family
DVLRFYRSGAFFYRSSASKAGLDPAKVIRSALSEALVHFYPLAGRFRELRPTRKLVVECTGEGVVFVEADADVRMDDLGDSLAPPVPCYDKLLCEPESPTADVIDRPLLYVQVTRLRCGGFVFGSQICHCIADGTGIVQFLTTLTELARGVPGAPTVRPVWERELFTASWPHEVSHDHLEYAPLPERPAAGKDHRVNPSDGDDVFDHHAFFFGPAEIAAIRSQAPPALRSAASRFDLVGAFMWRCRAAALQFYPDDSVRLHIFVDARVRNRSRRPVPAGYYGNAFAFASASAPAGELCRRPYRYAQQLLAEAKARASREGYVQSVAGFNAARRRPPFPKARSYLISDVTNAGLLAVDFGWGRPVYGGPATIMLASFHQEGRNEAGEPGILVPIRLPASAMERLKQNVRKELAGAHVDAVETAADETNSNRSSCLAKL

SEQ ID NO: 48755 - protein, 211 aa, Zea mays
  Coding DNA Sequence Number=SeqID_5380
  Subcellular localization annotation: CTP_CleavageSite=51; ConfidenceScore=5.29e-01
MSSRSLMHHVFPPSKPPDGEYPPSFRLVVGGTQLRGSWYLSAIVRLQGFSSCSPAAPLRRRSPETVTTSPWVGRSKPGCDLGPTLSFKDVHHPRWGGGRAVPELYLPRGFVGRPLLRCSRERALTGPVGGSDFNNAGLVDGGCRQPQRVGLVGLAPGAPSCRKAAAAPCAREDRPRCRALPGRRSCSGVVLPLHRYGASTRRSAPHSSGRI

SEQ ID NO: 48756 - protein, 99 aa, Zea mays
  Coding DNA Sequence Number=SeqID_5381
MGYMKRRPNGSDGRLGPRHMAFIVPGEEEVHARGGRDHQRAMGGKIWPIVRDGFVVLKQDEPSPSDNENVLTNDQAMNVFYDALDINEFNRIKKSHNRS

SEQ ID NO: 48757 - protein, 114 aa, Zea mays
  Coding DNA Sequence Number=SeqID_5382
MAAGSKLVRERRSGFAVEVKIARGRRGFGRGSRRAYDTKEDRLREREAESTGRRRGAWKEGKNAANKINNSSDSDSYVSFYLLDDDDQGDTDDDTESYEQPKPLAMKVLLLSSK

SEQ ID NO: 48758 - protein, 176 aa, Zea mays
  Coding DNA Sequence Number=SeqID_5383
MLLAEHELEAEEKEKKLEKRVHQFKAAQAVPGPQETEATKKALEDLQAEHRARVQRIAEWAGEASTMLVPLGMSPILVSELPASISDALPVLDSAADRIRRLDQILGACLGVDGSRLCQGVVDYMLTCFGSHNPAMSLALVLDGSVAATEDAARERVQDAVEMVAMRFQHDPADVE

SEQ ID NO: 48759 - protein, 259 aa, Zea mays
  Coding DNA Sequence Number=SeqID_5384
MTSHGSSDDGNALTHTDGLAREGFPRILWEVLQGAGYTTPPQYAVQQFEKHRVPRCRVRMTLEPHPLQPGWRSLDSESFGYRAEDTIEAIALHGLTTFCGFHPLELATHPIGLFPAEKEDDPMWKDRVEHAKDIWAIYPGQTAHLTVRCMNVLYRLQVMRGEAMSHLMALLEATKITLDNREELVVDLSQEMVEKDLQVEQLSTDIQELEELVGTRENTIEEANEDVDIEGGDDPASSVDTAGSGRPPSPESSVASFAH

SEQ ID NO: 48760 - protein, 114 aa, Zea mays
  Coding DNA Sequence Number=SeqID_5385
MRIKNSEGPEHKSDDVVVRPSRASIAPDLVDQGLEPVCTFNRKGITVQAWRKKRMPSQREQYGDTVHLFIDKGHSPYKITFMPFTFDNNSIVIYREILLNPVFEDLRTPKGPQQ

SEQ ID NO: 48761 - protein, 254 aa, Zea mays
  Coding DNA Sequence Number=SeqID_5386
  Pfam annotation: Domain name=zf-CCHC; Domain location=194-211; Score =16.1; E_value=0.0056; Accession=PF00098.14; Description=Zinc knuckle
  Pfam annotation: Domain name=zf-CCHC; Domain location=31-48; Score =12.7; E_value=0.018; Accession=PF00098.14; Description=Zinc knuckle
  Pfam module annotation: Pfam domain module=zf-CCHC::zf-CCHC; Domain location=194-211::31-48
MGMNHKINLMGVPLQVENLLFNIDRKEQRMRGSFVCGEKGHFRDNCPSMAEPKKERSKGKALTSVKTWDDSSSEDEPPRTRSHRSSSRSSRSSRKCLMAREVSLVEIPEIIKKNASTSCLDLINDTNPCNQVLVKNIVVETCPDKVAKENEELRQEVARLGKTLYDKKGKAKQIRPPQDNTTAGVNKLMEGETVFCRLCHKEGHKSFQCKAMTGDKQRQKLKQKPSSKISNTYIKKVDKKADTPYLIKKKKMER

SEQ ID NO: 48762 - protein, 214 aa, Zea mays
  Coding DNA Sequence Number=SeqID_5387
MSLTCLCESIVNMLIKASVKRRLGAKAFMEGEASTSPCSGGIRRLLASSERHRIDALGTGSGGQGTAAGRAGRVLGGAHALLPLRQRRHGRASRLRQGGMQVMAVRRVKEESCREGQGVLRGGRGKGEKGLAAETERAAGCTDVAAGGCVASPYAFSLKSLLYSVFAKSHLALLQVALALGFSGAMVVANDEAFALVVYITTIHTLMLLTIQLK

SEQ ID NO: 48763 - protein, 246 aa, Zea mays
  Coding DNA Sequence Number=SeqID_5388
  Gene Ontology: Mol. function=metal ion binding; Cellular component =nucleus; Biological process=regulation of transcription, DNA -dependent
  Homolog annotation: Hit_ID=Q7F8S8; Match level="QueryCoverage=43%, HitCoverage=43%, E-value=4e-28, Identity=55%"; Hit description =Putative uncharacterized protein P0437H03.106
  Pfam annotation: Domain name=C1_3; Domain location=113-142; Score =14.2; E_value=0.011; Accession=PF07649.3; Description=C1-like domain
  Pfam annotation: Domain name=PHD; Domain location=114-179; Score =28.2; E_value=6.6e-06; Accession=PF00628.20; Description=PHD-finger
  Pfam module annotation: Pfam domain module=C1_3::PHD; Domain location= 113-142::114-179
MDRPPHLVIDLNEAPPPPSSDTPPAQAPSPPPQFPPLLPPQLPLGAPNQQVRLQQEALDVVLRVHRPLELRNTPFGPIGNVPAGLLPGLGLPLLPLQPPAPHPGEAGWGNPPAPCSSCGRQEILGGTLVCDACDRGFHPNCVRVWPPLFPPPPPPGPPGARRPRAAANEDWICPACERRGARSTRWKLGAVELDINAAPPEDPVTVIANDIRRQLLELFLIIIIIDYIDSICLAIELLSLRGYESE

SEQ ID NO: 48764 - protein, 75 aa, Zea mays
  Coding DNA Sequence Number=SeqID_5389
MNKTEGPNTRSFVRKAYSTRMDAQMGRREAEREGGKRRPETGVREVEIPRPSCSSRAQVRRKERIQVYNGGVAEC

SEQ ID NO: 48765 - protein, 198 aa, Zea mays
  Coding DNA Sequence Number=SeqID_5390
  Pfam annotation: Domain name=IQ; Domain location=114-134; Score=18.7; E_value=0.021; Accession=PF00612.18; Description=IQ calmodulin -binding motif
  Pfam annotation: Domain name=IQ; Domain location=72-92; Score=19.6; E_ value=0.012; Accession=PF00612.18; Description=IQ calmodulin-binding motif
  Pfam module annotation: Pfam domain module=IQ::IQ; Domain location =114-134::72-92
  Subcellular localization annotation: CTP_CleavageSite=24; ConfidenceScore=5.39e-01
MDRRSMAPGISSRLSSPPPAAAPSAAATSSHPPSPTPDAFTRLEESFGRFAEQWDQFVVMFHRYKEKTEKELQAAVRLQTTARGFLAHRQVQSLRGEKHLAVASRATPWPSSHEQAVVRLQAVVRDFLVRRAVRKLHLLISSSLHQLVACAPNHQVSSILFEPPAEVEIWVCSPPARPKRVVSFIRAPALVLDRPNIT

SEQ ID NO: 48766 - protein, 2016 aa, Zea mays
  Coding DNA Sequence Number=SeqID_5391
  Gene Ontology: Mol. function=metal ion binding; Cellular component =nucleus; Biological process=regulation of transcription, DNA -dependent
  Homolog annotation: Hit_ID=A2X1X2; Match level="QueryCoverage=93%, HitCoverage=94%, E-value=0.0, Identity=65%"; Hit description =Putative uncharacterized protein
  Pfam annotation: Domain name=FYRC; Domain location=500-557; Score= -3.2; E_value=0.062; Accession=PF05965.5; Description=FY rich C -terminus
  Pfam annotation: Domain name=FYRN; Domain location=258-305; Score =47.0; E_value=6.4e-11; Accession=PF05964.5; Description=FY-rich N -terminus
  Pfam annotation: Domain name=PHD; Domain location=1159-1207; Score =59.1; E_value=1.5e-14; Accession=PF00628.20; Description=PHD-finger
  Pfam module annotation: Pfam domain module=FYRC::FYRN::PHD; Domain location=500-557::258-305::1159-1207
MTTISLNNNIESQFHLPLSEQAYQDCQALQDYIQTLQVQPYTKDSCHYIWGSRNYTSTKFYNFPFKNVQPQLLLSGFGGLNVPTNLEFLLGYFLSILVLSGWPYFFSFLLPCCVLGQNITDGPQLTVANLPHFEGGHLQNTTLYDGMQFMPAFDLAQCFGMRQNFTSMDQDLIADGNVPQRSAHLRRRRDLPQTSTLPKVAVNHELGSAGTSMDPSFFNNTIKQSPSENRSSLKPPIFLMENSNHQPHHHTVALPVQYSDFFITSLGEIDNRTSYHNSYQIWPVGFTSYWHDRVTGSLFECEVHDGGNFGPLFKMRRLPCSAFQLPDASTTVCLNVVRNADTIETKEGSDLIEDTANDANDNISMLLSDFSETNQDFLSCLGNDLEGKESLGCSNVETKDMTVPDVLSDPGSFSWAPTNDANMYDKIGDFSYEGTSPSSVWRMISCAMMEACEKMYKEHGHLVLFCTHSSEKSPFDYESGPQRTDGPFNLLAKFCSSNGPKVPQFIEKENDVQSTCALLKEWLYPDRIGFDLEFVQEFVESLPKSGACSHYQFLCNRTGINSSLTIASGTLVAVNKNSPMHARHGSVVSGPQDHAQPSSSSIRELPPGNPISRKLAPELAGDVFQILEFLGRFAEIIGLKELPSIEQVEDELIDPWPMHPNKNDIHNYMDHNPPMNSPANVSSSYSNGESGITSIEEMVYVSIPVETSSAREAAQNKLAAQTLGRCSGLVLPEIHIALLKVLFTELVSRVAIFVDPSIDLKESKSRRGRKRDTDTLTRELKIDMLTANNLTWPELARRYILAVSSMSGCMDLSDISSREGVKLFRCLQGDGGILCGALPGVVGMEKDASLLAEAETLICNSSANEGNTVFMMDYKDTDIVDSPEEPASDTTLPDWVKSLEPVRKLPTNVGTRIRKCVYEALERKPPEWARKILEHSISKEVYKGNASGPTKKAVLSVLTEACRTKVPQNTEKPRKERNIISISEAVLKKCRIALRRAISSDESKQFANLLGTTLTNSNENEDEGILGFPGMVSRPLDFRTIDIRLAKGAYRGSWEAFLDDVQEYAFLVFNRVLEPAFHSQKVICNLQTAFADRPEVLIMVVALSESFESLYKTEVQDLVEKFDRYLSNENDSSEIHQELQDALTAANNKLPKAPWEDGVCKVCGIDRDDESVLLCDNCDSEYHTYCLNPPLARIPLGNWYCPSCTAQTHVAVQEQKKCLGEEAHVFIEKLNKLAVAMDEKEYWELTVAERIYLLKFLCDELHNTALIREHLDQCSDKSNDLQQKLRHLNYELKELRYRVEIKNPYATQSRWMKNDQVSNSSGLVENQQRAMPTASEHLEEAEQVNVGVNLNNPAEGVPAALLDVGKPCSTDNGISSTSVIEGNKSLGLSEQPSKIITDQTDRDSIAEGSNSCEKSLVGKSGTCDPNVGETHAATVINAPNGDLPDENAMTLSQDNIETSTSKLVDHDADMNESNNLLERISQLHGSISTVESQLSMASLRGECLGRDSVGRLYWVTGRPCKRPRLVADGSMMIPKDRDISMVTSHSQSTFDRGWNSASLVIYESDEEMKCLVDWLRDIDPREKDLKDSILHWQKSIYRQASFPITDPPVSKFSKSEPLMELPNTNAFIVLEQKYGLQTDQDTSELSKRRGTKSRSGSEERVYRCDCLEPIWPSRHHCLNCHETYLTLMEYEGHNGGKCTSSNDCPNESKEIDEPKLKGSKSDIKEKDPVVHNCSVEPSNSGKLESCPYDFEEICRKFTTNDSIKETVKEIGLLGSNGIPSCVPSPAYFLDPPVLLNESKRNDDKPNDWTSSLQECQAVSAKMSGQEGSQVGQDFSGNAGDEELPKSKKPVRDSTSAKEAPSTDISTRLLTVNGGLVPESSLMPVIGRNFHILKQLKINLLDIEAALPEEAFRASKSQQIRRRSWRAFVKDAELISYVVLAINFLQSMIKAEFLKKDWWYWSSFTAAIKTTTVSSLALRIYTLDDCIMYTKDPAPNLQPADNARSGNKGKRKKDIDS

SEQ ID NO: 48767 - protein, 79 aa, Zea mays
  Coding DNA Sequence Number=SeqID_5392
  Gene Ontology: Mol. function=sequence-specific DNA binding; Cellular component=nucleus; Biological process=regulation of transcription, DNA-dependent
  Homolog annotation: Hit_ID=P24345; Match level="QueryCoverage=60%, HitCoverage=13%, E-value=2e-12, Identity=77%"; Hit description =Homeotic protein knotted-1
  Pfam annotation: Domain name=KNOX2; Domain location=44-79; Score =23.9; E_value=0.00019; Accession=PF03791.4; Description=KNOX2 domain
MVVSSLDTSSLHPRGAGEGALIMGGDVEAIKAKEMEARQHTVLGGLAAETEPELDQFMEVYLEVLVKFREKLTRLLREA

SEQ ID NO: 48768 - protein, 278 aa, Zea mays
  Coding DNA Sequence Number=SeqID_5393
  Homolog annotation: Hit_ID=O40947; Match level="QueryCoverage=75%, HitCoverage=22%, E-value=8e-10, Identity=22%"; Hit description=ORF 73
MTAMPSSTPSAAAEETPAASAAAIEVDTGGASSSNPPPTLEETEVIFGRRLRSGAEPEAALVPLPRVQSRAHQALQETKAAILREWEALEAEHQRLSDWRAQLEERTKAASQQFASERSELERDRKDYRKDLQKVFARELEVTRKEKRLAKKEVHLDQREEVISELQGKLNSLNKILEEQRVDQTAAVESLQRLQQELDGKARDAALAEEKLKVKGESLDRREADLAGRAADLTRWEKDLTFKKEMLERRKKSLAEHELEAEEKERTLEERVRQFEVA

SEQ ID NO: 48769 - protein, 374 aa, Zea mays
  Coding DNA Sequence Number=SeqID_5394
MAPGEAVELGGWRSNSLAADSAPGAALDVLDAHRLQDGLVAARQWSGQGTFNAEAAHRLGRAAQRPYVRLRPLAYVTGSGPRGSIGSPSERGAEAYTVWSGHVLAPDPRLALTKVRVLFVPESRDPSKSGPDPTQRGPGPVPGVRSVPAEVLDPAPRSGPYMQGSDTFPWGFGPTVDTLGDIVFSGHVVVLEPSTWWGRVLFATRLEIVVRAPYLHTVARGTPVSGAHEGGGGGSSLQDAASMMARNNDDKKRRLAALAPCGQKARWPGVQRETDRRPLTPPPPPPPTPLPSAPVAIYCRTEGWGSVAYWRGRPEKRAPARFLFLAGYTVLRENPKKHGKYSGPKWTGPGGAYGPVLAILKTEHEDGGKQRLEK

SEQ ID NO: 48770 - protein, 31 aa, Zea mays
  Coding DNA Sequence Number=SeqID_5395
MGSRLGRKNRAKAEKTNETSDDGKNDVKEID

SEQ ID NO: 48771 - protein, 110 aa, Zea mays
  Coding DNA Sequence Number=SeqID_5396
MDVLMIRNLAEDQQGLGKGLVVERSSKGATTGRRSSPTRLRLHLGFQDQSALKWTPKMHPDSDCDGLDMVGKIRILSNQSNWQGLAFMARSIAQRTVDNQRRSGAAIAGF

SEQ ID NO: 48772 - protein, 230 aa, Zea mays
  Coding DNA Sequence Number=SeqID_5397
MGQVKMVEIKEAAEKGRNGKAKAAEKERSIKQQTHGVSSVGTEAPWQIRQEQSSRGGRTPMDTRWRNSGSEMTDMWVPAKGNWLLGSIEGITTTDELEVFLLGAISILPASRVGGELQRGFGSEKARTRARKAEAAKSAALMGYSRARYRFKKCPVITRRLFPKPQRATWSPSSYLQNTDVALQSLGVTSKTLISYSITRRCLQNADFVFRRSALPLKCRRRLPVTRRCL

SEQ ID NO: 48773 - protein, 183 aa, Zea mays
  Coding DNA Sequence Number=SeqID_5398
MSTEKCHLDQIECLGVRRLLFDHLFFSCGGCETARFIGSSSAGIPRLTAIAAKSTQGPPYTDHSPTALAPFGFWTGHQFSESSRVSAQDNLDSGNSGQWTAAAPSVGRIHAGERALPGYSERHTLIHMAPVKLTTPHTFSSHQFLPPPSADPAMVRSNSRRRNRYGEQLSAPRFPNPSLISNV

SEQ ID NO: 48774 - protein, 338 aa, Zea mays
  Coding DNA Sequence Number=SeqID_5399
MQAACNCTKGAHPFDFDASSLEAQAHTSCNRRAGYYVRETAPPLAPVPRLLDCGTGAVTRGDPAHGPIVPTEHIGHGSVSRGRRRDGRYGQKCAGSNGGGRRAEAAVKSPAGSRPLLGQQESPLPRREDDAPVFRSSNDSRTHNGCLANHSSCRINSVAGQAAPLAGESERGTGKGDTPKGILLREGSGPRAPLMIRGSKAGPSEGFNSRLRALGLRAHYWSEVRRLAPRKGSTAASGHSGSAPTTDQRFVGWPPKGSTAASEHAERGMTLGTFGTQPRLGLRSRGTLGHFQDQRERFRNGIPPEGGIEPSDPIKRGPGPANHPQVLLERASGPLADP

SEQ ID NO: 48775 - protein, 33 aa, Zea mays
  Coding DNA Sequence Number=SeqID_5400
MGGGMRKTGLCSEDGMGMAEHGIGQPTPYRLNR

SEQ ID NO: 48776 - protein, 131 aa, Zea mays
  Coding DNA Sequence Number=SeqID_5401
  Subcellular localization annotation: CTP_CleavageSite=73; ConfidenceScore=5.15e-01
MDASHRCSAAAVDTIFNQSLIFSKATPSVRRSIQIRIYAWGFHRSIAARFVASASASASGEGLRLARPQASASASASGGVTSSHDLGLGLRRSLRLARPQPRTDYATGSRHFSDSHVSTRAGLKALLRQPR

SEQ ID NO: 48777 - protein, 281 aa, Zea mays
  Coding DNA Sequence Number=SeqID_5402
  Gene Ontology: Mol. function=transferase activity, transferring nitrogenous groups; Cellular component=mitochondrion; Biological process=biosynthetic process
  Homolog annotation: Hit_ID=Q5GAQ3; Match level="QueryCoverage=34%, HitCoverage=18%, E-value=2e-38, Identity=82%"; Hit description =Putative alanine aminotransferase
  Subcellular localization annotation: CTP_CleavageSite=21; ConfidenceScore=5.34e-01
MAPPVMWSVRALSWARRRLLRGRGRVCLPRPRSSPSPWVGQGGDRRLRPGLSPSPGVGRSGVRRLPGLSPSPSPGVGRSGVRRLPGQSPSPSPGVGRSGVRRLPGLSPSPSPRVHMILQLLIRSEKDGILCPIPQYPLYSASIALHGGSLVPYFLDEETGWALEVDELKKQLEEARSKGISVRALVVINPGNPTGQVELCEEHEFIVLACDGICSILWVIRDYMSSQQLVDFIREHIDTLASEYLLPIKEPLLELEMPPIFLAQMVPAPAAMDWLRKSGVH

SEQ ID NO: 48778 - protein, 262 aa, Zea mays
  Coding DNA Sequence Number=SeqID_5403
  Gene Ontology: Mol. function=nucleoside-triphosphatase activity
  Homolog annotation: Hit_ID=A2WNT1; Match level="QueryCoverage=39%, HitCoverage=29%, E-value=3e-25, Identity=61%"; Hit description =Putative uncharacterized protein
METATSMEHQTGGEDESVAPLGGGRTGHRLCPPRRAARCDTTREPRNEGERRILTDWMVPPCPLFWTYLNLFLRRRARRLLNVVDPYVTIDISEPGGEVRYSRYGPVSDNDSTYEEVKAYLSGAVRSQDARELRVEGAREGNGLVVSMRDGQDVADEFRGVPLWWSSVVAAEREEVAWEWSRLLRSAVGRHRGGSQRRMRRRWYEASATPSRRPTAAIGEGEFWRRERDAGSLRVTAWADPESETEREGARGGRNSIVLLLD

SEQ ID NO: 48779 - protein, 58 aa, Zea mays
  Coding DNA Sequence Number=SeqID_5404
MNTQAGAAISSQTMGAMGAEVQTHGSSDRAPYTNLEFEHTTGDMLIFCGWTVRLAFAD

SEQ ID NO: 48780 - protein, 335 aa, Zea mays
  Coding DNA Sequence Number=SeqID_5405
  Gene Ontology: Mol. function=hydrolase activity, hydrolyzing O -glycosyl compounds; Cellular component=cellulose and pectin -containing cell wall; Biological process=carbohydrate metabolic process
  Homolog annotation: Hit_ID=Q8RZK0; Match level="QueryCoverage=48%, HitCoverage=54%, E-value=3e-49, Identity=66%"; Hit description=Beta 1,3-glucanase-like
  Pfam annotation: Domain name=X8; Domain location=146-229; Score =177.6; E_value=3.1e-50; Accession=PF07983.4; Description=X8 domain
MDEEKARPYFTPLLRAVAVHTASHAAGVSLALGSCGDEMGQRLLDRLAGFLLVVVVVVVLYGGTEQRIAEAADGANPHRLLATVSVSKPSYPTVVTTPMSAYGADPASKPSYSTFPSLATGNGGAGAGAGAGGGGAAAGSGGGGGTWCVASQSASPTALQVALDYACGYGADCSAIQQGGSCFNPDTVHDHASYAFNSYYQKNPAPTSCDFGGTATITNTDPSSGSCQYPSSSGGGGAQNMVPPPSPTTTMPPTVPSTVPMTPTPTAPDTGTPVYGLSPPDYSGSTSPPGYGSTSPPDYNDVSAAAARVRQQGGAALALTLLCVVVATVSLRVSK

SEQ ID NO: 48781 - protein, 94 aa, Zea mays
  Coding DNA Sequence Number=SeqID_5406
  Gene Ontology: Mol. function=carboxyl- or carbamoyltransferase activity; Cellular component=ornithine carbamoyltransferase complex; Biological process=amino acid metabolic process
  Homolog annotation: Hit_ID=Q8SA97; Match level="QueryCoverage=88%, HitCoverage=21%, E-value=2e-09, Identity=42%"; Hit description =Ornithine carbamoyltransferase
MALPVDVAGLCPRSGDVEVPPKPRSSLSSMAEAEPEPLGRARRRLFGRGQGGVRALETLSPSPRSGGAEFAVFQGLARVRALGRAERSSPSSEA

SEQ ID NO: 48782 - protein, 350 aa, Zea mays
  Coding DNA Sequence Number=SeqID_5407
  Subcellular localization annotation: CTP_CleavageSite=39; ConfidenceScore=5.74e-01
MNKDTDIQSATTNGTLVPSPRVRTTPRNRGTRRAIASRRAARRRPIRQQRQPPPPRATKQLRQWLRGRCYDRRALTRRGQEPAIQAGRRRPRATGGVGNLIGREAISGCRRLEARRQVFALVRTAQSVGAALVERNTTVVRTEGVVLRPSRVMAAHLSRHGWRKSPRNWRLPFFPRRQGKKRAADPRGGSPLTRLILHLGLDDENPRGRGRGRGRSPARFPPPSSWRSPSWVTAGGGVQPGCMMKILEAERWLKGGASGRRSGRRFAFAAITAPKKGPGKGDTPKRILPCEGTRLRAPLLIRGSKAGPPRGSTVASDRVGPTPTTGQRFEGRPPEGLHGRLRLLGLRAHY

SEQ ID NO: 48783 - protein, 219 aa, Zea mays
  Coding DNA Sequence Number=SeqID_5408
MQSARNRAEWAHLFDSNAPSMEAQAHTSCNRRAGCYVRATAPPLAPLPRLLDCGTSTATRGNPAYDPTVPAWCIGHRPVSRGRRRDGRCGHKWASINGGSRRAEAAVTSSAKLTRSERCFAFAIMTASKKAGPSEGFNSRLRALGLRAHYWSEVRGPAPQKGSTAASGHSGSVPTTDQGGNDFVTESHQREASSPRTPSKGDRVRQITRRYFWSAPPGL

SEQ ID NO: 48784 - protein, 201 aa, Zea mays
  Coding DNA Sequence Number=SeqID_5409
MNKTPALKVPLQTELQFRPRGYEQPLTLEDPRGDKAPAGPPPPAPAAATMTSALAGRTAAAMAAGRMPLQQRPRPRLRSRGEDKCKEPEARSADGGGDPVGDGDFSSHRYLGTGDRSRLPTRILTDERSTDLRAETRTGAKAGQPQNTNAALAARDVLGGPPPSWAESSPTRSKVLPLRHGGWAPRVMQAGPGQKEPNRRA

SEQ ID NO: 48785 - protein, 273 aa, Zea mays
  Coding DNA Sequence Number=SeqID_5410
SQMEVRCQTSFCQNEDGFPTLMRACTVRLGIRSQPEYDGREFVEHGTEKCVVTVYIGSKEVADTPLRFFPPFQRNRPVWMARMRALEEKHTRKLHVDLTTAQARVAALESREVIAVEALKQAKDEHVQKLMEAYLVTHNQRRALRIQEPVSSNPVQPMRAEDPQILEGARTRAECNDHVFDALWARQSTPDARPACPASRQSPAGAMVRARAYKAPRDFDLTEREIQGAASVWGTGLSGGAPDSVRWCTGQCPVRQAASAEEAALGFFSGDFG

SEQ ID NO: 48786 - protein, 113 aa, Zea mays
  Coding DNA Sequence Number=SeqID_5411
MARARTYKAPRDFDRTPPHALDLTGAQNHRRSPVHIVSAAARSPCHRRPADRTLPNPVRPSEKTVHTSVKLPERGIGVCFAGEASPRSPDSTRPPASVDQPLRHPVKLTVPLD

SEQ ID NO: 48787 - protein, 112 aa, Zea mays
  Coding DNA Sequence Number=SeqID_5412
MVSHSGYGGYKCGHCTTAVGVSEALYAKAIQGIDGLFPFKCGLASKAGLRHLSRNNSGSSATLNPSQEKSTLPKKIPGSLPLKPGISYRRNQSSGSVKRIDRENQSTAPESK

SEQ ID NO: 48788 - protein, 747 aa, Zea mays
  Coding DNA Sequence Number=SeqID_5413
MIKAMFGLLPNSIPQGQRLELTSQSRRLENGLDTMRGGASKGKAPLRIVNPLDIIRSKKQRDNPVVDPTKSVETSRDAVVPSTLDSLAHAALDALHMHHAEIMGSQDALRAMDVSEDYDVDQFFNLGPNVPLEETSGGLDTMNGGASKVKAPLRIVNPLDVIRLKKQRVDLSANHAKSAETSRGEAVPCVLEGVTPAIPNAPYMHHAKVLGLQDIPWDRDVSLEDHDVDQILNLGPNELSEKMSGGVGLDTMHGATSKGKAPLLIVNPLDVIRSRKLRVGPAADPVKSVETSRGKAVPSVSEGLDSRYRSKGVPRVSLDILRRMVGILNAICLKEEQQRADPAAYSTKMADTSHGKPVCLRIVNPLGPIRSRKRRVSHAAYLAKSSETSRGDGTLRVGGCRTGSPRCSAHASCRGHGNSRRYTGLDTNRAGASKDKAPLRIVNPLDVVLSKQRAGLAADPAKSIDTSRGEVAPFMSKGVAPTTPDALHVHHAGVLGPQGAPRLGDVSLEGFDMDQILNSGPNVLSEETSDSAGLHTMREGTSKDVIRSKKRRADHAVDLAESAETSRGEAVPSVSEGVTPAALDAPYVHHVEALGPQDTPQAKDVSVEDHDVDQILNLGSNVLLETSGGAGHDTMCGATSKRMAPVLIVNHLDVIRSRKRSVSPATDPVKSADTSRGKAVPSVLDGVTPATLDARHVRRDEVSGPQDALRASDVSVDHHDVNQNLILGPNVRPKETSGGAGKATSFC

SEQ ID NO: 48789 - protein, 95 aa, Zea mays
  Coding DNA Sequence Number=SeqID_5414
MQDSSCRKDATEDFAPWRIGPRKTMPTQDSVIYLKHARPIEGREDATKSRGRPCVGAKAKTPPFARGLRRSGWSNRDKAATSSRGAASFSPKAHV

SEQ ID NO: 48790 - protein, 387 aa, Zea mays
  Coding DNA Sequence Number=SeqID_5415
  Pfam annotation: Domain name=zf-RanBP; Domain location=8-38; Score =17.4; E_value=0.0074; Accession=PF00641.9; Description=Zn-finger in Ran binding protein and others
MPSPPTPPAASDWRCVRCTFLNPDNSDSCEVCEASRPVEVDIDSPVVVGAALALASLKRSRRKRERSASPPPQRFGKNRERDASPDVVEVCDSAGKGSAAKKGSDEGQLALAAPGAAIVTAALAPKARGETLGVGGEVSALALVRDEAGVATRRLKGVTEALSQATEALSQLCLPKSRDFRTQHADAVREKSASDSKCRKLADKVAALEKEKADLRRQLAGERREANEAIAKEQAAQAEARLARAEGNIAKELAGELQGRLTALESRAEGAEAAMRAEAERTRTQLMAAYHELGARTGDFEVPEREAGLRCLEWVQEELQELPTVLEGLMSFASLVTCEAAMNALSREGCRHFEALDQADEDFGRDIFEVEDPVVKESAGALYDRMW

SEQ ID NO: 48791 - protein, 257 aa, Zea mays
  Coding DNA Sequence Number=SeqID_5416
  Subcellular localization annotation: CTP_CleavageSite=6; ConfidenceScore=5.11e-01
MANRPTARTPQSRPPTHAARPPSATCGTLLPPPNQPKARPEGHERHRLDPARFSPDLLAIIAAMPGFAPCSPKSDRDFDFPTDAGAVGLIGRDPSSHGRLLVWFADQNGDAMLPLRRVSHQIRHVLLAISELFVLGPILRTVAKSAIALKGKCALGPFLSILVIVCQHKGLNVYLCFWRNKVQIKIKALVATCVRVVALIFESCVRCSFPPYSVLLCELNCKGERLQVVEIPRKREKIKGKKNTVVFKLIIGSLERS

SEQ ID NO: 48792 - protein, 172 aa, Zea mays
  Coding DNA Sequence Number=SeqID_5417
  Gene Ontology: Mol. function=DNA binding; Cellular component=nucleus; Biological process=protein modification process
  Homolog annotation: Hit_ID=Q43703; Match level="QueryCoverage=98%, HitCoverage=28%, E-value=2e-86, Identity=83%"; Hit description =Initiator-binding protein
MSAFDLLATVAGKLLDEGVGSLGNMSAGALALTACAKDVRVKKEQCDEEMKQFKHEVTDQDSCNESAILPHIVFQRAVNNARNEDPKAKWSPESMESGAFTGDAVASLMPPAPAGFHKNAPEMYNLLDSMDVDVKPPPLVSSDSTDEMPLYGDKVHRSTSLPRGSKGVGFLL

SEQ ID NO: 48793 - protein, 115 aa, Zea mays
  Coding DNA Sequence Number=SeqID_5418
  Gene Ontology: Mol. function=identical protein binding; Cellular component=extracellular region; Biological process=negative regulation of catalytic activity
  Homolog annotation: Hit_ID=Q6ZKR5; Match level="QueryCoverage=82%, HitCoverage=14%, E-value=3e-28, Identity=59%"; Hit description =Putative subtilisin-like proteinase
  Pfam annotation: Domain name=PA; Domain location=7-110; Score=55.0; E_ value=2.6e-13; Accession=PF02225.13; Description=PA domain
MNRAFPANVRLDDGQVLDGGERRGASSASDGYSASMCLDGSLDPAAMRGKIVVCDRDVNSRAAKGDVVRHAGGVGMVLANGAFDGEGLVADCHVLTLLYSAVQLDLKSLLVVVLG

SEQ ID NO: 48794 - protein, 101 aa, Zea mays
  Coding DNA Sequence Number=SeqID_5419
MATFVALANGPHRTEAPLPFPHVYAARDFVFLGQAFFRCGVIPSGSGVHRLGHCRASSELPRRRAAVGADDLHAQPETSARAGLADNGTAALGAAVTLLAQ

SEQ ID NO: 48795 - protein, 170 aa, Zea mays
  Coding DNA Sequence Number=SeqID_5420
MTPRRKNACPWSRISAHGIHETVAGVGVDAADRGCGRSCGSPSPRPPSPLSESGSRVSADDDTRSGAPPATATALPGPAVEATGVRKGEDTNDTLMYTKGYNFLLFDFLTKWVLQTPSATDVEEILKKSLKGHHHKLQLRRPQLLRAQQLPKLHLRKLQLSKLPQPKIFT

SEQ ID NO: 48796 - protein, 101 aa, Zea mays
  Coding DNA Sequence Number=SeqID_5421
MATFVALANGPHRTEAPLPFPHVYAARDFVFLGQAFFRRGVIPSGSGVHRLGHCRASSELPRRRAAVGADDLHAQPETSARAGLADNGTAALGAAVTLLAQ

SEQ ID NO: 48797 - protein, 74 aa, Zea mays
  Coding DNA Sequence Number=SeqID_5422
MGVGLVRFNGSASITEMERVLKRNSRGLGLTCGGLPTAPRTVAGEFRGDARRSEVTKVIGFATTCLPPWRAHRP

SEQ ID NO: 48798 - protein, 32 aa, Zea mays
  Coding DNA Sequence Number=SeqID_5423
MGFEHSTCSAECSGGEAGNMDDFEEFQEYDEF

SEQ ID NO: 48799 - protein, 353 aa, Zea mays
  Coding DNA Sequence Number=SeqID_5424
  Subcellular localization annotation: CTP_CleavageSite=51; ConfidenceScore=5.09e-01
MSSRSLMHHVFPPSEPPDGGYPQTFRLVVGGTQLCGSWYLSAIVRLQGFPSVSPAASPCRWSPETVTTSPWVGRSKSGCDLGPTLSFKDVHHPRWGGGRDELELYLPRGFVGQPLLQCSRERALTGPARGVDFDNAGLVDGGRRQPQRVGLAGLAPSAPSCREGGCHVVRTGGPPKMSCAARAAFVFWGGPAFAPESLGSVGLAVRGFSCLVKGTPRPLFDEPRPGVAVSARTEAELARKEDLVGRSLAGSSVSGTDAGVDLPRPRAWLMSSGDSWPRPRGDQPSRLLEPDSWRRPRRQWPGRDDEVVLQSGDPRTTSLSEARSDLAEGVVDAEGAAAPFSRQDPSLQDQIIL

SEQ ID NO: 48800 - protein, 131 aa, Zea mays
  Coding DNA Sequence Number=SeqID_5425
MAASAEEPASGARSSETGDTRAPCGEVPRERVGRMTRSGAALATQSGTVLRAFRGARDRERGIPRKGSFPVKEPGSEPPLLIRGSKAGPPNGSTVASDRVGLTPTTGQGFEGRPPEGFHGRLRLLGLRAHY

SEQ ID NO: 48801 - protein, 219 aa, Zea mays
  Coding DNA Sequence Number=SeqID_5426
MPLSTTLVVTTMRMPSPGKAGQGEQREVVGTQARSVAETSSDPWARFFPIVDGGGGVTEASTSGGVAMVVVRQLRYVAVFTDQVVYGVLVDLATSQLRSEKKWLEDKVERLRTQNIEAIRDKSAMQKPITRRWRLLHGSVWVELICSFLKVIVIPGLAAVAWSKSYLFAESLLASVVTRLSFGGAPVNRHISRKVDTILEGWSEGSLCSDYIGHLPEGH

SEQ ID NO: 48802 - protein, 124 aa, Zea mays
  Coding DNA Sequence Number=SeqID_5427
MWGLGVRTIVVTNPPYPPPSFPAWRDRVDRFPWPELPQPTRLSSSRASHPIHRRVGPMSHPQLPVFVIARKQRKLRGAIGEAGGRGRFRPLGRVGGLARVNRKPSVDFVGGVDYRATTDCSPDL

SEQ ID NO: 48803 - protein, 790 aa, Zea mays
  Coding DNA Sequence Number=SeqID_5428
  Gene Ontology: Cellular component=exocyst; Biological process=vesicle docking during exocytosis
  Homolog annotation: Hit_ID=A2XCV0; Match level="QueryCoverage=100%, HitCoverage=100%, E-value=0.0, Identity=78%"; Hit description =Putative uncharacterized protein
  Pfam annotation: Domain name=Sec15; Domain location=441-789; Score =41.0; E_value=1.4e-11; Accession=PF04091.3; Description=Exocyst complex subunit Sec15-like
MTAQPMKRAIVESGDGGLGLGIATFIANGEDLGPIIRHSFESGKPEALMQNLRSIVKKKEVEIEELCRLHYEDFILAVDELRGVLVDADELKGMLYGENSHLQEASADQLLKLDELLELYSVKKNVGEAITTLKICVEVFSLCMTCNNFIAEAKFHPALKTLDLIQKGYLRNIPLKLVKKVVARQIPLIKLHIEKKVCSEFNDWLVHIRRMAKQIGQASISQASSARQKGEEMRARQREAEGHSHAGPDEHLYALDLENTEEESALHFDLTPVYRAHHMHTCLGMEDKFRDYYYKNRLMQLNLDMQISTSQPFLESHQPFLAQVAGFFIVEERVLRTADGLLLESQVETTWETAIGKITSILEEQFSRMRTASHLLLIKDYVTLLGAAVNKYGYRITQLIEVLEKSRDKYHQLLLLDCRKQIDDVLTNDSYEQMVIKKEYEYSMNVTAFHLEHDDAIPDFPYVTSFSSSVPDVCRIVRSFIEDSVSYLSYGGLMNIYDVVKAYLDRLLIEVLNDSLLNMIYARSLGMSQMMQLAGNISVLEQACGMYLLHSAQLCGIPKRVAERSHSGLTARAVLKASQNAVYNALINLTNFKVDEFMVLLEEVNWIAEEAPDNANDYMNEVLIYLETLVSTAQEILPLEALYKVVSGAMSHISDSIMTTLLNDGVKRFTVNAVLGIDIDLKTLEAFADDKFDSTGLSDLGKETTFRDCLVEIRQLTNLLLSSQPENFMNPVIRQRNYGSLDYKKLAIICEKYKDSADSLFGSLSNRNTPQQSARKKSMDVLKRRLKDFS

SEQ ID NO: 48804 - protein, 535 aa, Zea mays
  Coding DNA Sequence Number=SeqID_5429
  Gene Ontology: Mol. function=protein binding; Cellular component =nucleus; Biological process=regulation of transcription, DNA -dependent
  Homolog annotation: Hit_ID=A2XHV2; Match level="QueryCoverage=95%, HitCoverage=97%, E-value=1e-145, Identity=57%"; Hit description =Putative uncharacterized protein
  Pfam annotation: Domain name=GRAS; Domain location=123-446; Score =110.7; E_value=4.4e-30; Accession=PF03514.5; Description=GRAS family transcription factor
MKPMSCHEQEQHAELAAATTNSGFDWLDDPISFLTADVDAAGCGGYGWWSDDPAAAQQDNIGSVVAQTLSPPAAPLLTTSPPLAHTSPSIASPAVSEPSSKKRKSPAHRASAHSGSNQRRRADQADRPGAGGGKKGGGAGSDDRDTRWAEQLLNPCAAAVEAGNLTRVQHLFYVLGELASFSGDANHRLAAHGLRALARSRLPAAVGPAAAAAVRVPPCDCPTPAFAGAEPRLFRASLIRFHEVSPWFALPNALANAAIARAASRGGSTPAEQPRPLHVVDLGVSHGVQWPTLLESLTRLSGGRAPPSVCLITVAAAPPAPFSASPPGYDFSPHLLRYAKSISLQLAISRAASLDSVRGLASPSASGEEALVVCIQFRLGHASADERTEILRKVRGLDPELVVVSELDGGGDGTAAGEFTARLELLWRFLESTSAAFKGRDGDERRLLEAEAGASLVASEAPALEGREAWREAMAAAGFEEASFGDEAVESAKSLLRKYDGGWEMSASGAAGAVALRWKGQPVSFCSLWRPACSG

SEQ ID NO: 48805 - protein, 253 aa, Zea mays
  Coding DNA Sequence Number=SeqID_5430
  Homolog annotation: Hit_ID=Q75K38; Match level="QueryCoverage=43%, HitCoverage=95%, E-value=4e-35, Identity=74%"; Hit description =Expressed protein
  Pfam annotation: Domain name=DUF1313; Domain location=150-237; Score =156.5; E_value=7.3e-44; Accession=PF07011.2; Description=Protein of unknown function (DUF1313)
MKKWFLHLASHVQYSELVLCEAFLVAREDLLISFLPVLLLPSPATEVLVGATEEYYDDDGEEEQSESKSRSLIPRSIRVEFSGPKLERFGKQVNPHPPHLSSLTAHRRLCAAADKECRIAKTSTPTTTSSSCPGSMEGGDGETTLSGFGVGGVDTKVLHAFQTSFVQVQTLLDQNRLLISEINHNHESKVPGDLSRNVGLIRELNNNIRRVVDLYADLSSLFAASDGASEGGSVGTVRQAGAAGHKRIRSGLD

SEQ ID NO: 48806 - protein, 161 aa, Zea mays
  Coding DNA Sequence Number=SeqID_5431
MAGGPHRGRVFPKRTRGFLAPWLGLRTPLPQSQRGFRIPRAKLGLLGAGCGITSSINPGTFPHAILHQPSSIVDAIEDRRKALVGLVLADGPTLGIGSGWCAAGVAGGNPELAGGRTLGNCSPEQSFRLGSQVTVGGSVSSSIPGMELSITLVRCSGPFSA

SEQ ID NO: 48807 - protein, 410 aa, Zea mays
  Coding DNA Sequence Number=SeqID_5432
  Homolog annotation: Hit_ID=Q10RI3; Match level="QueryCoverage=14%, HitCoverage=8%, E-value=3e-10, Identity=60%"; Hit description=YT521 -B-like family protein, expressed
MACGVRGSDRTATGVPWDGDGDATLRGLRPHRRLQHLRHRHLRPWHDMDKKHQLYVISALAGTKIDMKSWWSTNVSEENLLEVLQLDEASRALLMKVLEDATQDAVRRQAKMLFFEISTTGVSTRIIISDSAMQSKDVVKALKKQIGHKNPKVQLLALTLFRSAIMNWRPRINGLLGNIDANTGDPQVGILLGAVHGMVEALFRRYIEQGMDEESAYKNTVKSIKFCSSYKIQFILGFFSLYCLQAGYAEQYRWNSSFYVSGTLSMICLEQGPHILNIFKDYHVSKTSILNDLAFYKSRQKLMQDKRSKQQQLQKQCFLYKVPIQIVLPIGYFPLFNTMSRGIVHEFSDSKFGHVFAFGESRSLSIAKKIFAGQQLFCRTSSSVLSSHAGQPLHHYIAMMDQQERNEQLL

SEQ ID NO: 48808 - protein, 153 aa, Zea mays
  Coding DNA Sequence Number=SeqID_5433
  Homolog annotation: Hit_ID=A2XQ06; Match level="QueryCoverage=33%, HitCoverage=8%, E-value=2e-09, Identity=63%"; Hit description =Putative uncharacterized protein
MAITMSNNYFTHHNKWLDFSSNGEGQDNAGDSYVEDKAMQVTIAFNHFCEGLIPDNAKDSVLLRSALQATTSEVLKVVEDGLREANFEIVLDDRKVHKEMDEIYTLFLNISTPINVYNKLFVLQSTLQATIISRIPWSPSVGVCCIDPYHSKS

SEQ ID NO: 48809 - protein, 100 aa, Zea mays
  Coding DNA Sequence Number=SeqID_5434
MHDSSNLDAIMAPRLNKTYHVVYESHTNSFHVYMLRWANARLAGRHTSNSLNYSRFSCGRILQVGSCPQKALQFFSPFLQRAAMPVAFSTRDIVLASQQG

SEQ ID NO: 48810 - protein, 76 aa, Zea mays
  Coding DNA Sequence Number=SeqID_5435
  Subcellular localization annotation: CTP_CleavageSite=42; ConfidenceScore=5.22e-01
MGHTEGISGKSPTLGTTTSISGKAPTFGTTTDIGGNITFGMMAGTTVGIGGSAALFGTIWIYGIYGTDTHRRYGKH

SEQ ID NO: 48811 - protein, 118 aa, Zea mays
  Coding DNA Sequence Number=SeqID_5436
  Gene Ontology: Mol. function=nucleotide binding; Biological process =defense response
  Homolog annotation: Hit_ID=A2X267; Match level="QueryCoverage=69%, HitCoverage=7%, E-value=4e-25, Identity=71%"; Hit description =Putative uncharacterized protein
MAKMKLLCESVSGLVADEYGEEDRRKCAMYENVFPRLASLTNVGKLKDVETMIKSGINKKLLVLLGNGSEISQHYVITMLKIFSELGAPLKGCMGPAVLLHLSCHAQISLESPNNYLR

SEQ ID NO: 48812 - protein, 282 aa, Zea mays
  Coding DNA Sequence Number=SeqID_5437
  Homolog annotation: Hit_ID=A2YNN7; Match level="QueryCoverage=97%, HitCoverage=89%, E-value=9e-44, Identity=39%"; Hit description =Putative uncharacterized protein
MGIINWMQSRFHGKTETSRIFDGATATSSYRGGAGAQGTTQGTIVHESEKRLDAEPWPQAGILSIGTLGSEEPPAQEQDLPEFTVEEVKKLQDALAMLLRRAKSKSSARGSGAGAGEDRPPLDRFLNCPSCLEVERRVVQTTATNHGGQEEGDLSPDTKIILNRARDLLDSGGGGGGIKQRSFKFLLKKMFACNGGFSAAPPRSLKDPVESRMEKFFRTMIGKKMNARSGNGSASSRKYFLEDGTKGRRRGGRRCGCQEEEEREAESCRWDRTDSEFIVLEI

SEQ ID NO: 48813 - protein, 180 aa, Zea mays
  Coding DNA Sequence Number=SeqID_5438
  Gene Ontology: Mol. function=structural constituent of ribosome; Cellular component=ribonucleoprotein complex; Biological process =translation
  Homolog annotation: Hit_ID=A2X331; Match level="QueryCoverage=62%, HitCoverage=59%, E-value=3e-28, Identity=60%"; Hit description =Putative uncharacterized protein
  Pfam annotation: Domain name=Ribosomal_S8; Domain location=13-164; Score=-37.7; E_value=0.0019; Accession=PF00410.10; Description =Ribosomal protein S8
MFSWRGWSSWKLPLHGGLERLRAATVERDWTNGELRDEGALRSGYIKKFEVIDENRVGKIRVELDGRLKDCKALTYRQDLKAKEIERYRVRMLPTRQLGRSVYKPIIILEPLCPLSLAVDLEHTFDMYTVSMWGYVVITTPNGVLDHEEAIRQNVGGQVPGKGFGGSRAPTTLSGYSEAS

SEQ ID NO: 48814 - protein, 109 aa, Zea mays
  Coding DNA Sequence Number=SeqID_5439
MNKNTRDIRFIPRFGHTTKVPYFLVEAPTKSQVSFNPNPPFADHKDLKWERQEMCEREWEVFFKLEMEFGSCSSVWGERSGRLSASLTVRVCQSNCQTDWQTDLQADQG

SEQ ID NO: 48815 - protein, 32 aa, Zea mays
  Coding DNA Sequence Number=SeqID_5440
MGSGHSTCSAECSGGEAGNMDDFEEFQEYDEF

SEQ ID NO: 48816 - protein, 31 aa, Zea mays
  Coding DNA Sequence Number=SeqID_5441
MAAATVATAPPLGLRWGAWAETIEYLFAQVK

SEQ ID NO: 48817 - protein, 500 aa, Zea mays
  Coding DNA Sequence Number=SeqID_5442
MDKDRQGAAQKRQATVRVHEARPKRQRGPAKAAAPGGGKPPLPAKAGASGPSKAPEATVGAGGPRLTKVVPPTGGVAEAAKAARALPLPGKRVADFGTEINVDDYLGGSDEGQLALAAPGAAIVTAALAPKARVETLGAGGEVSALALVADFTSRTASGALTAALSAEVERLRTQHADAVREKSASDSKCRKLADKVAALEKEKADLRRQLAGERREANEAIAKEQAAQAEARLARAEGNIAKELAGELQGRLTALEIRAEGAEAAMRAEAERTRTQLMTAYRELGVRTGDFEVPEREAGLRCLEWVQEELQELPTVLAGLMSFTSLVTCEAAMNALSREGCRHFEALDQADEDFGRDIFEVEDPVVKESAGALYDRMWGSHGREVVRARAEAARAQAERGERVDDFGALNSVLPDPETTPAEAATGVAPGSTPETAEDAPGAPASAAAGEDLPPKVAEGAPDAPAAAVPSSEDPTAVGAEAAAEAAAEAPAAAGPSQVA

SEQ ID NO: 48818 - protein, 291 aa, Zea mays
  Coding DNA Sequence Number=SeqID_5443
  Subcellular localization annotation: CTP_CleavageSite=88; ConfidenceScore=5.16e-01
MAPPVDVAGPCPGLGNVEAPPRSRSSLSSKAEVESEPPGLSPSPGVGRSGVRRLPGLSPSPSPGVGRSGVCRLPGAEPESEPWGRAKRSSSSSGAEPESEPWGRVKRSSSSSGAEPESEPWGRVERSSSSSGAEPEYKPWGPAERSSSSSGAEPESEPWGRAKRSSSSCGAEPESEPLGSGEAEFPMAPRAGLGCCQPHSVEWLSSRCGAGGADLLSDRSVERRSDYDHFGSVDWRACVRIKVSGHLCIKCPCDLVGWRGDLAKLYADGGYQLRFRSLEGTPNYGPRHYLF

SEQ ID NO: 48819 - protein, 97 aa, Zea mays
  Coding DNA Sequence Number=SeqID_5444
MRFTMKISTEYSPTLYLFARRGRCTTANGRDGVEVVSGRRRGGRRRGVVGGRGRRAGARAAQASGRRAGGGAWPATRVGAGAGSAARVGAGVGACSE

SEQ ID NO: 48820 - protein, 128 aa, Zea mays
  Coding DNA Sequence Number=SeqID_5445
  Subcellular localization annotation: CTP_CleavageSite=42; ConfidenceScore=5.06e-01
MSRSVGHESSAVTADLRVVPRPSSSSLTFPLQVFVGNYDPSRAAWEAAEAEVEPLREKLAEADDRVVGTLERTSKNLGKAKVLSRSSKGGHNRKEIKSDSAATPSRVPGLVCTKMDAQDASELRLQQT

SEQ ID NO: 48821 - protein, 514 aa, Zea mays
  Coding DNA Sequence Number=SeqID_5446
  Subcellular localization annotation: CTP_CleavageSite=19; ConfidenceScore=5.24e-01
MPSSSSSAAATPPADSSPPAAASSEETLSSLMAEELRAGDSVDFGVSRMTSARVQDMQRLGYFGGGVARAPGTEEVPEPEGELVVFEAFFAAGLRLPAHRVFELNQLSYDGYPGQDDADRRGKKSVVETGDDPAPAAAPSSKKRKLGTAMGGLGVSDSFARELMRTCAAPGGRMSSPELRESSARMLRVTGGCWPRNVPIPRAAGEDCFTSRMVREWRVFPYGRNIAAVVSAVMDKDRQGAAQKRQAAVRLHEARPKRQRGSAKAAASSEGKPPLAAKPGASTSSKAPEPTAGAGGSKSTKVVPPVSGVAEVAKAARALPLSGKRVADFGTDINVDEYLGGSDEGQLAIVAPAAAITTAAIVPKARGEALGAGGEVSALAVVRDEAGAATRRLKEVTEALSQVADFASRTASGALTAAVSAEVERLRTQHADAVREKLASDSKCRKLTDKVAALEREKADLRRQLAGERRETNEAVAKEQAAQVEAKLARAEGNLCQGARRTAAGAAHRPWRAA

SEQ ID NO: 48822 - protein, 325 aa, Zea mays
  Coding DNA Sequence Number=SeqID_5447
MNALSREGCRHFEVFDQADEDFERHVYKVEDPVVKESAGALYDRMWGPYGREVVRERAKTTRAQAARGERVDDFGALNSALPDPEPTPAEAVSGVALEPTPETAEDAPDAPTSAAAGEDLPPKVAEGAPDAPAAAAPSAEDPTAVAAEITAKAAAKPTAEAPAASGPSQVQDFGPAHATATTEFLATSTAEGGNEYGGSASEFFDFTDSGSSVEWTEESSEEDLDYFAALDVAAAEASLHAADAQDVPGPSTGRRRRRAVAKRRVSTEEGARLCVSRASRQELLSLPAAASTGEGELRSLFAGEELRIMLFNYREMGIIPKVEPM

SEQ ID NO: 48823 - protein, 63 aa, Zea mays
  Coding DNA Sequence Number=SeqID_5448
MAIGDLRPQEPQEQDQFSSSTMVQPPTQGERMKKNTWRKKTFQRHLHPKFAPPYNVIIRWIKS

SEQ ID NO: 48824 - protein, 415 aa, Zea mays
  Coding DNA Sequence Number=SeqID_5449
MNKRPAFKVPLQTELRFHLRRYEQPHTIGGPVEQQKTNERLAVARSSSGDDDDFCSGGPNSSSDDLRADATAMRPSPVPSLVRQGRAEGRRVGGRSDGGPGYLVGGRTSSSCRGRRRRRERLRSHSGQRARHAAAASATNGEHLSPPSLREGAGRRPRRGRPQLGTLPSPALMMKILEAEGGAEAAARRRGLSLLQHAPRSSPYGAGAGSHASCKLAQSRRSQTAARGACNRPAVTSIPPLSPRPVGERAGSHAGGMQPHQVGAPLRLPMHPAWGPTRHATGAPVATCKQLHHHSHHCHASSTAEPVPRLEATLRATQQCQPGTTVNTAKNGPAVMAVAGGQEQRSRRQPSSRPVQGQRENPLSRREDGAPAFRSSNGSRTRNGRLANHSPRRINSTAGQAAPSAGEASDASPSP

SEQ ID NO: 48825 - protein, 293 aa, Zea mays
  Coding DNA Sequence Number=SeqID_5450
  Gene Ontology: Mol. function=endonuclease activity
  Homolog annotation: Hit_ID=A2ZQV2; Match level="QueryCoverage=44%, HitCoverage=22%, E-value=3e-51, Identity=75%"; Hit description =Putative uncharacterized protein
  Pfam annotation: Domain name=Smr; Domain location=190-270; Score =18.1; E_value=0.00039; Accession=PF01713.12; Description=Smr domain
MIINITLSPAVLESSVGSVASRPPGLLVVGCAYRRPGVWVALIKPVYVWAGYNVFAFLSIVETLSTRSKLSIGVVCPYTAQVRAIQEKVGKACRRNDYFSVKVKSVDGFQGAEEDIIIISIVRSNGAGIAYGLWGMEPLCSTAIPFGKRLSRTQGIEGKHYRELGRIEDEKASRNIFEARNKHITNTVTIDLHGQHVQHAMNLLKIHMMICICIPYEYHTRFAVLLRVITSCGSEGTGKGKIKRSVIELAEKEHIEWREENSGTVALRLGGPREYRFLEHESDSDQVGNFNID

SEQ ID NO: 48826 - protein, 325 aa, Zea mays
  Coding DNA Sequence Number=SeqID_5451
MDESGVEIGLLGLVVVSHLSPRGLGRFNNHERALKLLDALDLRSGVESLGDEELALVASQFTRFHNNRLNRWRGGSRDGCYNCGGPKKGKSEAVQRDHHPGRCKGKCKYTSIKHKSKGRFYKEALKKKYLWKAKVKECDFLAFLSNLDHDSDDSTSSLSDEELERRVKDKLNRLYFNVTPWEASAPWHLCAFCEGLQSTLESYRLEKTRIEVENVYLRSVLRWVSRSEPQLDMMVSQFKKSTLGTQRTHSHKQIPPKREVRYHCEYCERDGHLAVFFFRRKRERRGSEVSRKNMNCPLMVFVIFLLRDVLLGLEVLFFMLLGLKK

SEQ ID NO: 48827 - protein, 262 aa, Zea mays
  Coding DNA Sequence Number=SeqID_5452
MAERYQLPRSCVPPMTRRKDCGCPPSGGSEGGKTRCIREREDMVAFQGGHPPFKGDSPYLRPQPSWAESSPTRSKVLPLRRGGWVPRVMQAGPGQKKPNRRARCMQLPSGYKHSSTFAQTSGPMRHATGVPVTTRKQLHRHSHHYHASSTAEPVPRLEATLRTTQQCQPGATVNSTKNGPAVMAVAGGHEQRSRRQPSLRPIQGQRENPLSRREDDAPVFRSSNGSRTRNGRLANHSLRRINSAVGQATPQAGEASDASPSP

SEQ ID NO: 48828 - protein, 399 aa, Zea mays
  Coding DNA Sequence Number=SeqID_5453
  Gene Ontology: Mol. function=kinase activity; Cellular component =ornithine carbamoyltransferase complex; Biological process=amino acid metabolic process
  Homolog annotation: Hit_ID=Q6QP54; Match level="QueryCoverage=18%, HitCoverage=27%, E-value=7e-12, Identity=53%"; Hit description =Putative kinase
MGRRETEREGGRQSEGDWRERWNPAAFVVMMASPVDVVDPCPRLGEMEAPPRSRSSLSSKVEVESEPPGRTRRRPSADARPESEPWGRARQSSSSFGAEPEPWGRAERSSSSSGAEPKSEPWGRAERSSSSSGAEPKSEPWGQAERSSSSSGAEPKSDPWGRAEDLTLSSGSVVGAAQAALSSCQTGQWSSEATFALNAPAIWSVGVAIWPRLLLGEDWASGEPKLCADGGYQLRFRSLEAKGSQSPMYVPSWLSERFWRPVHVMSWPSEERLSPVEVESEPWGRARRSPSSEVEVESEAWGQARRRPPSGVEAKSELRGRARRSPSSEVEVESEPWGRARRSFLWRLRPVLAAVGLTLTGGTTVEAAQATLFSCQVSQWRGEVTAVTSALSSEERASG

SEQ ID NO: 48829 - protein, 131 aa, Zea mays
  Coding DNA Sequence Number=SeqID_5454
  Subcellular localization annotation: CTP_CleavageSite=68; ConfidenceScore=5.31e-01
IAITFSETCHASLPPPSPLSWRRPQPHPSDLHPGTLPSPSCSLFGSRDSPLTRPLLVCLVPDFSDRVVKALDPSIIVRDGLDLVRRPPTPTSLAAIGSQSMPVQARSSATHGKGSRLGRLAWLLKRRLNDD

SEQ ID NO: 48830 - protein, 53 aa, Zea mays
  Coding DNA Sequence Number=SeqID_5455
  Subcellular localization annotation: CTP_CleavageSite=13; ConfidenceScore=5.15e-01
MVPLLQVQAPPPSAAMLQPLPLPPASAQCSSRQTPARSHKLGIVCHSTDFGGI

SEQ ID NO: 48831 - protein, 61 aa, Zea mays
  Coding DNA Sequence Number=SeqID_5456
MEKVKYVRESTILSSAGGETEKLGEEQERFSGKSSQKLKSNGERTEEKALSVLLAGAQDSE

SEQ ID NO: 48832 - protein, 207 aa, Zea mays
  Coding DNA Sequence Number=SeqID_5457
MKALLKVLVDCAEDATKTLGGLVDHALGHMHDEEIVARTLYAIKDKLELLQQDALAAKVQAFPEIVKYDGDDISVDPTSPSTPPTVTEPSVDEDELYCPDVSDEWYFSDSDRSTRRWLRTSEDRGERQAQISGILHYALKRTRTSTLDTLYVLRENQGGLTDDDKTSKAATLFAHEENKPFHYMHCWHQLKGNQNGRVSVKDIPSEA

SEQ ID NO: 48833 - protein, 212 aa, Zea mays
  Coding DNA Sequence Number=SeqID_5458
MGFDTIHGPMAPQTTDPGTRDRVAAESDLISFLLWPPLLLLLNTLVFPKSLLVLSKLGAKIYGAELGATSVAALAYLGAQTCGVEAFYLGSTTMASTSSSASNRVPDAVWVSRFSTNLTATATMEKQLPPSAVAVSTNHLNHAQPYYIGSLSKSHPYGMAYDGGFHQYDAYDDLFDLLASHPVAPIVTKHHFDVMKPMFLDARLHTVAVQRG

SEQ ID NO: 48834 - protein, 102 aa, Zea mays
  Coding DNA Sequence Number=SeqID_5459
MEVLMIRYLGEDQQGLGKDQGISLRGESAFPEPQLVSSRTGPKNQMDKDKGPKLNDDECVSQMELKEMMRAVGVSGPTAHPGLALKVTREFSSMKDTRELGV

SEQ ID NO: 48835 - protein, 550 aa, Zea mays
  Coding DNA Sequence Number=SeqID_5460
  Gene Ontology: Mol. function=peptidyl-prolyl cis-trans isomerase activity; Cellular component=chloroplast; Biological process=protein folding
  Homolog annotation: Hit_ID=A2ZRX7; Match level="QueryCoverage=13%, HitCoverage=51%, E-value=3e-35, Identity=95%"; Hit description =Peptidyl-prolyl cis-trans isomerase
  Pfam annotation: Domain name=Pro_isomerase; Domain location=78-271; Score=82.9; E_value=1e-21; Accession=PF00160.12; Description =Cyclophilin type peptidyl-prolyl cis-tr
  Subcellular localization annotation: CTP_CleavageSite=17; ConfidenceScore=5.31e-01
MTCMPAVSAPSVLAPAPASTRTHLCYSTEMRRGALSLRPARAIPTLRLGGHRDARGAVVVRATAAEGAVELQAKVTSKCFFDVEVGGEPAGRIVIGLFGEVVPKTVDNFRALCTGEKGYGYKGCSFHRIIKDFMIQGGDFQQNNPRAEQPPRQAQAPPPPGRRRTSPAAATLALPAPAHRAHPRTATPTAPAAEAARAPSPTDVHTNAPLFHPTDQIHHSLTRLAMPAPPHSKLPQHLANRVVGAGADSIVVTCVKHEYQPAEVTKMDGAIQRVYTRKNWSSMVLCNCSHPNNVVPLTSEIVSAQTGTFLHLLPGSTMTRSGNCPSPETSSSVTTRLTRLIWPHAPGPSTIPPTVAVCVWVVLCRPGTHASSGASSGSSPAEPNSCLSDRGPLETFAQRGGRRWDLDSWATVGMLLGGEDMHRFPVRSPRMDRDDLIRSPAARQIDVRIPYQQKRMFGFVTFVYAETVKAILSKGNPHFVCDARSSSPTRRRVRKLQHAHHGGAEFAGCASPTGLLDSRDPYALLLLSSAQGRLKKAHDGSAHEAGSTHS

SEQ ID NO: 48836 - protein, 233 aa, Zea mays
  Coding DNA Sequence Number=SeqID_5461
  Homolog annotation: Hit_ID=Q5GAU8; Match level="QueryCoverage=52%, HitCoverage=95%, E-value=9e-48, Identity=69%"; Hit description =Putative uncharacterized protein
MYREALWQKRGRPRELYPDVSSKDAPVPTDLPVPNCDCGRPAWEHMRCFFFQWINGPDKFDHRYLLFAKWLCGRTSHERFKRWVAPPPNPPPMMDEEKDVAIERRTELPPRCDCGDRAVIDEDTAKHFVCPNIDYLSMNSFLPTFELGVGYFYGHMVEYDEETRKCGWERYDDKEEDMRRFMKSMSFDSPMRVEQRRLKAANEKRTHDAREWEAARAEKQMLGNLADRLSGSE

SEQ ID NO: 48837 - protein, 255 aa, Zea mays
  Coding DNA Sequence Number=SeqID_5462
  Subcellular localization annotation: CTP_CleavageSite=67; ConfidenceScore=5.35e-01
MALPVDVAGPRPRPGDVGAHPKLGSRLSPSPSPGSDGAEFAVFRPESEPWVGRSGVRRLPGLSPSPSPESGGAEFAVFRGLARVRALGRAERIGVAQAALSFCQTGQWSSEVTAVTSALPGGARQDKAAPLALDVPRPAAPRRRARCSRAASLALALAAPGPSAAPTPLAAPARFAAVAPLAAPLTVRFAAVTPSTPSQALRRALHTVVTSTPSRSFAVVHRPRRATREDTCLPSRCGSVCTASHRHCTDPPQPH

SEQ ID NO: 48838 - protein, 266 aa, Zea mays
  Coding DNA Sequence Number=SeqID_5463
  Subcellular localization annotation: CTP_CleavageSite=58; ConfidenceScore=5.49e-01
MDSLPSAARKTLGKTNFFAECHRGHSAKPPSPSPDAVTAAFLCRVLSGTRQRSLPSAREKALGKEGFADALFTEPSLPSVTLGKAFAECFEGFAECFRHSAKLLIPSFNMLTAKSGLGRHRKLRLARPPGSDSGSAPEDDEFRFARPQGSDSGSAPEDDELRFARPQGSDSGSALEDDELRLARPQGSDSGSAPEDDELRLARPGARTRPRPWKTDSTPTSEEPPPRPTQGLNRPRHRGAIITLSLASSGYGQQEQRPIWLAPENR

SEQ ID NO: 48839 - protein, 231 aa, Zea mays
  Coding DNA Sequence Number=SeqID_5464
EQQGSSFSLQQEIESVRSCSPVLPLEAPPAPPLGAPASGVAAGGDPDDGGGDDSPSHDTDFPADHEPEGWVARPITRDAARGGAEACSEHYSISERDSAEAAMQDAARRALSHYCSILGGVADGLDLKYYPRRPSGSTGGVIVSPAGEDNPRLSSTVNLAAVLNTELDHALDELSRARAEIALLRAERAERRHLDDGSPAPVGTQHPYRSPRRGRQSYGNPDCKTKINLEP

SEQ ID NO: 48840 - protein, 77 aa, Zea mays
  Coding DNA Sequence Number=SeqID_5465
MAGGIKLAGAKERWLAGEEIWSQEIWSVSLPKPEANPRETLGDTAVSQPSPLKGISSRDSGQSPPRVKRRVRLIGNG

SEQ ID NO: 48841 - protein, 53 aa, Zea mays
  Coding DNA Sequence Number=SeqID_5466
MGLGVYAARSAKVDLSLGEECGGNESDGFGFDYGAGKWYSFRLERVHWANNLG

SEQ ID NO: 48842 - protein, 42 aa, Zea mays
  Coding DNA Sequence Number=SeqID_5467
MEGRIKLAGAKERWLAGEEIWSQEIWSASLPKPEANPRFCHV

SEQ ID NO: 48843 - protein, 249 aa, Zea mays
  Coding DNA Sequence Number=SeqID_5468
  Gene Ontology: Mol. function=carboxyl- or carbamoyltransferase activity; Cellular component=ornithine carbamoyltransferase complex; Biological process=amino acid metabolic process
  Homolog annotation: Hit_ID=Q8SA97; Match level="QueryCoverage=51%, HitCoverage=21%, E-value=3e-12, Identity=40%"; Hit description =Ornithine carbamoyltransferase
MAPPIDVAGLRPSLGDVEAPPKPRSSLSSVVEVESEPLGRARRSSSSSRAEPKSKPWVGRSGVRRLLGLSPSPSPGSGGAEAEPESEPWVGRSGVRRLPGLSPSPSPGSGGAEFAVFRDLARVRALGRAEWSFLWCLRQGLTACQSHSVKWRRSRSGAGGAVLLSGRSVERQSEGGHFGSASWGARVRIKVSGHLCIKCSCDLVGRCGDLVRVASWRRQGLGRARNMFAAGGGLGRDGNPPGSAAFVRG

SEQ ID NO: 48844 - protein, 263 aa, Zea mays
  Coding DNA Sequence Number=SeqID_5469
  Gene Ontology: Mol. function=carboxyl- or carbamoyltransferase activity; Cellular component=ornithine carbamoyltransferase complex; Biological process=amino acid metabolic process
  Homolog annotation: Hit_ID=Q8SA97; Match level="QueryCoverage=40%, HitCoverage=21%, E-value=8e-15, Identity=45%"; Hit description =Ornithine carbamoyltransferase
  Subcellular localization annotation: CTP_CleavageSite=49; ConfidenceScore=5.00e-01
MAPPVDVAGLRPSLGDVEAPPKSRSSLSSVVEVESEPLGRARRSSSSSRAEPKSEPWVGRNGVRRLLGLSPSPSPRSGGADLSPSPGSGGAEFAVFRDLARVRALGRAEQSFLWPGQWSGEVTAVTSALPAGGASGEPEICSPLEGASGETEILRLYADGGYQLRIRSLEGRMTHRSGSYEDPDNFLWLPSPGDELVEKDQQVERLSQRITTLEQQVEIRDNTIDVLENPWYQCDCLRDAPFTHIQCRFHYSGLMSHFDALGG

SEQ ID NO: 48845 - protein, 66 aa, Zea mays
  Coding DNA Sequence Number=SeqID_5470
  Homolog annotation: Hit_ID=Q7XBC7; Match level="QueryCoverage=78%, HitCoverage=5%, E-value=3e-08, Identity=53%"; Hit description =Putative transposase protein
MGLYVEPLIDELVHAWKEGAWTYDRATKTNITNTPCMTYLLMGYSAPGEFTINHVSVRAAQDREHG

SEQ ID NO: 48846 - protein, 142 aa, Zea mays
  Coding DNA Sequence Number=SeqID_5471
MVVIGRLCASTHDAVMKECVAPVSNNTSAIWESTGNIPTIMPGAETHSALLGHWGLAAARLPSSDIASPSGLALHSGNMLCFQPELVLPDCSAGLLGQEDEVPADSAFETDLLTDCSDGSGTGVENTAFGTADAAEVDAGSA

SEQ ID NO: 48847 - protein, 119 aa, Zea mays
  Coding DNA Sequence Number=SeqID_5472
MAVFWFHGVCPVVVVKISRDGWVLEIIAGITMSMPESAWKCSRGSTLEAHAGSQSTTRQGKFSKKRVDGGSIMAVMDSTSEKMYLSQVRKQRSFAVSVQRWYQKRSQILDRGCGRMLAS

SEQ ID NO: 48848 - protein, 34 aa, Zea mays
  Coding DNA Sequence Number=SeqID_5473
MTYFEGVSDDTDDDYSYDVASCTHKILKNVPPDN

SEQ ID NO: 48849 - protein, 52 aa, Zea mays
  Coding DNA Sequence Number=SeqID_5474
MVGTSAVTARRQPGSVEHCTMQDVVDGVTWPTTLPPGWTVEWDVAPAGEEHE

SEQ ID NO: 48850 - protein, 126 aa, Zea mays
  Coding DNA Sequence Number=SeqID_5475
MALCGVWRGFDLFAPTTKCGRWKAVCSMAHRIVRCKRTGAEEEGVLNRSEPLSRMRCPATAPATPAPDVDRVDVSDADSGSSSHRSDSGRHSAAAAATTAAGTTSTSDASDAQGQACGRTTRIIPA

SEQ ID NO: 48851 - protein, 140 aa, Zea mays
  Coding DNA Sequence Number=SeqID_5476
MIVPRPSLASGKGSRPRRTYVLPEDPPPATGTIAACVAPTAEPPDRVRLTAAKAGLGRHRKLRLARPQDSDTGSAPEDGELRSARPRARTRAQPRKTANSAPPDPGLGLGLSPGRRRTPLRPTQGSDSGSAPEDGELRSA

SEQ ID NO: 48852 - protein, 68 aa, Zea mays
  Coding DNA Sequence Number=SeqID_5477
MEKSHMRHQFLKELWYYIEFFVDSLLLELLAPRRLGVAYVDARAIDLAMRIAERMFLKMKGDEAKNQD

SEQ ID NO: 48853 - protein, 253 aa, Zea mays
  Coding DNA Sequence Number=SeqID_5478
  Gene Ontology: Mol. function=kinase activity; Cellular component =ornithine carbamoyltransferase complex; Biological process=amino acid metabolic process
  Homolog annotation: Hit_ID=Q6QP54; Match level="QueryCoverage=31%, HitCoverage=37%, E-value=2e-16, Identity=51%"; Hit description =Putative kinase
MAPPIDVTGLRPRLGDVEAPPKPRSNLSSVAEVESEPLVRARRRPSAEARAESEPWGRAKRTRVRALGSGEVEFVVFWGLSPSPSPGSGGVEFVVFWGLSPSPNLGSGGVEFAVFRGLARVRALGRAKRSFLWCLRPGLTACQPHSVKWHRSRSGAGGAVFLSGRSVERRSDGGHFGSVGWGARVRIKVSDHLCIKCYCDLVGRCGDLVRVASWRRQGLGRAGNIFAARGGPRARRKSSGVGCPCPRLGSGEA

SEQ ID NO: 48854 - protein, 99 aa, Zea mays
  Coding DNA Sequence Number=SeqID_5479
MGLLEATKITLDNKEELVVDLSTEMVEKDVQVEQMATQIQELEELVGDRENTIEEIQDMEADEDVDIEGGVELEPASSLNTAGSGRPPSPESSVASFAH

SEQ ID NO: 48855 - protein, 404 aa, Zea mays
  Coding DNA Sequence Number=SeqID_5480
MAARPFRPLVWAKVESRFPRAAGEDLGACWRRLCLRRLGTQVGRVAFKRRVTPLEGDHVFALPYASCLSTFQAPGWGIPAVFSPPLRPSFGGTQLHGSWYLSAIVRLQGFSSYSPVAPLRWWSPQTVTSSPWMGRGKPGCDLGPALSLEDVRHPRWGGERGEPRLYLPRGPAGHLFFQLLVVATILQLYGGDVLQPCWGRRTVAAQLGCNIPPSSSLSWRGQERGPAGALWSGPLFGFNSWFASLERERERETSGGRVRPGTMAAAAEVAGGSPDSLVSCLNRFTKRESPRVKVTSESLAGPSVSGTDAGIDLPRPRVELMSSGDSWSRPRGGQPSRLPEPDSRRRPWRRRPRLGDDAVLQSGDLRTASPSEARSDLAEGVVDAEGAAAPFKHQGPSLQDRVVL

SEQ ID NO: 48856 - protein, 238 aa, Zea mays
  Coding DNA Sequence Number=SeqID_5481
  Gene Ontology: Mol. function=cysteine-type peptidase activity; Biological process=proteolysis
  Homolog annotation: Hit_ID=Q5NKQ2; Match level="QueryCoverage=94%, HitCoverage=28%, E-value=3e-77, Identity=63%"; Hit description =Putative uncharacterized protein 9C20.3a
MGLRVDFAQQRTSYMKNVDRPPSNPKRIIIQSTQECFSVDIPRVPAKTVRHKPMQAGDEDDDFMPLSKKRNFDDSPPKVLKKIVTKRRKAVDPPPRQQRLNVRCNPQDVIRQDIARRGFSNILDMRVDALGSRYHLAWLMEKLDHNDMTIQAGLGKELKITKETVHLILGLPNAGGGKALGIDEAVAANNLRAELGLSKEEFGVAALQDHLRKGFYDDLSIRSFFLILFNRLLFPTAS

SEQ ID NO: 48857 - protein, 384 aa, Zea mays
  Coding DNA Sequence Number=SeqID_5482
  Gene Ontology: Mol. function=cysteine-type peptidase activity; Biological process=proteolysis
  Homolog annotation: Hit_ID=Q8S456; Match level="QueryCoverage=99%, HitCoverage=61%, E-value=1e-90, Identity=58%"; Hit description =Putative uncharacterized protein 163K15.6
MDRMAEIDWCQLVYTDLCDAASRWHKRNRTNITATVYGCSHIVPIYYLDHLHHPASLENKYGTPRIKYFDNETIRDLARGDRRGLRQTGEPFGHAEMSHQMLVSKQIELSETFGEMIDKVLRAATQRDTQQEDNPPTTSSPPTNDHVSTPPVRTPDHQHHDQPTHVPTDDNKVSKQEGQNHVLQDPPTYGAPKFDRTPLTEGFIDCIRDDDILYNPDTISNTLILNVNVGTVLNIEELEQHSTNPQPFSTSVLKDLIVPILPPDEVLNQIKLVSPNQYYLLIMRRLSIALHEAQPDSSLPKFGNYKIGLLPNCPTMLPDSNDCGFFVANFFRCYDFDDDDISEFVVPDEPLDQRAFVLHYLTFHRNNRVYPIPAELLPFKLSDC

SEQ ID NO: 48858 - protein, 31 aa, Zea mays
  Coding DNA Sequence Number=SeqID_5483
MAGNSLRGAEVTNGDDGMASRIMLRTIPIIR

SEQ ID NO: 48859 - protein, 206 aa, Zea mays
  Coding DNA Sequence Number=SeqID_5484
  Homolog annotation: Hit_ID=Q6J9V9; Match level="QueryCoverage=31%, HitCoverage=33%, E-value=6e-07, Identity=43%"; Hit description =Putative uncharacterized protein
MAERYQLPWSCVPPNDGRRGGEKTAGGQEQRPRRQPSSRPIRGQRENPLSRREDNAPVFRSSNGSRTRNGRPANHSPRRINSAAGHAAPLAGEAGDASRFTFAIMTASEKGSGKGDTPKRILPREGTRLRASLLIRGSKAGPSEGFNSRLRSRGLHTHYWSEVRRPAPRKGSAAASGYSGSAPTTDQGFEGWPPKGSQPPQTQSEG

SEQ ID NO: 48860 - protein, 114 aa, Zea mays
  Coding DNA Sequence Number=SeqID_5485
MEILGEIYNVQPKPSKDLMNHKNIIKEYCNLADGEYILVPEQGVAQEVAQEPAPEPVIEDLPAPALEGSLEDMVAVVTWTSILPPGWTVEWDPTCDTPGVSFVLCREIYPNLRC

SEQ ID NO: 48861 - protein, 124 aa, Zea mays
  Coding DNA Sequence Number=SeqID_5486
  Gene Ontology: Mol. function=binding; Cellular component=nuclear pore; Biological process=protein import into nucleus, docking
  Homolog annotation: Hit_ID=Q84NP8; Match level="QueryCoverage=28%, HitCoverage=3%, E-value=2e-11, Identity=85%"; Hit description =Putative Ran binding protein 11-like
MENPTGLYPLPSLPGARRASLVWVTRVVGRDEGMAVAWTMEKEQFVMREADNWGHMSKVPEAERGIFMSFKYLRSLQLFCRYFMYTSKDLEEWSENPESVHHEQNLVQWTEKNDHVLKPFSFWL

SEQ ID NO: 48862 - protein, 201 aa, Zea mays
  Coding DNA Sequence Number=SeqID_5487
MATGRLLRAILGRPSQQGKARGHGEMELRILSSTYSASIWWGCGEKKIGALLLAAQGRWPSATASSLPWGKLQRAEGGAGGAMEQGKNGEGAGLLLAMEGSTTPCCCWNSWAPWTGSRAAREKNPSSPGAGGHGWEETPARSREEDRNRELAGRSGDRKRSSAARFFRVPWQLVLLLRHGREAELPAATVRKKREAKRSGG

SEQ ID NO: 48863 - protein, 18 aa, Zea mays
  Coding DNA Sequence Number=SeqID_5488
MPAGYLLFCAAPSATSLE

SEQ ID NO: 48864 - protein, 104 aa, Zea mays
  Coding DNA Sequence Number=SeqID_5489
MKICEIIEPKLRLSGVINRTSDGTVTRTDQNDSMTVPHRRRPISVEIHAAAVAIHVAGDQIRLPADKLTVDRRLPAVRRVAQPFHRVAVTRYCCQINAGEVATA

SEQ ID NO: 48865 - protein, 42 aa, Zea mays
  Coding DNA Sequence Number=SeqID_5490
MALRGADNAAQVPERNHCACIKNFDRVLSISQVVLNTKVLHW

SEQ ID NO: 48866 - protein, 157 aa, Zea mays
  Coding DNA Sequence Number=SeqID_5491
MTTRRGGLEEPSRRSSGAGVGAATLATVKGQGTTAAAVVNERVRMEERARTCDDEDGGRGSFATGMRRRPRCANPRQDENETRHTRRTHTGAGIDKEFAEEVARTYDDAGRRQTGSGALRAQRRRDGFATAEERCVWARTLAKWAQGFESKLTDGRF

SEQ ID NO: 48867 - protein, 26 aa, Zea mays
  Coding DNA Sequence Number=SeqID_5492
MAVIIKSIPQILKQRRGRILQAPLQE

SEQ ID NO: 48868 - protein, 130 aa, Zea mays
  Coding DNA Sequence Number=SeqID_5493
MEKFENEKEADEKRIADLEYALSVQVGLHRSEVVQKNVEELRRAKEECYNVATECCTELSPPLEPYDPEADPALKGALDVIRIANEAVNRLLKEVADKKRFVKVRLCIPLETTLESLHLLLRWYFSSASP

SEQ ID NO: 48869 - protein, 189 aa, Zea mays
  Coding DNA Sequence Number=SeqID_5494
MSDESTTPARVMTEEASFKGHSIAHNPQGNNKALSGHQPQGAEATGASEEDKGHTTRTCQVTIQKQKEIAEAEARQNQPKSRSYILLRATLPIYKNTWVINLQLLLLRQVIHKLPSPSSHYHHHCHLLTPEASSQKGTSTPNNNATSGRSPKLVQSIALYQNRNIYTEEYPTFDVPLSFIAFYFSTRNK

SEQ ID NO: 48870 - protein, 253 aa, Zea mays
  Coding DNA Sequence Number=SeqID_5495
MSTEKRHLDQIELLSVRRLLLNLLIFSCGGNNNKNWNIESYGLGLNFWKCQGPRSKTTETQRIVTNGRRVYFSETEGLLSKMDPRRGIGESEPLDLRPQDLESTVWILFTLESPDPSDQIRTDQISRPKRYADGAQQSSVDAGGTATADAPAPAANSGSTDHQSTAEMTPDQTPSHGEAYGPEFVGATAKYTELDRRRQRSHPRGAWRRSGGGERLGIKMGEGKGARGRPTCIPSGRPGSGREPVKSPAMSRR

SEQ ID NO: 48871 - protein, 322 aa, Zea mays
  Coding DNA Sequence Number=SeqID_5496
MAPPVDVVGPWCPRLSDVEAPPRSRSSLSSVAEVESEPLGRARRRPSAEARAESEPWGRMKRSSSSSGAEPESEPWGRAKRSSSSSGAEPESEPWGRAKRSSSSSGVEPESEPWGRAKRSSSSSGAEPESEPCGRAKRSSSSSGAEPESEPWGRAKRSSSSSGAEPESEPWGRAKWSFLWRLRPGLAAISLTLSSGTAVGAAQAALSSCQTVGVAIWPRLLLGEDWASGEPKGERTVKDRLDFFTFAPVSPFRKEGGKAPCCPRRAPNMVSPVSCWRVIRVDARAPFVRGRLEARRRAQKYLRVICRTRSPFDGVRGLDVSL

SEQ ID NO: 48872 - protein, 152 aa, Zea mays
  Coding DNA Sequence Number=SeqID_5497
MVTSSPWVGRSKPGCDLGPALSFKDLHHPCWGGGRAEPELYLPRGFVGQPLPQHSRERALTGLAGGSDSDNVGLVDGGRRQLQRVGLAGLAPGAPPTARAVRRTGGPPKTSRAARAAFVFWGCPAFAPVQRLRAEVVAPLVREDLSGDLLRG

SEQ ID NO: 48873 - protein, 284 aa, Zea mays
  Coding DNA Sequence Number=SeqID_5498
MAERYQLPRSCVPPTTRRKDCGCSPSGGSEGGKTRCIREREDMVAFQGSRPPFKGDSPYLRPQPPWAESSPTRSKVLSPMARGLGPTRHASWPRAKEAKPPRAVHATTQRLQASLHFRPDQRVKGRTAVQAACNRAKWARPFDFQRTQHGGPGPRVMQPTRRLLRASNCTAARTTATPPRLWNQYRDSRQPCGPGKGDTPKRILLREGNRPRASLLIRGSKAGPSEGFNSRLRARGLHTHYWSEVQRSAPRKGSTAASGHSGSAPTTDQGFVGWPSKGSQPPQT

SEQ ID NO: 48874 - protein, 230 aa, Zea mays
  Coding DNA Sequence Number=SeqID_5499
  Gene Ontology: Mol. function=kinase activity; Cellular component =ornithine carbamoyltransferase complex; Biological process=amino acid metabolic process
  Homolog annotation: Hit_ID=Q6QP54; Match level="QueryCoverage=45%, HitCoverage=37%, E-value=2e-27, Identity=61%"; Hit description =Putative kinase
MALPVDVAGLRPRLGDVEAPPKPRSSLSSVAEVESEPLVRVRQRPSAEARAESEPWGWAERSSSSSGAEPKSEPWVGRSGVRRLPGLSPSPSPGSGGAEFVVFWGLAQVRALVRRFGQGCFLAKTGPRASRKYIRRWRGASGETEILRGRLPLSEARLGRGVIESLEWTDPDLIAPIRPLQLYADGGYQLRIRSLEGTPNYGPRQVRSRDSTAAYNYKSPDCPVVHRTIR

SEQ ID NO: 48875 - protein, 115 aa, Zea mays
  Coding DNA Sequence Number=SeqID_5500
MASGAFRAVASRAVYTVDSPILKGIFDLATDPPHDYYTRLQRHRGAMDANTKLILDEFEKKFGAMDAKWESKFADLQVAKEERLLALEQGQADLGSWRPRLESAMEDIKLELSIY

SEQ ID NO: 48876 - protein, 246 aa, Zea mays
  Coding DNA Sequence Number=SeqID_5501
MGEIVEEDDREDGAIDRAKNPSGPTCHHGVHVMGVAMEMRGWVGVARSGPPTLIIVTLDNLDSRKQEVVEWVHAAAWCTGEEALDGAVVKGTMRGVGEGEYSLGDLKYKIVVDPMEGEGDRANDLGSEVVAALVEAPKTVEDEHTIEGALADVMAGVDHTLHLTTILSDREITMDKGMEDNVEVESMTLREVNEVTPAGVGGSRVEDDGNQGPDVLDTSRLSVKVALNLCKMTSEGVDGSSLLLLD

SEQ ID NO: 48877 - protein, 89 aa, Zea mays
  Coding DNA Sequence Number=SeqID_5502
MDVLSSLFNMAESRGLLQSLEEANVRNRISIYADDVVLFVRPIEADLRKVVPSLLAAMYHLYKRVAAPFNVPQLYFLALIWGFRFRIEN

SEQ ID NO: 48878 - protein, 137 aa, Zea mays
  Coding DNA Sequence Number=SeqID_5503
  Subcellular localization annotation: CTP_CleavageSite=46; ConfidenceScore=5.36e-01
MGPSVAGTDVAVGVTEGGLTVITSASARKRRANRQSSFGPTYRLVSSPEVMELPLDAQSSGRRLDVDERVEHSRAVADVLHVLARFVQVLQMQHLRGIHTYREEAPRTELLGSRRRLGEGERRAAAAGFAGGELGYP

SEQ ID NO: 48879 - protein, 163 aa, Zea mays
  Coding DNA Sequence Number=SeqID_5504
  Gene Ontology: Mol. function=protein serine/threonine kinase activity; Cellular component=integral to membrane; Biological process=protein amino acid phosphorylation
  Homolog annotation: Hit_ID=A3AXR9; Match level="QueryCoverage=44%, HitCoverage=15%, E-value=4e-28, Identity=80%"; Hit description =Putative uncharacterized protein
  Pfam annotation: Domain name=Pkinase_Tyr; Domain location=3-122; Score=-131.6; E_value=0.00024; Accession=PF07714.8; Description =Protein tyrosine kinase
MYCQGILPDGQEIAIKRLSKTSAQGLEEFKNEVMVLSKMQHRNLVRLFGCCAHGEKMMVYEYMPNKSLDSFIFSKFSATCSPDSIQILYTGASSYEGKSSDADADAVEKMQMQWKAKETAQMQWGPAALKDEAAQVSSESGYGYTRAWSRRNLTGMEGDHDEG

SEQ ID NO: 48880 - protein, 76 aa, Zea mays
  Coding DNA Sequence Number=SeqID_5505
MAAEKWPKKLFKKAKKASMMLESNISVSSLLSEPAELPPGPHTKGDDEIRQMAEAIMDRVVDQLLNEAVEVVLKED

SEQ ID NO: 48881 - protein, 698 aa, Zea mays
  Coding DNA Sequence Number=SeqID_5506
  Gene Ontology: Mol. function=DNA binding; Cellular component=nucleus
  Homolog annotation: Hit_ID=A3B7E6; Match level="QueryCoverage=26%, HitCoverage=9%, E-value=1e-39, Identity=52%"; Hit description =Putative uncharacterized protein
MLYQNSSFFTQQRHSKVFAGEVLDLTREEVLDSNNISLRALYGDNAALLHPSPMLNHFTRDAIKDLGGRGAQVCHWIASDAHAKFEKASILKKQKAVIKIIAKGIMSFWRSAEALQTADRTAKVMPHNSTMLEEIDPSGVKAGKEQGHNSLEAKESSQQRSQIHDYAVRFLEYNRTADLHVLPEAPPTPDRLNDFGVLKVSDHLSEESLFYTVAAPGAVLAYRDSLESLFMYHKSWGYSVVGNVSSQLGLARDVLHRLEMDQDSRMLMTKEARLRKKRNFISKLEDEGRIVTNHEQMQEVLDGFFSNLLGSIVQRPFTLDLCGVFSIGCLGIVFAALPEGGGMEVVVVGLIKTFPLAFPLLAFTSRSSTSPGGPKQTCEADRTLMCSTFDELHQAPSLPTCPMKTWLVASTMEVNLVLPLLSVYIFGGGLVKPWHAIVELCLSSLKLNCVVYTLTPSLDPSAFKLRGWCLDPESIPVSLDLHVEEPPVAVDEGGTLKGAVELVEPLPQLGGLCHAVSHGAVLGLYAGAGDDGLPLGSLGDEVGAQEYDITGCGPTRVGAANPVIVGVDDELCRRGWTVEKSVVEGAMEVAEDPLEGGEVGLLQGVDVQAHMLDGVGDVGPEEGDVLERAGEAPVGRRVSDRGPVDLRELHLSVDECGAGLAVGHASPLQDVDSVLAQVEEETLRPTLGGDAEEVVQGP

SEQ ID NO: 48882 - protein, 139 aa, Zea mays
  Coding DNA Sequence Number=SeqID_5507
MGAVMSTVMDKDCQEALWKKWKAPHWLVDPHRDAKVSHTKPQLELTTQLEEFSTQMVLKSLSQRIKCARMESWCLGMIKECLCVSSMRLGTSFIALRQLGAVGGNLGRQFLPSVRRRTGQSGVPPDSPCSCPVRISYHS

SEQ ID NO: 48883 - protein, 198 aa, Zea mays
  Coding DNA Sequence Number=SeqID_5508
  Subcellular localization annotation: CTP_CleavageSite=35; ConfidenceScore=5.53e-01
MARARAYKTLPDFDCTLPRTLKPHRSPARRRLPVRSVSAAAQSLCHRRPASRAIPNSVQPSEKTVHTSVKLPERGIGVCFAGEASPRSPELSTPPEYVDRVNHSTILRFLVHTVATLPREAHRALGLNQFAVVWPIIQIHYVILKENLSLKDCNLADGEYILVPEQGAAQEVAPDPAPEPAPEDQPATALEGKPRFYA

SEQ ID NO: 48884 - protein, 285 aa, Zea mays
  Coding DNA Sequence Number=SeqID_5509
MEPCEGAQLLTMSGLVEAGLRTAILATLPTLDERGVSVRLTGGRDLHHGIRISDAPAGGPQPAGVAPSAPTVAPRPLDKGKGLQAAPPPVPRPRASSPSAPKVAPPPPDTRPAGGSGSQQQKSAERGIGGAHPAAVGKAPLASHVPTGGPAAAAPASGGATVAEEVPAGGPAPAPDTGGDLGGASSSVPPSTLEEMDVIFGRRLRSGAEPDAAPIPLPRVLSRAHQVLNETEAAILWEWEALESEHQRLSDWRTQLEERTKVASRQFASEWFELARDRKEYKRDL

SEQ ID NO: 48885 - protein, 227 aa, Zea mays
  Coding DNA Sequence Number=SeqID_5510
MPPQYTVQLFEKHRVPRCRVRMTLEPHALQPGWHSLDSESFGYQAEDTIEAIALHGLTTFYGFHPLELSTHPIGLFPAEKEDDPMWKYRVEHAKDIWALYLGQTAHLTASKITLDNREELVVDLSTEMVEKDLQVEQMSNEIQELEELVGTRENTIEVLEDQLINTQQQLVEAIQHLDMHHQEIQDMEANEDVDIEGGEEPEPTSSLDTAGSGRPPSPESSVASFAH

SEQ ID NO: 48886 - protein, 84 aa, Zea mays
  Coding DNA Sequence Number=SeqID_5511
MANKIIKKNEKETHDAREEAKRAEEATEHARRIAELSPLPEPYDTQADPVMKEALDVMSVANTIVDEVVDRLLNEAAEKILKED

SEQ ID NO: 48887 - protein, 81 aa, Zea mays
  Coding DNA Sequence Number=SeqID_5512
  Homolog annotation: Hit_ID=Q8W0X8; Match level="QueryCoverage=29%, HitCoverage=28%, E-value=2e-07, Identity=95%"; Hit description =Putative gag protein
  Subcellular localization annotation: CTP_CleavageSite=41; ConfidenceScore=5.11e-01
MNSLDHLQQALTFVMPPKKTTGPGVALQPLDVNQETLREARSQNRARGCTTATGPRDQATPWPPSYKPPQLPMYDGHSDPK

SEQ ID NO: 48888 - protein, 108 aa, Zea mays
  Coding DNA Sequence Number=SeqID_5513
  Homolog annotation: Hit_ID=A2XFR6; Match level="QueryCoverage=85%, HitCoverage=26%, E-value=3e-07, Identity=34%"; Hit description =Putative uncharacterized protein
MKKPMMSKRTTSLVYGLSLSITPQCEAGKDRLNTLVGVVAGLNTDLDSTTLDLSRVHGELEEAHARIAALKAHLKGRNPPEAQVPAIAMSPSHKRICYGERGPITRLL

SEQ ID NO: 48889 - protein, 235 aa, Zea mays
  Coding DNA Sequence Number=SeqID_5514
MRLQGHPHPTAGYPVLFEQLHRILGRRRIIGSLQHLPQNAGKTLLRKLSVWECAFPPSEDSQILDDRLWCWLLGYLLSNSLLRNEDAGGLVGGVCSDLIPAVEFNPRAQGASRGAKETTRARNLRKTHCGARSMCAGGRVKSSDVDPVSPARYSSIPGSGSFTEARRERSPVILRSSEVESERGRTVEASVDFIDAGADILMYFNFGKGFKSLNIHLLILSINPVFGGLMAQEGV

SEQ ID NO: 48890 - protein, 106 aa, Zea mays
  Coding DNA Sequence Number=SeqID_5515
MTQLMGLVEATKITLDNREDLVVDLSTELVEKDLQVEQMATQIQELEELVGARENTIEEIQDMEAEGADEDVDIEGGEEPEPASSLDTAGSGRPPSPESSVASFAH

SEQ ID NO: 48891 - protein, 160 aa, Zea mays
  Coding DNA Sequence Number=SeqID_5516
MTRAAPATSDVDLHTDVTAVTSPTSLTTPTSLTTPSELYCRRIHISYSLHSIDCNLADGEYILVLEQGVAQEVAQDPALEPAIEDLPAPALEGKPCRLPSSRDLRRGLPFRLWWVQVRSLHDDSRGSLEDMVAGVTWSSILPPGWTVEWDPTSAEKEHEE

SEQ ID NO: 48892 - protein, 24 aa, Zea mays
  Coding DNA Sequence Number=SeqID_5517
MDDKYGGVIVNSEIDSSLDPKDQF

SEQ ID NO: 48893 - protein, 485 aa, Zea mays
  Coding DNA Sequence Number=SeqID_5518
  Homolog annotation: Hit_ID=Q6J9V9; Match level="QueryCoverage=23%, HitCoverage=46%, E-value=2e-07, Identity=35%"; Hit description =Putative uncharacterized protein
  Subcellular localization annotation: CTP_CleavageSite=88; ConfidenceScore=5.49e-01
MVAFQGDHPPFKGDSPHLRPQPSRAESSPTRFKVLPYDTGARSHASCKLAQGRRSQTAARGACNCPVVTSTPPLSPRPAGERADSHAVGMQPRQVGAPLRIQHAQHGGPGPHVMQPARRLLRASNCTATRATTATRGNPTYDPTVPARRIGHGPVSRGRRRDGRCGQKWAGSNGGGRRAEAEVTSSAKLTSPRGTGPRKGIPRKGILLREGNGPRAPLLIRGSKAGPSEGFNSRLRALGLRAHYWSEVRGPAPRKGSTAASGHSGSAPTTDQGGNDLVTESHQKEASSPRTPSKGDRVRQITRRRHRKLLSPDPRARTRLSPGRRRTPHRPTPGLGLGSAPEDDELLRPTLGLRLGSAPEDDELLRPTPRARTRAQPRTTTNSFADPKARTRLSPGGRRTPLHRPEGSDSSPGLKRRLRSPTRGARTRPRPWRDETRPRPQRSLHLAQPRAQTDHVIGGVIITLPQADSGYGGTKTGVPSGLRQT

SEQ ID NO: 48894 - protein, 384 aa, Zea mays
  Coding DNA Sequence Number=SeqID_5519
MGNTRNPSALSLEECNFAEVGTFQPSFGFKDFHQAARLHPLAGGHQDASRMFIILAGAGAGLSRSSTSRAGSWVSLSLSIQGRGRSAAQREGRTSTTRGWSTTGVISFSVLGSLAWPAVPPLAARTVVAPHAPEDRPRRRALLGRRSCSEAVLPLPRYGTSAWRSVLRSSGRIRVGICRWADGSCRRCGGGGGWRSPRRRRDHRHHPRSGPPALCTCPRPSSVDVGEGKVAAASALRPLLLQFGHPEWGSLSLLLERAMASHPSVFCCSAGSPIESLGSVGLAVRGFSCLVKGNPRPLFDEPKPEVAVSAQTEAELARKEDLVGRSLAGSSTGGTDVGVELPRPQAGPMSSGDSWLRLRGDRPEPSARAGFLEKTLAAMARAWC

SEQ ID NO: 48895 - protein, 114 aa, Zea mays
  Coding DNA Sequence Number=SeqID_5520
MDQKSFDNTRDNHGIIVWVVLEMKILLGEAGSEDEPPVIGSTSFGSEAAPAWSLNEAISSRSGSEFTGGGRQCWGLVLKCYELRTRQHKVLNVKCPFVQRSIIPLRINGPLDEG

SEQ ID NO: 48896 - protein, 240 aa, Zea mays
  Coding DNA Sequence Number=SeqID_5521
MCRIHGVELNVAGIEGLGIERTTAGGEGLVRPAGTGEDRGRSVSTVAAHRDDLGGLASTMIGAREDRCGPAAIDRFTFPEGINGENRCGAAENGGAARWQQAENNGRRDTFLCHVTHDDMEGIMSEPVQDGQEPKSAKEAVSQVVKSTTFLRVAGVCSASKSTSRGAISSQVHDLQVELENEKQEKKELRQELDNLKMESETSRVKHSEEIEGLKKTSQEMHGLLRQLLSFNQGQHNPGS

SEQ ID NO: 48897 - protein, 337 aa, Zea mays
  Coding DNA Sequence Number=SeqID_5522
  Gene Ontology: Mol. function=nucleic acid binding
  Homolog annotation: Hit_ID=A3BQ85; Match level="QueryCoverage=51%, HitCoverage=15%, E-value=3e-32, Identity=47%"; Hit description =Putative uncharacterized protein
MVDANPPKSSRCAATVDTDLPRSSPVPAGDDEQGATGLFGLEGENVLVDSKIGESSGSLEEKVEYDVEQKIFSSDERAVYEEALKHITQETKEEDLPKGDDQGVGKTISTIALIQKEMVKQSRFMTAGSYSTKFVPNSDYDNGSDVVISMDKKEPKDEPLNELDGSARLHVASSLKLCDSKPNTATDKVEPKKKARVRDSASNLRSKTRPAAGTVVVCPASVLRQWANELSVKVMEDNKLSVLVYHGSSRTRDPNELATYDVVVTTYMTVANELVPHLSLSTLEQIGTCGFDCIIVGVHGELGLVLSGTIIRGTLKTPNSQLVTPISIKLQRPDGYD

SEQ ID NO: 48898 - protein, 58 aa, Zea mays
  Coding DNA Sequence Number=SeqID_5523
MGYQLILRRYKRIAKPMTELLKKGVKYDWSQKVRRCLFILLRQHFDNSPRCWLNPDNI

SEQ ID NO: 48899 - protein, 153 aa, Zea mays
  Coding DNA Sequence Number=SeqID_5524
MGKSKKGGSSSHHSGDKRKCEPTPLSEDFGDSEYSEEEFSSESEGSPVPTSPPVSSDDSDDSQGITAEVWTYIQAVERARLEGSDELGGSSDDEDSSDSSEEGGGDGDGEGGGNGGGGGDGNGDGKGGSGDDGDDSKGSSKGSTRPVARRHWF

SEQ ID NO: 48900 - protein, 60 aa, Zea mays
  Coding DNA Sequence Number=SeqID_5525
MAVGVSEALYAKAVSPDLLTENRWGRLMFFGGHGCWSDLAVHLATGLDCRVGPRLGWGGA

SEQ ID NO: 48901 - protein, 303 aa, Zea mays
  Coding DNA Sequence Number=SeqID_5526
MARLRHTARKSVIPFLPSRLAERPLHRPVAGQSSHLERLHHRLHEEQERRRQEQQGSSFSLQQEIESVRSCSPVLPLEAPPAPPLGAPASGVAAGGDPDDGGGDDSSSHDTNFSADQEPEGWVARPITRDAARGCHFHDALDTLLRRALNQRTWSIEYRCVVYQHSRGVYPDRWEATCLVRRPENSLQGAEASSEHYSISERDSAEAAITGGVIVSPVGEDNPRLSSTVNLAAMLNTELDHALDELSRARAEIALLRAERAERRHLDDGSPAPVGTQHPYRSPRRGRQSYGNPDCKTKINLEP

SEQ ID NO: 48902 - protein, 112 aa, Zea mays
  Coding DNA Sequence Number=SeqID_5527
MSLRYGRIYTLGVLKAERPHLSLNVAILAKGRYLRTKVGIAVDRNNTKVDTEPKVNSIPVLFTLTWHSFSASRLYCHFLPIEALKNKSPTHCSGEDEAVEGDFQEFQDYDDF

SEQ ID NO: 48903 - protein, 305 aa, Zea mays
  Coding DNA Sequence Number=SeqID_5528
MSSPELRESSARMLEVTGGRWPKNVPIPRAAGEDFFTSRMARDLRVFPYGRNIAVVVSAVMNKDRQDAAQKRRAVIRLPDARHEAKRAQGSAKATVPGGSQPTLAAKPAAPGSSKVPESTKAVGAGGTKSAPDEPAKVRELPSSGKRVADFGTNISVDDYLVGSGEGQLVVVPPAVATTASTVVLGVKGGAFSAGSEILAATAVKDEVGTMSRRLREASQQLSQQLSQAADFADCVASSALTADVSAEVERLRAQHADAVREKSAAESKSRRLVEKVAALEGERMDLRRQLVEKRREANQAIAKA

SEQ ID NO: 48904 - protein, 310 aa, Zea mays
  Coding DNA Sequence Number=SeqID_5529
MERVEVSTRSEVERTRKQLVDSYRELGARTAHFEVPDREAGLRFLEWLQEELLALPTIMEGFMSFASLVTCEGAMNALSREGCSHYEGFDRSDEDFGREIFKVEDPVVKDSAGALFDRMWGPHGREAMARAEDVEDFRRLNSVQPKAEVNPVVAKAEVDPAPPPETGSSPATVPMAEGPPKAATELAAEDPMAAARSSQVQDFGPAHAITTANFVAASSVVAGNESDESMSKFFEFDDSGSSVVWTEESSDEDLDYFAALDVAAAEASPCVTDAEVFPGPSAGCRRRRAVAKRRGWQAGIVVLAGWGECR

SEQ ID NO: 48905 - protein, 512 aa, Zea mays
  Coding DNA Sequence Number=SeqID_5530
MALYGYTMSTMSNVTCSLRALGATPKERGNSILPTGKIPSCHAAVDNHGVDVWCAAQVDVTGVEGQWHMGPLRLHDWIGNRDVVDAAVMVPLLPLCVEVGAGPPSDHVNDAAIRLIGEVFLLWGLEVVVVVDVLLLLVWGWGKYDLYLLVVLVCVVRWMRSGAVVVWLRGLLVCVRDNSRVVGWLRSCHPVSGGLRFWKVSCRVDAVFVVEQAVKSARLLRASPAPTTSSVSAALGDTPGGEGPRQRGSGWRCCAPAADCARPDRSLPARASSTCGWTVECLWLIHLLEVLGRIPDGVAVKDAGSKATDGVVDGDLSESSAKASVSGRYPWKLSKNLSRRLLQESMDNGGNLVYQVWRQGTSLVKVVDTLECRGMWDGVATLRDVQVFDLCALLEGWAVLQAEVAFALHERDLLFELLSLLLFVTLRFLMRKARNCSCSSAETPMTSPSSVTSAPSCGAKPGEVAVVLQSCSAAFAVSSAFELALLGAIAGGFSVPWPHGGRQMLELALLGK

SEQ ID NO: 48906 - protein, 17 aa, Zea mays
  Coding DNA Sequence Number=SeqID_5531
MPPSAVDSTPARVTRGA

SEQ ID NO: 48907 - protein, 21 aa, Zea mays
  Coding DNA Sequence Number=SeqID_5532
VKNRYRRMRRLEDAVMSFLEV

SEQ ID NO: 48908 - protein, 206 aa, Zea mays
  Coding DNA Sequence Number=SeqID_5533
  Pfam annotation: Domain name=zf-CCHC; Domain location=105-122; Score =13.8; E_value=0.012; Accession=PF00098.14; Description=Zinc knuckle
MEDLSNMTPTIVIGKIAAFEMSRKMSRGEEPTSSRPYAFACDERKGKKKAPTPSSSSEEEEEEESDDDEDNQPCTSSSEDEETIRRVGKDNTTAGVNKPMEGETVICGLCHKEGHKSFQCKAMTGDKQRQKLKQKPSSKISNTYIKKVNKKDATPYLIKKKKNGKVIAIKANKQANKGKGAKRIWVPKEIISTMKSTKKVWIPKGK

SEQ ID NO: 48909 - protein, 81 aa, Zea mays
  Coding DNA Sequence Number=SeqID_5534
MGWATIPLVFAPLRGSPQATTPAAWPPSGGAGDASSGGIGEPKTLPPAEAGRKSPTALAPGANALAPRAGCGAIPPSGCTG

SEQ ID NO: 48910 - protein, 46 aa, Zea mays
  Coding DNA Sequence Number=SeqID_5535
MEMGRDWCGVHYRVASHLKRYLRTQVGITADQNNTKVDTAPKVCPS

SEQ ID NO: 48911 - protein, 92 aa, Zea mays
  Coding DNA Sequence Number=SeqID_5536
  Subcellular localization annotation: CTP_CleavageSite=52; ConfidenceScore=5.29e-01
MAPSSLALAPCREQFPLADAPAMAPFFLAQRLGSPSPKLQRSWNSRRKPRVCVEKASRSTLVDVRSDAQIGITVVLANADLGLFMVVIWSCS

SEQ ID NO: 48912 - protein, 152 aa, Zea mays
  Coding DNA Sequence Number=SeqID_5537
  Homolog annotation: Hit_ID=A2XFR6; Match level="QueryCoverage=95%, HitCoverage=41%, E-value=1e-23, Identity=40%"; Hit description =Putative uncharacterized protein
MDAGDRGFRTLSVHEYLTPLSTYAASVSDAARRTLWSLSHTYRQQLHNTKYMHLPMCLRGESQTNIIPGRAEEDCLNTLVGVVAGLNIDLDSATLDLSRVHLELEGAHTRIAALEAQLEGRDPPESQVPAMALSPPHKRIRYGEPGSITRLL

SEQ ID NO: 48913 - protein, 65 aa, Zea mays
  Coding DNA Sequence Number=SeqID_5538
MSKTPAEPLRARAASPPSSDVFGTRVMMAGEHREDKEGECFVRFRHGGGLTPSGITVKRRRSLIG

SEQ ID NO: 48914 - protein, 108 aa, Zea mays
  Coding DNA Sequence Number=SeqID_5539
MARIALRRRNLNPMAASAFCGQCGAEQYGASRGVAEDPEGLIPHDATSSGLPFRISRGVAGDSVPAVAEVRDDRWGQPVEKGDRPPGTSNCITFESQRIRTLQFGASN

SEQ ID NO: 48915 - protein, 221 aa, Zea mays
  Coding DNA Sequence Number=SeqID_5540
MCALEGQQLLEDDPTVVYLTAYLLTLDAQYDFLARHHRQMIARVEDTEKHNPLKQAKDEHVQKLMEAYLVTHNQCSALRIQEPTSSNPVQQPMRAKDPQILEGHPVSIKGEKKAWELPEGSIVLEGILVSPQAMDKQEHPKSCQDPPPKLFEPLTMKKIPAPSLEIKEEAASTPPAPPPSEELREPVPLEEEFDPILPSQSPPEEVLNISSLLTHPGDVLD

SEQ ID NO: 48916 - protein, 360 aa, Zea mays
  Coding DNA Sequence Number=SeqID_5541
  Homolog annotation: Hit_ID=Q10SZ0; Match level="QueryCoverage=23%, HitCoverage=5%, E-value=3e-07, Identity=36%"; Hit description =Retrotransposon protein, putative, unclassified
MDTGRSDLSRGSANAYFHVVHRGFATQMELKSLTQSIKCVEAESGSLRMLSECFVYCSMRLGVPFIAPRQLGVIGDQLGRKFLPSVEWCTEQSGAPPDSYCSSPVHDLFPFLAKPTVGSSDLLAHRTLSGAHWTVRCDHPNIWLSHVSPVDRAGDHWPLAPLTHRTVRITYSPPSRCSQTITKEQVESLRDEELALVEDSPQDHSGWHKDKQDHTSGKHMSRGRFDKEELKKNEPQLGMVVSEFKKGIGGPETCFASRSRSDLHFGKVGPYQMGETIFVEEEHDNADWGDVESSPLGGPVKPASTTSTTGPDITFSTTWGPVKPEPTEPAFVASFEPWNVGHTLSDPNWVNVMHEELEIF

SEQ ID NO: 48917 - protein, 93 aa, Zea mays
  Coding DNA Sequence Number=SeqID_5542
MDESEKGDRPPGTSNCITFESQRIGTLHVSSPDPTQRGSGSHPRGPVCARGGGDEDDGFDYDYGNGCPRCNHCSGEDEVVDEDFQEFQEYDEF

SEQ ID NO: 48918 - protein, 196 aa, Zea mays
  Coding DNA Sequence Number=SeqID_5543
  Homolog annotation: Hit_ID=Q8W1D1; Match level="QueryCoverage=18%, HitCoverage=2%, E-value=4e-07, Identity=66%"; Hit description=Gag-pol
MEDLNVQDDLTYAEYPIEILDTLTRVTRNKVIKMCKADSWVVLGEKSRGTRPHADVNFSSAFTVHRVAALLRGHGASSLFLGYVAPNHVRRIPYYAYLSPIRFWPPYCASEKVRRRPPPRCSAGVGGAADRLCSDWAKSCGPLDAVRAVPIRSPRTASRGPSWPSDGDRAGVERLSRLVIRTVDLASEGYEPCTGL

SEQ ID NO: 48919 - protein, 199 aa, Zea mays
  Coding DNA Sequence Number=SeqID_5544
MQVACNRTARAHPLGFVASSMEAQAHTSWTEKGDIPKGILLCEGSKPRALLLIRGSKAGSSEGGSKAGPSEGFDSRPRARRARDDSGYVCYMAEARATLPRRIQCEDRLTPYPDTRASVGKVEPQAQQEAPPRPTLGLGLRRRSPPRPTLGLGPRLGLRRRLRGNKTGVPSRLAPVAGNDGSSGLKRSSDGHDTAYTGL

SEQ ID NO: 48920 - protein, 130 aa, Zea mays
  Coding DNA Sequence Number=SeqID_5545
MVTSSSTAGESKPGCDLCPSLSLKDFHHQGWGRGLPRAWLSDPSGFGAALGAGFRHGSWKSIRPEVIAAVVWPPGAEVVVVAAAGAGDGAPFVGLLLLRRLPPVECGDSPVGCLNRFTKRELPRVKVTSE

SEQ ID NO: 48921 - protein, 111 aa, Zea mays
  Coding DNA Sequence Number=SeqID_5546
  Homolog annotation: Hit_ID=Q10AI2; Match level="QueryCoverage=57%, HitCoverage=33%, E-value=3e-21, Identity=78%"; Hit description=SnRK1- interacting protein 1, putative, expressed
  Subcellular localization annotation: CTP_CleavageSite=33; ConfidenceScore=5.45e-01
PREQRVAFLRARSPFRFPAPAAFPSRRPARVPVAAAAPERRPPGAVASTTNYVVPLDAAPSGITRPLVEILRDLNKRVPDAIVRPSSRRASASDPVIPWYHANRMLSFYAP

SEQ ID NO: 48922 - protein, 262 aa, Zea mays
  Coding DNA Sequence Number=SeqID_5547
  Gene Ontology: Mol. function=RNA-directed DNA polymerase activity; Biological process=RNA-dependent DNA replication
  Homolog annotation: Hit_ID=O48967; Match level="QueryCoverage=35%, HitCoverage=19%, E-value=7e-18, Identity=51%"; Hit description =Putative uncharacterized protein
  Subcellular localization annotation: CTP_CleavageSite=59; ConfidenceScore=5.31e-01
MCLAQIAQPTVGPADRWLTGQSGAHRTVRGSGATTQGSGKNKKKNRGHDRPQSGAPVAVAATGGRDERGKRPRQQGSDSGSCPVHSNSRHCASECREILKLVKRISEWREQASRDGSPPHRRPGKEKVDEGDLAAGERDLWYQTPEQVLKDIITGDSDSGDDDDRRKKLPAMYRFMAIAHYWYLVLKMSSPAGVLTVQGDRPAALTAIEKLHALAAEAARPDDGGRDPSTSCTKTPAKVPKVQPAGADDVPVKTIRLSADSS

SEQ ID NO: 48923 - protein, 145 aa, Zea mays
  Coding DNA Sequence Number=SeqID_5548
MRKWEQELEGKASDAALAEENLKAKEQSLDRREADLARRETDLTFWEEMLTQGGEMVAEHELEAEERERTLEEQIHQFNTAEAAPAPRRWRPPGRPLKIFKRSTVPGLAHRRVGRQGKHDTGAARDEPPSQCWSCQRRSLMRSRC

SEQ ID NO: 48924 - protein, 20 aa, Zea mays
  Coding DNA Sequence Number=SeqID_5549
MARRWPGATMADLRDCTEDG

SEQ ID NO: 48925 - protein, 767 aa, Zea mays
  Coding DNA Sequence Number=SeqID_5550
  Subcellular localization annotation: CTP_CleavageSite=44; ConfidenceScore=5.45e-01
MNRHQHSRCHYKRNSGSTSAGTNNPPRWRACGATERRRDSRWLTAARSGSSDNDFRSGRPNSSSDDLRADAAATRPSPASPPKGRGHAEGRRVGGQSAGGADYLVGGETSSGCLGGRWHRKQRRNRSGRRARHAAAASATNSERPSPRSLREGAGRCPRGDQPQLGALPSPALMMNILEAEGGAEAAARLASPHHGTGAGADRVFSNTLQGPPPTTRGLGPTRHASWPKAEEAKPPCAVRVTAQRLQALLHFPPDQRVKGRTAMQAACNRTKGRTLSTSTRPAWRPRPTRHVTGAPVTTCEKLHRHSRQYRAFSTAETVPRLEATLRMARQSQPSTSVTGQSAAGEGATVDTARNGPAIMAVEGGRKQQSSRQQAHVPSWDSERALSHSVKTTGPCSVPRTARARTTAAPRTTRPVALTLRQDRRHLWQATLHLRHDDRVKKGTGKGDTPKGILLCEGSRPRAPLLIRGSKAGPSEGFNSCLRALGLRAHYSLEVRRPAPRKGSTAASGHSGSAPTTDQGFVGWPPKGSDSRLRARRARDDPGYVRYITKARATLPSAACVAPTAVPLDRVRLTAAKFGLGRHRKLRLARPQGSAPVSASDDGLRLARPQGLGLSLGSRRRRTPPRPTPGLGLSLGSGRRRTPPRPTPGLGLSLGSGRQRTPPRPEPRARTRPWSSDDGLRLARPGARTRPRPRKTDSTSTFGGASASPDPGLGPTRHTGGGIITLPLTSSGYGNKTGVPSGSPRKKIMMPPACSMNDGALSPTSQE

SEQ ID NO: 48926 - protein, 224 aa, Zea mays
  Coding DNA Sequence Number=SeqID_5551
MQGHSVPTHINRPHRFPVSREGLTALAYNASLTPTGRRAVTALAGPPELALVLDLGLPPEQLLAPARGCTLRQQDYSLSKCNEHRWSELLGPRAQAAEVAGDVCSGQNMAARFNQRVRGASRDDTEAIRARNRKMAKGFTRSTCAGGFLNSGERDLASPVTRALGSSLSQAHGLTRKLSGCLNRTEGDWKGVGHGGGARAALAGREEVAGGNGWLGRVRRSTEE

SEQ ID NO: 48927 - protein, 51 aa, Zea mays
  Coding DNA Sequence Number=SeqID_5552
MEIKGRGMKDMNKDCNLADGEYILVPEQGAAQEVAPDPAPEPAQEDLPATA

SEQ ID NO: 48928 - protein, 151 aa, Zea mays
  Coding DNA Sequence Number=SeqID_5553
MVTSSLMVGESEPGCGLYPSLSLKDFHHQGWGGECAEIGSTPAWAVARSFPSVIGGKGGCRPWRRQLQRAWLSDPSGIGAALGAGFRHGSWKRVFRRRDSQGRPRTDLQLYGLLPVLAVAEPPELFQLKCLSHASGARIIDVVGNEEMGKA

SEQ ID NO: 48929 - protein, 134 aa, Zea mays
  Coding DNA Sequence Number=SeqID_5554
MRKKHGSVPKLHTCSGLDSHNEQKHWHSKCHYKRNSGSTSAGTNNPTRWGGPAEQQKTDERRAVARSGSGDDDDFCSGRPNSGSDDLRADAAARRPPPVPKLNSVIQTLSQRSGMFTLIPNSNPNGPIDKIVSN

SEQ ID NO: 48930 - protein, 551 aa, Zea mays
  Coding DNA Sequence Number=SeqID_5555
  Homolog annotation: Hit_ID=Q6JAD6; Match level="QueryCoverage=100%, HitCoverage=78%, E-value=0.0, Identity=84%"; Hit description =Putative uncharacterized protein
MPRTKNASASGGGDDEDPRRPFRQVKGKTVYLEQQEGRKKRRSDREARAAAAAQAALGDQPDVPSDQIAFRARRLASRSRSSTHTSASTPPPTLPAPVTPIAPSTSTAIPTTSTTPASTASPAPAPASAPPVPPPRFRERDETEVRPLVSDPRLFDLQRATAARVRRFRYVPVESWLPAQRDPAAGVLFSTRIQESFFRAQMSAQIALRVHRLLDLPAFLLAAGAESEAHLTYLPGLLSFLTISGRYVEEWVRVFYASVWIDPDHHWMRFRFEREDVTITASQIRQLFGFPESTTRLHSPCYGTSDPPRRPHGGVAPGTAHVAALFRPPFTDGSRRSPADFTTTAKYLYELVRRTLLPRMGYREATTHIQLWLLGALVSHSEFDVVDFLICEIEDTVLDGIRARRQLPYAHYLCHIFAQLIQPPRFQSTLEASRLVFGSYRPAPEIPVPAYAPVFDTQAEDAALRQFDTQGTAADDDDDDDFGIPPPPPMPPRSHDHEAGSSSAAPATPQAMDPALASILQTLTQQQAHLAAEQTRLSDRMLSMFQNMQDR

SEQ ID NO: 48931 - protein, 79 aa, Zea mays
  Coding DNA Sequence Number=SeqID_5556
MAHRTVNSSLSGAHRTVRCGVRCATKIQLQTLRSRVSGKLYADGGYQLRIRSLEGTLIMVPDKRIQNNRSPFKPQIVFL

SEQ ID NO: 48932 - protein, 547 aa, Zea mays
  Coding DNA Sequence Number=SeqID_5557
  Gene Ontology: Mol. function=binding
  Homolog annotation: Hit_ID=A2WL55; Match level="QueryCoverage=80%, HitCoverage=22%, E-value=1e-105, Identity=50%"; Hit description =Putative uncharacterized protein
MAMPSSTTAALSRLVDRTRVPDPTLQRHAVGAVFRHLLSLPAPLPAAAHDATSALLASPHPAVAAHAAASIARLTATRPDLLPSDVALPLLIAPLAASPSPLLASCLVKAVSALATCALRSGSRFPAHDHPFIQALASGADGARAELMRQAAGMVADRVDWVVKFLRPFVMFSVVRKGDAAFARDLIGALAAAAVAAGKASVAIPVLKMLQDSMLHFGRGDDQEVRLWLSSAECLVDAYVVLLRKLAHGQMICSGILLHGVILWCYYIISLPTYDAQASSATLMETLLSQYSFHQKFLGIDSTIFGLSKHLFLVQKDLGLCYIPEISVVLSSLSYSLTGLEFEHEQLAALKLLSFLIDWKYENVLDSKEQTHHVSVELLCVLAVINLTISPSKSVKAVAYHVLSRFSLFVLDLPASHSSEEQDISTSYHISKPALLLPKLLHHLWSKRGGDTENPNVTGGDTLTDEVQVDLHVLRVSMLHEIGEVDHAGVVVVDEDDTLEGVVELLEKLAQPGGLCHTVGHSAVLGLRAGAGDDELPLGGPGDEFGA

SEQ ID NO: 48933 - protein, 412 aa, Zea mays
  Coding DNA Sequence Number=SeqID_5558
  Gene Ontology: Mol. function=binding
  Homolog annotation: Hit_ID=Q8LQU3; Match level="QueryCoverage=13%, HitCoverage=2%, E-value=3e-17, Identity=78%"; Hit description =Putative RST1
  Subcellular localization annotation: CTP_CleavageSite=26; ConfidenceScore=5.03e-01
MSNALPRGTAPSRAPPCGTAPARLKLASHKQPRGIDAKGQLRPTTPDLGSRASAEHLPGRCGELHPMNPPPVELPLWNLLFSGCGSTSREPRRPNSPGPASDLLWRRRIGRGGGGEGAPARVAARVARILCDQVPVSTPQVVVNIALVIGALALIVPPTAHLVVSSVSDFLLKWLLQYEHEHKQCPGKRCQDVTDPMPSLKGKCALGPFLSILVIECQRKCFCVDLCNVVDKVQIMSKGKDQLEMSWLEQPRLCSVWEHRTVRWCTGQCPVRQAGSCELATLGISSAAYGYNSPDCPMRTGLSGEPTVGRANGWLRDLRKTRGRANGREGAPDSVRCANGSQAPTVDYITEGKKSAPDSVRCAPDCPVRQATEGKICLLGMLSTAPSCLGAIKGTPRRMEEYTKYSQSIPKH

SEQ ID NO: 48934 - protein, 100 aa, Zea mays
  Coding DNA Sequence Number=SeqID_5559
  Homolog annotation: Hit_ID=Q8S474; Match level="QueryCoverage=39%, HitCoverage=7%, E-value=3e-08, Identity=51%"; Hit description =Putative pol protein
MNSILGDIHKGPYRVEDTLRDSDWVLAMQEELNNFTRNEDVKPIKTPMGTNGHLDLDTGGSALEGLVPIEESTKDGSLSTLSLSQPIPKIGELFFFSRIT

SEQ ID NO: 48935 - protein, 230 aa, Zea mays
  Coding DNA Sequence Number=SeqID_5560
MLETKGKETQLYNTARVCLGPGGRRKRTLQDNPILQAQILTAEGSSSTLGIDDNFGKGRPSLGRRRGPRISTLEDDVITTPGPMPLGSSPGIRPEQAARPVTPGPRPVTFQGRQSGPSRRLGRSPRGLGQLPSKDVSPTRGLGWSIPASVPLTDDPARLRPTRFSFRANSTSVHVDAATPGLSSPKSGRGVPLTKLEKPRTTRPTEPRDSYATGIRIPHSSPVHEAIHAW

SEQ ID NO: 48936 - protein, 259 aa, Zea mays
  Coding DNA Sequence Number=SeqID_5561
MVGESEPCCDLGPTLSFKDVHHPGWGGGRAEPELYLPRGLVGHPLPRRSRERALAGPAGGSDFDNAGPVDSRRRQPQRVGLVGLAPGAPSRAEGGCRVVCTGGPPKMSRAARAAFVFWGGPAFAPVQCPRGEVGALLVREDPSGDLPAGWRPLSSVPRRRRLEKSPSPTGSPPPSALRASGSLYLSSPLECRRGRGQGCSGVRPEAIAAAVWPPVEGVVVAAAGAGEGEPFVGLLLLRRPLHRRVGLFVPAEAEPEFRL

SEQ ID NO: 48937 - protein, 261 aa, Zea mays
  Coding DNA Sequence Number=SeqID_5562
MAERYQLPRSCVPPTTRRKDGGSPPSGGLEGGKTRCIREREDMVAFQGGHPPFKGGSPYSRPQPSLAESSPTHSKVLPYGTLGHFRDQQERSCNRIPSEGGIEPSDPVAREPSLAEHPQRLGGCSRKPGSGRTVDSVNIPARELGTRPYTRATASSHEGTTRPAEALREALRPRRSETTPPMPRGLHPAGALARPHRNKTQPRKAGPLAKKVRQKPPSECKHSLRGSGLLSGTIIRGTLKAPNSQLVTPISTKLQRPDGCD

SEQ ID NO: 48938 - protein, 212 aa, Zea mays
  Coding DNA Sequence Number=SeqID_5563
MDVLTTKRQCSEVQARIHNLIQQEKERLQTLEQQISELQAHQEPSHPSHCRAGQGNFGEVVVQSLHPRSPSVPPRGVPTLREICKVLKVQHKPIKRSKLGFKRKEQKKPKRTLIWRTGLSGVPSDSVRCLRPYDFKLATFGFLESRSAIIHRTVRCASGATTIERNSQLQRSPANMNSAQTVRVESEQRQKAHRTVNSACPVWHRTVRCPKM

SEQ ID NO: 48939 - protein, 99 aa, Zea mays
  Coding DNA Sequence Number=SeqID_5564
MEVVEQNLVRKMDSKWKTSVAPNVFMVLKDDIIDHDLMARAEARGDYSRIYTDRVPANPELLSSSRPSFRRMPSPSGVYNCLARHIRALSALNSDVSLH

SEQ ID NO: 48940 - protein, 140 aa, Zea mays
  Coding DNA Sequence Number=SeqID_5565
  Homolog annotation: Hit_ID=Q2RBI6; Match level="QueryCoverage=25%, HitCoverage=10%, E-value=5e-12, Identity=86%"; Hit description =Expressed protein
MDAPALAASAMEALAAPAPGPDPVRRGVDLEFDPAVVLARMVYISAPASELYDFLYRNLFESLERESCVLFRLTMYARCTKKNFGRYHVSEPPVEHLRDSLYKTERDVMKVISPAMFGSEGRCPESKNEATQYGLDMTEQ

SEQ ID NO: 48941 - protein, 215 aa, Zea mays
  Coding DNA Sequence Number=SeqID_5566
  Homolog annotation: Hit_ID=Q6JAD6; Match level="QueryCoverage=57%, HitCoverage=16%, E-value=2e-12, Identity=40%"; Hit description =Putative uncharacterized protein
  Subcellular localization annotation: CTP_CleavageSite=65; ConfidenceScore=5.77e-01
MALMLQHSGISAPPVQSAPPSSLHAPVVPSILSAPPAVTSLLRPVTLAFTSPVLSSVCPQPPVPPASAVTTTAVAVSVTAPAPVAPAARPASESVPAPASTADPGSETDSDPPSAARTRAQPQKTTNSRFARPQGSDSALASAYGLRLARPRGSDSTSATEDRLDLGFGGASTSPNLGRRPATSTGGTIITLPRADSGHGEQDRRPIWLAPPDSQ

SEQ ID NO: 48942 - protein, 257 aa, Zea mays
  Coding DNA Sequence Number=SeqID_5567
  Gene Ontology: Mol. function=kinase activity; Cellular component =ornithine carbamoyltransferase complex; Biological process=amino acid metabolic process
  Homolog annotation: Hit_ID=Q6QP54; Match level="QueryCoverage=42%, HitCoverage=39%, E-value=2e-20, Identity=52%"; Hit description =Putative kinase
MGRREAERKGGRKVAGDERERGGNPAAFVFVPRPGRPESAWGRVMMAPPVDVAGLRPRLGDVEAPPRSSLSSVAVVESEPLGRARRRPSAEARAESEPWGRAKRSSSSSGAEPKFEPWVGRSGVRRLPGLSPSPSPGSGGAEFAVFRGLARVRALGRAERSSSSSGAEPKSEPWVGRSGVRRLLGLSLSPSPGSGGAELPMVPEVGPDCLSALLCQVALQSERRRRRCLSVRPLYADGGYQLRIRSLEGTPNYGPRQ

SEQ ID NO: 48943 - protein, 315 aa, Zea mays
  Coding DNA Sequence Number=SeqID_5568
  Subcellular localization annotation: CTP_CleavageSite=3; ConfidenceScore=5.03e-01
MAAAAEVAGESPGTRRPAGSPESLGSVSLVVRGFSCLVKGTPRPLFDELRPGVAVLARAEVELARKEDLVGRSLAGSSVSGTDAGVDLPRPRAGLMSSGDSWPRPRGGQPSRLLGPDSRRRPGRRWPGRDDEVVLRSGDPRTASPSEARSDLAEGVADAEEELSNVKTCSVRGITYPSVSYLSQKVMSENFGDDKRPVLGVCVAPGCLQQGLGVLRDGRKPTSVRGLPVSIRRDPASLLLDAQCLTLGGRGYLGPNRGYLGPSRGYLGLGRGCLGLGRVVDLDGGLMQVSGEGFRGNRYSPRGGTEAGLFRRGAG

SEQ ID NO: 48944 - protein, 511 aa, Zea mays
  Coding DNA Sequence Number=SeqID_5569
  Gene Ontology: Biological process=double fertilization forming a zygote and endosperm
  Homolog annotation: Hit_ID=Q9LWP7; Match level="QueryCoverage=100%, HitCoverage=100%, E-value=1e-150, Identity=59%"; Hit description =Putative uncharacterized protein P0451C06.8
  Pfam annotation: Domain name=DUF641; Domain location=107-246; Score =227.2; E_value=3.9e-65; Accession=PF04859.3; Description=Plant protein of unknown function (DUF641)
  Subcellular localization annotation: CTP_CleavageSite=34; ConfidenceScore=5.14e-01
METQVAAPPHQQQQQQQKAANLARTFTKLLRRKRAEAAAQGGAPEAPASVAPGDALEEERTEPPPAIPSLSKLKLSGNLAAAYSFDAFFRNAAEKKAAAAGGGAVRQPAGAGEVTLEAAADALLANLFAGVSAVKAAYAQLQLAQFPYDAEAIQSADAAVVAELTRLSDTKRRYLRDPAAAARGAAAAGHTALAAHAEEQRHLLKTYQITARKLESDLRARDAEAERARSSLTGELRAERALEARLHPGRTLASLDELHLSGLNPTHFLTALRHTVKSIRSFSRSMLSSMQSAGWDLGAAAAAVHPGVPLRRAGDAKFVFESYVAMKMFANFHRRDFNFSFLGEREFYERRRFFEEFTELKAEPASAFLDARSPRWGGLGKFLRAKYLSLVHARMETAFFGRLEQRGIVSAGPGFPESSWFADFAEMARRVWLLHCLFFAFDGGAEEDGASIFQVRTGARFSEVYMESASDGSAGDDAEDRVVGFTVLPGFRVGRTLIQCRVYLSKPGRRP

SEQ ID NO: 48945 - protein, 344 aa, Zea mays
  Coding DNA Sequence Number=SeqID_5570
MAANVCARSAARPAWRARGAWPQRGLFVPARWRDCLALACGPPAPTLRSLGGPARHDLTPPLAPPGPIRGLPVVARDRISRRGARPTQLGRPGAAVRDARSATAHGRPPARPARGVRESAFIPFVSFGDLDNNTFKGLTKRIRVERDPALCGRLNEEVGHLGDVDPRAIDLAMRIAERMFLKMKEDEAKNKIEEENDRWRPNDESTSSQGSSFKSTSHMCFIANGSDSESKSEDEEEQESDSEDEDDLQQFFARLSKKHRMSLLKLMKRAEEQKEMLHKQEDFLIRKMEDLEKLTKEHEKLKCSHDDLVQRYEDISIEQIKVPHRKNEALENELKRFYLALERI

SEQ ID NO: 48946 - protein, 219 aa, Zea mays
  Coding DNA Sequence Number=SeqID_5571
  Gene Ontology: Mol. function=metal ion binding; Biological process =metal ion transport
  Homolog annotation: Hit_ID=A2Z0E8; Match level="QueryCoverage=73%, HitCoverage=99%, E-value=9e-52, Identity=67%"; Hit description =Putative uncharacterized protein
  Pfam annotation: Domain name=HMA; Domain location=32-92; Score=46.0; E_value=1.3e-10; Accession=PF00403.17; Description=Heavy-metal -associated domain
MGGGTLEYLSDLLGGGGGRRRYKKRKQFQTVELKVRMDCDGCEMKVRNALSSMKGVHSVEINRKQYKVTVQGYVEPHKVVKRVQATGKKAEIWPYVPYSLVAHPYAAPAYDKKAPPGYVRRVDAVMPVSSTYGGPAAAAGPPQEERLATMFSDDNPNACSVIITTVKRYKSDGSIMSDGCLGDRRTYAYVRWPGEYPRAGRRTVGHTLMSDGCQISRRT

SEQ ID NO: 48947 - protein, 453 aa, Zea mays
  Coding DNA Sequence Number=SeqID_5572
MGSTRGSFVLSSLEERNFAEVGTFQPSLGFKDFHQAARLHPLAGGRAEPELYLPHGLVGHLLLQHLGEKALTGLAEGADFDNAGSIDRKRRQLQRVWFAGSAGSGAASGATSHRVAPRALGDRPRRRALLGRRSCSWDVLPLLRYDASTRRSVLARPGGPERGFAGGQTAAVVGAEVVAAEEVLVADEIAATIRAPGLRLFGFDSLSSPLEWGRGRGPYRSSVCPEVIAAAVWPPGAEVVVAAAGAGGGEPPGVLSPHRPPMWGIESLGLVSLAARGFSCLVKETLGRSAMSRSRRQRCQHGQRQSWLEKRLRWLEPGRAVHWRDQRRSRVAEAMSQADVLGGQLAEATERPVESSARAGYGAVLTSFFEVEILRPCCRPRPGRIPPKVESVPRVLLLPLLMSDPAGTVYLYVVVDLALTVSQLVRSGLQNLGDDEWPFPGRRELVTPSGVLS

SEQ ID NO: 48948 - protein, 266 aa, Zea mays
  Coding DNA Sequence Number=SeqID_5573
MQAACNCTKGAHPFDFDASTMGPRPTRHVNGALVTTCEKLHRHLRQYRAFSTAEPVPQLEATLRMAQQFQPSTSVTGRSAAGEDATVDMAKSGPAVMAAAGGQKQQSSHPQAHVPSWDSERALSHGVKTTRPCSVPRMARARTTAAPPTTRPVALTLRQNRRHLWQAKRATLHLRHYDRVKKGDTPKGILLREGSGPQALLLIRGSKAGPLEGFDSRLRALGLRAHYWSEVRRLAPRKGSTAASGHSGSAPTTDQRFEGWPLRRVR

SEQ ID NO: 48949 - protein, 331 aa, Zea mays
  Coding DNA Sequence Number=SeqID_5574
MKVHKKHICGPSYIKEHDMFAVDFFHKITGLTTEFVVVNTPLRVVEVIAYLLAGLPIDYDPFVAYITIKAELLFLDDMFVHLVVYNFNTWPYYRCNTLPLPTSWIMTTPLMVVSLVTMATVDTLMVILAAITLVLNARFVASLATHHHQSPAADARAHSSSFTQTAPAPARPSPCRSAALPEAAVEAAPEPPRPRPPSRPPLPDARAPSRRRGRPRPARGRRRGRPRPALRRRPCPTPARLATPPPRPALRRRPCPTPRAPSRAAAPARAAPPLRHAATAPGRARDAAPTQLIPVGLGNRRELTNNSRRPAADGDKRIPDKGRLAAENRRE

SEQ ID NO: 48950 - protein, 576 aa, Zea mays
  Coding DNA Sequence Number=SeqID_5575
  Gene Ontology: Mol. function=GTP binding; Cellular component =intracellular
  Homolog annotation: Hit_ID=Q69NK1; Match level="QueryCoverage=79%, HitCoverage=88%, E-value=1e-124, Identity=70%"; Hit description=GTP -binding protein-like
  Pfam annotation: Domain name=MMR_HSR1; Domain location=378-468; Score= 22.3; E_value=9.8e-06; Accession=PF01926.14; Description=GTPase of unknown function
  Subcellular localization annotation: CTP_CleavageSite=55; ConfidenceScore=5.66e-01
MKSRGSLRSGKPAKSPTNSSSCAAASSSSGRRLWRWASEAGRVHRAWGRCVNVVWAETKTSEGDGGSEGERGGRASEAGHGHRVKVGSDVLECSASAKTSKPFSILFRRHLCSSPPATPPPTSPPPAVVSSDLPAVHVNEVCPGCGIAMQSSDPELPGFFLLPSAKSPNYRARLAPVTADDTRISASLKSGHLREDIQPSGGDKPAAAAAEMAEAKGEGKVLVCARCHSLRHYGRVKHPDAERLLPDFDFVAAVGPRLASPSGARSLVLLLADASDFDGSFPRAVARLVAAAGEAHRADWKHGAPANLPRALLVVTKLDLLPTPSLSPDDVHAWAHSRARAGAGADLRLAGVHLVSATRGWGVRDLLEHVRELAGTRGNVWAVGARNVGKSTLLNAIARCCGIVGRPTLTEAPVPGTTLDVIKLDGVLGAQAKLFDTPGLLHGHQLTSRLTSEEMKLVQPPIGQERVKELGKWVRKQFKVSGNSWDTNSKDIAIAGLGWFGIGLKGEAVLGLWTYDGVDVISRSSLVHERASVFEEAGFTVSQIVSKADSMTNKLKSTKKPKKERMKRTSPTEPEA

SEQ ID NO: 48951 - protein, 190 aa, Zea mays
  Coding DNA Sequence Number=SeqID_5576
MGPRVARKRSSWPHEEQGEVRGRVAHRLRGKTVEEVGGSVQGLCPVAGRERRLEEEAAEHIGGGADHTFGSAVLCRGVGARESQLDAMSEEERARGVVIELAAIITLQSTDRATKLSGYPGEEVCEGGECVRLQPKRESPEKMGKIIQNHQIVFITGKTEYRGGPKITVNQVKSLLSPRRSSKWETSMSA

SEQ ID NO: 48952 - protein, 139 aa, Zea mays
  Coding DNA Sequence Number=SeqID_5577
MEILHLPAHLKHLEEATMIQLVLLLVKIINGAKDFANLKLPIFIARPDRVEDGTSPKRCPRGRTRSGNEKSVPGQDGDDYGKATFGMSEASMDRLFAHASKQWETVKRSVDNHVDGQVSEPETSTKLIRRNYSGNLSLN

SEQ ID NO: 48953 - protein, 143 aa, Zea mays
  Coding DNA Sequence Number=SeqID_5578
MTVLPQTGMHGGGAAPGLLAQRWRGLLAGEWCDSRPRAPGGSTTKQVMELPLDAQSSGSRLDVDERVEQCRAVAGVLQVLARTSVALVEDAHCAKVVPPRVVLSRERLEEYMVSCVRTLTHRALGPVLHVGLGPRSRAPKMLG

SEQ ID NO: 48954 - protein, 119 aa, Zea mays
  Coding DNA Sequence Number=SeqID_5579
MARRSSSRREARKAASVGSRCEEMASTSACAAGERKECGGGGGVWCDHAARGEVEQERIERDQGAVASARRTAYGRGQRELGCSRGRGRGGREATHVRRTKNIDVGWTVEIEGWQNGRT

SEQ ID NO: 48955 - protein, 26 aa, Zea mays
  Coding DNA Sequence Number=SeqID_5580
MMYQEKEKRLLFLTLALIYSSKGGNN

SEQ ID NO: 48956 - protein, 98 aa, Zea mays
  Coding DNA Sequence Number=SeqID_5581
MQDVARRVLLQYCSLFSGVADGLDLKYYPRRPTGSAGGVIVSPVGEGNHRLNNMVNLVAVLNTELDQSLDVLGKMSENRRRGGRRAHQEQQAPQEEAA

SEQ ID NO: 48957 - protein, 725 aa, Zea mays
  Coding DNA Sequence Number=SeqID_5582
  Gene Ontology: Mol. function=receptor activity; Cellular component =integral to membrane; Biological process=translation
  Homolog annotation: Hit_ID=Q2R2X1; Match level="QueryCoverage=88%, HitCoverage=95%, E-value=0.0, Identity=85%"; Hit description=Lung seven transmembrane receptor family protein, expressed
  Pfam annotation: Domain name=Lung_7-TM_R; Domain location=220-494; Score=390.1; E_value=3.5e-114; Accession=PF06814.4; Description=Lung seven transmembrane receptor
  Subcellular localization annotation: CTP_CleavageSite=67; ConfidenceScore=5.28e-01
MTVDKQRQKAQAKAIKQKISNTYIKKAVTDQQAPRARPPSSPEAPSSLRFRLPGRLPPMDLRRLAVFAAALAAGWWSRGAEASIHTYDREPFREVGNAFLLSGGSEGIVADGADPAAPASSFIKGVARDALDIWTRAEELDADGDAILFEVVDRDNIGGSAYGGQRSICCTPDLAKLEGCKQGEVIRRPSSDDPDWPFVLDTHFSANHLSVKLEDEPVRITKTGMYNLFFISCDPKLRGLTMSGKTIWKNPGGYLPGRMAPLMKFYVLMSLAYLLVMIVWFSQYVRFWRDILPIQNWITLIIALGLFEMTLWYFEYLNFNSSGVRPVGITTWVVTVGAIRKTVSRLLILSISMGYGVVRPTLGGLTSKVLLLGLTYFLASELLDIAENVGTINDISGKARLFLVLPDAFLDAFLILWIFTSLSRTLEKLQARRSSVKLDIYRKFTNALAVSVIASVAWIGYECGKLRQRRGCRQRLAVFRLWHMASWRGVKLSKWQQWRGCRLQAAVRCYLAQRLASILRIEQHTTHVAARPSEGLSDPPLQFTVLIHSHVDNKDMSGWVALSPLELAVAQAVGLVSYHVLAFAAWTRLFPWDPGSCTRVGPMRRGEVIVSVIVRLQLEDELHVQVYFKATDPFSERWQSAWIITAFWDVLAFVLLLVICYLWAPSQSSQRYAYSGEAADDDDEESQSLTKGDGEVGMVKIDKDRNAGVSSAFGLEDEAEEDKRE

SEQ ID NO: 48958 - protein, 103 aa, Zea mays
  Coding DNA Sequence Number=SeqID_5583
MMSSGNSWPRPRGGRPSRLLEPDSWRRPWRRWPGCGADVVLQSGDPPTASPSEARSDLAEDHWVCVLVIDDLDHCCVKKFSENTGGEAMPVTWGCWTRNSLEP

SEQ ID NO: 48959 - protein, 170 aa, Zea mays
  Coding DNA Sequence Number=SeqID_5584
  Gene Ontology: Mol. function=nucleic acid binding
  Homolog annotation: Hit_ID=Q5NKQ1; Match level="QueryCoverage=90%, HitCoverage=23%, E-value=3e-15, Identity=34%"; Hit description =Putative uncharacterized protein 9C20.4a
MKVVNHASMSKSGSDKALDAMDELLEMHVRLEPDIGCGDAGGASTGEGNHGEEETVGNDEGEHVSQCDNEEHVLARTLQQDGSRNIDAEHQSELQMTLAGNVDFEGARYGDVRKENRVKLASLANRKSGRPPGSRNKNSTMAPQWNETLTSKKDKMVDSRDHGSDDDYVT

SEQ ID NO: 48960 - protein, 262 aa, Zea mays
  Coding DNA Sequence Number=SeqID_5585
MAERYQLPRSCVPPTARRKDCGRPPSGGSEGGKTQCIREREDMAPFQGGHTPFKGDSPYLRPQPSRAESSPTRSKVLPLRHGGWAPRVMQAGPGQKKPNRCAQGMQLPNGYKHSSTFAQTSGPTRHATGSPVATCEQLHSPSRHYRASLTAKPVPRLEATLRMTQQCQPGATVNTAKDGPTVMAVAGGQEQRSRRQPSLRPIQGQRENPLSRREDGAPVFRSSNGSHMRNGRLANHSPRRINSAVGQAAPQAGEASDASPSP

SEQ ID NO: 48961 - protein, 411 aa, Zea mays
  Coding DNA Sequence Number=SeqID_5586
  Gene Ontology: Mol. function=cysteine-type peptidase activity; Biological process=proteolysis
  Homolog annotation: Hit_ID=Q5NKQ2; Match level="QueryCoverage=65%, HitCoverage=33%, E-value=4e-78, Identity=52%"; Hit description =Putative uncharacterized protein 9C20.3a
  Subcellular localization annotation: CTP_CleavageSite=51; ConfidenceScore=5.03e-01
MAWRSRALLQRVGRAGKDGTALAQGRSLPPAWTLVTPYCKRTRPGRGANTKAAGSTSHACLPPAASPPFAFRLAPTHLGWGTRRQFTRRSRDPPGFETPTIIFMNILLMPHKCFVYVVFVHLSIMFLEPYNIIEAAASIMWKVDRLPTNPKRLIIESSQECFSVDIPRSTDTGDPPNTRCDGDPPQYRKRGAAADAKKLPIPSVDDDDDFEPQKRSRLNIRYNPGDVLASIQIMNERQRRAIVRKGFSSILDMTIDAIGCRTHLCWLMQKLDPRDMTLCIGLDKEQKITKETVHPILGLPNSGGGKPLNIDEANGTANLRSSLGISKDEFVISKLQDRLRLGNDDELSIRCFLSSSTGCFSQRLASRYLTTRFLPTEELDRFPHIDWCHLIFNDLCEATQKWHNRSTNNVW

SEQ ID NO: 48962 - protein, 233 aa, Zea mays
  Coding DNA Sequence Number=SeqID_5587
MRGAIITRIVERARWDADLVPRSLSQLGVGLGEVEAPPRSRSSLSSKVEVESEPPGRTRRRPSAEARAESEPWGRAKRSSSSFGAEPESGPWGRAKRSSSSSGAEPESEPRGRAKRSSSSSGAEPESEPWGRARRSSSSTRAEPESEPWGRAKRSSSSSGAEPEFEPWGRAKRSSSSSGAEPESEPWGRARRSSSSSGAEPESKPWGRAKRSSSSSGAEPESEPWGWARRSFL

SEQ ID NO: 48963 - protein, 227 aa, Zea mays
  Coding DNA Sequence Number=SeqID_5588
  Subcellular localization annotation: CTP_CleavageSite=71; ConfidenceScore=5.38e-01
MNKNTRDTRFISRFGHTTKVLKVHTQPIKRSRVGFNKRAKGQPKAPEDSNSNLPPSGISRGTRAIIHRTVRCSKEEWPQELASFGSLQRLVHYNSPDMSGVHRTVRCNPGATAIRRQRLPATHLMRAQRAQKAGEPIPAHRTLNSSCPVRHQTSRRAQKSELQRSDSNGTGDVAGAPDMSGVHRTVRCAIVQTAPPTATFGGWGYKYPNHPTIHCIQVFHFSTTYKS

SEQ ID NO: 48964 - protein, 116 aa, Zea mays
  Coding DNA Sequence Number=SeqID_5589
MGANGILCDSTHDAVTKECVAPGHWELAAAELSSLGNDSPSGLVPDSGNMCNLLLALELLGCFGWLLGQEGEVPGCSGVVLLLLLLLRKLPLILLLLVLTLTLVLVTLLELLRWVA

SEQ ID NO: 48965 - protein, 54 aa, Zea mays
  Coding DNA Sequence Number=SeqID_5590
MSGDHAEREIVTGDKLASSGRTLSRESSHKHKEESSSSNKTHQKGDKKKMMKKV

SEQ ID NO: 48966 - protein, 227 aa, Zea mays
  Coding DNA Sequence Number=SeqID_5591
  Gene Ontology: Mol. function=RNA-directed DNA polymerase activity; Biological process=RNA-dependent DNA replication
  Homolog annotation: Hit_ID=Q8S463; Match level="QueryCoverage=34%, HitCoverage=4%, E-value=1e-09, Identity=45%"; Hit description =Putative prpol
  Subcellular localization annotation: CTP_CleavageSite=49; ConfidenceScore=5.29e-01
MPHTNSSGTSSCGMESTNSSRYRTGCASHTGPPTCRLGGASHYLAGHTRARGEPSMFNPIPFQPSFDTISLTSLYADLPFPLGCLDSEEEDGLGIGLDFSRLRDPESMLQFLFTCDELLSDGSDGHNTDEGVYDPTRICFHLYHEEHDGGNQLSMPRENDVPPPHVGEAREPGEARTLQGFESSLCPEIGSGCRLGGVNMQIKIITVKLKTLLYSKIGSQHNEDCFE

SEQ ID NO: 48967 - protein, 134 aa, Zea mays
  Coding DNA Sequence Number=SeqID_5592
MGKPVPSLLMLLLSRDVYLAIHTWYQTFYQSTSFASNLIFTYYSMQYNGSSSLISCEKQTIRIEFYPCKIRAHRLGVQCLTDPDCRRAVTALVPTITGMGDHVSGRVRGKVCGQVHSSTRLTDLPYFSVFANFF

SEQ ID NO: 48968 - protein, 150 aa, Zea mays
  Coding DNA Sequence Number=SeqID_5593
MGKNKKGGSSLHHSSNKRKREPSPPSEDFGDSEYLEEEFSSESEGSPVYASPPMSSDDSDDSQGIAAEVWTYIRVVERSELEGSDESEISSDEENSSDSFEEESGGDDDDEGDGGDGGDDGGDGDGKGDDDDSGKDDSGSSKDSGKAPLA

SEQ ID NO: 48969 - protein, 83 aa, Zea mays
  Coding DNA Sequence Number=SeqID_5594
MPRWMDETIAPRKLDAAAAAMRGGRSWARGVVAGNERRGKWMDDSTEADGDDGAEVVGFCGGVGARRTVVRSWPRGGNWEGMY

SEQ ID NO: 48970 - protein, 34 aa, Zea mays
  Coding DNA Sequence Number=SeqID_5595
MTGKLKLSLSVTNTQAKITTQCGGYEEHDSQLPN

SEQ ID NO: 48971 - protein, 270 aa, Zea mays
  Coding DNA Sequence Number=SeqID_5596
  Homolog annotation: Hit_ID=Q6QP51; Match level="QueryCoverage=38%, HitCoverage=37%, E-value=3e-08, Identity=42%"; Hit description =Putative growth-regulating factor 1
  Subcellular localization annotation: CTP_CleavageSite=65; ConfidenceScore=5.08e-01
MSRLEATQRTTQQRQPGALVKAAESGPAVMAVAGGRAQQSRRQPGSRPILGQQESLLPRREDSARTTAAPPTTRPVALTPWRDTRRLWREKRATLRLHRNNRVKKRDRERGIPRKGSFSAKEPGLRAPPTDQGFEDWPSEGFNSRLRSRGPDTHYWSGVRRPAPRRVPWPPQATRAPRPLLIRGSKAGPRRVHSRLRHRARDDQGYVRYITEARAALPRGSRAALAKPAPAKPLTASTYQAESLGPDRAPGLRPVRMREQPDQPKHYARH

SEQ ID NO: 48972 - protein, 143 aa, Zea mays
  Coding DNA Sequence Number=SeqID_5597
MGKGTKRKHEPTPPSDEFGDSEYSEEEFSSESEGSPAPVSPPASSDDSDDSQGIAAEVWTYIRAVERSGLEGSDESEYSSDEEDSDGGDEGEDDDDDDDDDDDGDGDGSGSGRGGGDGSRDSTKGSSRGSTKGGGGGRGRASG

SEQ ID NO: 48973 - protein, 248 aa, Zea mays
  Coding DNA Sequence Number=SeqID_5598
  Subcellular localization annotation: CTP_CleavageSite=35; ConfidenceScore=5.19e-01
MASSSLMRRVFPSPKPPDGGPVAPLHRWSPRMATSGLMVGESEPGCGLCPSLSLKDFHHQGWGGESAELGGSAAGEIAGAGHGLTSNSTAFCPSLPHEFWRGRGPPGSSTRPEVSAATVRPPGAEVAVVAAAGAGDGAPFVGLPLLRRPSPSEGGCSYLRRGNRSSVCNGTSNAVSPVDYLNRFTKHESPRVKVTSEYEQRRSWLENGNLVGRSLAGLSVSGADAGVDQPRPRVGLAPLEDAWPRPQG

SEQ ID NO: 48974 - protein, 178 aa, Zea mays
  Coding DNA Sequence Number=SeqID_5599
  Homolog annotation: Hit_ID=Q6QP54; Match level="QueryCoverage=51%, HitCoverage=36%, E-value=7e-08, Identity=47%"; Hit description =Putative kinase
MALPVDVTRLCLRSGDVGAPPKPRSSLSSVAEAEPEPPARVRALGSGGAEFAVFRVLARVRALGSGGAEFAVFRVLARVRALGSGGAEFAMAPLARPDCLSDSLCRVALQSEWRRRRCPSVRLSGLLLSEAKASGEPELYADGGYQLRIRGLEALTPTVRLSLLDSLGLHQDHRVVPQ

SEQ ID NO: 48975 - protein, 41 aa, Zea mays
  Coding DNA Sequence Number=SeqID_5600
MAVMGSTSEKMYLCRADAPGHGQTVQLNQPDHLSEHQTVRM

SEQ ID NO: 48976 - protein, 413 aa, Zea mays
  Coding DNA Sequence Number=SeqID_5601
MSQQMRHASQQLKHAAAFADHVASGALTSEFTAERQRLEGRIERLGAQHTDAVRDKSAVENKSCRMAERLAAAEAEKEDLTHQLAAERRDANKACAEAQSAQAEAKLAWVEASLTCQRAEEMETRLGGLRDRLDKMEASTRAEVERTHTQLVDAYRELGVRTAPFEAPGREVGLRFLGWLQEELEVLPTNMMGLMSFASLNTCEGAMNALSRERCGHFEVFDQSDEGFERRIFQVEDPVLKPSAGVVFDRMWGPHDQETVRERSDRATDQMAHDEEVEDLGDLDSTLPEALRVEPAPSSDAGEGPAVTPALTGAGEDPVPCTALTGEDASKVVPTFGPVQATAAGNTDFVAASTVVLADDNLFGYGSECFESDGESESSFSWTEESSDEGLDYFAALDVVAGVFTACGGCRGC

SEQ ID NO: 48977 - protein, 155 aa, Zea mays
  Coding DNA Sequence Number=SeqID_5602
  Subcellular localization annotation: CTP_CleavageSite=62; ConfidenceScore=5.01e-01
MDLPAGATHRPTPWHPHTHALLASSVDGAKGSTQTNKKNKPGFKRKEQKETEVLPGLAHRTVSGAPGRIALELFTFGFLRRSSAIIHRTVCCDTGLSGAPAEQRSSARNGRLCKVNSANQMSEQTVRGAPDCPVSHRTVRCHMRTKPPTVDQLRP

SEQ ID NO: 48978 - protein, 75 aa, Zea mays
  Coding DNA Sequence Number=SeqID_5603
MGLGVCGSLCQVWVRPLGRSARHYGTGGYEIDDSGYDYGADKWYSFRLERHSNHCSGEDEAVEGDFQEFQDYDEF

SEQ ID NO: 48979 - protein, 340 aa, Zea mays
  Coding DNA Sequence Number=SeqID_5604
  Gene Ontology: Mol. function=protein serine/threonine kinase activity; Biological process=protein amino acid phosphorylation
  Homolog annotation: Hit_ID=A3BUJ8; Match level="QueryCoverage=32%, HitCoverage=19%, E-value=8e-11, Identity=39%"; Hit description =Putative uncharacterized protein
MAAHRWVLWSRSPSNAGVGDAASLCCLAGEWLAYGVGLAAGNAACCLTTRQRLQPRRKRIHSAASGSAVGRWARHTRAPAWRSPGDEAQHPVKLLLGDGVEVLDISLPDRTVRIQTKISWVEYAAEFNGSWSVPAPDGPLMVSTARNSFVAFGCNVLAKLIPYGTVLSYASTCAAACMNTPDVSSCSGVRCCQTSIASLGSDLPWYGIQVKHLEGETGNYYHRAVFIVDQDWFNRVEAAMASNFSTLFFGNRFYEQVVLVDSVPVVLEWSLNLIRDSGLLHLYHPKQIMCFIFMVLVLFSPHSPDIDECQLPDIYPCHGTCIIVPGTYRCLSKKTIRSLP

SEQ ID NO: 48980 - protein, 323 aa, Zea mays
  Coding DNA Sequence Number=SeqID_5605
MDRVFSNTLQGPPLRRWGWVPRVMQGGSEQKKPNRRARCVQPAQRLQATLHVCPDQRAKGRAAVQAACNRAKWAHFSDSQHAQHGGPGPRVMQPVRRLLRVSNCTATCATAAPPRLWNQYRDSRPPSARPSGSSLARRRSERRFAFAVMTASKKGTGKEGYPEKDPSPRRNQAPSPPTDQRFEGWPPGRVRQPPQIAGSKAGPRRVYSRLRRRARDDHGIPSEGGIEPSDPVTRGPGLANHPQLIGDTMFGAHRGQHGAFPPFSLRKGDAGAGLGAALANPAPAEPLTVSTYQPENLGPDRTPGLRPARMRERPDRPKHYVRQ

SEQ ID NO: 48981 - protein, 971 aa, Zea mays
  Coding DNA Sequence Number=SeqID_5606
  Gene Ontology: Mol. function=actin binding; Cellular component =cytoskeleton; Biological process=cytoskeleton organization and biogenesis
  Homolog annotation: Hit_ID=Q10L72; Match level="QueryCoverage=100%, HitCoverage=100%, E-value=0.0, Identity=69%"; Hit description=Villin- 3, putative, expressed
  Pfam annotation: Domain name=Gelsolin; Domain location=147-227; Score= 58.6; E_value=2.2e-14; Accession=PF00626.13; Description=Gelsolin repeat
  Pfam annotation: Domain name=Gelsolin; Domain location=261-337; Score= 34.5; E_value=3.9e-07; Accession=PF00626.13; Description=Gelsolin repeat
  Pfam annotation: Domain name=Gelsolin; Domain location=28-110; Score =60.2; E_value=7e-15; Accession=PF00626.13; Description=Gelsolin repeat
  Pfam annotation: Domain name=Gelsolin; Domain location=403-486; Score= 35.0; E_value=2.8e-07; Accession=PF00626.13; Description=Gelsolin repeat
  Pfam annotation: Domain name=Gelsolin; Domain location=533-612; Score= 24.5; E_value=0.00039; Accession=PF00626.13; Description=Gelsolin repeat
  Pfam annotation: Domain name=Gelsolin; Domain location=658-738; Score= 1.1; E_value=0.33; Accession=PF00626.13; Description=Gelsolin repeat
  Pfam annotation: Domain name=VHP; Domain location=936-971; Score =64.8; E_value=2.8e-16; Accession=PF02209.10; Description=Villin headpiece domain
  Pfam module annotation: Pfam domain module=Gelsolin::Gelsolin::Gelsoli n::Gelsolin::Gelsolin::Gelsolin::VHP; Domain location=147-227::261 -337::28-110::403-486::533-612::658-738::936-971
MSTAKVVLEPAFQGAGHKPGTEIWRIEDFKPVALPKSDYGKFYCGDSYIVLQTTCKGGAFIFDIHFWIGKDSSQDEAGTAAIKTVELDSMLGGRAVQHREPQCYESDKFLSYFKPCIIPMEGGFASGFKKPEVDKFETRLYICKGKRAIRVKEVPFSRSSLNHDDVFILDTENKIYQFNGANSNIQERAKALEVIQHLKEEYHDGVCAVAIVDDGKLQAESDSGEFWVLFGGFAPIGKKAISDDDVVLETTSPKLFSISNGQLKLEDAVLTKSILENTKCFLLDCGAELFVWVGRVTQVEDRKAASAAVEKYIIKENRPKTTRITQVIQGYENHTFKSKFESWPVSNTSGSASTEEGRGKVTALLKQKGVDVKGISKTSVPVNDEVPPLLDGGGKLEVWCIDGSAKTALPKEELGKFYSGDCYVVLYTYHSAEKKEEFYLAYWIGKNSVQEDQEAAFQIANTTFNSLKGRPVQGRIYQGKEPPQFVAIFQPMVILKGGTSSGYKKFVEEKGLKDETYCSDGTALIQISGTAVHNNKTLQVDAVATSLSSTDCFVLQAKNSMFIWNGNASSFEQQQWAAKVAEFLKIGLDLGQLETGVAVKHCKEGTESSIFWSSIGGKQSYTNRNAAPDVVIREPHLYTFSLRNVTLIFHFHFLASIAITSSPFVREAGDDLLTEDMMILDTHCEVFVWMGQCVETKEKQKAFDIGQKYVQHAVAFEGISPDVPLYKVNEGNEPCFFRTYFSWDSARSVGGNKGSGDGGPTQRASALAALSSALNPSSQGKQSDEKPTSSDDSEHTQRASAMAALSSALNPSTKPSSTQTQSHSGQGSQRAAAVAALSNVLTAEGSHSPRHSRSSPTADADKTELVPTSPHQLETGTAEDVRTEPDVSQEQTAKENGGQTTFSYERLISKSTDPVSGINNKRREARLFTIKSKWTYLVDSEFETVFGMTKEEFYEQPRWKQELQKKKADLF

SEQ ID NO: 48982 - protein, 330 aa, Zea mays
  Coding DNA Sequence Number=SeqID_5607
  Homolog annotation: Hit_ID=A5AV06; Match level="QueryCoverage=76%, HitCoverage=68%, E-value=1e-87, Identity=60%"; Hit description =Putative uncharacterized protein
MASLSADLFYDILKRLDAAALARAGCACADFRAISNEEDLWENACTSLWPSMRRDDNGLSLDYYYYDDGGMDDSENSLPSDFVSLIDVWYKGHALYSKVIWGIPSSDSANGWFYNYPFRIDLSQHSAENNENNNGDVFLSTVSGVSPVPSMEQERKDGKLWRELNDGVKLSWIVVNKKMKRAVNLTSWHPLSGQRHWPTDADFVLRFGSVLPAKEVLPCQVAECILLMKFRVTGMGGEEAGEPSTLALTELSMQIQDMGGVHLNGRCSLLLLKEALSCHRSRNYDEVLESCNLYLKAQSELKEEKIRSECRFDTLCVFSGIAIFAAICTM

SEQ ID NO: 48983 - protein, 276 aa, Zea mays
  Coding DNA Sequence Number=SeqID_5608
  Gene Ontology: Cellular component=nucleolus
  Homolog annotation: Hit_ID=Q6BTJ4; Match level="QueryCoverage=75%, HitCoverage=33%, E-value=2e-14, Identity=28%"; Hit description =Similar to CA1621|CaIFF6 Candida albicans CaIFF6 unknown function
  Subcellular localization annotation: CTP_CleavageSite=49; ConfidenceScore=5.56e-01
MALPPPPPCGKENSAACPAPTAVPLARVTPTAAKSSLGRHRKLRLARPQGSAPVSTSDDGLRLARPQGSDSTSTPEDGLRLARPQGSDSTSTQEDGLRLARPQGLDSTSTSDDGLRLARPQGSDSTSTSDESLRLARPQGSDSASTPEDGLSLARPQGSDSASTPEDGLRLVRPQGSDSASTSEESPPRLTSGSDRPHHRGGIITLPLTSSGYGEQDRCPIWLVPVKQVMMAPRVLHDDGGSQPLTEARRRQQGSDSPDSCASTGLKRSSDGHNIT

SEQ ID NO: 48984 - protein, 57 aa, Zea mays
  Coding DNA Sequence Number=SeqID_5609
MEARMMAEREAERVAREADHQRMAEMFQYMQSLAPQRVSLRHLHCSHPASVPYSWPI

SEQ ID NO: 48985 - protein, 52 aa, Zea mays
  Coding DNA Sequence Number=SeqID_5610
MVGLQGGDKDDGYDYGNGKEEGVEANLQEFQDFDEFEDLASDLPQSAACDAP

SEQ ID NO: 48986 - protein, 186 aa, Zea mays
  Coding DNA Sequence Number=SeqID_5611
  Subcellular localization annotation: CTP_CleavageSite=37; ConfidenceScore=5.22e-01
MSSSSALASSSPPLGSILDPPLAASLGLAKAGEWAARARRSSRRRGLKQQWHRTTQLVYGHGHDVRLRPGDAANPLNKSIDTRLMKMLPILILTDLEELEIAKWTGARGKYSEKRGIRKRTRAGRGKTTLLNWNGRGSFKMQVQDKHHGKVQGMTRVKVITDKHNQGGILDKTCEVSKNGKQSMVK

SEQ ID NO: 48987 - protein, 298 aa, Zea mays
  Coding DNA Sequence Number=SeqID_5612
  Homolog annotation: Hit_ID=A2XFR6; Match level="QueryCoverage=54%, HitCoverage=46%, E-value=5e-08, Identity=29%"; Hit description =Putative uncharacterized protein
MARLRHTARKSMIPFLPSRLAERPLRRTVSSQSSHLERLHHRLREEQERRRQHREQQGSSSPPEQEVESVRRRSSVPQLEAPPAPPRDAPAVGGATGGGPGGDPDDNDSDHSTESSEPQEAEGWSTSTVAGGDRWEATCLVRRPEDDLRGAEAVSEHYYISERDTAEAAMQDASRRALSQYCSLFGGVADGLNLRYYPRRPTGSTESVVVSPVGEDNPRLSSTVNLVAVLNTELDHSLDELSRARTEIAELRAELAERRHQEGGSPAPVGTQHPYRSPPHGHHTYGSPACKTRIDLDP

SEQ ID NO: 48988 - protein, 106 aa, Zea mays
  Coding DNA Sequence Number=SeqID_5613
MASPCSLALCRACPCARSAHHSKLALLPAARPVELPDRRATSLPPPPRCSHAKAPPPLTAAVPSPFLRRRWSPVVPSATSPWSATVDSGYRRSYAATEGSPEFTLR

SEQ ID NO: 48989 - protein, 459 aa, Zea mays
  Coding DNA Sequence Number=SeqID_5614
MSMRLREVSQQLSQKLKQKKKKWVPEFRIPVSDPNIRAANFADRVASGVLTADVAAEVERLRAQHADAVREKSAAESKNRRLAEKVAALEAEKTDLRRQLVEERREANQAIAEAQAAQAVAKVARAESSLASQRAKELEARFNALRGHVDKTEASTRSEVERTHAQFVDSYRELGARTAEFEVPDREAGLRFLEWLQEELLVLPTIVEGFMSFASLVTCEGAVNALSHEACRHYEVFDQSDENFEREIFKADDPVVKQSAGALFDRMWGSHGREAVRERSDRAREQVKMERAEDVEDFGALAGAPPEAAEVNPVLPSDAAEGLSTVPVPTVAGEDPVSAPAPTVEDALKVVAEPVVEDPTAAVAPSQVQGFGPAHATATDNGNFVASTVVAEDDSNDSVSKFFESDDSGSSIVWIEGSSDEDLDYFAALDVAAAETSLRVMGEDIPGASAGRRRRRAVA

SEQ ID NO: 48990 - protein, 249 aa, Zea mays
  Coding DNA Sequence Number=SeqID_5615
MARRRSQKNKKTTPKENKEKKEIGSQMEVRCQTSFCQNEDGFPKLLRACTVRLGIRSQPEYDGQDAEKLNRKLHVDLTTAQARVAALKSREAIVVEALKQAKDEHVQKLMEAYLVTHNQRRALRIQEPTSSNPVQPIRAEDPQILEGHPVSIRGDKKTWELPEGAIVLEGIPVFPQAMSKQEHPESSQDPLPELFEPLTMKKIPAPSREIKEEAASTPPASPPSEELQESVPLEEEFNPVLPSQSPPEE

SEQ ID NO: 48991 - protein, 129 aa, Zea mays
  Coding DNA Sequence Number=SeqID_5616
  Subcellular localization annotation: CTP_CleavageSite=44; ConfidenceScore=5.13e-01
MARATTGVGPGAVPEGTRRGPPRHRSPAWGATTAPARDRPGMPDARSGQPRRARRGLQAALGVASRRRSARPPAALGAGHHGGSARPSGGGSAQPTRRARRGPHKARSARPPGGARRGRMAPAGGGWEP

SEQ ID NO: 48992 - protein, 395 aa, Zea mays
  Coding DNA Sequence Number=SeqID_5617
  Subcellular localization annotation: CTP_CleavageSite=28; ConfidenceScore=5.17e-01
MSSSSLKRRVFPSSKPPDGGQPGRTPSPAVTRDGDLQLDGGGKRAGLRPLPLPQPQGFSSPRLGRGECRVGVGPCVGGGPLLHSVMGGEAGIARGVRQLQRAWSSAASGFGATCGVGVCHGSWKRRGPPGSGIHPEVSVAAVRPPGAEVAVVATAGAGDGAPFVGLPLLRRPSPSEWGCSYLRRGNRSSVCNGTSNASVLRSLRLSRPERESLGPFGLVVWGSSSLVKETPRLPFGGPRPGPTPKSISRGLGSGWRPWKPVDRGPRGNRLSRLLGPDSRRSPWTAALPEAGSGFAEDVVDAEGATASFGVKTRACRTRSSCSVCFLRPPRPEEHTLAALAKLRLFSSCLEHLDSVGNRDKGTSEVSVSRRRRSPSARSALAAYVYLVVSRIRFPK

SEQ ID NO: 48993 - protein, 308 aa, Zea mays
  Coding DNA Sequence Number=SeqID_5618
  Homolog annotation: Hit_ID=Q2R935; Match level="QueryCoverage=100%, HitCoverage=73%, E-value=1e-116, Identity=68%"; Hit description =Expressed protein
MEVTSLRSLTQVCDVLGVSAQRRKSVRLNVCPQVTQHHVWRGALEAVLGDLQADMASLDSPSPGIKMAEQIASACNGFLSDTATSSSPSWMRPTPFKKPAEPTAPAKKWQEVLDMFTDLARSLEMEDRLTGHVQKVEAMKEGLYQIRDVVIERDIAFKEARRQDCLVQRKLSKSLGHSSRCLYTLLLFYLYGSVRDMEVHVGKCISGEGGRNVTVHAAEFLIDGDESTIRSGIKQLSRALQIFRFVWEAANTDCHAANHNGKDVVGKKKNEDAKGVLELQGHLWSFGVEEKTLTYRGDVFHMHQIQLP

SEQ ID NO: 48994 - protein, 178 aa, Zea mays
  Coding DNA Sequence Number=SeqID_5619
  Subcellular localization annotation: CTP_CleavageSite=30; ConfidenceScore=5.27e-01
MDLPRAAFVQQAIHRTLRAQLSNMNNVGAKAKTLPSAPAFVYLVAPTGSRTTGESHCRLKLNHVHISLTPLLESTCPGTQVPTLAPTVRATRKPPAMAPKRANSKAAPSVDEAAKTALLAEKKGKALADNTHQGAGEDEAHSKRQSNDQHTPEGTLRTCSSEGQPQAPPLGFAPPEGE

SEQ ID NO: 48995 - protein, 162 aa, Zea mays
  Coding DNA Sequence Number=SeqID_5620
  Homolog annotation: Hit_ID=Q8SA86; Match level="QueryCoverage=39%, HitCoverage=8%, E-value=2e-07, Identity=35%"; Hit description =Putative retrotransposon protein
MLPTPPKDVPKAQAKEIVLTMVATAPYAEAGSLNQSKDNVEMDLEEDNTVIHPTKPIHVDFGKSKIKEGHIEVRLGGDELVPSPREDEVVVFRCFLKATPEAKVEVEIEELPPMGAEEAKFEEAIDLIAQKFKPLEMLLESYEEEDDRERIAPITSSFFRRT

SEQ ID NO: 48996 - protein, 123 aa, Zea mays
  Coding DNA Sequence Number=SeqID_5621
SGGALAEPPSPDAPTPTALQLGAQADRHRPPPMPQLLDPYPQVAAAANTQISHHAVTTPPESGGQPKPSPTREPASASQTVAVTPSHTDLDHQISQLRDCKFMPAVEVKALCEQAKAILIEEI

SEQ ID NO: 48997 - protein, 305 aa, Zea mays
  Coding DNA Sequence Number=SeqID_5622
  Subcellular localization annotation: CTP_CleavageSite=34; ConfidenceScore=5.11e-01
MPRSFCIYHALPPFGPPDGVRRIRGRRAFASLAKAANFGYAGRPSEAPSAAACLAPRPGWLWCRLRRCLLPLGRGVAARPPHGRWLCRAQVGHIHGFSRVDGRTRVTYKTSYAAGAASAFLDGLVLTPVVRTGARTSSHALGQPPFAGTALVRRWPLSSVLRWSPPLVRLPTVEVVASAGETVSATFCRAPDSLALMASLSPPVGRQRRGPFRSGACAEAVATAGELLVQRRPSPSVLMWSPPLASRSELAISWPYWAVERAGPWYGTGLSGCTGSGPPQETNAHSLAPVPRPMVRDQDERLHGL

SEQ ID NO: 48998 - protein, 376 aa, Zea mays
  Coding DNA Sequence Number=SeqID_5623
  Homolog annotation: Hit_ID=A2YGC2; Match level="QueryCoverage=38%, HitCoverage=65%, E-value=1e-08, Identity=31%"; Hit description =Putative uncharacterized protein
  Subcellular localization annotation: CTP_CleavageSite=63; ConfidenceScore=5.03e-01
MTARSLATSKPRARFEPHALLAHLPSLICAFSLALPTRIGSSATIRRCPPPVLWPLLRPCPVQCPRKSTRRRQEQEQQDSSPSPQQEVESERPPSPAPQPEMPPAPPQGILTAGGDPDGDGDDDDAGGSSSHDTEHSEEQEPEGWIARPITRDAARGCHFHDALDTLLRRAFDRHTWSIEYRCVVYQHRRRLYPDLWEATCLVRRLDDDLRGVEAFSEHYSITKRDTVEAAMQDAERRALFQYCSLISGVADGLDLKYYPHRSTGNTGGVIVSPVGEGNPRLSSMVNLVAVLNTELDHALDELGKGFSTLIVHCPVVASTMMSENRRRGARRAQPEQQAPQEEAAPQQHLPLPPPMTIEQMFMMQTRAVQAIGQTF

SEQ ID NO: 48999 - protein, 57 aa, Zea mays
  Coding DNA Sequence Number=SeqID_5624
MESHDLRAEWESRLVGGYETDGFGYDYGAGCHHCNHSLGEDEAVEGDFQEFQDYDEF

SEQ ID NO: 49000 - protein, 103 aa, Zea mays
  Coding DNA Sequence Number=SeqID_5625
MPTCSNKIARIKKSFSCRLAARSQGLGGINPSPGHGAVPLHLHGQILPPSSIWPPAARHGYRVSSSSSLSRSMDNPSKRPCSFPGLPGPRRAPQHGSCHCSLS

SEQ ID NO: 49001 - protein, 149 aa, Zea mays
  Coding DNA Sequence Number=SeqID_5626
  Gene Ontology: Mol. function=transferase activity; Cellular component= cytoplasm; Biological process=auxin mediated signaling pathway
  Homolog annotation: Hit_ID=Q7G227; Match level="QueryCoverage=28%, HitCoverage=15%, E-value=2e-13, Identity=83%"; Hit description =Glutathione S-transferase GSTU6, putative, expressed
  Pfam annotation: Domain name=GST_N; Domain location=16-83; Score =37.4; E_value=5.3e-08; Accession=PF02798.11; Description=Glutathione S-transferase, N-terminal domain
MAPSSCLPPRQAAPRSVGKTVRPACQTRAQLQGPQEYEYVKEIFGNKSELLLESNPVHKKVPVLIHNGKAICESQIIVQYISDTTTDSYTETELITDSNTDSNTDSSYKDSNKFYSRFHTQIHPHIYQVPSYTDLYTSSCITTQHLKVP

SEQ ID NO: 49002 - protein, 466 aa, Zea mays
  Coding DNA Sequence Number=SeqID_5627
MAGSAAPPPCLARLGRPTAGSAAPCAAPCPAENDPVEEPEEFAGEAPEQQSVVMRLMVLVMIMVLVVSIATTAQEKMKLWKETSRSSKITTSSRCGLAATPSRLPVKAALSTFLFRTLIYCKNYMDVSDMARLRHTARKSVIPFLPSRLAERPLRRPVAGQSSHLERLHHRLREEQERRRQEQQSSSFSLHQEIESVRSCSPVLPLEPPPAPPLGAPASGVAAGGDPDDGDGDDSSSHDTNFSANPEPEGWVARPITRDAARGCHFHDALDTLLRRAFDRHTWSVEYRCVVYQHSRGVYPDRWEATCLVRCPENSLQGAEACSEHYSISERDSAEAAMQDAARRALSHYCSVFGGAADGLDLKYYPRRSSGSTGGVIVSPVGEGNPRLSSTVNLAAVLNTELDHALDELSRARAEIALLRAERAERRHLDGGSPAPVGTQHPYRSPQRGHQSYGNPACKTKINLEP

SEQ ID NO: 49003 - protein, 70 aa, Zea mays
  Coding DNA Sequence Number=SeqID_5628
MAAGLGGGRPDRAGREAAEPAMGKGERGWGREERGRGELTGEGRDGEGRSAAGAAEGGGWAGGGGGLGQG

SEQ ID NO: 49004 - protein, 64 aa, Zea mays
  Coding DNA Sequence Number=SeqID_5629
MAGSAAPPPCLARLGRPTAGSAAPCAAPCPAGGYEIDGSGYDYGAGEDEAVEGDFQEFQDYDEF

SEQ ID NO: 49005 - protein, 192 aa, Zea mays
  Coding DNA Sequence Number=SeqID_5630
MARKKASSKADKAAKAALLAAKKGKSLALTHSTHQEPPPGFAPPEGADLTEDDEVLGVSAEEQLQLRALRLKNHNLQRQKEILEAKRQRVSALAKVRQMIHDEEQKAQDLEREIALMQREGHLGLHLGPPLQQRVQLEDIREGHLVLQHVPPLYQRAQMEDLTSPSATTPPTRLAILGVNYLVDRSFPVPPL

SEQ ID NO: 49006 - protein, 105 aa, Zea mays
  Coding DNA Sequence Number=SeqID_5631
MGSLMLGVGRGRPERGHLASSYSSSSGRLDTGIVPKALPCSLDYKLVTHLRNEDSREKPRSETLAIHLGKVADEDMMLNSRDASLVIPPVIFLWMDVLVSLYFDE

SEQ ID NO: 49007 - protein, 275 aa, Zea mays
  Coding DNA Sequence Number=SeqID_5632
MGQSAAGEGAMVDMARNGPAVMAVTGGRKQQSSRQQAHAPSRDSERTLSHGDRRHLWQAKQAMLHLRHNDRIKKSGPQAPLLIRGSKASPSEGFNSRLRALGVRAHYWSEVRRLAPRKGSTAASGHSGSAPTSDQGFVGWPPKGSNSRLRARGARDDPEYVRYITKGSRTRRLAARENGPTRKSLTLSHADAYDNPIKGLTSVLSVEHVLNAKLTGFNSKKIDQAKDGGKKSFEVPSAWEKVKETKNPKPGVKKKTCKVKVDRVKKSYGTSRITT

SEQ ID NO: 49008 - protein, 217 aa, Zea mays
  Coding DNA Sequence Number=SeqID_5633
MPGKANCCCPARMQHSILYPCFHGEDGSEDLLVRFGAVGARWCGAGGQSGDANGSLPAAASVLGPSLLLQRSLASHPELVAPQALRCGGCSYPRGQNRSSVCNGTLNVGVCSLWLSGPEHESLGSVGLAARGFSCSVKGNPRPLCDEPEPEAAVSAWTEAELAQKEDFVGRSLAGPSTGGTDAGVELPRPRAGLVSSEDGWLRLRGGRPSRLLGSGP

SEQ ID NO: 49009 - protein, 107 aa, Zea mays
  Coding DNA Sequence Number=SeqID_5634
MAERYQLPRSCVPPTTTRRKNRGRPHPGALKVFPLRHGGWVPRVMQAGPGQKEPKPPLTVRVTAQRLQALLHFRPDQRVKERTAMQAACNRTKGAHPFDFDASSMEA

SEQ ID NO: 49010 - protein, 516 aa, Zea mays
  Coding DNA Sequence Number=SeqID_5635
  Homolog annotation: Hit_ID=Q6QP51; Match level="QueryCoverage=23%, HitCoverage=59%, E-value=4e-08, Identity=34%"; Hit description =Putative growth-regulating factor 1
  Subcellular localization annotation: CTP_CleavageSite=45; ConfidenceScore=5.21e-01
MVAIQGGHPPFKGDSPHLRPQSVQIESSPTRSKVLPLRHGGWVTRVMQAGPGQKEPKSPRAVRATAQQLQAFLHFRLDQRVKGRTAMQAACNRTKGVHPFDFDASSMVAQAHTSCNRRAGYYVQETAPPLAPVPRLIDCGTGAATRGDPAHDPTVPTEHIGHGSVSRRRRRDGRYGQKWAGSNGGGRRAEAAVKSTGGTFGRRSRRRFTSAIMTASKKQGTGKGDTPKGILLREGSGPRAPLLIRGSKAGPSEGFNSRLRALGLRTHYWSEVRRLAPRKGSTAASGHSASSPTTDQGFVGWPPKGSDSRLRARRARDDPGYVRYITKARATLPSLGQRQPTPKDSRLARGPPQATDNTFGSPEAQSLQRSNLGQIATPTDPSDAIGSSTSPDPRARTQPRPRKTVSASPDPRARAQPRRWTTNSASPDPQGSDTALASEDGLRLARPRARTRPRPRETVSASPDPGLGLNLDLGRRTPPRPTLGVGLSLDLGGAPASPDLGLGPTMSQGGPSLPYP

SEQ ID NO: 49011 - protein, 382 aa, Zea mays
  Coding DNA Sequence Number=SeqID_5636
MHRILPPSEPPDGEHSRRFRLVVVGGTQLRGSWYLSAIVRLQGFSSGSPAASPRRWSPKTVTTGLMVGRSKPGYDLCPALSFEDLHHPSWGRGRTEPELYLPRGFVGHLLPQHSGEMALTGLAGGSDFDNAGLVGDERRQLQRVGLAGSVGSGSAPGASSRRKSGCRAAHTGGPPKTSCAARAAFVFLGCPAFAPVRRLCAEVGARPSGRIRVACGQMASVVGAEVVAAEEVLVADGITANICAPGLWLFGFDSLSSPLEWGRGRGYCCSSIRPEAIAAAVWPPGAEVVVVVAGVGVGEPPGVLSPRRPSNVGGCSYLRGRNRSSVCNGTLSVGVCSLWLSGPEHESLGSVRLAARGFSCLVKGTLGRSTVSRGRRQRFQHG

SEQ ID NO: 49012 - protein, 490 aa, Zea mays
  Coding DNA Sequence Number=SeqID_5637
  Subcellular localization annotation: CTP_CleavageSite=46; ConfidenceScore=5.62e-01
MSSHSPHASRLSTFRAPGWGRPRFFRLVVVGGTQLRGSWYLSAIVRFQGFSSGSSDASPRRWSSKAVTTSSMVGRSKSGCNLRPALSFKDLHHPGWGGGRTEPELYLPRGFVGHLLPQHSGERALTGLAGGSDFDNAGLVGGDRRQLQRVGLAGSAGSGSAPGAPSRRESGCRVARTGGPPKTSRAARAAFVFLGHPAFAPVRRLCAEVGATRPGGSEWGSAGGQMASVVGAEVVAAEEVLVADGITATICAPGLRLFGFDSLSSPLEWGRGSPSARLALLPDASLAQLKENPRLLCDEPEPEAEVSAWTKAELARKEDFIGRSLAEPSTGGTDAGVELPRPRAGLVSSEDGWLRLRGGRSSRLLGPGPWRDPGSDGLGMVLMSSFGAEILRPRCRPRLGRTSSKVELTPRVLLFPLHRRLSLQDRFTCKRFPSIKTCSVSGIAYPSVSYLSQKMMSEDPTFEVVEKHERRSGRKTFSEENFDAEGVPPF

SEQ ID NO: 49013 - protein, 133 aa, Zea mays
  Coding DNA Sequence Number=SeqID_5638
MDPNVEIEECVTLIQFNELKQSIEAKQDLLAQDLQTLMAEIRGRRRLPDGVRNHDEDGEEDEGNYSRRASEHGRRNQGAAYGRGRGRNRRNNDNEESEFGDDQSQHRYGRRHHRGVNQEGRFGKLKFTMPKFD

SEQ ID NO: 49014 - protein, 269 aa, Zea mays
  Coding DNA Sequence Number=SeqID_5639
  Homolog annotation: Hit_ID=A7P225; Match level="QueryCoverage=76%, HitCoverage=36%, E-value=8e-23, Identity=36%"; Hit description =Chromosome chr19 scaffold_4, whole genome shotgun sequence
MAEELFNQPFDYENCLRDNRYCSLSPFGFLPSLRHAHEGIYSQFRHFTIMHRFCGVLNSFVKRTSNGKHGADTKSEKDNSTILDKAGNGPVDKEQSVDAYASKSKAQNGKAMPSNGGSLANMWGRASAKPMPPSTTNSTAVASVAATADAQICAKEEADGNSSDDEHGINYKRGSTNANNRKRTVVFDYSDDEEDDNIVSIASPELPKQHTPDLVVGIVTISVTKSPMIEVVSLLFVIYHYATVEEIGSIPFSEPLTHIIIAFKCVYKL

SEQ ID NO: 49015 - protein, 206 aa, Zea mays
  Coding DNA Sequence Number=SeqID_5640
  Homolog annotation: Hit_ID=A7PJT3; Match level="QueryCoverage=42%, HitCoverage=12%, E-value=2e-17, Identity=54%"; Hit description =Chromosome chr12 scaffold_18, whole genome shotgun sequence
MCSFKIPSRSDEEEGLKARCHYRSAKVDNVVYCLEDDVYVKLRQMGGAFRDGAAPDLCARKSFLSSLSIMRRPILRRRTTACLRVSKAPSSQGSLTADNYKHSSLLGVIKSDNAVLGLPYALANQSFCKSFNLDLLEASATLTLAELWLALGSSHAKKALSLVYQSLPMILGHGGLELRARAHVVLAKCHLSDLKFSSTLQHFVLH

SEQ ID NO: 49016 - protein, 226 aa, Zea mays
  Coding DNA Sequence Number=SeqID_5641
  Gene Ontology: Mol. function=transcription regulator activity; Cellular component=nucleus; Biological process=regulation of transcription
  Homolog annotation: Hit_ID=Q10CH6; Match level="QueryCoverage=98%, HitCoverage=62%, E-value=2e-25, Identity=35%"; Hit description=Helix- loop-helix DNA-binding domain containing protein, expressed
MDGNTRFAAESQKKPIVPDDDLVELLWHNGSVVAQPQAHHRPAQPSDRDRPGTSGLTAEETAAWFLNTLDDPLEKDLYTQLWYNTIADAALQHEGTFPGPTSHPSSPPPPVGSSGVESSWVGDFCSTFCDSNQVPRTPTGIRGKDAALQSEVPSDAGAHDGTSSSGGSGSNYGGSGLPSDSVHGHKRKGMCRDESDSRSERRRDRIKEKMRALQELIPHCNKVQVP

SEQ ID NO: 49017 - protein, 244 aa, Zea mays
  Coding DNA Sequence Number=SeqID_5642
  Gene Ontology: Mol. function=serine-type endopeptidase activity; Cellular component=integral to membrane
  Homolog annotation: Hit_ID=A6MD08; Match level="QueryCoverage=100%, HitCoverage=100%, E-value=3e-43, Identity=72%"; Hit description =Membrane protein
  Pfam annotation: Domain name=Rhomboid; Domain location=29-172; Score=- 12.5; E_value=0.0095; Accession=PF01694.13; Description=Rhomboid family
MASDGDGKGRVATAPGAGYGYAAYGGYQGAEERKWWPWLVPTVIVACIAVFVVEMYENNCPKHGSQLGDCVAGFLRRFSFQPLRENPLLGPSSSTSRTPPIRVLRVCFRSNRAGEIDLFRVWDLAAAAIITLLFIIALNLAIGILPHVDNFAHIGGFATGFLLGFVLLARPQFSWMESHELPHTNQPPKYKAYQYILWVVALVLLLVGFVISLVMLFKGKNGNDGCHWCHYLNCVPTSKWKCNT

SEQ ID NO: 49018 - protein, 148 aa, Zea mays
  Coding DNA Sequence Number=SeqID_5643
  Subcellular localization annotation: CTP_CleavageSite=47; ConfidenceScore=5.37e-01
MLFQFSQQPNLFHSQGPNILGNLQSVQHLASQTQLSPNITHRFVPPRLQSLGQSPQLQGHFLKRTETVSWLIPGGSNLLKEPRELKPKTFKMKSALPPNIHLEFESQGTVIRGHSGITKEHTIRKKFFPAVSAEDMIQLDKGRIFSLI

SEQ ID NO: 49019 - protein, 45 aa, Zea mays
  Coding DNA Sequence Number=SeqID_5644
MARKRSQKNKKTKENKEAQLRYNSPGCLVHQRSNGYLRATVDYAK

SEQ ID NO: 49020 - protein, 349 aa, Zea mays
  Coding DNA Sequence Number=SeqID_5645
MAKRYQLPRSCVPPTTRRKDGGYPPSGGLEGGKTRCIREREDMVAFQGGHPPFKGDSPYLRPQPSQAESSPTRSKVLPCGAGAGSHTSCKPAQSRRSQTAVRGAHDRPAVTSDSPLLPSPTGERGGQPCRRHATAPSGRASPSPNTPSMEAQAHASCNRRAECFVHATAPPLAPPLRLLDCGTNTATRGDPARDPAAPAWRDGQCGQKRAGSNGGGRRAGAVGPGKGDTPKRILPREGTRLQASLLIRGSKAGPSEGFDSRLRSRGPYTHYWSEAGPRRVHSRLRHGARDDHGYVRYITEARAALPRARTRAKPRKTANYAPPDPGLGLGLSPGRRRTPLRPTQGSDSG

SEQ ID NO: 49021 - protein, 66 aa, Zea mays
  Coding DNA Sequence Number=SeqID_5646
MEPGGGTAVGAVESLLTSSCFRKGVESRRRHRVGRCGSSSEAEIESAFRGRGRVRAPGSGEAETVG

SEQ ID NO: 49022 - protein, 189 aa, Zea mays
  Coding DNA Sequence Number=SeqID_5647
  Gene Ontology: Mol. function=protein binding
  Homolog annotation: Hit_ID=Q7X9L1; Match level="QueryCoverage=59%, HitCoverage=52%, E-value=3e-46, Identity=81%"; Hit description =Holocarboxylase synthetase
MSITSGLSSEDSEHINSMLSSANLGAKICGAELRGRVAAASMSAASPATAAMARRRKTDAPPRLDEADRTLYSTFCGAANSLSQLYAQAMAQQKLNFHAGERHALEKLYQWILRKHDEEARLTVAEIMSHIQHEIDYVGTDAHVSPRVPQHPQIANPFANSVVPPGTGVSRTLIPLKVLAMEAGMQKQT

SEQ ID NO: 49023 - protein, 477 aa, Zea mays
  Coding DNA Sequence Number=SeqID_5648
  Gene Ontology: Mol. function=oxidoreductase activity; Cellular component=cytoplasm; Biological process=metabolic process
  Homolog annotation: Hit_ID=Q8S529; Match level="QueryCoverage=95%, HitCoverage=91%, E-value=0.0, Identity=92%"; Hit description =Cytosolic aldehyde dehydrogenase RF2D
  Pfam annotation: Domain name=Aldedh; Domain location=19-467; Score =776.5; E_value=1.7e-230; Accession=PF00171.13; Description=Aldehyde dehydrogenase family
MRWLAQALLRKQVARATTTEEDEGKTFDTRDPRTGDVLAHVAEADKADVDLAVKSARDAFEHGKWPRMSGYERGRIMSKLADLVEQHTEELAALDGADAGKLLLLGKIIDIPAATQMLRYYAGAADKIHGDVLRVSGRYQGYTLKEPIGVVGVIIPWNFPTMMFFLKVSPALAAGCTVVVKPAEQTPLSALYYAHLAKMAGVPDGVINVVPGFGPTAGAALASHMDVDSVAFTGSTEVGRLIMESAARSNLKTVSLELGGKSPLIIFDDADVDMAVNLSRLAVFFNKEGIYDEFVKKAVEAARSWKVGDPFDVTSNMGPQVDKDQFERVLKYIEHGKSEGATLLTGGKPAADKGYYIEPTIFVDVTEDMKIAQEEIFGPVMSLMKFKTVDEVIEKANCTRYGLAAGIVTKSLDVANRVSRSVRAGTVWVNCYFAFDPDAPFGGYKMSGFGRDQGLAAMDKYLQVKSVITALPDSPWY

SEQ ID NO: 49024 - protein, 94 aa, Zea mays
  Coding DNA Sequence Number=SeqID_5649
MGVPDFCALLARIECACSAPALKIPEAEEFSAESPGAPDSLKRKAGASILTTAKVVKTCAGSSAGAAAHPVPWVDAAREALQRGDEASRLALEG

SEQ ID NO: 49025 - protein, 95 aa, Zea mays
  Coding DNA Sequence Number=SeqID_5650
MGSAALGLGDGEGDGGALGDGLGGARARGRGGGRLGDGGARGRGRAPASSETVVVGLGLGGGVEGAHGSETGTGTGTAAQQPGGVVSAPGENTKP

SEQ ID NO: 49026 - protein, 148 aa, Zea mays
  Coding DNA Sequence Number=SeqID_5651
  Gene Ontology: Mol. function=protein transporter activity; Cellular component=COPI vesicle coat; Biological process=retrograde vesicle -mediated transport, Golgi to ER
  Homolog annotation: Hit_ID=Q6QP55; Match level="QueryCoverage=72%, HitCoverage=79%, E-value=1e-49, Identity=95%"; Hit description =Epsilon-COP
  Pfam annotation: Domain name=Coatomer_E; Domain location=3-147; Score= -95.6; E_value=0.0016; Accession=PF04733.5; Description=Coatomer epsilon subunit
MASPDLLFNLRNLFYLGAYQAAINNIDILGLDAAAAAERDAIVFRSYIALGSYQVRTHLASGASAATSLQAVKLLALYLTGDKRRYVMKKINISKQNDKFQQTAYQEAFSKPSVGVKVAKYPRCSHPELVMGLREHTDAGGDHTSISR

SEQ ID NO: 49027 - protein, 149 aa, Zea mays
  Coding DNA Sequence Number=SeqID_5652
  Gene Ontology: Mol. function=kinase activity; Cellular component =ornithine carbamoyltransferase complex; Biological process=amino acid metabolic process
  Homolog annotation: Hit_ID=Q6QP54; Match level="QueryCoverage=55%, HitCoverage=29%, E-value=4e-10, Identity=44%"; Hit description =Putative kinase
MAPPVDVAGLRPRLGDVEAPPKPRSSLSSVAEVESEPLGRARRRPSAEARAESEPWGRAKRSSSSSGAEPESEPWVGRSGVRRLLGLSPSPSPGSGGADPSPSPGSGGAEFAVFSGAEPESEPWVGRSGVSYGRSVERRSDGGHFGSIG

SEQ ID NO: 49028 - protein, 568 aa, Zea mays
  Coding DNA Sequence Number=SeqID_5653
MTRVCFGLGGRRKHALQDDPTLQARILTLEGSSSTLGVDNTFGEVRPGLGRRHGLRVSALKDNVITKLGPSPPGSSPRIRLGQAAWLATPEAWASCPPRTSARPEASAGLDSHNEQKHWHSKCHYKRNSGFHLRMYEQPHSMGRGPAEQQKTDERRAVARSGSGDDDDFCSGGPNSGSNDLRADAAARRPPPMPKLVRQGRAEGRRVGGRSVGGPGYLVGGRTSSSCHGRSRRRERLRSHSGPRARHAAAGSATDDNRPSPQSLREGAGHRPRRGRPQLGTLPSPALVMKILEAEGGAEAAARGLEGGKARCIREREDMVAFQGGHPPFKGDSPYLRPQPSWAESSPTRSKVLPYGAGAGFHMSCKLAQSRRSQTAMRGACNRPAVTSGSPLLPRQAGERAGSHAGGMQPRQVGALLRLPTRPAWRPRPTRHATGAPNASCMQLHRHLRHHRASSTAEPIPRLEATQSTTQRRQPGATVNAAKNGLAVMAVAGRQEQRSRRQPSLRPIQGRRENPLSRREDNAPVFRSSNGSRTHNGRPANHSPRRINSAAGQAAPLAGEASDALPSP

SEQ ID NO: 49029 - protein, 70 aa, Zea mays
  Coding DNA Sequence Number=SeqID_5654
MVRWRPERKKATGASELVATVVATTPVIGGKLKRSAAMRWRYSDTWRKVVRRWFPGELICSAAKQKGDGD

SEQ ID NO: 49030 - protein, 248 aa, Zea mays
  Coding DNA Sequence Number=SeqID_5655
  Gene Ontology: Mol. function=nucleic acid binding; Cellular component= intracellular; Biological process=regulation of transcription
  Homolog annotation: Hit_ID=Q6QP57; Match level="QueryCoverage=93%, HitCoverage=76%, E-value=1e-106, Identity=82%"; Hit description =Putative zinc finger protein
  Subcellular localization annotation: CTP_CleavageSite=20; ConfidenceScore=5.13e-01
MAAPHDMHGVDSFAQLPFVRGAAPRPPAGSRDVATSIRLFGRDFSSDQQQAVQLLLLKEDAAAAAASGERKFECHYCCRNFPTSQALGGHQNAHKRERQHARRAHLEASFAAHCGAAYLPGAHLYGLFGYGGGGGGGHTAHYPAVWAGAAPGIYGGVGPVARPPVYGAVAVPGTWRPSPPGSGGAFVAAGRPVGYGEMAGKDDKAKMSVVVSLPASLPSSCLSGQSAEMIGRVVSSMFLQLNCARHFH

SEQ ID NO: 49031 - protein, 717 aa, Zea mays
  Coding DNA Sequence Number=SeqID_5656
  Gene Ontology: Mol. function=calcium ion binding; Cellular component =membrane
  Homolog annotation: Hit_ID=Q6QP53; Match level="QueryCoverage=99%, HitCoverage=89%, E-value=0.0, Identity=78%"; Hit description =Putative uncharacterized protein
  Pfam annotation: Domain name=MS_channel; Domain location=495-703; Score=29.9; E_value=1.1e-07; Accession=PF00924.9; Description =Mechanosensitive ion channel
  Subcellular localization annotation: CTP_CleavageSite=43; ConfidenceScore=5.15e-01
MDQSTAKAAAASNNADHVLVIPPGHPPPLHPRNNQQPETPKLSQNPEKPLPTSSPSRPPLPPAALRRRSSIAKPKSRFVEPPTPTHPHSAHPSPVHPAAAASLTATPTHRAAGGSTPAAEVDDDEDLFRNKDGSRAPASAARCRRRARLGVELCVLVLFLGLLLVSLVVAPLQGRVLWGLEVWKWCVMVITVFSGHLLSQWLVTLIVFVIERNFLLRTKVLYFVFGLKKSFQVCLWLALVLIAWSQLFDSEVGRSRKTARILNYVSRFLASMLIGSVIWLVKTFLMKVVASTFHRKAFFDRIQESVFHQYVLQTLSGPPLMELAENVGREGSGLGRVSISRAKEEKGVPEVIDVVKLRRMSQEKVSAWTMRGLITTIRSSRLSTISNTIESSFDDVDGIEQKDKEINSKWEAEDAAYAIFKNVARPGYKHIEEVDLLRFFTKEEVDLLIPTFEGAPETGKIKKSALKNWVVKAYLDRKSLAHSLNDTKTAVMQLHNLVSVIVIIISIIVTLLLMGIATTKVLVVVSSQLLVVVFIFGNACKTVFEALIFVFIMHPFDVGDRCVIDGTQMTVEEMNILTTVFLENDNEKIYYPNSVLSTKAISNFYRSPNMFDTIDFAIDISTSVESIGALRSKIKGYLESKPTHWHPVHTVNLKDILDVNKINMSLCVQHTMNFQNIREKNIRRSELVMELKKIFEEMSIRYHLLPQKVELTYIMDL

SEQ ID NO: 49032 - protein, 314 aa, Zea mays
  Coding DNA Sequence Number=SeqID_5657
  Subcellular localization annotation: CTP_CleavageSite=21; ConfidenceScore=5.34e-01
MAHRTVRCATGAPTVHHRPAVSPRRWSPKTVTTSSWVGRSKPGCDLGPTLSFKDVHHPRWGGGRAEPALYLPRGFAGHPLPRRSGERALTGPAGGPDFDNTGSVVGGHRHLQRVGLVGLAPGGPSHRRAAAAPRRRLEKSPSPTGSPPPFALRASGSSYLSSPLERRCGRGQDCSSAHPEACAAAARPSGAGVIVVVVRAGGGEPLVSLLSLRRPTPMEWGCSYLRRGNRSSVCNGTLNADSPVDYLSRFTKHESPRVKVTSEHEQRRSWLENENLVGRSLAGLSVSGTDAGVDQPRPRTGLAPLKDGWPRPLG

SEQ ID NO: 49033 - protein, 631 aa, Zea mays
  Coding DNA Sequence Number=SeqID_5658
  Gene Ontology: Mol. function=binding; Cellular component=integral to membrane
  Homolog annotation: Hit_ID=O24564; Match level="QueryCoverage=66%, HitCoverage=83%, E-value=0.0, Identity=51%"; Hit description =Embryogenesis transmembrane protein
MPTLIILLLSKNVARQRLWLRSMQLTMVLDLFSLMGAYAAYDAGTCRAVKSSIYIWVLVLSVFTYIMIHILVFMRVVPRFVSEKRFVPKRLKDVARSMERWILSRCGVHRSQKNSSHKKDLEEARKFTLVLVTFAATVAYQAGLSPPGSFWAENDENKTPATSMLRSGNLPRYNTFVVCNSTSFIASLVTIILLLSPELSRHGIKSRAVTVCVVVNILGLVGAYAAGSCRSVVTFVSAVLVAVLVWIFFAVLAGIFVNRSVAEWFGKKIKPYIMRCTDRFGRVFSSNHGRKRSRNPEGENSIASHQQTEESIKDIEEGECPGEQQSPGKQQPTNIMVVSISEHASVNEKQAENSSSVMCKLGSQSTDPNSAANEAMTETETENIQDANMEEQQSSLVDGLKTPTTVADQESTAVECLSDIAPNNNCNLWERGDGNHKPFVRDLAGDKRKEQWLREDTTCMLPITNRSYTPRMKKQIDLGLGRTRSQACEVIEKEEEGESVACAHVCVASSARWGRHPGERIKVSPARRHLGREKDSRGRGVSPWGKGTCHLGRKNVELRSSLGTLQQWPWDAICGDRQLWSRLMGTGVVDGGVRPVGGKGTPLPWRARIESWCVDPGHLIRLPWRARRERR

SEQ ID NO: 49034 - protein, 136 aa, Zea mays
  Coding DNA Sequence Number=SeqID_5659
MATGGLTHRDPFVHGCYGGGEKGQCVEYQVSHPIPERGTGCGQAWFGWRRRCDFKSFERRDKKILTQNLWKILHNSQNEILRCYTGTHPNFPSPSPISSASAHPPFSAQSPRSATVDSGYRRAFAATEESPEFALR

SEQ ID NO: 49035 - protein, 161 aa, Zea mays
  Coding DNA Sequence Number=SeqID_5660
MNTRGLRPLGQPLANVGALRPSTTHDGYSVRPQALHLPLPLRLALGTQATAVAALRLGLSATAGQSQIRRRRQRLPLSPFANRLAPIALRLRSSAHRPATLRARLLLPSYSGGQSTASGSGGCTARRVRPSGSRSQQPLLHQGGRAALVPLIPQTKRDPSA

SEQ ID NO: 49036 - protein, 134 aa, Zea mays
  Coding DNA Sequence Number=SeqID_5661
  Subcellular localization annotation: CTP_CleavageSite=40; ConfidenceScore=5.38e-01
MPRHPHPSPPSSPFPRSRCLPSSPSTAIPVLPQIMAPSIVASAWPRQGHMKCKWFFFLLACWCKEQVLISKDQYGGTILNLLRRLGLHLIERWWSKVLVAYWVQPRLALPWNNCERTSWWQEVEEGVFYKIKMR

SEQ ID NO: 49037 - protein, 233 aa, Zea mays
  Coding DNA Sequence Number=SeqID_5662
  Gene Ontology: Mol. function=aspartic-type endopeptidase activity; Biological process=proteolysis
  Homolog annotation: Hit_ID=A7QF49; Match level="QueryCoverage=46%, HitCoverage=25%, E-value=1e-09, Identity=38%"; Hit description =Chromosome undetermined scaffold_87, whole genome shotgun sequence
MSGSLVLGGTGGGEGMQYVPLVKSAAGDKLSYDMYYYLALRGMTVGGKAVQLLAWEFATNAAGSGGAIMDSGTTFTYLDPTVFQPVADTVVTVVGGRYKRSKNTEVGLGLHPYFALPQGASQPTDKPFRTEHMRRLEFAFWFKIIPDRRSFLEKQAKRGPSGPLRRTVRDTRMTLRQNQCKNTSFHYRLSGGKVKTVRALARTVRPQARTVRSGRTVRTRRADRPRSAERPNG

SEQ ID NO: 49038 - protein, 334 aa, Zea mays
  Coding DNA Sequence Number=SeqID_5663
  Homolog annotation: Hit_ID=Q6J9V9; Match level="QueryCoverage=21%, HitCoverage=27%, E-value=1e-09, Identity=45%"; Hit description =Putative uncharacterized protein
  Subcellular localization annotation: CTP_CleavageSite=45; ConfidenceScore=5.54e-01
MVAFQGGHPPFKGNSPHLRPQPSRAESSPTRSKVLPLRHGGWVPRVMQAGPGQKKAKPPRAVRTTAQRLRAFLHFRPGQRAKGRAAMQATCNRTKGAHPFDFDASSMEAQAHTSCNRRAGCYVQETAPPLALVPCPLDCGSGTATRGDTAHDPTVPTEHIGHGSVSHGRRRDGRYSQKWAGSNGGGRQAEAADRRHLWQAKQATLRFRHNDRVKKGTGKGDTPKGILLREGNRPRAPLLIRGSKAGPSEGFNSRLRALGLRAHYWLAPEGFNSRLIRRARDDPGYVRYITKARATLPRLGGCSRKPGSGQTVDNVNIPVENLGLDCAPGLRQFA

SEQ ID NO: 49039 - protein, 239 aa, Zea mays
  Coding DNA Sequence Number=SeqID_5664
MGRCKTEHGGQKQGDRRKGETRGLRVCPAPRSGALAVGGYKRKERAQDNDGPPCDVVGPSPGSGEAEAPPRSRSSLSSEVEVESEPRVGRGGDRRLRPRLSPSPEVGRGRVRRLPEPRLSPSPGSGEAEFIVRGRDGGRALGSGEAELPMVPEAGLGCCQPHSVERHSSQSDAILALNASAIRSVGVAIWPRLLLGEDWASGKPKVCPLLEGALGRDVNPPGSAALARGWARARRDRVP

SEQ ID NO: 49040 - protein, 779 aa, Zea mays
  Coding DNA Sequence Number=SeqID_5665
  Gene Ontology: Mol. function=protein serine/threonine kinase activity; Cellular component=myosin complex; Biological process =protein amino acid phosphorylation
  Homolog annotation: Hit_ID=Q7XYY6; Match level="QueryCoverage=87%, HitCoverage=68%, E-value=0.0, Identity=71%"; Hit description=EDR1
  Subcellular localization annotation: CTP_CleavageSite=76; ConfidenceScore=5.71e-01
MKSLFKSKIRWQHRSNDPASPSGQPQPQPQQALGPPSPSPSSSPSSAAPLSVSTAATSSPSSPPSAAATPTGAGAAAAAGAGAAGEDYIASEEEFQMQLAMALSASSNSDCVGDLDGEQIRKAKLISLDRFAAHRDEGHTAESLSRRYWDYNFLDYHEKVIDGFYDIFGSMESSRQGNMPSLADLQTGIGDLGFEVIVVNRAIDSTLQEMEQVAQCILLDFPVANIALLVQRIAELVTDNMGGPVKDANDMLTRWLEKSTELRTSLQTSLLPIGCIKIGLSRHRALLFKILADSVGILCKLVKGSNYTGGDDDDAINIIKMDNEREFLVDLMAAPGALIPADILSWKGNSLNSNRKLGLSQTAGSSSTVGANMGPSVLPLEPKGDQLPLFSSGDWISESGSGYGAAETAASTQTSSGATSSVPAGSAFDSSWMLINHDQSDGPSTSAGTSSQQKVVPQNEHPRNLNRLPDLQEIPESKNLFADLNPFGDTKSKKTSVPFKGPDQRNNELQKRRENIVPNGGRPQQRLVMKNWSPYNDVSNNKQYNYVEDSFARRNVGNNAASSSSQITQQAARSNLNSGLRNDASYHNYDSIMAGTSATNITSTAETGKVPERVLRGDLDKGQTNYRLQDQHVVGQPPQERLPWGNPAEGRVPMNRFQNQAKQHMGNIDTKQDHKKLLPDPKKSPLDRFMDTSLPSRNLDVRSQRLDFDDVSECEIPWEDLVIGERIGLGSYGEVYRADWNGTEVAVKKFLDQDFYGDALDEFRSEVGELLSVSILEFS

SEQ ID NO: 49041 - protein, 99 aa, Zea mays
  Coding DNA Sequence Number=SeqID_5666
MPRAGGGNGKCEGKPKAGGVLVVRLRGAWRDCKMARLLCDCGGWRIGSRVGSGRPSTFGLISKRENLKRYEGWQCRSCEAGKLRHVRRKGNRLKDEKVI

SEQ ID NO: 49042 - protein, 96 aa, Zea mays
  Coding DNA Sequence Number=SeqID_5667
MKSMFYAPYLRSVTRLSDDSSDYPILTRLTRPVEPPPDISGDVSANLTGRLQERKPQLNCPEASSAGVWSKRSTTEVEVQLELRKLNSVEVQLSCS

SEQ ID NO: 49043 - protein, 213 aa, Zea mays
  Coding DNA Sequence Number=SeqID_5668
MGSDWNQVMSQYGSFLSQIDEQPIGTQHSEFPVDGQPEGSRTPAVTKKPTQRTKLANFTTEEDTRGRNVKDFGVELLKHTTQDEEHCQKEESVPSSFTSKRPLGRDSSKEKAKRTKSVDTSSSDSEFMTRMGDLSLERLSVYKTAVTTEEKKLDSMNKNERQKLLLEKKKLNLEKLRLERQKLKEDKEEEIMILSMDLSKCNPLLRKYYEAKQ

SEQ ID NO: 49044 - protein, 201 aa, Zea mays
  Coding DNA Sequence Number=SeqID_5669
MPPFARGLRCSRWSNGDKAGRDTLRPTRHQAKACDEVIPPCGLVQLGGPQDVADTLNVEGSGSALSALLLHQPPRGNFRVLLPRAGDCIFRGRALDPARFAADIEAGGREAAVRRRVCRRRARTPSNRGRATHRNPRSKLASPCSSPESRHRQKASSSADFVEGSRQKEEKLVAAVVFLFDSVHRGRSAKSEVHIDAMYID

SEQ ID NO: 49045 - protein, 110 aa, Zea mays
  Coding DNA Sequence Number=SeqID_5670
MEGVLEFAPTYKYELGSRRSLIVSIIIQATLGSGSMVMMTQKSTHSKCGVHEGFELPVLYSPGQSTSQSCATDRFDLESKAVVVPRTICYQNKKDESGWWPRLMKKDLCS

SEQ ID NO: 49046 - protein, 82 aa, Zea mays
  Coding DNA Sequence Number=SeqID_5671
MSDDLVIPVHFEVGQEFCFCLLDHTLLVLLELELFVSRQELSLEPTIEGRFDASIFAVPSGVAKKGGLSAAWGWTVRGLVPG

SEQ ID NO: 49047 - protein, 209 aa, Zea mays
  Coding DNA Sequence Number=SeqID_5672
MGAIQVKAPSTQGTRSRLTRAQPRAGTVYPGFAEKRPWPDRLANRPYRRSIQCKDRLTPYPDARSSVDKAEPSPASGAIGSSASPDPKARPPPRPRKTVSASPDPRAWTQPRPRKTVSASPDPRARTQPRPRRSHRLARPWARTDHVTGGYIITLPLASSGYGEQDRRPIWLAPDYGSSLPDTLAYFYTPHCTPGPSLKASRPLVGFSD

SEQ ID NO: 49048 - protein, 364 aa, Zea mays
  Coding DNA Sequence Number=SeqID_5673
  Homolog annotation: Hit_ID=Q336Z6; Match level="QueryCoverage=53%, HitCoverage=78%, E-value=2e-72, Identity=64%"; Hit description =Expressed protein
  Subcellular localization annotation: CTP_CleavageSite=75; ConfidenceScore=5.65e-01
MPLHARAPPLRHSHLLLTAATARLRPCAAPATKPRRRSLVLVRASSSDPPQQQLNLSVLRFTLGTSPRLFSLHLRSEAVGLCLAAFSATLPFLGRFLEGADAASRVPLPEGSIQVFVMSENLSAVQKEDMAWASYVLLRNTNTTSVVIAIGDLLCVRGYWNPPANTSKYSTIEWFKSQMQQLGLVDLRGALYFPNSSDSQLAKILPDGILSVLAQPILSPDPANNETKTEGVILLACNANYAYKMLTVRQYWKMDRERLGSSYFSSVSKTPAFLLIVELTSDDNPIKGLTSVLSVEQVLNAKLTGFNTKTTDQAKDGGKKSFEVPSAWEKVKETRNPKTGVKKKTCKVKVDRVKKSYDASRITT

SEQ ID NO: 49049 - protein, 68 aa, Zea mays
  Coding DNA Sequence Number=SeqID_5674
  Homolog annotation: Hit_ID=Q7G256; Match level="QueryCoverage=88%, HitCoverage=58%, E-value=5e-07, Identity=48%"; Hit description =Expressed protein
MLVIDLGIWLIPLALVLVPCRRIALLLSRLEELGRSVTGPRLPTADMWARFATLNSMAFMALDIALTA

SEQ ID NO: 49050 - protein, 122 aa, Zea mays
  Coding DNA Sequence Number=SeqID_5675
MGKSNKRKREPTPPSEDFGDSEYSEEEFSSKYEGSPAPVSPPASSDDSDDSHGIAAEGSDESEYSSDEEDSSDSSEEGSGGDGGDDDDGGDGDDGDDNGGGGDGGSKGGNGGSSKGSSKASG

SEQ ID NO: 49051 - protein, 168 aa, Zea mays
  Coding DNA Sequence Number=SeqID_5676
  Homolog annotation: Hit_ID=Q6J9V9; Match level="QueryCoverage=47%, HitCoverage=31%, E-value=5e-10, Identity=45%"; Hit description =Putative uncharacterized protein
MAAPRTTRPVALTPRQGRRHLWQAKRATLHLRHDDRVKKGTGKGDTPEGILLREGSGPRALLLIRAASGHSGSAPTTDQGFEGWPPEGFDRRLRMRRARDDSGYVRYMAEARATLPRGSGAALANLAPAKPLTASTYQPENSKPDYAPGLRPVRMREQIDRPRRHARH

SEQ ID NO: 49052 - protein, 377 aa, Zea mays
  Coding DNA Sequence Number=SeqID_5677
MVTQDGDHQFRWWGRSKSGCGLCPALSFKDLHHPCWGEGELSRSSTSRTGERALTGLAEGVDFDNAGPIGRKRHQLQHAWFAGSAGSGTTSGSTSHRWAERGYLLAVRAAVASRAPGDSPRRRTLLGRRSCSWAVLPSLRRDASVRWSVLARPGGLEWGSNGGQVAAIVSAEVVATGEGLVADEIVGAICAPGLRLFGFDSLSSPLEWGRGLGPCRSSLCPEVIAAAVWPPGAEVVVAAAGVGGGEPPGNCRPAGPPMPKRRSSGGWNLARSSAGGTDAGVGLPRPRARLMRGADIFLRGGDPPTVSPSEAGSDSAEGGDDAEGAAAPPIDDLFVGSRIVYPSESYLSRKVMSEESLGSVSLAAYVYSAVFRIPLSK

SEQ ID NO: 49053 - protein, 109 aa, Zea mays
  Coding DNA Sequence Number=SeqID_5678
MKAGAPLSPALALYMEGVAGALIDGITARGRLPRSALSPALALYMEGGDTAQIDGIKLIAHGFPAPRSPVYSYCSSPASQPTTDSTPLTKQWRGGADAVHLALSEAYEQ

SEQ ID NO: 49054 - protein, 66 aa, Zea mays
  Coding DNA Sequence Number=SeqID_5679
MGLRLTRGTLGWKMHICLAEGISGEGPATSPSSTKILRTSGPLGKAVFFAECQLGHSAKSPPERVP

SEQ ID NO: 49055 - protein, 511 aa, Zea mays
  Coding DNA Sequence Number=SeqID_5680
  Subcellular localization annotation: CTP_CleavageSite=49; ConfidenceScore=5.23e-01
MVKNFGSKTVQIAMNAVVTSHLLVCLYSTVGKKAKRQDFYTRRTPARTRCVVDRRDQTVTLQGGAAIRWEIESFLDNELREAFENKSPTGSLAKQRVEQLEERLSALRARVERVEASTRAEAERTRKQLMDSYHELGAWTADFEVPDREPGLCCLEWVQEELQALPTIVEGFMSYASLVTCEGAMNALSREGCRHYEVFDQADEDFERDIYKVEDPIVKESAGALYDRMWGPHGQEVVREQAETARGQATRGERVDDFGALNSTLPGPESNPAAAVSEAALEPPPETAEGAPDAPAAAAAGGGRPPETAEGVPDAPAAIAAGGGPPPTATPRAEDPVTVEAEATAEALATAGSSQVQDFGPAHATATTNFLAASTVDDGNKSDESASKFSEFGDSGSSVEWTEESSNEDLDYFAALDVAAEEASPHAVDAEAVPGPSAGRRRRRAIAKRRVSGADGGRLRVSRAGRQELLSLPAAISAGEGELRSLFAGEELRIMLFNYREMGIIPKVEPM

SEQ ID NO: 49056 - protein, 306 aa, Zea mays
  Coding DNA Sequence Number=SeqID_5681
MVKNFGSKTVQIAMNAVVTSHLLVCLYGTAAFENKSPTGSLAKQRVEQLEERLSALRARVERVEASTRVEAERTRKQLMDSYHELGAWTADFEVPDREPGLCCLEWVQEELQALPTIVEGFMSYASLVTCEGAMNALSREGCRHYEVFDQADEDFERDIYKVEDPIVKESAGALYDRMWGPHGQEVVREQAETARGQATRGERVDDFGALNSTLPGPESNPAAAVSEAALEPPPETAEGAPDAPAAAAAGGGRPPETAEGVPDAPAAIAAGGGPPPTATPRAEDPVTVEAEATAEALATAGSSQVA

SEQ ID NO: 49057 - protein, 298 aa, Zea mays
  Coding DNA Sequence Number=SeqID_5682
  Gene Ontology: Cellular component=chloroplast thylakoid membrane
  Homolog annotation: Hit_ID=Q10A81; Match level="QueryCoverage=45%, HitCoverage=16%, E-value=6e-39, Identity=60%"; Hit description =Expressed protein
MYIDNVTELAFDDVTPEDPDFPFIQGEACLEAKFIAAVESEMEVLLKLRSEVEEQLQNVLSKKVEVSFEKSRIENLQKEFESDNSAVVQLQAWAEEEAKKAREHARALEEAQNQWERQGIRVVVEGELKDDASARVTWANAGKEHAVDESINRAEALLEKLKTMSGEMEHRTVRWCTGQCPVRQAGSSEVAALGNSPATYGYNSPDCPVCTGLSGEPTVGRAICAGHVAELTARRGHRTVRCAPDMSGAPMALRLPTVDCVISGKKSGTGQCPVCTGLSGAPVDRRQDQPSWIALNGS

SEQ ID NO: 49058 - protein, 211 aa, Zea mays
  Coding DNA Sequence Number=SeqID_5683
  Gene Ontology: Mol. function=helicase activity
  Homolog annotation: Hit_ID=Q1EPC6; Match level="QueryCoverage=57%, HitCoverage=7%, E-value=9e-12, Identity=32%"; Hit description=DNA helicase homolog, putative
MESPTYTPEVVHPATNAIEPDGSTVTPCDWVIPEIASNPFLPASTHTEDADSLHMSTRPLRHKQHVPRGERQAILARRNRQFEASISRNKATATEDTMGDAGEGDDRTQPHMTAKINNNVQCRNQCHDAIVATNESASMTEQGSGVDHTQSKPRVISNVDDDDGVVFEDDADENEGYLFAGQYDYTDEDIEVDVSQDESTATDVCDPYHKV

SEQ ID NO: 49059 - protein, 71 aa, Zea mays
  Coding DNA Sequence Number=SeqID_5684
MTVEQKNEKSRKRREVSQRNKGPPIQPEVYDHLGSVSLLDGCSTIDFTNFATQDGNENVNANQDDDSDWFA

SEQ ID NO: 49060 - protein, 79 aa, Zea mays
  Coding DNA Sequence Number=SeqID_5685
MSSVFAGGSTALCVSLLVLLVEADSGEAETSPEAEAEARSAHRSLETWTTVHAKMIFMLLSISYDRLQVRTGNFEQHAH

SEQ ID NO: 49061 - protein, 180 aa, Zea mays
  Coding DNA Sequence Number=SeqID_5686
  Subcellular localization annotation: CTP_CleavageSite=39; ConfidenceScore=5.19e-01
MAVAGGQEQRSRRQPSLRPIQGRRGNPLSRREDNVHVFRSSNGSRTRNGRLANHSPRRINSTAGQAAPLAGEAGAFAIMTALEKGPGKGDTPKRIFPREGTRLRASLLIRGSKAGPSEGFNSRLRARGLHTHYWSEVRRPAPRKGSTAASGYSGSSPTTDQGFEGWPPKGSQPPQTPSEG

SEQ ID NO: 49062 - protein, 360 aa, Zea mays
  Coding DNA Sequence Number=SeqID_5687
  Subcellular localization annotation: CTP_CleavageSite=26; ConfidenceScore=5.48e-01
MSSRSLMHCVFPSSKPPDGGYPPSFRLVVGGTQLRGSWYLSAIVRLQGFSSVSPAASPRRWSPKTVTTSPWVGRSKPGCDLGPTLSFKDPLPQRSRERALTGPARGADFDNAGLVDGGRRQLQRVGFAGLAPGAPSCRKGGYRAVRTGGPPKTSRAARAAFVFWGGPAFAPVRRLRAEPLERRRGRGQGCSGVRPEAIAAAVRPPVEGVVVAAAGASDVKGTPRPLFDEPRLGVAVSARTEAELARKEDLVGRSLVGSSVSGTNAEIDQPRPRVGLTSSEDSWPRPRGDRPSRLLGPDSRRRPRRRWPGRGDDVVLQSGDLRTASPSEARSDLAEGVVDAEGAAAPFKRQDPSLQDRIVL

SEQ ID NO: 49063 - protein, 241 aa, Zea mays
  Coding DNA Sequence Number=SeqID_5688
  Homolog annotation: Hit_ID=Q6J9V9; Match level="QueryCoverage=51%, HitCoverage=43%, E-value=4e-49, Identity=80%"; Hit description =Putative uncharacterized protein
  Subcellular localization annotation: CTP_CleavageSite=78; ConfidenceScore=5.02e-01
MAVDMTEGGPAVIAATDEGRQRSNHQPGPGPTSGLASSLKRQKSLRALSHSIKTTHLCSVPRMTRARATDTPRIARPVALTPWQGKRHLWKAKRAPFRLRHDDRLKKEKGYFERILLNERNRPRALLLIRGSTIAPYGVQQPPQSTRALSPLLIRGSKAGPSEGFDSRPKACRVRDDPGFVCYMAEARATLSRYHRTFLRPAGAICNGIPPEGGTEPSDPIKWVRVQQITCMYFWSAPLGH

SEQ ID NO: 49064 - protein, 76 aa, Zea mays
  Coding DNA Sequence Number=SeqID_5689
MAGAAATGKMAARVRMLGLMGLRLHEDEFQASRGQDSRRPKIGVWTDMCIPPMTNNSGSMKMSSRHQEVKIPGGLK

SEQ ID NO: 49065 - protein, 241 aa, Zea mays
  Coding DNA Sequence Number=SeqID_5690
  Subcellular localization annotation: CTP_CleavageSite=68; ConfidenceScore=5.42e-01
MSSSSLMRRVFPSSKPPDGGYPPSSRLLIGGTQLRGSWYLSAIVRLQGFSPCSPAAPLHRRSPEMATSGLMVGESEPGCGLCPSLSLKDFHHQGWGGESAELGVPGLQTRVASEPLAAPASTTTAGRGSSAGAIAGAGHGLTSNSTAFCLSLPHEFWRGRGPPGSGIHPEVSVAAVRPPGAEVVVVAAAGAGDGALFVGLPLLRRPSPRSGVVRTCGGGTGVPFVMAFRLPVFLFIAAVEA

SEQ ID NO: 49066 - protein, 77 aa, Zea mays
  Coding DNA Sequence Number=SeqID_5691
MVEKVYMGRMELPQVACLDLPSSVQEHGCNKSGKNLMESWKAPTNILPRDIWDFNNLDPEIKLSNPEQEEYYYHFDS

SEQ ID NO: 49067 - protein, 140 aa, Zea mays
  Coding DNA Sequence Number=SeqID_5692
MGKNNKRKREPTPPSEDFGDSEYSEEEFSSESEGSPAPISLRESSDDSDDSQGLAAEVWTYIRAVERSGLEGSDESEYSSAEKDSDGGGEDEDDDDDDNDEGGGDGDGSSRGGSSGSKNGDGGGSRGGSGSSRGSNRASG

SEQ ID NO: 49068 - protein, 255 aa, Zea mays
  Coding DNA Sequence Number=SeqID_5693
  Gene Ontology: Mol. function=phenylalanine ammonia-lyase activity; Cellular component=cytoplasm; Biological process=phenylpropanoid metabolic process
  Homolog annotation: Hit_ID=A2X7F7; Match level="QueryCoverage=23%, HitCoverage=8%, E-value=3e-20, Identity=91%"; Hit description =Phenylalanine ammonia-lyase
MQRSHARIGRQNYREINSNSSLSFSYTLLSYPRVLPHGRVYKAQGAPHQNDRPYYLAAHFDSRHSQFREPSCNLIHSAYSPGRRVLRISKRPEPVNLVHCPSCNWHEPFCYSRRHRPTPKNTLRGNPGIYKAEYRQPLVKIEGASLSIAQVAAVATGAGEARVELDESARSRVKASSDWIMNSMMNGTDSMMWGGAAGGIRVRSLRLLCSQTSSTSISRVFAATAHGCHSGPRQCRPSSSPCRRHPIAAPGSLRC

SEQ ID NO: 49069 - protein, 202 aa, Zea mays
  Coding DNA Sequence Number=SeqID_5694
  Homolog annotation: Hit_ID=Q2R8U1; Match level="QueryCoverage=25%, HitCoverage=14%, E-value=1e-10, Identity=62%"; Hit description =Expressed protein
MVEVLEGRNDYTDRSGYNGPPDFRSQSQYQGHVNPAGQGQGYNNPQERSNFSQGQAGEHLLLLPHLGLMANHQHLDLMVNLIHLHMVEITGKEVLVSILAQVKDKETGRGLLTDQVLEDLTMYLRRQREGGDDAGAVVASSRDDNDVETMPESSEPYQHASSRDDDIKAMPESSDPYQGPAHACQEMGRRPIFIPCSSYVWD

SEQ ID NO: 49070 - protein, 226 aa, Zea mays
  Coding DNA Sequence Number=SeqID_5695
  Gene Ontology: Mol. function=receptor activity
  Homolog annotation: Hit_ID=Q7Y1J0; Match level="QueryCoverage=99%, HitCoverage=99%, E-value=1e-23, Identity=36%"; Hit description =Putative prenylated Rab receptor
  Pfam annotation: Domain name=PRA1; Domain location=60-211; Score =140.3; E_value=5.5e-39; Accession=PF03208.10; Description=PRA1 family protein
  Subcellular localization annotation: CTP_CleavageSite=58; ConfidenceScore=5.43e-01
MSSSTASWSRYGALPTSPPAPQLKPEDVAAAGGDAAPSSSSAAATAAEAGVAFFSRARAFAGAAAGRPRAWREVLDPTAFSCPDSCGEARARARRNLAYFRANYALAALALVFLGLVYRPASMLAFLALFVAWLGLYFGRGGGEPLVCLRREVDDRVVLAALSAATVLAVALTRAGLNLLVSLVVAAAVIGAHAAFRVNLYLDESDAFDVAGASFTDTAYGYALPS

SEQ ID NO: 49071 - protein, 137 aa, Zea mays
  Coding DNA Sequence Number=SeqID_5696
  Gene Ontology: Mol. function=DNA (cytosine-5-)-methyltransferase activity; Biological process=DNA methylation
  Homolog annotation: Hit_ID=O49889; Match level="QueryCoverage=79%, HitCoverage=6%, E-value=2e-09, Identity=37%"; Hit description =Cytosine-specific methyltransferase
MAPASQQYRYVSVSLQLDLWSLSSKIRGVTVFLSEHISMEMNDLAEYHQGASTFQNDWQKPLEETVTNHAPFANGYASTCQPVEWWTCCPTPPKGTINGRGSMGGWTGRAASPTSVSDPQPVGKLGMCFHPEQILYL

SEQ ID NO: 49072 - protein, 85 aa, Zea mays
  Coding DNA Sequence Number=SeqID_5697
MSTGVKRLNEAPHPPSSFRHHRLCIRESSAEECGSDRHSNPDAGGAYGVAQFRKRAFIWAAAPGETLPLDSGVGLNQCMSPQALS

SEQ ID NO: 49073 - protein, 190 aa, Zea mays
  Coding DNA Sequence Number=SeqID_5698
  Gene Ontology: Mol. function=DNA binding; Cellular component=nucleus; Biological process=regulation of transcription
  Homolog annotation: Hit_ID=Q5WA77; Match level="QueryCoverage=74%, HitCoverage=34%, E-value=1e-26, Identity=47%"; Hit description=MYB transcription factor-like
MDFSCFQPHMGVCSYLPFDPYMQQDGRYELHPVEHHHPFEAIGDYTPATFDDLGRQLFFAESKKPVSGHASPIGRSRVGSSQLPLLTPKAEVSHLMDISGLAGSYKAYETNGRFLPRKKTSSNKANVVKGQWTAEEDSEAGKTSGTVWAEEVVLHSTAAARKSGKAVQREMAQPFEAEHQDISKWNNEIS

SEQ ID NO: 49074 - protein, 58 aa, Zea mays
  Coding DNA Sequence Number=SeqID_5699
MGSLIVMKVAVAPKLCGRECANGRLMWRAPDTAQWLFGGAPDSPVHPTTESCCFLSNG

SEQ ID NO: 49075 - protein, 219 aa, Zea mays
  Coding DNA Sequence Number=SeqID_5700
  Gene Ontology: Mol. function=kinase activity
  Homolog annotation: Hit_ID=Q6QP54; Match level="QueryCoverage=21%, HitCoverage=15%, E-value=3e-09, Identity=71%"; Hit description =Putative kinase
MRSSSSSGAEPESEPWGRAKRSSSSFGAEPESEPWGRAMQSSLSSGAEPESEPWGRAKRSSSSSGAEPESEPWVGRGGASYGARGRTWLLSAALCRVAQQSERRRRRYPFVRPATFALNAPAIWSVGVATWPRLLLGEDWASGEPKAVAALCLWGLPAEIRSLEAGLVVPSCELAIARGERTVKDRLDFFTYAPVSPFRKEEGEKRYVALGGRRTWCLQ

SEQ ID NO: 49076 - protein, 48 aa, Zea mays
  Coding DNA Sequence Number=SeqID_5701
MGRLEPRAEWESRLVGKVCNLYNVLELCSGGEAGNMEDFEEFQEYDEF

SEQ ID NO: 49077 - protein, 80 aa, Zea mays
  Coding DNA Sequence Number=SeqID_5702
  Subcellular localization annotation: CTP_CleavageSite=30; ConfidenceScore=5.22e-01
MAQGHISLSGASTDKGTGTRAAHLGRSDTQAWTVRPYSRPATTAYLQTTTFTGCKVDCTEALRMQHLKEDIIRLIEGITK

SEQ ID NO: 49078 - protein, 89 aa, Zea mays
  Coding DNA Sequence Number=SeqID_5703
MALQDKNLLEIPGRPQPNGCFPMGVTKGRLAMGKDKKGQGSPRRSGDKRKRERSPLSEDFGDSEYSEEEFSSESEGSPVYASPPPGVVR

SEQ ID NO: 49079 - protein, 44 aa, Zea mays
  Coding DNA Sequence Number=SeqID_5704
MDLFTRPLLLALVSLLVCVTPWCRWSRLYSPDEVLSPFVGGDVE

SEQ ID NO: 49080 - protein, 77 aa, Zea mays
  Coding DNA Sequence Number=SeqID_5705
MTNNIIKDFGGCFGGNSTDFFSKNSLEALALASLIDDYYIEDCGVILALEVTQRRIDNSDQFVILATVRVAFVSVCL

SEQ ID NO: 49081 - protein, 133 aa, Zea mays
  Coding DNA Sequence Number=SeqID_5706
MPPQYAVQLFEEHQLSTHPIGLFAAEKEDGPMWKDRVEHAKDVWALYPGQTTHLTVGAREKTIEVLEDQLLTMQQQLEEANQHLDMHHQEIQDMEEEGADEDVDIEGGEEPEPASSLDTTGSRRPPSPESSVA

SEQ ID NO: 49082 - protein, 154 aa, Zea mays
  Coding DNA Sequence Number=SeqID_5707
MNKNTRDTRFIPRFGHTTKVPYFLVEAPTKSRVSFNPNPPFADHKGQAHTLIFAQTSGFLSKDLKWERQEMCEREWEVFFKLEMEFGSCSYVGREDRFNRLGQADSQSASQTGRLQVRLQKQVLTPVEPPLGPVQPPGGQTGSQSASQEVRLVS

SEQ ID NO: 49083 - protein, 293 aa, Zea mays
  Coding DNA Sequence Number=SeqID_5708
MKILEAERWLKGTNSHGVAFLQRQGGRTAAVVGRVFSNTLQGPPPTARGLGPTRHANWPRAEEAKPPRAVHATPSGYEHSSTFAQTSGRKGGQPCRRHATAPSGRAPPTSNAPSMGAHAHASRNRRTGCNVRATAPPLAPLPRLLDCGTSTATRGNPAYDPAVPARRDGQYDQKWAGSDGGGRRAGAAVTSSAKLASLLELALSRKGIQRGARYNGPDHTWASKLDEAARWDDLVAGLRPMLYQAKGVPARFVSVGPATVAKASSEGWRLCLRPNICPPRDQFDKVTWCRRRR

SEQ ID NO: 49084 - protein, 267 aa, Zea mays
  Coding DNA Sequence Number=SeqID_5709
MRAGRSPGARSGSKFSGWYVDAVNGLAGAEFARAAPEPLHRARGRSRTDSTFLHTPLRRLSARRMGGKRHVALGGRRTWCLWCLRAHASLTQGVGRSDTYKYPRTVPVCGKINRAIAILCENPVDVTVHPRWIPLRLRASSNIWRPPFVLRENHSRWHPRKLTRRLTRLRRQHCLPQERARPSPSPNPPTKRPLKTTFSAPAKMTLSAPAALKDNRSPPGFAPLEGVDLTEDGEVLGVSAEEQLQLRALRLKNRNLQRQKEILEAKR

SEQ ID NO: 49085 - protein, 128 aa, Zea mays
  Coding DNA Sequence Number=SeqID_5710
MSAKKGYAPIPAVTEPPKNVSPVLQTLQNIGDKEMRKRLHNLHLLKGFKEGNQVQGSKQVRKILKTSREVENAPGLAFVNRKPLRLLFLRTAKPTTALRTAELRRASVLADLGDDWRSQATYTKSDLS

SEQ ID NO: 49086 - protein, 310 aa, Zea mays
  Coding DNA Sequence Number=SeqID_5711
MARLRHTARKSVIPFLPSRLAERPLRRTVSGQSSHLERLHHRLREEQERQRQHREQQGSSSPPEQEVESVRRRSSVPQLEAPPAPPRDAPAVGGATGGGPGGDPNDDNSDHSTESSEPQGGRKGWVARPITRDAARGCHFHDALDTLLRQAFDRHTWSIEYRCVVYQHSRGRYLDRWEATCLVRRPEDDLRGAEAVSEHYSISERDTAEAAMQDAARQSVVVSPVGEDNPRLSSTINLVAVLNTELDHSLDELSRARTEIAELRAELAERRHQEGGSPAPVGTQHPYRSPPRGHHTYGSPACKTRIDLDP

SEQ ID NO: 49087 - protein, 38 aa, Zea mays
  Coding DNA Sequence Number=SeqID_5712
MSSYTMVERCCHSACPVGWKMAVASAYSSPWEHGAAAD

SEQ ID NO: 49088 - protein, 34 aa, Zea mays
  Coding DNA Sequence Number=SeqID_5713
MEKDTKELEVVFEAMYLEETGGGKEEVEDLVERT

SEQ ID NO: 49089 - protein, 73 aa, Zea mays
  Coding DNA Sequence Number=SeqID_5714
MEVEDAAADTVVAAGVRLIAVEAEAEAAPFRLFLREGEQRLLGRRRRGKSARGSPAARGGQLGRPGPQLGRPA

SEQ ID NO: 49090 - protein, 38 aa, Zea mays
  Coding DNA Sequence Number=SeqID_5715
MSSYTMVGRCCHSACPVGWKMAVASAYSSPWEHGAAAD

SEQ ID NO: 49091 - protein, 404 aa, Zea mays
  Coding DNA Sequence Number=SeqID_5716
MTSESVMLGSSQLRRSQEFPGRKAARGLPSPSKRVADFATDISVDDYLGGSDEGRLVIVAPAAATTAAAVVPKAKGGALSAGGEMLALAAVRDEAGAVSRRLKEMKEALSQAADFADRTTSGALTAVVSAEVERLRTQHADAVREKSTADSKCRKLADKVAALEGEKTDLRRQLVEERREANEALAKAQAALAEANLARAEGSLARERAEQLEERLNALQSRVERTEAATRTEAERTRKQLMDSYHELGAWTGDFEVPDREPGLCCLEWVQEELQTLPTIVEGFMSYASLVTCEGAMNALSREGCRHFEVFDQADEDFERDIYKVEDPIVKESAGAVYDRMWGPHGREVVRERAETARAQAARGERVDDFGALNSALHDPESNPAEAVSEAALEPPPGNCRRRS

SEQ ID NO: 49092 - protein, 161 aa, Zea mays
  Coding DNA Sequence Number=SeqID_5717
MNKTPALKVPLQTELRFHLRRNDQPHTIGGPTEQQKADGRLAVARSSSGDDDDFCSGGPNSSSDDLRADAAAIRPSPMPSLKRQGRAEGRRIGGNSPYLRPQPSWAESSPTRSKVLPLRRGGWVPHVMQAGPEQKKSNRRARCMKLPSGYEHSSTFAQTGG

SEQ ID NO: 49093 - protein, 68 aa, Zea mays
  Coding DNA Sequence Number=SeqID_5718
MTSQELKHGSPRTNKSVVPDVDEPTSKDLIDGDRVLALQALDKYQVQIKAWPDNAVVPREFSEGDLVL

SEQ ID NO: 49094 - protein, 184 aa, Zea mays
  Coding DNA Sequence Number=SeqID_5719
  Homolog annotation: Hit_ID=A2YHW7; Match level="QueryCoverage=68%, HitCoverage=29%, E-value=7e-19, Identity=46%"; Hit description =Putative uncharacterized protein
  Pfam annotation: Domain name=DUF1005; Domain location=6-184; Score =84.6; E_value=3.1e-22; Accession=PF06219.3; Description=Protein of unknown function (DUF1005)
MQHGEMVAPLSLYDDGWPGGGEVAMGMTGDGELVMGRPDHLLAPASTKPPRHPRRLRTGDAQLGYRFELVPDHNSNITDSAVCVAESSVPAVRGGQFAIDLTTAGSPGRGSSELGHALWPPGGFVMSAAVQEEGRRGRPSVGISVAHFGCAEDAAAFVALAAAVDLSMDVCRLFSCKLRRELSA

SEQ ID NO: 49095 - protein, 75 aa, Zea mays
  Coding DNA Sequence Number=SeqID_5720
MSLVGPWLLTVKFGQLDGVRGPFEKRTICTASDPTAYGTQICEKIPTLESGLYYTCIKLIEHGAYKFYTLPTYYN

SEQ ID NO: 49096 - protein, 107 aa, Zea mays
  Coding DNA Sequence Number=SeqID_5721
MKLLGSPYMCVVLPGVMIAVNRRNFLPAVKIRGMARTHTLVTLTLGIVWIWGLMAFGPWDRDPVAEVESRFIKVLDLILTVGARSSGPGGRIPFQSDGFSNTTLGSS

SEQ ID NO: 49097 - protein, 351 aa, Zea mays
  Coding DNA Sequence Number=SeqID_5722
  Gene Ontology: Mol. function=transcription factor activity; Cellular component=nucleus; Biological process=regulation of transcription, DNA-dependent
  Homolog annotation: Hit_ID=Q5NAQ6; Match level="QueryCoverage=99%, HitCoverage=97%, E-value=1e-77, Identity=50%"; Hit description=Pti6 -like
  Pfam annotation: Domain name=AP2; Domain location=110-161; Score =81.5; E_value=2.8e-21; Accession=PF00847.11; Description=AP2 domain
MEEEMFLAVKRTEHVEVTSRAMDSAPAAGPRTVRVFCDDNDATDSSGDEAEGAAARRRVKRYVQEIRLQRAVPVKEEAASARAVAGERPRPLALPGRKRKSDGAGAGAEPRFRGVRRRPWGKYAAEIRDPWRRVRVWLGTFDTAEEAAKVYDSAAIQLRGADATTNFEHAAVPVPVPDEVAGRLPQPPPAPASKNASSSATSSYDSGEESHAAAASPTSVLRTFPPSSAAADATCKKPAPAAETDESTGVGGSRSSVYAYPFFANDDCFGGDFPPLYTDFDLLADFPEPTLDFLADIPEEKLPPLPEPFPAASPDECPSDAEAASPARWQQVDDFFQDITDLFQIDPLPVV

SEQ ID NO: 49098 - protein, 405 aa, Zea mays
  Coding DNA Sequence Number=SeqID_5723
  Gene Ontology: Mol. function=flavin-containing monooxygenase activity; Cellular component=microsome; Biological process=aromatic compound metabolic process
  Homolog annotation: Hit_ID=A2WM93; Match level="QueryCoverage=85%, HitCoverage=84%, E-value=1e-120, Identity=61%"; Hit description =Putative uncharacterized protein
  Pfam annotation: Domain name=DAO; Domain location=45-268; Score= -50.4; E_value=0.022; Accession=PF01266.15; Description=FAD dependent oxidoreductase
  Pfam annotation: Domain name=FAD_binding_3; Domain location=39-273; Score=-161.0; E_value=0.05; Accession=PF01494.10; Description=FAD binding domain
  Pfam annotation: Domain name=FMO-like; Domain location=46-400; Score=- 400.7; E_value=3e-06; Accession=PF00743.10; Description=Flavin -binding monooxygenase-like
  Pfam annotation: Domain name=Pyr_redox_2; Domain location=45-332; Score=-19.6; E_value=0.00071; Accession=PF07992.5; Description =Pyridine nucleotide-disulphide oxidore
  Pfam module annotation: Pfam domain module=DAO::FAD_binding_3::FMO -like::Pyr_redox_2; Domain location=45-268::39-273::46-400::45-332
MDRRRFAETEGKRAHDPLYSPRRAARATATGFPVGEHGEVLAGPVIVGAGPAGLAVAACLTMRGVPYVLLERHGCVASLWRHRTYRRLRLHLPKRFCELPLMPFPPSYPAYPTREQFLAYLEDYIATFGIRPFFRQAVVSAEHDGDFWCVRTLDGGGTSREYRSKWLVVATGENAEPVVPDIDGIHAFRGLVIHSSDYRSGESYRGKKVLVIGCGNSGMEVSLDLSNHNVHVLPREIMGVSTFGLSLWLLTHLSIQKVDQILLVLTQLVLGDTARLGIPRPNIGPMELKRVSGKTPVLDVGTIAKIKSGDIKVYPAIQSFQEHGVQFIDGKSESFDVVILATGYKSNVPYWLKWAREANAQQLRGEFNVLVLKETKNTEDFVDCITRLVVDLCLLGDNITDTKVA

SEQ ID NO: 49099 - protein, 96 aa, Zea mays
  Coding DNA Sequence Number=SeqID_5724
MYHHKMVNTRKGGGIYLPPNRHTRRIFRQPQQLEMDPAQPPPAGADPAVAAQMGIMQQMTDTLADMHAQMQQERQEMHQEREDIRQEMRREREEIH

SEQ ID NO: 49100 - protein, 61 aa, Zea mays
  Coding DNA Sequence Number=SeqID_5725
MVYVLRFRISLSPMHCNVYKMGETFLGRARRSPSSEVEAESEPWGRARQSPSSEAEAESEP

SEQ ID NO: 49101 - protein, 141 aa, Zea mays
  Coding DNA Sequence Number=SeqID_5726
MTLEPHPLQPGWCSLDSESFGFRAKDTVESTALHVLTTFCGFHPLELSTHPIGLFPAAKEDDPMWKDRVEHAKDVWALYPGHTAHLTVRCMSALYRLQALRGEAMSQLMGLVESTKITLDNREDLVVDLSTELVEKDLQVE

SEQ ID NO: 49102 - protein, 152 aa, Zea mays
  Coding DNA Sequence Number=SeqID_5727
MARVACTLRGKRLDGGLSKVYCNTLHEEVHVLYSRLHLDVPANPVAMGVGHQGQQMPSRTRAHDGAGTSRGREDTPNPPPVLPTLAEAIAALVNATADNTRFLREMAGNQFQQHGGRAPPQGPCETSYLDFSETCPPLFVKAEDPLEANEWM

SEQ ID NO: 49103 - protein, 252 aa, Zea mays
  Coding DNA Sequence Number=SeqID_5728
MDQTISLAARSRRFESSFKPCKIRAHRLGVQCLTDPDCRRAVTALVPTITGMGDHVSGRMRGKILDGRLWCWIRGYLLSNSLLRHEDAGELVGDVCSGLSMAIPVNPRARGASRGANESTCARNRRITHRGAQSTLAGDRVKSGDLDLASSARQSSIPRSGSFAKARRIYSKGWTGLGMALLAGLRWRGIERSLARRLQGKLRRSLASMRLRASGGGASNTWKCSSAHVQQLAEIANLRILAKIRRRPPPST

SEQ ID NO: 49104 - protein, 122 aa, Zea mays
  Coding DNA Sequence Number=SeqID_5729
MKALLKVLVVCAEDATKSRGGLVDHALDHMHDEEIVARTLFAMKEKLELLQQDALEAKVQAFPEIAKYDGDDISVEPTSPSTPPTVTDPSVDEEEFYCPDVSDEWYFSNSDRSTRNSYWNIN

SEQ ID NO: 49105 - protein, 280 aa, Zea mays
  Coding DNA Sequence Number=SeqID_5730
MTSHGSSDGENAQSHMDGLAREGFPRILWEVLQGASYTTPPQYAVQLFEKHRVPRCRVRMTLEPHPLQPGWCSLDSKSFRYRAEDTIEAIALHGLTTFCGFHPLELSTHPIGLFPAEKEDDPMWKDRVEHAKDIWALYPGQTAHLTVRRGEAMSHLTALLEATKITLDNREEHVVDLSTEMVEKDLQVEQMSNEIQELEELVGTRENTIEVLEDQLINTQQQLAEANQHLDMHHQEIQDMEANEDVDIEGGEEPEPASSLDTAGSGRPPSPESSVASFAH

SEQ ID NO: 49106 - protein, 96 aa, Zea mays
  Coding DNA Sequence Number=SeqID_5731
  Homolog annotation: Hit_ID=Q6JAD6; Match level="QueryCoverage=100%, HitCoverage=12%, E-value=5e-23, Identity=61%"; Hit description =Putative uncharacterized protein
MPHTKNVSAPGGGDDEDPRRPFRQVKGKTVYLEQQEGRKKRRTDRAPRAAVAAAAAAAQAELGDQPQTPSDQIAYRDFALAEEKVFSNSLQHLLAN

SEQ ID NO: 49107 - protein, 147 aa, Zea mays
  Coding DNA Sequence Number=SeqID_5732
MTHVGLEWSHGMAYDDSRHTDVAKREVSGLGLTDEIATTIMQLDSLKPVYDIYLHGIALEEKTGSLKPATTYGKGKGPAKIEDAKNAIEDDRPLGEGHFGQEFGGRRYKVHHSARKVMGPKQLNEVVGFAEQLGVSFGVYNLWGGGA

SEQ ID NO: 49108 - protein, 118 aa, Zea mays
  Coding DNA Sequence Number=SeqID_5733
MSFNFCHEVVIPGRSEEYQVWATFLLPCQMTAKLSLKEDMLEETKRLFLALLYSLMDYIEVVDLAIEFVILGVEADSFPLMQPDLPKESFVSFVGVQGREDNTGCRCLLRRHDEGSCG

SEQ ID NO: 49109 - protein, 336 aa, Zea mays
  Coding DNA Sequence Number=SeqID_5734
  Homolog annotation: Hit_ID=Q10SV7; Match level="QueryCoverage=100%, HitCoverage=100%, E-value=1e-142, Identity=74%"; Hit description =Expressed protein
  Subcellular localization annotation: CTP_CleavageSite=28; ConfidenceScore=5.03e-01
MKPPVSRAAFASVLIGPRTLGASLVAARCASSSAAAAVTAYDHASFVKEIAATDPPEHLNSLLNVLQARGEKIVSPGAKRGLIPCVVPLSESPAGDLTSLLRWPTAPTGYTKYTAIFISMVKQYIHRILVEADFSAGTGDDLWAAVGEAGKNLYAKGEFKESQVADLDVYLLKKVGLFPDVIERKTLRHLEKGDNVSALITGEFYTRDQFPGFGRPFVFNAEIFKRVGRTSEAKDSARVALKSPWWTLGCSYEEAAELAGWEDEQLEFIREKVTEEGKREDLKRGKAPEQVILDEAAFLMDLASVDGNWDEVVDRIAECYREAGLHDIANFIAYRE

SEQ ID NO: 49110 - protein, 48 aa, Zea mays
  Coding DNA Sequence Number=SeqID_5735
MAAAGVSGALYAKAVLFWMFGCWCDLAFIPTRSKAEGVTASAGEDQEE

SEQ ID NO: 49111 - protein, 201 aa, Zea mays
  Coding DNA Sequence Number=SeqID_5736
MAQGHISLSAISAFVEPSMETVSIKIPSKCLPPPSQDSHVEPQSPLPAESVNRKKQSILVDTEVRRTARLREKARAPGLPALPFRGQVLPLAAGLICKGSLEFRGMILTLKMMRGHAPRLGRDKKESFDDSYIRYFCNRSLDKFAFGPSIGAFGGFITIWKGAHFDAEVILSLSRFVIPKLHEEEPSAISYKQLQPKAASS

SEQ ID NO: 49112 - protein, 142 aa, Zea mays
  Coding DNA Sequence Number=SeqID_5737
MGKSKKGSGSSPRSGDKRIREPTPPSEDFGDSEYSKEEFSSESEGSPAPVSPPASSDDSDDSQGIAAEVWTYIRAVERSGLEGSDESEYSSDSSEEDSGGDGGDGGDDGGDGDGGKGSDGGSKGDHGGGSKGSNKGSNKTSG

SEQ ID NO: 49113 - protein, 283 aa, Zea mays
  Coding DNA Sequence Number=SeqID_5738
  Subcellular localization annotation: CTP_CleavageSite=33; ConfidenceScore=5.40e-01
MAEDATIVRLQGFSSGSPAASPRRWSPKTVTTSSMVGRSKPGCDLGPALSFKDLHHPGWGGGRAEPELYLPRGFVGHLLPQHSRERALTGLAGGSDFDNAGLVGGERRQLQRVGLTGSGSAPGAPSCRESGCRAARTGGPPETSSAARAAFVFWGCPAFAPVRRLCAEVGAPLIREDPSGDLPVGRWLPSSALRRWRLKKSSSPMGSPPPSVLRASGSLALIACPRPSSGDVGEGIVAAASALRPSPLQFGHLERRSLSLLPEQAAVSHLEPSRSRVFPHFEH

SEQ ID NO: 49114 - protein, 161 aa, Zea mays
  Coding DNA Sequence Number=SeqID_5739
  Homolog annotation: Hit_ID=Q6QP51; Match level="QueryCoverage=28%, HitCoverage=20%, E-value=1e-09, Identity=67%"; Hit description =Putative growth-regulating factor 1
  Subcellular localization annotation: CTP_CleavageSite=46; ConfidenceScore=5.23e-01
MTVAGGQEQQSRRQPSSRPIRGQRENPLSRREDNAPVFRPRTARACATAAPPTTRPVALTSRRDRRRLWQEKRATLRLRHNNRVSKGTGKGGYPEKDPSPGRNQAPSLPTDQRFEGWPPGRVRQPPQIAWAQHPLLVRGSKVDPSEGFHGRLRLLGPHAHY

SEQ ID NO: 49115 - protein, 145 aa, Zea mays
  Coding DNA Sequence Number=SeqID_5740
  Subcellular localization annotation: CTP_CleavageSite=43; ConfidenceScore=5.08e-01
MEQGITRSTLTGGRAKSGDRGLASPAKQTPIPRSGSFTEVCIVFSEGWTRLGRVLLAGLWWQGLGWPRARHARGNAGGFGLREIRGWEVGYVRDVQTETKLVPSRVKRLRVGVNFLQGILKVIKCTTTFINGPSHDHEVFIILWS

SEQ ID NO: 49116 - protein, 128 aa, Zea mays
  Coding DNA Sequence Number=SeqID_5741
  Subcellular localization annotation: CTP_CleavageSite=38; ConfidenceScore=5.05e-01
MARARAYKAPMDLDRTPPHALDLNGAQTHRRLPVHGVSAAARSPCHRRPANRTIPSPVQPSEKTVHTSVKLPERGIEVCFAGEASPRSSDSTRPPASVDRIILYYILRFLVHTASTSHREAHRAIGLN

SEQ ID NO: 49117 - protein, 68 aa, Zea mays
  Coding DNA Sequence Number=SeqID_5742
MARAHAYKSPRDFGRTAPRTLDLTGARNHRRCPMHGVPAATRAPAIVDWPTEPFPTPSNPRRRLCTPR

SEQ ID NO: 49118 - protein, 56 aa, Zea mays
  Coding DNA Sequence Number=SeqID_5743
MAGGNELAGAKERWLAGEEISISSLTHALEISILSLGVEDSLGAPEVGPMGVAPEL

SEQ ID NO: 49119 - protein, 156 aa, Zea mays
  Coding DNA Sequence Number=SeqID_5744
MGKNKKGGSSSHHSGDKRKREPSPPSEDFGDSEYSEEFSSESEGSLVYASPPMSFDDSDDSHMIVAELWTYIRAVERSGLEGSNESEISSGEENSSDSSEEESGGDDNDEGDGGNGGDDGDDGDGNGKGDGDGGKGHGDGGKVDESGKGSGKAPLV

SEQ ID NO: 49120 - protein, 101 aa, Zea mays
  Coding DNA Sequence Number=SeqID_5745
  Subcellular localization annotation: CTP_CleavageSite=79; ConfidenceScore=5.84e-01
MAGSAAPAPCPVPARLGRPRARPASAAPGRFNRPPGRFNRPGPSSPARSPVPASPDRIFARPRSRGLEWFLECLSVRTCSMDDRPGKQCNHEGRMGVPLAE

SEQ ID NO: 49121 - protein, 502 aa, Zea mays
  Coding DNA Sequence Number=SeqID_5746
  Homolog annotation: Hit_ID=Q6QP51; Match level="QueryCoverage=26%, HitCoverage=73%, E-value=1e-23, Identity=45%"; Hit description =Putative growth-regulating factor 1
  Subcellular localization annotation: CTP_CleavageSite=75; ConfidenceScore=5.14e-01
MAEKYQLPRSCVPPTTTRRKDRGRSPSEGSKAVAGWVFTNTLQGPPPTTWGLGSTRHASWPRIEEAKPPCAVRVTAQRLQALLHFRLDQRVKGRTAMQVACNHTKGAHPFDSDASSVGAQAHTSCNRRAGYYVREAAPPLAPVPRLLDYGTGAATRGDPAHDPTVSTEHIDHGSVSRGRRRDGRSGQKWAGSDGGGRRVEAAVKSSASSRPLLGQRESPLPRSEDDAPVFRSSNGSRTHNGCPANHSSRRINSAARQAAPLAGEAGNGFTSAIMTASKKDRERGYSERDPSPRRKRAPSPPTDQRFEGWPLGRVRQPPQSTRALSPPTDQRLAPEGFDSRLRARRARDDSGYVRYIAEARAMLPSHFAAPLTDLTGKQRRLLRSDCCATRQTSTSEDGLRLARPRARTQPRPQKTDSASPDPRARTQPRPRKTDSASTLDDGLRLARPSSPDSTSTSEEPPPRPTSGSDRPRHRGAIITLPLASSGYREQDWRPIWLTPVNK

SEQ ID NO: 49122 - protein, 416 aa, Zea mays
  Coding DNA Sequence Number=SeqID_5747
  Subcellular localization annotation: CTP_CleavageSite=49; ConfidenceScore=5.52e-01
MPEVGRLVAAKPRGRATAGAKRHTTVGGGVLSTRRFTFTFSAHRNRRARCMTCGSGPPCQRLDRWLQRRRGGALPWGGSMLLVRRFAFLTVGRSEDKGAHYRVAVACSLCHDSPSSRLGPALEVALNLVRNPLGWGVLAFVGRTCVCVSPLSDLAVEEFVFFVSKLPSGLALPIPSFLVQLLEGLGLQPLPMVSCFILQAAIIAYLYGMSVEATLLPASSSSIRGEDDYQPREEVVASAGGPLRVEVVAAAREPLGYSYPRDPTGVEVVRTCRVETELELRLKEDVILLLFVRLDLSRLQTSIPKKELAMAPRRPTVRNQAERLHGLRTTPGDKLSDQQAGLMRADLPGLAYTDAPVVRKRYSFSRSKIVTPGSAHSRRLEGSFPAGGELRSPSWFEAWTRGESRRVSGGRQASAP

SEQ ID NO: 49123 - protein, 464 aa, Zea mays
  Coding DNA Sequence Number=SeqID_5748
MATRQQMRVKLELDGCHEHRVAFRLQWLLGHKPTMPVPPLNILDLVHASHALQGMEHTVSMRIRRMREVLHIVDDAMLEAYTVGQATALPPVHEIPERRVQVQNVHFCVLHGWTAVVPLPVVECGLPTAFPSPQAPVFDAGSSASAPMDVDLEAPPPPPPTAAAVARRSPSPPVPVVVGTIAARRGQPARAVDAPERSHHLSPAITQMGWPHLPPPIGGPNGPRSGRHVGRLGEGVGSGAANPGASALCGARLGALRIRAGARRSPRQGAGAGEGKAGARDSRSAWARCGPTRGRRLRDPGRRGSAQRLHQAALGVRRVAQLLAGLGQGRSARPPPPEARERGPGEGARRGSQGRSARPPRARERGPGEGARRSLLLQRRGNEAPARALGAAPKGARRGLLGRGNEAPARALGAAPMGARRSSRGALHEALGARQERAQEENQGGGWELLAPWRRPGTSLAAAM

SEQ ID NO: 49124 - protein, 225 aa, Zea mays
  Coding DNA Sequence Number=SeqID_5749
  Pfam annotation: Domain name=Transposase_28; Domain location=26-166; Score=-65.2; E_value=0.092; Accession=PF04195.3; Description =Putative gypsy type transposon
MPSSSSSAADTPPAGASSEDTLSDVAAEELHPGDTVEFGVLRISSVRVQDMQQLGYFGSGVGRVPGAEEVLEPEGGLVVFEAFFTAGLRLPAHRFMAEVLRRFEVQVHQLTPNAVVALAKLNRVFDLNRLPYGGYPGEDAADRRGKKPMGGTEEGPSQDAAPAAKKRKLGLLTGDILQGRARDNGCCPAFGGDHFAIGGGKGEGNRAGPVGCLLRKRRDSDSRCR

SEQ ID NO: 49125 - protein, 356 aa, Zea mays
  Coding DNA Sequence Number=SeqID_5750
  Gene Ontology: Mol. function=DNA binding; Cellular component =mitochondrion; Biological process=regulation of transcription, DNA -dependent
  Homolog annotation: Hit_ID=Q53PX7; Match level="QueryCoverage=78%, HitCoverage=79%, E-value=1e-87, Identity=65%"; Hit description =Expressed protein
  Pfam annotation: Domain name=DUF296; Domain location=140-258; Score =187.8; E_value=2.8e-53; Accession=PF03479.6; Description=Domain of unknown function (DUF296)
MEGREGIAVVAAGGGHGSGQHGMFGAADIAMAEAHEAAAKGYQYQSSPSSPSTSLTPSPPPAAAGHAGDATAAPLAWSLGGGMPSEPAGDSGVRAAGQSQSEHANNMSSERRRGRPRGSGRRQILATLGEWYALSAGGSFTPHVIIVGTGEDVAARVMSFSQKGPRSVCILSANGTISNVTLRQPGSSGSTFTYEGRFEILQLMGSFTMAEEGRKRTGGLSVSLAGPDGRVVGGVVAGMLRAASPIQVIVGSFLPNSLKQHQRRMSAQQQLSPVPALPEPEAPPPVLTAATPISLAGPGNGFHDAPPPSAAPPQPHASAMNLNATGFPVAGWPASSPQQMVYRASPDINVSLTPQE

SEQ ID NO: 49126 - protein, 512 aa, Zea mays
  Coding DNA Sequence Number=SeqID_5751
  Gene Ontology: Mol. function=oxidoreductase activity; Cellular component=peroxisome; Biological process=tetrahydrofolate metabolic process
  Homolog annotation: Hit_ID=Q8RZT1; Match level="QueryCoverage=75%, HitCoverage=94%, E-value=1e-148, Identity=68%"; Hit description =Putative L-pipecolic acid oxidase
  Pfam annotation: Domain name=DAO; Domain location=123-479; Score =158.0; E_value=2.6e-44; Accession=PF01266.15; Description=FAD dependent oxidoreductase
  Pfam annotation: Domain name=Pyr_redox_2; Domain location=123-408; Score=-37.2; E_value=0.013; Accession=PF07992.5; Description =Pyridine nucleotide-disulphide oxidore
  Pfam module annotation: Pfam domain module=DAO::Pyr_redox_2; Domain location=123-479::123-408
  Subcellular localization annotation: CTP_CleavageSite=27; ConfidenceScore=5.32e-01
MPPPPRHPFSAEGMGAGVSSPYSSDTSLDTDSQSGYCTSTRMFGIHAPSFSLSSDVPFVFLAFALFFLPNLLLSPTVAVLSRLTLVDAGHRIAVSSAVRLVFMAASGAANDAAAATGLRLRYDVIVVGAGIMGSCAAHAAASRGAHTLLLERFDLLHQLGSSHGDSRIIRDAYVKAQYPPMVRLARRLWAEAEAESGYRVLTPAPHLSMGPRGNAALLAAVKSAGAEEVDLSQMWGGAFQAPEGWLTAVSEHGGGVLNATKSVAMFQALAVKMGAVVRDNAEVVDIRKEPEGGVVVKTSSGEEFRGAKCVVTVGAWTSKLLRSVAGVEIPIQPLHTLTLYWRIKPGRERGLMAKAGFPTFSSYGDTPVYGTPSLELPGLIKISCDGGPPCDPDNRDWASGDREITERVARWIQEFMPGHVDSAGAPVVRQSCICSMTPDKDFVIDWLGGEFGEDMVVGAGFSGHGFKMGPAVGRLLAEMAIDGEARTAVEAGVELGHFKINRFNVQDQQVKG

SEQ ID NO: 49127 - protein, 120 aa, Zea mays
  Coding DNA Sequence Number=SeqID_5752
MATKKCLVTKHELFLTKLMSAKNEEPNIFVHNEASSFISKHFRSYRSIFTLKAETFPSFSLVPYEICHDAMKLQMSNDLGMSFPSISFNLYDPGLDKDTTKKGPSHLSCSFPTVSGLAIL

SEQ ID NO: 49128 - protein, 85 aa, Zea mays
  Coding DNA Sequence Number=SeqID_5753
MARVGDSARAKKALGGRGWQGGLGSTARDRDEGKARPDGGGARSRTAAELYRRRIRAQRAWRRGISGELEERARVARGFPIPNSN

SEQ ID NO: 49129 - protein, 66 aa, Zea mays
  Coding DNA Sequence Number=SeqID_5754
MRLMVLVMIMVLVSGILSVWKGYIGLITWVNVKTWLSTSCQHCNHCSGEDEAVEGDFQEFQDYDEF

SEQ ID NO: 49130 - protein, 229 aa, Zea mays
  Coding DNA Sequence Number=SeqID_5755
MGRILGHFPSTAWLPWHVMGKGKGGGCSVRAPSRAGGADGWQQSRVEGEADPTQRGRRSSDPWVRARPPSIDGAGLWRRGARTTGMCERGEDRGVASMAWTCIAGAGWRGAGRGVERRRGGEGTCRGGGGGRRPRERDGEGQGPPRERAETGRAGGIHARWRRASWARSAGVFHARTRGGGAQAEGEAVWGEVRGIRGTFHPRQDLPSAWHRQNRAPLNCGRLHSALKG

SEQ ID NO: 49131 - protein, 205 aa, Zea mays
  Coding DNA Sequence Number=SeqID_5756
  Gene Ontology: Mol. function=protein kinase activity; Cellular component=cytoplasm; Biological process=protein amino acid phosphorylation
  Homolog annotation: Hit_ID=Q6JAD7; Match level="QueryCoverage=21%, HitCoverage=26%, E-value=3e-11, Identity=79%"; Hit description =Putative casein kinase I
MDHIVGGKFKLGKKIRSGSFGKLYLTVNVQNGEEVAVKLVTLHSGQNHNSVSTILSRNVTSSVPLPPPLSLQPWHLGRASPEPKPETHPAVDHRARRGAPTGGPDGVRRRKGRVARSASTNGIGGGAARWRSGQGTMSAVVCSKRSSSIFGDDLVPSPSSALSPSYHHHHHPAKRARCSPTRRSEVLLHHLFLDMDPQVRHVLAS

SEQ ID NO: 49132 - protein, 58 aa, Zea mays
  Coding DNA Sequence Number=SeqID_5757
MDPNLGAIIIGAEVTHIDASTIGATMCYLGANDDGAECLLGFAVLGFVPDRNDVYDVV

SEQ ID NO: 49133 - protein, 134 aa, Zea mays
  Coding DNA Sequence Number=SeqID_5758
MDQRPGLPHFPPIAELRRRTRADGGGHCRAPKSHLPAPEAPIGRTLLYAEAKTNWGEEFSPTMPMDAVRSATMRGTAPSPSTDEKSREHQRRLVRPKDTGGHPSRGSIIRREGEEVKTRRSALRSSRNGFYLPQ

SEQ ID NO: 49134 - protein, 142 aa, Zea mays
  Coding DNA Sequence Number=SeqID_5759
MDGSDIPRSWNADELRRSTRAVSPEDVNVKTGHAPSSAMRKEKTGRSSKDVPKGMQNTTKLQKVVPKGAQPRLQKGNSCAPRSCQGTEVAMPSYNFVKIINFTFNMLEGTRQVFSRRSELFATGSNKMEYLLQLLNASIAEL

SEQ ID NO: 49135 - protein, 78 aa, Zea mays
  Coding DNA Sequence Number=SeqID_5760
  Subcellular localization annotation: CTP_CleavageSite=43; ConfidenceScore=5.10e-01
MAVLLLTAILLGSSFSRASQRLALLAISQLLLPRPPPSASDATAAALKAKAATVHRDPQEAGSRQPPPYLFYVKNVNE

SEQ ID NO: 49136 - protein, 117 aa, Zea mays
  Coding DNA Sequence Number=SeqID_5761
MTKVDACQRCSKLKKWKRIGMMLGYKYTFDLKEETDTNEPIHEQVQMRCQEAYQEEHTSLRDGAVGDIHLDLDLLHMDNEPGNPISRNLVEHIRRQKHTTQGDNTHGDEEDEDDTYL

SEQ ID NO: 49137 - protein, 167 aa, Zea mays
  Coding DNA Sequence Number=SeqID_5762
MHATARRLRAFLHYRPDQRVKGRTAMQAACYRAKWAHPSDFQCTQRGGPGPHVMQPARRLLRASNCTATRTTTAPPRLRNQYRDSRQPCQGPGKGDTPKGILFREGNGPRAPLLIRGSKVGPSEGFHSHLRELGLRAHYWSEVRRPAPRKGSTAASGHSGSTPTTDQ

SEQ ID NO: 49138 - protein, 315 aa, Zea mays
  Coding DNA Sequence Number=SeqID_5763
  Gene Ontology: Mol. function=hydrogen ion transmembrane transporter activity; Cellular component=integral to membrane; Biological process=proton transport
  Homolog annotation: Hit_ID=Q06572; Match level="QueryCoverage=73%, HitCoverage=29%, E-value=1e-110, Identity=90%"; Hit description =Pyrophosphate-energized vacuolar membrane proton pump (EC 3.6.1.1) ...
  Homolog annotation: Hit description=(Pyrophosphate-energized inorganic pyrophosphatase) (H(+)-PPase)
  Pfam annotation: Domain name=H_PPase; Domain location=1-301; Score= -88.7; E_value=1.1e-20; Accession=PF03030.7; Description=Inorganic H+ pyrophosphatase
MQVPYFSSSLGIIYVLAKPAIYAMISGEVLSTDQGKAQGFIATVQSVAILLAPQFMSPLTSYFISEEAPFDCKGFSFIVASFFLGFAIGSAALVSLALFGAFISRAGVKVVHVLSPKVFIGLIVGAMLPYWFSAMTMKSVGSVALKMEEEVRRQFNTIPGLMEGTAKPDYATCVKISTDASIKEMIPPGALVMLTPLIVGTLFGVETLSGVLAGALVSAGFMDFCLMFAIFAPNTGGAWDNAKKYIEAGASEHARTLGPKGSDCHKAAVIGDTIGDPLKDTLGPSLNILIKLMAVESLVFDPFFATHGGLLFKYL

SEQ ID NO: 49139 - protein, 135 aa, Zea mays
  Coding DNA Sequence Number=SeqID_5764
  Subcellular localization annotation: CTP_CleavageSite=54; ConfidenceScore=5.23e-01
MTTVPIDSPFASRPHRLGIQCSTDPGCRRAVTALVPTIASMGDPISGRMRDKVRARLHSGTRFTGYHFSRHVLSTFKSLTQKLQLLTVYDLLELDKVNFTYVRPLGGILGKLGQTLAKGRRGALNYNYYLTVGNL

SEQ ID NO: 49140 - protein, 47 aa, Zea mays
  Coding DNA Sequence Number=SeqID_5765
MAGGKELTGAKEGWLAGDAFPLKGILSRDSGQSPPRVKRRVRLIGNG

SEQ ID NO: 49141 - protein, 280 aa, Zea mays
  Coding DNA Sequence Number=SeqID_5766
  Subcellular localization annotation: CTP_CleavageSite=76; ConfidenceScore=5.17e-01
MTIKILLIKPRGCAPASRLLLGWSNSGVRRATPMLQLPDSPARPGPASIRPTNQHPLQLQCATPSLQAPATTQALVCTQDWMRRACHITNEEDTEELAKLEEALFAEMDSSNIANNTDTASKDKEIALRHGVSGVGGQGHKVVDWAADTGSVTVEPGPAGDELTNPFTSLLSPSLKKPLHLGKTRYQAWYQGATRCKLRQQWTADDYADIDSSDDEETEYDLSTRLGTQVEAAPILDRVGNTLQRSVEDIDRQLLTVGDSGMRSFLQAPTWSCCLLWLQD

SEQ ID NO: 49142 - protein, 76 aa, Zea mays
  Coding DNA Sequence Number=SeqID_5767
METTRRILEGPRVPRSMELKLAFLRKPFWIPHGSRLPTDGDQGSGPSPTTSTNQEGLHNSPPTGKDPSRYELPPHQ

SEQ ID NO: 49143 - protein, 266 aa, Zea mays
  Coding DNA Sequence Number=SeqID_5768
  Subcellular localization annotation: CTP_CleavageSite=54; ConfidenceScore=5.58e-01
MAAATFAPMTRQQWRSPQHVRHCGKVLAPVFLRGATTRPLKPKSRKARRQVALMASPAKATTSATGSLTRGDDHLSADDSSHLCTGGRRLPQHTRRGPRSRPHYGSEDKTIQERGCRPRSIPRLVPPPGAAASAGEAVDVADLRTARPSPVRWTGSHAPTKRQEAVSEAAPRPSKPGNRAHGGRRHPQLAGPAYPKFASSSELVNALLPRMLEEEAGHQPMRKAGPQLGSPSSPAWMMNILEAEDRGEAAAWLASLHHKAGGHPSR

SEQ ID NO: 49144 - protein, 254 aa, Zea mays
  Coding DNA Sequence Number=SeqID_5769
  Subcellular localization annotation: CTP_CleavageSite=42; ConfidenceScore=5.07e-01
MENRKEPPFSLGSALWQAQQAPLLPPFPLGRLARRPSRPLPRAAQPAAQLAPPPHGPPGPSRAQQPHPLNPRPRPPPAAAATPSGGARSSAHPLPLPPLSLPDPAHIPLSPSTPLALALPLPAPPLGSAGHGGPGGPGGPTRVAWARFRRGHVPARARGPCAGARSLRGRAGARSLRGRGFGAAPARRPGAASSAPPAVRPRGPAWCAAGVASAWRAAGVVRGQPARGAFAAAAMARQPARRGGSRPVSATRAA

SEQ ID NO: 49145 - protein, 143 aa, Zea mays
  Coding DNA Sequence Number=SeqID_5770
MGKGHKRKREPTPPSEDFGDSEYSEEEFSSESEGSPAPVSPPASSDDSDDSQGIAAEVWTYIRAVERSGLEGSDESEFSSDEEDSDGGGDEDDDDDDGGDDDDDGDGDGDGSNGGGGSARGGSSTGSTRGGGGGKGSSSKASG

SEQ ID NO: 49146 - protein, 149 aa, Zea mays
  Coding DNA Sequence Number=SeqID_5771
MGVPPARGIDRHAACHRNGQVSLNAEVTHFLPVEWTGRCLTAECQRFIYNYTKSTVRNTVDYSGQEKLFGKTGQARTVRALAADRPQHQDDPRTEPIQKSKSALRTVRRKSADHLRPRADRPASGADRPGRTVRTRQADRPRSAEWSNG

SEQ ID NO: 49147 - protein, 246 aa, Zea mays
  Coding DNA Sequence Number=SeqID_5772
MGLLVLPEDGLNCLLARGELGGDVHQLARPGGDLATQLAHQVTAGGAGEERADDVRVGDVGKLGTLLRESPDVVPERLSRLLAAASEIPGVPRAHVRALEVAGEGLDQVVPVGDLPRRQMLQPGSSGVGEEQGEVADDEVVIVRSTQMAGQSVVRKPQFRPHLPRVLCDVHPLVEVGSTVAVVVLVAEATQGRRRRVARTPGVDQGFPHESGSRGAMLRGVLADPTGSRWRPCPDVVGNAVLDALG

SEQ ID NO: 49148 - protein, 191 aa, Zea mays
  Coding DNA Sequence Number=SeqID_5773
MALLVHPERFQTKWALDMVHHLPRWSAPVFSGRIRAGAILLDDLAAGESAASWEVAPFRQCSVSRMFISLAEVASELSYGSIFRMNFIASCSGLVACLHELVELRLRFSGQATGRRVPPRFQLFGFNVPDVASNDEDSFVSTHVSRRPPPPASRPEGRTGRHEDGGRTRSALDASRLDTSIPKRVGNDPQE

SEQ ID NO: 49149 - protein, 1091 aa, Zea mays
  Coding DNA Sequence Number=SeqID_5774
  Gene Ontology: Mol. function=hydrolase activity; Cellular component =nucleus; Biological process=metabolic process
  Homolog annotation: Hit_ID=Q9SN39; Match level="QueryCoverage=93%, HitCoverage=92%, E-value=0.0, Identity=43%"; Hit description =Putative uncharacterized protein F28A21.160
  Pfam annotation: Domain name=PPR; Domain location=170-204; Score =48.9; E_value=1.7e-11; Accession=PF01535.11; Description=PPR repeat
  Pfam annotation: Domain name=PPR; Domain location=271-305; Score =30.9; E_value=4.7e-06; Accession=PF01535.11; Description=PPR repeat
  Pfam annotation: Domain name=PPR; Domain location=383-417; Score =40.2; E_value=7.1e-09; Accession=PF01535.11; Description=PPR repeat
  Pfam annotation: Domain name=PPR; Domain location=484-518; Score =35.1; E_value=2.5e-07; Accession=PF01535.11; Description=PPR repeat
  Pfam annotation: Domain name=PPR; Domain location=585-619; Score =43.7; E_value=6.4e-10; Accession=PF01535.11; Description=PPR repeat
  Pfam annotation: Domain name=PPR; Domain location=686-719; Score =26.4; E_value=0.00011; Accession=PF01535.11; Description=PPR repeat
  Pfam annotation: Domain name=PPR; Domain location=786-820; Score =46.6; E_value=8.8e-11; Accession=PF01535.11; Description=PPR repeat
  Pfam annotation: Domain name=PPR; Domain location=821-854; Score=9.9; E_value=0.52; Accession=PF01535.11; Description=PPR repeat
  Pfam annotation: Domain name=PPR; Domain location=857-891; Score=7.7; E_value=0.96; Accession=PF01535.11; Description=PPR repeat
  Pfam annotation: Domain name=PPR; Domain location=923-957; Score=1.1; E_value=5.7; Accession=PF01535.11; Description=PPR repeat
  Pfam module annotation: Pfam domain module=PPR::PPR::PPR::PPR::PPR::PP R::PPR::PPR::PPR::PPR; Domain location=170-204::271-305::383-417::484- 518::585-619::686-719::786-820::821-854::857-891::923-957
  Subcellular localization annotation: CTP_CleavageSite=33; ConfidenceScore=5.70e-01
MATPPLYSVSTHHRAPPPWPPPKAATSPRITFRCSVLAAPAGRVLEAPTAAPSSWSTKNPPSRALSSDVNLRIQRLCQAGDLAGALRLLGSDGGVDVRSYCMVVQLCGEERSLEAAKRAHALIRASSAAATGGKGSVLGKRLVLAYLKCGDLGEARTVFDGMPPQAADVRVWTSLMSAYAKAGDFQEAVSLFRQMQCCGVSPDAHAVSCVLKCVSSLGSLTEGEVIHGLLEKLGLGQACAVANALIAVYSRCGRMEDAARVFDSMHPRDAISWNSMIGGCFSNGWHGTAVDLFSKMWSQGTEISSVTVLSVLPACAGLGYGLIGKAVHGYSVKSGLLWGLDSVQSGIDDAALGSKLVFMYVKCGDMASARRVFDAMSSKGNVHVWNLIMGGYAKVGEFEESLSLFVQMHELGIAPDEHAISCLLKCITCLSCARDGLVAHGYIVKLGFGAQCAVCNALISFYAKSNMIGDAVLVFNRMPRQDTISWNSVISGCSSNGLNSEAIELFIRMWTQGQELDSVTLLSVLPACAQSRYWFAGRVVHGYSVKTGLIGETSLANALLDMYSNCSDWQSTNQIFRSMGQKNVVSWTAMITSYMRAGLFDKVAGLLQEMVLDGIRPDVFAVTSALHAFAGDESLKQGKSVHGYTIRNGMEKLLPVANALMEMYVKCRNVEEARLIFDRVTNKDVISWNTLIGGYSRNNFPNESFSLFSDMLLQFRPNAVTMTCILPAAASISSLERGREIHAYALRRGFLEDSYASNALVDMYVKCGALLVARVLFDRLTKKNLISWTIMIAGYGMHGFGKHAIALFEQMRGSGIEPDAASFSAILYACCHSGLAAEGRRFFKAMQKEYKIEPKLKHYTCIVDLLSRTGDLKEALEFIESMPIEPDSSIWVSLLHGCRIHKNVKLAEKVADKVFKLEPENTGYYVLLANIYAEAERWEAVKKLKNKIGGRGLRENTGYSWIEVRSKVHVFIADNRNHPDWNRIAEFLDDVARRMRQEGHDPKKKYALMGADDAVHDEALCGHSSKLAVAFGVLNLPEGRPIRVTKNSKVCSHCHEAAKFISKMCNREIILRDSSRFHRFEGGRCSCRGYL

SEQ ID NO: 49150 - protein, 270 aa, Zea mays
  Coding DNA Sequence Number=SeqID_5775
  Subcellular localization annotation: CTP_CleavageSite=44; ConfidenceScore=5.49e-01
MAAAGGRKQQSNRLQAHVPSWDTERALSHGVKTTRPCSVPRTARARTTAASPTTRPTALTLRQDRWHLWQAKQTTLHLRHNDRVKKGTGKGDTLKGILLREGSGPRALLLIRGSKADPSKGFDSRLRALGLRAHYWSEVRRLAPRKGSTAASGHSGSAPTTDQGFVGWPPKGSTAASEHAERGMTLGTSDTWSRLGLRSRGTLGHFRDQQERFCNGIPSEGGIKPSDPIKRDRENSAACAAPTAVPPVRVRLTAAKTGLRRHRKLRLTRP

SEQ ID NO: 49151 - protein, 29 aa, Zea mays
  Coding DNA Sequence Number=SeqID_5776
MANIPERQRFSWPPHKARGLVAAASHTLQ

SEQ ID NO: 49152 - protein, 408 aa, Zea mays
  Coding DNA Sequence Number=SeqID_5777
  Subcellular localization annotation: CTP_CleavageSite=54; ConfidenceScore=5.01e-01
MLDASKPKGCATFGAVACRLHGGPPFHPLVRAKVEECFPAASPCRWSPKTVTTNSMVGRSKPGCGLCPALSFKDLHHPCWGGGRAEPELYLPHGFVGHPLLQHSGERALTGLAEGVDFDNVGLVSRERRQLQRVGLAGSAGSGSARGAPSRRRAERGRLPTVRVVVAPRAPEDRPRCRALLGRRSCSWVVLPLLRYDASVRRSVLARPGGSEWGSAGGQMAAVVGAEVVAAEEVLVADEIAASIRAPGLRLFGFDSLSSPLEWGHGRGPYRSSVCPEVIAAAVWPPGAEVVVAAAGVGGGEPPGVLSSRRPSNVGGCSYLWEWNRCSVCNGTLSAGVCSLRLSGPEHESLGSVGLAARGFSCSVKETLDRSAMRRSRTQWCQHGQRQSWLEKKTSSAQELGTSQAEEA

SEQ ID NO: 49153 - protein, 113 aa, Zea mays
  Coding DNA Sequence Number=SeqID_5778
MDPCSEAKGDQHGYLAECHNLPSSKTTKRDIMDQKSLDNTRYDHCINVGIILELKILLGEELEQPVIGSTRFVAEGGTTWLICEAIVVVVEAEAIKLQHFALLSLLKVFVLRS

SEQ ID NO: 49154 - protein, 226 aa, Zea mays
  Coding DNA Sequence Number=SeqID_5779
  Subcellular localization annotation: CTP_CleavageSite=46; ConfidenceScore=5.15e-01
MAPPVDVAGPRPRLGDAKAPPRSRSSPSSVAEVESEPLGRARRRPLAEARAEFESWGRAKRSSSSSGAEPKSEPWVGRNGVLRLPGLSPSPSPGSGGAEFAVFRGLARVRALGWAEQRALVRIKVSGHLCIKCSCDLVGRCGDLVRVASRRRQGLGRAGNTFAAGGGSRARRRSSGLYADGGYQLRIRSLEGSLEDMVAGVTWPSILPPGWTVEWDPASVEEEHEE

SEQ ID NO: 49155 - protein, 143 aa, Zea mays
  Coding DNA Sequence Number=SeqID_5780
MLVDYTMVLNGPSVSVEGPTQKGVESVVEVTPASGVTSDGSSDPSLWLQLLRALHAVARAATGVIVVSVFVKGASIAKVQGKAASQTPPPAEARGKSPAAPAPGVGAPTPRAGDDAVSLGDWTNLASYDAVDALPDEKAKRGS

SEQ ID NO: 49156 - protein, 29 aa, Zea mays
  Coding DNA Sequence Number=SeqID_5781
MAEAQGCDGSTVAGLRLRKNCSGIFGIGS

SEQ ID NO: 49157 - protein, 59 aa, Zea mays
  Coding DNA Sequence Number=SeqID_5782
PAEPSADPHAKGDNEIRKMAEAIMDKVVDQLLNEAAEIVLSGISVYFSLYALHSLRNDF

SEQ ID NO: 49158 - protein, 151 aa, Zea mays
  Coding DNA Sequence Number=SeqID_5783
  Gene Ontology: Mol. function=metal ion binding
  Homolog annotation: Hit_ID=A3BIK8; Match level="QueryCoverage=86%, HitCoverage=53%, E-value=2e-58, Identity=79%"; Hit description =Putative uncharacterized protein
  Pfam annotation: Domain name=zf-C3HC4; Domain location=74-111; Score =15.0; E_value=0.0018; Accession=PF00097.16; Description=Zinc finger, C3HC4 type (RING finger)
MAGLRLLLCPSQLFRTISHPHMQAIIYPILQQLESSLIERDLKGKGRCKDIVSRRRMEDWKKVSGRDVEREDECGICMEACTKMVLPNCSHAMCIKCHRDWYKRSESCPFCRGSLKRICSTDLWVLTNSNDVIDPAHLEKENVCVIKASAS

SEQ ID NO: 49159 - protein, 105 aa, Zea mays
  Coding DNA Sequence Number=SeqID_5784
MDCVACHLRHAVLATDVPISMDYDTCHLCHAILATGVPISMDNIGCQFYHHILDASVSIFKDNAKFRHIIFVDGVSVPMDDATRGSHGLTITSSIDGGLVDQHKG

SEQ ID NO: 49160 - protein, 153 aa, Zea mays
  Coding DNA Sequence Number=SeqID_5785
MGKSNKRKREPTPPSEDFDDSEYSEEEFSSESEGSPALVSPLASSDDSDDSQGIAAEVWTYIRAIERSGLEGSDESEYSSDEEDSSDSSEEGSSGDGGDDDDDGGDGDDGDDSSRGGDGGSKGGDGGSKGGNDGSSKGSNGGGNSKGSNKASG

SEQ ID NO: 49161 - protein, 247 aa, Zea mays
  Coding DNA Sequence Number=SeqID_5786
  Gene Ontology: Mol. function=transferase activity
  Homolog annotation: Hit_ID=Q5ZDJ3; Match level="QueryCoverage=29%, HitCoverage=7%, E-value=2e-24, Identity=77%"; Hit description =Acetyltransferase 1-like
MRRKMLEAALMIVDLGTRERDLALSARHQQRHRAAISKCEHDGVHGIQVVAHVQVQCVEASLLHRAAGAEMMYLFEPDKKMEAIKLIDDSTNITSSGHSVLGSVKEWQIQDCNGVHKLLETVFGDQDVANSARFCLGAINARDPRHPPHRPPWPPAILGCTVPRLVPPASTAPTTPVRLDAAPAPSEEAIHVVMVCLGAPAVPQSSCLSTGSWPMAKEQAGWPSVSIFVEVYGPIYNGFAVNGKTTR

SEQ ID NO: 49162 - protein, 162 aa, Zea mays
  Coding DNA Sequence Number=SeqID_5787
MVYHTMLSEEEWSWGWGSQMDAPWPSLQSVNRPHLHMARPSPEWTFTVSASVPIGSSDDVRSGYHLGPLPSTFHPGTCGLSYTFVCTSSLGFPLSLLAPLRLPNVLMVVSLITLHSHSSPMVYSSKCPAPYTSHNGKAECMIRTTNNIMRSLLFQAFVPVCY

SEQ ID NO: 49163 - protein, 95 aa, Zea mays
  Coding DNA Sequence Number=SeqID_5788
MNVCELTLAVSHPPTQVKNRTPVIYKDVTFDPVPLYIICVRLGPSISGVYVRARVLVPLKPGCDRSGIRGMLTVGQNLDRTGQPLSTYLCYSDSF

SEQ ID NO: 49164 - protein, 216 aa, Zea mays
  Coding DNA Sequence Number=SeqID_5789
  Gene Ontology: Mol. function=ARF GTPase activator activity; Biological process=regulation of ARF GTPase activity
  Homolog annotation: Hit_ID=A2Y6V9; Match level="QueryCoverage=86%, HitCoverage=36%, E-value=7e-39, Identity=48%"; Hit description =Putative uncharacterized protein
MSYLIFSFFQRAKEIYFKYWDLQGPVIDSSDVHRLRNFIKNVYVERRYPDQRIGEHLVQAKGNQDSYGNNNAYSSPGVLRSAYVRTYEDNHDLKRTKESISENQNNSNGHPVSSTVDQNNNSTMAREKVDLRSHLRPDDLLKTDGKSENNQKVVISSASSAAQASKEINSNKVFLPIKLPDPPRSQKATSSNTSTEAHVMQFLYALVIFYSALPSP

SEQ ID NO: 49165 - protein, 189 aa, Zea mays
  Coding DNA Sequence Number=SeqID_5790
  Gene Ontology: Mol. function=thiosulfate sulfurtransferase activity; Cellular component=viral envelope; Biological process=sulfate transport
  Homolog annotation: Hit_ID=A2Z8U8; Match level="QueryCoverage=28%, HitCoverage=5%, E-value=2e-19, Identity=87%"; Hit description =Putative uncharacterized protein
MGSISIHQHSEVCAVSAHCQCEIYRQKLQQFVADGELSKKEVEALMAFQVHLCIPQETVDAAHTEICGQLFEKVVKFFNQYLWATVRKAHKSYCLQMSSVNGLSKKLPHMLPSEKAFSAAVSALGIYNKDGIVVYDGKGLFSAARVWWVKNVGTHVLNVKFVGTVELNVQTTQTHGGQISSTATWPRRT

SEQ ID NO: 49166 - protein, 67 aa, Zea mays
  Coding DNA Sequence Number=SeqID_5791
MDQAVSLAARSRRFESSFYPCKKGAHRLGVQCLTDPDCRRAVTALVPTITGMGDHVSVRVRRAICGQ

SEQ ID NO: 49167 - protein, 61 aa, Zea mays
  Coding DNA Sequence Number=SeqID_5792
MEGRLLLYAMGSSLLLLGRHGKTGRRSGLMGKMEGGAAATPPPKDREEWLCVVKATNQADS

SEQ ID NO: 49168 - protein, 137 aa, Zea mays
  Coding DNA Sequence Number=SeqID_5793
  Subcellular localization annotation: CTP_CleavageSite=19; ConfidenceScore=5.04e-01
MHPALSLGIGCDIRGGTIPAQNASRSRSSAQCGSTTDGKSGEQLLECRWSSTRIEGTAAPPGEEDSLRPTPRTGNPRGRDSPVADRVLVTAAAMELALAVSGSVLVCWGGEGVQERDFIVGSENLDTTWPAARRIVR

SEQ ID NO: 49169 - protein, 253 aa, Zea mays
  Coding DNA Sequence Number=SeqID_5794
  Gene Ontology: Mol. function=N-acetyltransferase activity; Cellular component=plasma membrane; Biological process=cellulose and pectin -containing cell wall modification during multidimensional cell growth
  Homolog annotation: Hit_ID=A2ZR07; Match level="QueryCoverage=74%, HitCoverage=45%, E-value=8e-75, Identity=66%"; Hit description =Putative uncharacterized protein
KGDRDVGMDWIIHLDTDELIHPVGAREYSLRRLLLDVPNNVDMVNFPNYESSIDRDDIMDSFTEVSMFKKYYDHLAKGTYFGLYKEATRGNPNYFLMVMGNQLQGEIKLEEAAILHYAYTKFSDLTSRRDRCGCKPTKEDVKRCIILEFDCLAIIRGLKESDVFTNAVTSAKAQSKTKPSNMGGSRKQGGHPTERNCWSVHTGRWSREVTGNRKKDPGNGGRPGTGTGRSNATEVVPWFARALGTRHCFVMTT

SEQ ID NO: 49170 - protein, 309 aa, Zea mays
  Coding DNA Sequence Number=SeqID_5795
MEVRCQTSFCQNEDGFPKLLRACTVRLGIRSQPEYDGREFIEHGTEKCVVTVYIGSSPHHVEWSVTAAGHRFQDTCQVVARKALRVLCQIYEEEVADTPLRFFPPFQRDRPVWMARMHALEGQQLLEDDLTVAYLTAYLLTLDAQYDFLARHHRQMIARAEDAEKRNRKLYVDLTTAQARATALESREVIAVEALKQAKDEHVQKLMEAYLVTHNQRRALRIQEPASSNPVQSKKTWELPEGAIVLEGIPVFPQAMDKQEHPESSQDPPPELFEPLTMKKIPAPSREIKEEAASTPPAPSPSEELQEPD

SEQ ID NO: 49171 - protein, 107 aa, Zea mays
  Coding DNA Sequence Number=SeqID_5796
MGRQTGVVQLGVEHGDQVDLVVHPGIVVTNGRDNHTSSIAGRTARGLLQQPGCPVVVQGVSLAEVQGKAASQTPPPTEAREKSPAASAPGVGALAHRTGDDAVTPGG

SEQ ID NO: 49172 - protein, 140 aa, Zea mays
  Coding DNA Sequence Number=SeqID_5797
MGPCSEGIFMHKYAGMKYRFESIKCPSTNDCIIKVGNKPKGNGLWNFAKGYNLPSSEATKREKVIGMWEHFDLMKGPCTPTCCTLLCASFFCFLLAGSKLKPPIIGSTSFVAEGATTWLLNEAISSKSGSEFTGGGRQGW

SEQ ID NO: 49173 - protein, 234 aa, Zea mays
  Coding DNA Sequence Number=SeqID_5798
MYNGSSNLISCEKKMIRIEFLSLQVTALVPTITGMGDLVSGRVRGYVCGQVHSGTRLTDLPYFSRPCAQGIEERLSGLPGPRTPAGLRAPATVDWPLRRRRPRFLARGASLRCAHLSPRVGWGGGKLDWPIYGGSGSDGRGHAAHGQTAVNWAPVRFERARKSVTDAWEGFIGAGEGQDAGWPLARCGAREGVLWQVQGASNTWSLQSARVPQLTQVANVRILAKIWRESFPGT

SEQ ID NO: 49174 - protein, 230 aa, Zea mays
  Coding DNA Sequence Number=SeqID_5799
  Homolog annotation: Hit_ID=Q2QNH3; Match level="QueryCoverage=74%, HitCoverage=10%, E-value=5e-07, Identity=28%"; Hit description =Retrotransposon protein, putative, Ty1-copia subclass
MYPPPGDYGLGGLKKKLAGRFKSKRRHADDADYNPATDFEAQSSAGGSISMDTEDAPHAHPDYPIDVIGWTYPKRRFSMAEYCSRRTVNQYDLPSDTNIQFFHTQLQFDVFWGTLMDTNFHKHQFLATTEIDIDEQSITWMTGFKRYSTIFAEFATANSLDYDTISAAIDLYTEDNFEEFVQFYEPARLGIPRRFGETARLRHHPVVTNKITRVTILPKSGDKSKIRDKF

SEQ ID NO: 49175 - protein, 118 aa, Zea mays
  Coding DNA Sequence Number=SeqID_5800
MEWRHTYTYEHEESYEGNICRDLKNDSEARHDIGVGDLGDRRPLLPYTLRHSNLPLHSPLKETRKPRLRTHQLGVGNNLVSDSEDTTTVMSGVMPDPEDKSTKQKLDFLMDAMNRMLG

SEQ ID NO: 49176 - protein, 158 aa, Zea mays
  Coding DNA Sequence Number=SeqID_5801
MQRTDLGEELNWGATVANRRRGLVLLLRNNLAELMVHSIYSLQERWLRILKKKAGGRREGESPVNAIVAFTEAMLQVMDRLPMTVYCDVIRLRSTWHPGGTRQTPVRSPRPAAGQVDNEQFKVSECVAGDFPEQQPDEGKCPMTRYVLLTYNSLSHIT

SEQ ID NO: 49177 - protein, 90 aa, Zea mays
  Coding DNA Sequence Number=SeqID_5802
MGQVHAVARRKLPIRHRYLLPWSRLSLPWSTPPPTTRAFCEKWQATNFNNTEEEFPLKDHEILPIWSSLKPDHRSSSRQRNPWKPTNGCE

SEQ ID NO: 49178 - protein, 203 aa, Zea mays
  Coding DNA Sequence Number=SeqID_5803
MDNMNQPTNLKRLTTTHKNTQYNPRFGNHHKGVLLLVEEPTKGQVFSNPNPSQANHKGDAIAGVKGEMNALVWSLVSQDFVGEVGVNERESVRGYIKDPPKAGSRWERKSKNRLNRFSDRLNRFLPGRSRFTDLLSRRLDRIQNRLSRGKIQLNRFSKKICSDFSDSSDCQTGQSRDGRGAVPKPVEPVSGPVEPVSRAETKF

SEQ ID NO: 49179 - protein, 137 aa, Zea mays
  Coding DNA Sequence Number=SeqID_5804
MSPTACTRGQPYSSHHRRRSTPRLDRQKPPDLIRPFTGPLPPPGTGYAMPPQYAVQLFEEHRIPRCRVRMTLEPHPLQPGWRSLDSESFGFRADDTIEATALHVLTTFCGFHPLEMLTHPIGLFPAEKEDDPMWKDR

SEQ ID NO: 49180 - protein, 524 aa, Zea mays
  Coding DNA Sequence Number=SeqID_5805
MPSSSSSADTTPPAAASSEETLSSLMVEELRAGDSVDFGVSRMTSARVEDMQRLGYFGGGVARAPGTEEVPEPEGCGPGGGKPPLAAKAGAAAPSKAPEATAGAGGSKSTRVVPPASGVAEASKAAQALPLSGKRVADFGTDITVDDYLGGLDEGQLAIAAPGAAIATAVIVSKARGEALGAEGEVSALALVRDEAGVATRQLKGVTEALSQATEALSQVADFASRTASGALTAAVSAEVERLRTQHADAVREKSASDSKCRKLMDRVAALEREKADLRRQLAAERREANEAIAKEQAAQAEAKLARAEGNLAKELAEHLQERITALESHAKWAEAAMRAEAERTRAQLMDTYRELGARTGDFEGAMNALSREGCRHFEVFDQADEDFERDVYKVEDPVVKESAGALYDRMWGLHGCQVVRERAETARAQAERGERVDDFGALNSALPDPEPTPETAAIATAASSSAAAGEDLPPKVAEGAPDAPAAAVPSAEDPAAVAAETMAEATAEPTAEAPAASGPSQVA

SEQ ID NO: 49181 - protein, 478 aa, Zea mays
  Coding DNA Sequence Number=SeqID_5806
  Subcellular localization annotation: CTP_CleavageSite=69; ConfidenceScore=5.56e-01
MQAACNCAKWTRFSDSRHAQHGGPSPRVTQPARRMLHASNCTATCATTAPPRLRNQYHDSRRPSARPNSASLAWRRSGRRFAFAEITVPKKAPSLPTDQRFEGWPPEGFDSRLRSRGPYTHYWSEVRRPAPRRVPRPPQATRAPRPLLIRGSKAGPRRVHSRLRRRARDDHGYVRYITKARAALPSSPETPCSAPIEGNMALPPSSLRKGDAGAARTRAKPRKTANSAPPDPGLGLGLSPGRRRTPLRPTQGSDSGSAPEDDELRSARPQGSDSGLAPEDDELRFARPQGSDSALASADDLRLARPKGTDSASAMEDRLDLGFRGASTSPNLGQRLATSTGGAIITLPRADSGRREQDRLVSGTIIRGTPKTPNLSRLGHHRKLRLARPQGSGSTSTLDDGLRLARPQGSDTASAFEDGLHLARPRARTQPRPWKTDSASPDPRARTQPRPRPRRSLRLARPRARTNHVKGGPSLPYP

SEQ ID NO: 49182 - protein, 42 aa, Zea mays
  Coding DNA Sequence Number=SeqID_5807
MTSGQTLLRQGPRPHPHPRGEDKQKAVELEGQRQREHVFDRG

SEQ ID NO: 49183 - protein, 72 aa, Zea mays
  Coding DNA Sequence Number=SeqID_5808
MVSHSGYGGYKCGHCTTAVGVSEALYAKAPCLWHNFTGSLEDMVAGVTWPSILPPGWTVEWDPTSAEEEHEE

SEQ ID NO: 49184 - protein, 29 aa, Zea mays
  Coding DNA Sequence Number=SeqID_5809
MAGGNKLAGAKGKWLAGEGLIWGFIELFG

SEQ ID NO: 49185 - protein, 196 aa, Zea mays
  Coding DNA Sequence Number=SeqID_5810
SDSAIIHRTVRCTPDSVRCSKGEPPQELASLGFSLQPLRYNSPDCPVYTGTVRCNSGATAISAPTATCAAFNARAARAEVRRAHTGAPDNEQYLSTPPKRKFTGARFAHGVPAAARAPTTVDRPLQPSSTPSNPSELLDLTQPSTGPLPPPVSRATAFYLYGYCSGEEGVRVKKGKSQGVFGNVSDSDEQFPRGTI

SEQ ID NO: 49186 - protein, 243 aa, Zea mays
  Coding DNA Sequence Number=SeqID_5811
MPTPSRKNRPPTERREANEALAKAQAALAEANLARAEGNLARERAEQLGERLNALESRVERTEAATRAEAERTRKQLMDSYHELGARTGDFEVPDREPGLRCLEWVQEELQALPTIVEGFMSYASLVTCEGAMNALSREGRRVASGWMIFGALNSVLPDPESNPAEAVSEAALEPPPETAEGAPDAPAAAAAGGGPPPETAEGAPDAPAAAAPRAEDPATVAAKATAEATAEAPATAGSSQVA

SEQ ID NO: 49187 - protein, 382 aa, Zea mays
  Coding DNA Sequence Number=SeqID_5812
MGGARVAFVLLSLEERNFTDVGTFQPSLSFKDFHQAARLHPLADASRIFIILAGEEGEASRGLPSRGLASRFFLRLLGVETILQLCGGGALQPCQGRRTAAAQSRVQNFILCPGDGGQPHRGVSQHVVRREGGTRVLGRSHSHFRGEDGSEDLSVRFGAPGARWCGVGGQVDVTVSAEVVAAGESFSTDETVSATRGPTLGSLALMSGSCPSSGDANESLLAVASVLGPSLLLQRSLASHPEFVVPQALQCGGESLGSVDLAARGFSCPVKENLGRSAMSQSRRQRRDADIFLRGGDSPTVSPSEAGSDSAEGGVDAEGAAAPYRCLNLQEQFICSDLFVGSRIVYPRVSYLSQKGMSEESLGSVGLAAYVYSVVFRIPLSK

SEQ ID NO: 49188 - protein, 70 aa, Zea mays
  Coding DNA Sequence Number=SeqID_5813
MHDFLLELALLDCAGWLLGQEDGLLGCSDAGIYFLLAGCSDGTAAAEETASGTAASGSDDDAGASANAGR

SEQ ID NO: 49189 - protein, 223 aa, Zea mays
  Coding DNA Sequence Number=SeqID_5814
MAVNGGRGVVLALPRLGCRASPLYPNGTLAEYVDVYSPLLYTRPTPQVVPSVSNAQEEMLATWMTSRSSRNMTSSSSFLVANPRSTLTLVLTRSFVDGSYQVHYTGVADGLDLKYYPRHLTGSAGGVIASPVGEGNPRLNNMVNLAAVLNKELDHALDELASWIFAMIVTKMSENRRRGARRAQPEQQAPQEEAAPQQHLPPPPPMTIEQMFMMQTQAVQAIG

SEQ ID NO: 49190 - protein, 405 aa, Zea mays
  Coding DNA Sequence Number=SeqID_5815
MPTSSSSAAATPPADATSEETPSTLVAEELRVGDTVDFGVSRMSSVRVQDMQRLGYFGGGVARVPGTEEVPEPEGELVVFEAFFAAGPSADSECRGGSVEVCLGDDFGTVDSHQSKSLRKYYCLHWQKRMIGDEVAQFGSCTFMPKTGKTTMEVVELVPCTRNKWGNWNEFWFYVAEGTVEEHEGLPVSEMCSHFYSAYPPFEVAEEDADEGALRCAAGLSSGRDLVEEFVAYGVWPLAHGWALGEVCPRQMPSHDGKLVRSPAFALDLQSRDPAAFVREAEDGAVRIVGRVFELNRLPYNGYPGQDDVDRRGKKPVVESGDDPAPAAAPSSKKRKLGTAMGGLGVSNGFARELMRTCAAPGGKDVFARAPGVFARMLRVTGGGGPKNVPIPRGGPAKTLLHSSH

SEQ ID NO: 49191 - protein, 52 aa, Zea mays
  Coding DNA Sequence Number=SeqID_5816
MARVACTLRGKRLDGGVSVLSVKKQQIFVASIPRWCPKRKIKTEAAGGSVLL

SEQ ID NO: 49192 - protein, 269 aa, Zea mays
  Coding DNA Sequence Number=SeqID_5817
  Homolog annotation: Hit_ID=Q6J9V9; Match level="QueryCoverage=50%, HitCoverage=47%, E-value=2e-50, Identity=71%"; Hit description =Putative uncharacterized protein
MRCVVFSSLYTLLGCETKAEDKHKWQGKEPLSAPLPGIGNGDISKEPFVAKRNGPRALLLIRGSKVAPCGVRRPPQSTRAPSPLLIRGSKAGTSKGFDSRPRTCRVRDDAGYVRYMAKARATLPRYPKTFPRPAGMVCNGIPPKGGTKPSNPIEQVRVQQITCRKTTLFTCSDYYANHQGKTNNRSSTSPDPRPRPQPRPREKVSASPDPRPRPQPRPREKVSASPDLRPREKVPASPDLSLGLKRSHRLARPRPRTDYATGDTSLPYL

SEQ ID NO: 49193 - protein, 93 aa, Zea mays
  Coding DNA Sequence Number=SeqID_5818
MTGFKRYSITFAEFATANSLDYDIISAGIDLYTEDNFEEYEQFYEPMSRCPRSCKRPTRNGIGEMARVACTLRSKKLDGGVYVLSVGVNPVWS

SEQ ID NO: 49194 - protein, 140 aa, Zea mays
  Coding DNA Sequence Number=SeqID_5819
  Subcellular localization annotation: CTP_CleavageSite=70; ConfidenceScore=5.36e-01
MTAVTSPPLLIVLTGKQHYSPCSDYYANHQGKTNNSKSQPLPSSASGATGSSASPDPRPRPQPRPREKVSASPDPRPQPRPREKVSASPDLRPQPQSRPREKVPASPDLSLGLKRSHRLARPRPRTDYATGDTSFTLTSS

SEQ ID NO: 49195 - protein, 149 aa, Zea mays
  Coding DNA Sequence Number=SeqID_5820
MNSLLIADRRNPASEAEPSHPHEINIEFRSKSHANITFCESDPFLFRESIHNTRVLRVHKTLLQPREAKHPPAQKFIVFKVGGKHPPATNFTAKALPWVPPLNRNSKTLLFPHLQQHGFENPEYGVYFRKSYSTKEKDSQGYAGLRESR

SEQ ID NO: 49196 - protein, 211 aa, Zea mays
  Coding DNA Sequence Number=SeqID_5821
  Homolog annotation: Hit_ID=Q8S473; Match level="QueryCoverage=52%, HitCoverage=11%, E-value=5e-07, Identity=36%"; Hit description =Putative RIRE2 orf3
MLDPLTQERALIPPKTENTERKEMNSGCGRRTLRREALPHLTCLDGVYFHYGAHGEIRSQVLFLCREHGVWDSSWRQKGLLARANEQLAQKSAEVADLQALYSEMRDEAASAWREAAPLDEKVHELEEELKRISSEREGFLCQAAEASSQARSLAKELEAHQTEAQQWKARAELCFVYLCFTCSDYFGYAQRSVWLFSEFERDLHTSIEMS

SEQ ID NO: 49197 - protein, 112 aa, Zea mays
  Coding DNA Sequence Number=SeqID_5822
MSDDLVVPVHFEVGQEFCFRLLDHPLLVLLKLELLVSRQEISELSLEPAIEGRFDEPRCVIPSGVAKKYVDAFSERQILKKNRRRCSLVRRGRSASWGRTVRDLAQGLGFPA

SEQ ID NO: 49198 - protein, 102 aa, Zea mays
  Coding DNA Sequence Number=SeqID_5823
MGHIVVSPSLLNYTSRYTARSNPVGIVFWLRGWNELSDQLTRESRVSVAIHSFDVVGRPEDIYPPQAPDLWVDLEVINSKIQGFWTSLGAPEVHPMGVAPDL

SEQ ID NO: 49199 - protein, 397 aa, Zea mays
  Coding DNA Sequence Number=SeqID_5824
MDAQVLGTISPVRPTTWGPELEKRCLSPGVVWRRVATQPGPVPWACTLHYPAAGVTLEVGSEQPHQRRRLPLHQRIAGGSNHLYTSSDNDLRSERLTSGGDHPKEEEASHQPAWRVGPRLGSPPTPARMMNILEAEAGGKPQPGLLLPTARLMAHPIWGPRRWKGTKDAKGPRHDYYPRGQPLFKGERSRMLTATQEANNCPAVIRSLGFAPVGGPTCGPRPTCHATDAPNRCSDSRHPAHGSTVILSTKVMGQSAVGTDVTVGVAIGGPVVIAPTGAQEQQADRQSNSGPTCRLVSSPEAGPGATVSTLDQGGRHDLTESIVKGQARLRNKSIVEALFAGEKAPLSSQKFTFGPPEILFARLDPKLGATGCGAEVTQLGATGCGAELPDVAVPRGT

SEQ ID NO: 49200 - protein, 106 aa, Zea mays
  Coding DNA Sequence Number=SeqID_5825
MAGYLHTLDNHYDDLSSHCTHLNSRVESLERQVRELKQEKASLQECLDIAEGEEANTREAYRTLKMDYDKKLKKLAPKKKIQKKTTNRGCQTEKKKTPPAPPPQGR

SEQ ID NO: 49201 - protein, 385 aa, Zea mays
  Coding DNA Sequence Number=SeqID_5826
  Gene Ontology: Mol. function=actin binding; Cellular component=plasma membrane; Biological process=cytoskeleton organization and biogenesis
  Homolog annotation: Hit_ID=A2YVR2; Match level="QueryCoverage=99%, HitCoverage=78%, E-value=1e-148, Identity=69%"; Hit description =Adenylyl cyclase-associated protein
  Pfam annotation: Domain name=CAP_C; Domain location=219-383; Score =181.1; E_value=2.9e-51; Accession=PF08603.2; Description=DE Adenylate cyclase associated (CA
  Pfam annotation: Domain name=CAP_N; Domain location=1-202; Score= -33.6; E_value=3.8e-10; Accession=PF01213.10; Description=Adenylate cyclase associated (CAP) N
  Pfam module annotation: Pfam domain module=CAP_C::CAP_N; Domain location=219-383::1-202
MESVTTFMGPLNEAILEANALVERTSSIYANHLKAAAGSLAALAWIGYTGKGCGMPLPIAHVEESWQMAEFYSNKVLVEYKNKDPDHVEWAKALKELYIPNLRDYVKRYYPLGPSWQPPGSAANKAPSAPSVPPPCLSISSASSSQPKSGMSAVFAEISSGKPVTQGLRKVTDDMKSKNRTDRTGVVAAEGKETRNSPPFSSTKEMRMNPRNENQAHSIMPFSVRWVVEHHVGNKSLTIEGCDTKQSVYVYGCKDCVLQVKEKIITVQACAGKVNNITIDKCTKVGVLFKGVVAACEIVNCSSAEVQCEGSVPTISIDNTSGCQLYLSKESLEASITTAKSSEINALVPDANSDGDWAEHSLPQQYIHAFKDGQFTTSPVSHSGA

SEQ ID NO: 49202 - protein, 169 aa, Zea mays
  Coding DNA Sequence Number=SeqID_5827
MAVIGRLCASTHDAVMKECVAPVSNNTSARWESTGNIPTIMPGSPKLLQPPSGSVSRGYNMAESGCLLQAETHSALLGHWGLTAAGLPSSDIASPNGLALHSGNMLCFQPELVLSDCSAGLLGQEDEVPADSASETDLLLTDCSGDSDADAKDTAFETAAAAKVDAGSA

SEQ ID NO: 49203 - protein, 64 aa, Zea mays
  Coding DNA Sequence Number=SeqID_5828
MAGEHREDKEGECFVRFGHGGGLTPSGITVKEQEAHWWLKRPNPLGLKCDTITSPRRLVTTFLN

SEQ ID NO: 49204 - protein, 155 aa, Zea mays
  Coding DNA Sequence Number=SeqID_5829
  Subcellular localization annotation: CTP_CleavageSite=41; ConfidenceScore=5.45e-01
MGKDVILGKNWLQRTKARAPPGTPSRQAPAALCPASRSSLPCSTEPSCPTISRHARPGRRAPPDRAEQRASRPGVDLDRAQKPNAPDAVERPRPAPPCDPRKDTEPPTAPSRRPDQPLITGVTSSAIDVTAQYTYWTIRAQRRTPFMPCSCLAVP

SEQ ID NO: 49205 - protein, 163 aa, Zea mays
  Coding DNA Sequence Number=SeqID_5830
MGARFRVRELPHAVARLFISVARDNSPVYDTGPQAHSSYSLGAGSRVRKERTSACTGRTHKALCAWPDETTRRGGRGPVSHENKYGSWRDRRRIDASGDYSGPATASDPHHVGGSGAATWPEKVRYSKASTVSSDPMGECRTPGYTVRTSRLVQDPHIYGPDP

SEQ ID NO: 49206 - protein, 147 aa, Zea mays
  Coding DNA Sequence Number=SeqID_5831
  Subcellular localization annotation: CTP_CleavageSite=63; ConfidenceScore=5.12e-01
MRVVRIVATAQEKVKPWKETSRSSKTTTNSSSHSVCLPKPGVTISPIPVLEPPASISDALPVLDSAAERLRRLDQILGARLEAEGNRLCRAMVDYLLTCFRSHDPAMSLAPVLDGPMAATEDVAWESVQDVVETVAARFQRDPVDAE

SEQ ID NO: 49207 - protein, 737 aa, Zea mays
  Coding DNA Sequence Number=SeqID_5832
  Homolog annotation: Hit_ID=A2XMQ3; Match level="QueryCoverage=100%, HitCoverage=100%, E-value=1e-151, Identity=46%"; Hit description =Putative uncharacterized protein
MYPSPYDGSGAGGKIRRRPHLRAASTPYERPPAAAAAHRLAAAAAAASASSEPGGERGGGGGGWVSRLVDPASRLIAGGAARLFGSVFRKRLAPPPAPSPPLSSPPGRNNEPKQGLPDSTHVDSLPIPEGGMEKGKSIVDTSDVKAMSEVEHLLMRKTFTKVEFDRLTDLLRARTIESDPPKPIVSREEKNEESIKVDGIRGSALRHMDLDDSPAVKCCCSLSAGYTPYLWPSSATTLPEGVHNHGASSPAELAKQYMSSRYLREPQSSSLRSRLFLENKGEASNTVNDRRSVPPIVQTPLELRNENPGLPVNGYVTSGLRGRSAIYRMSRSPYFKGQNYSSDLNTSSLSQRSQSLHVGGRQVLKRSGAELENELGSIGPIRRIRQKSNMMSSFRDSRANPKGNLLTSHISSTDFTEDGASIQSPSSKKLLVGSSQSLRPLESQKNEGDGKSSDSIPPIPAQSNKMAEKIFEQLNIIAPSPKQQQSVTLNASNSMSKKPVFQDAGSSSMYNQSSSLKFQDLDGANGPHDTNLNGSLLKKDKLNIIKDGSPKAAFSDRPALLGNSVSASKSWTPAFKMAVIEDLPELDDDLEVLIQSSKIEVETTEQKIDSNRKEQKVEQNILEQRVEPNLKNIAGSTISEQPVASLSKTVTSSGGLFLSNDPGKAVPKASVDNNTEFAFSNGPPGTRPATGVSAMPLASVNNDKQTGASNFIFGIKQPITSDFETSTAKNKSTLGQR

SEQ ID NO: 49208 - protein, 408 aa, Zea mays
  Coding DNA Sequence Number=SeqID_5833
  Homolog annotation: Hit_ID=Q6F3A7; Match level="QueryCoverage=99%, HitCoverage=87%, E-value=2e-49, Identity=37%"; Hit description =Putative PspA like protein
GCAPNAKVLPEEPDCPNVNVLGGDELEPKGLLKAEAEEAVEVLANTLVLAAVDAPAEELGEENVNPVLELELNGFAKVAPVPNGELPNPVPDVEVAAPKEAVLGPDEEVPAPKEKTPGAEDEAPTPKDAVPEPVEEAPSPKDSVPGPDEDAPTPGVMTGNASDDVLRPVDWAGELNPKRLFPELGNVNEGVEADCKPGAVEVLDGAATDIPAASLEGATAVKVGVDVAGELEKLAILDDTGEIKSSDDALLLASGATDFTSAFVPPIPNDKVLAALFSAVVPSDLADVTNDNPTGALEEKLNPVNAGDDEIAGLLLDTANMEVETAELIAGLSVGGGVVSFGGEYDKPLLRLEVDATDVKWRGAFSVVDAAEGNTFSDGLATSSAFSVLSPLSELVLANVVGLVTLEK

SEQ ID NO: 49209 - protein, 160 aa, Zea mays
  Coding DNA Sequence Number=SeqID_5834
  Homolog annotation: Hit_ID=A2XCZ4; Match level="QueryCoverage=36%, HitCoverage=51%, E-value=1e-08, Identity=55%"; Hit description =Putative uncharacterized protein
MARVGDRTRYPSMDPLDTVVATMKNCGGEDRREELGLGGREGNGAGADGAGSTFASYNGNGGEVVVIAEEEEEEGERGLEDDVGPRPTIVAVDLSRCHRSLPPLPAPLTESQSLVIPGIGAAAGPAMELMAVPKKKVSKYKKGLRNGPKALKSVPVIIRC

SEQ ID NO: 49210 - protein, 325 aa, Zea mays
  Coding DNA Sequence Number=SeqID_5835
  Gene Ontology: Mol. function=protein kinase activity; Cellular component=nucleus; Biological process=protein amino acid phosphorylation
  Homolog annotation: Hit_ID=Q8S7U9; Match level="QueryCoverage=99%, HitCoverage=84%, E-value=1e-101, Identity=48%"; Hit description =Putative pentatricopeptide repeat containing protein
  Pfam annotation: Domain name=PPR; Domain location=182-216; Score =23.8; E_value=0.00064; Accession=PF01535.11; Description=PPR repeat
  Pfam annotation: Domain name=PPR; Domain location=278-312; Score =10.7; E_value=0.41; Accession=PF01535.11; Description=PPR repeat
  Pfam annotation: Domain name=PPR; Domain location=74-108; Score=15.9; E_value=0.1; Accession=PF01535.11; Description=PPR repeat
  Pfam module annotation: Pfam domain module=PPR::PPR::PPR; Domain location=182-216::278-312::74-108
MLRKSGTQRQQPALWRRCRSLRQIKQVHALMVLQGFLSDSSALRELIFASAVGVRGGTAHARLVFDRIPHPDRFMYNTLIRGAAHSDAPRDAVSIYARMARHSADCDLMTLRPDKRTFPFVLRACAAMGAGETGAQVHAHVVKAGCESDAFVRNALIGMHATLGDLGAAAALFDGEAREDAVAWSAMISGFARRGDIGAARELFDESPVKDLVSWNVMITAYAKLGDMAPARELFDGAPDRDVVSWNAMISGHGGMVDKGHEYFSLMQQRYRIEPNIKHYGCMVDMLSRGGLLKEAFEFIGTMKIEPNPVIWRTLLGACRIHGCC

SEQ ID NO: 49211 - protein, 784 aa, Zea mays
  Coding DNA Sequence Number=SeqID_5836
  Gene Ontology: Mol. function=protein binding; Cellular component =Golgi transport complex; Biological process=protein transport
  Homolog annotation: Hit_ID=A7PXT6; Match level="QueryCoverage=77%, HitCoverage=77%, E-value=0.0, Identity=62%"; Hit description =Chromosome chr15 scaffold_37, whole genome shotgun sequence
  Pfam annotation: Domain name=COG4; Domain location=162-475; Score =265.2; E_value=1.4e-76; Accession=PF08318.3; Description=COG4 transport protein
MSPSLDFGDPTSFTALRVLTDGGAATRLLHECVAYQRALDARLDALLARRADLDRAAASLLRSAPPLLSLAASDAAALKESSSSTAALADALSSRVRHLDAAHSRADAALARAEAALDRSRALEATRRALAADDLAAAATAAHEFLAIDARFPTDDDLRRDLIDIKRRLEGLARRRLAAVVDAQDHPAVLRLVRLFPLLGLADEGLQVYVAYLKKVVALRARADFEHLAELTSATQPTSDRPDFVGCLTRLFKDIVLAVEENDGVLRELRGDDVAYAIIELQEECDSRGTQILRRYADYRKLARLASDINSYTKNLLSVMGSMASAAGGNEGPDPREIELYLEEILALTQLGEDYTEFMVNKIRVLRDVKPELGPRAMKAFRNGNFNKMEQDLTGFYVIFEEFFMVENVRKAIRIDEPISDGLTTSMVDDVFFVLQSCCRRATSTASINSVIAVLGGATSLLSNEYQEALQWRMREPNLGAKLFLGGVGVQKTGEEIATALNNIDISSEYVLKLRHEIEELCVEPGRQPPPSTRWHCRSSQQPRHLLAIALSRLPTPYPPRRDPLQAAAAVAGLQIFHTPADREKIKSCLSELGEISASFKKILHSALEHLVASVAPRIRPILDTVATVSYGLDDAEYGENEVNDPWVQKLILAVNTNVAWLQPVMTSNNYDSFVHLIIDFIVKRLEVIMMQKRFSQLGGLQLDKEVRSLINHFSEMSQRPVRDKFSRLSQMSTILNFERVSEILDFWGDNAGHLTWLLTPAEVRRVLGLRTDFRPEAIAALRL

SEQ ID NO: 49212 - protein, 99 aa, Zea mays
  Coding DNA Sequence Number=SeqID_5837
MVVSVGGGDEIARTTSTQRLYSDGFESFSTSVHGVALPGYVVNVALCPDLVGGKEARRDRTMGAAQGGLPRQSRDRWNLFLHLWWLWRGKMPLEDLWTR

SEQ ID NO: 49213 - protein, 112 aa, Zea mays
  Coding DNA Sequence Number=SeqID_5838
MDNVYRCQRFIYNYTKSTVRNTVDYSRQEKLFGKTGQARTVRAIAADRPHHRDDPRTEPMQKSKSSLQTVRRKSKDRPRPRADRPASGTDRPARTVRTRRADRPRSAEWSNG

SEQ ID NO: 49214 - protein, 224 aa, Zea mays
  Coding DNA Sequence Number=SeqID_5839
  Pfam annotation: Domain name=Chromo; Domain location=1-36; Score =15.0; E_value=0.0079; Accession=PF00385.15; Description='chromo' (CHRromatin Organisation MOd
MYKVQWSNHSVEEATWEIEDFLHSRFPDFLPKGVEHAPALDPARTAPRRAKPVPAPAPIKPTEASTVRPRSLSTSPERKFTGDCSAREPGIKLYLTGDTGSTSPDFTRSSGLEHTPSTSLPACARGPTNSCHHRRRVVPRRDRKDFPELTPSFAGPPSPSVSRAALFTSAVTVSKGEGPREERRRSQGGFEWSETQEVAQEPAPEPAIEDLPAPALEGKPRFYA

SEQ ID NO: 49215 - protein, 770 aa, Zea mays
  Coding DNA Sequence Number=SeqID_5840
  Homolog annotation: Hit_ID=Q6Z3A7; Match level="QueryCoverage=21%, HitCoverage=54%, E-value=7e-57, Identity=59%"; Hit description =Putative uncharacterized protein P0038F09.34-1
MAVVRSARAFVMVSIFCSSAVLAELVAAADATSLVLLSLPGISDTRLLELRLLRRSSSLCYGDIHPDALLNKEKHIKKDEKAYHVNLLNYHSKDNPSNQMQGVMQLKATNSGMPMKVAQRIDVSKFMSYIKVSRTQLNHIKRLKQSGDGIQTKHVSRVIGGLDKSHVKPYGALLEDEQRRLREHWLEMSCNDLPAAFEVLRERKVLMEKSIKLLGLELQQKNVSVLRKADQLTDIMKGLGQPGASENDGTPVFQNDQVECSPQSILQGGHVQSTSLHHQDDEQSVYHIHRMNVEDHDLMVVRGIDITSQSEKNSDVPDQSRNGISCVDKGIYCCANNPDKQSDVLMDIKLCKGGLVVYNPDCKNTQLEDLDGVSYKGPSVHACDQDQDLESIGHAVVNHNCHNSPNISSEMSHPTTNAVIDQETENVMEPSCSSSQLPKSSGEQMHVEDFLYLNDQAAKFEKVSGQLAGPLGPPENMMYNDSGDLQIKQTYLSSGQHFSSVYLNNGILSHQQPQLATPAFALDNPASFIEPFSNLQSNRQPETEKDIGAVFYPFRHATNIKQSASLHCLVNKGLAQSASFPRLLQERHQLIDQSDSDLYAQPHEDYCTDVSCPTKVNLHISEQHSYTAFASMDHRYNWFPEGCQSHNNNDNLLGLQSGNFLPQALPSGSSTDGALFSTASQYNQPSVHMGHGGSNRSQLIEPRNQFGPPQNFLSKSQDTNPMFPDMYGFTQNIASGTSSQELLLHHTCLNASAGNLESKLRIPAFAVLPC

SEQ ID NO: 49216 - protein, 554 aa, Zea mays
  Coding DNA Sequence Number=SeqID_5841
  Gene Ontology: Mol. function=protein binding
  Homolog annotation: Hit_ID=Q4W1G0; Match level="QueryCoverage=10%, HitCoverage=43%, E-value=3e-13, Identity=67%"; Hit description =Putative leucine-rich repeat protein
MDVGETALYVATKASCEEAMSLLLLLYDLETATVCSRHNLDALHVAAKQGHTDIVKALNKRIGHKNPKVHLLALIFIEKDYKLADTMIWGLQVLASQKLPRGVHTAAFCHPQPPRPDDLFDKAMNSFKLAKNLPAYNEKHRLSEALTETVKYGICYSCCSILHYFELCITIYTRDFPYQIVLIIVYIALLFSLFNGYLKQGSTADNSFSYEVYLTNETIKMMTLMKGLIKGKGSLPPLVLPLPCSAFSDRPWASYVSARLFYVSFTRRRHATTAPSPVSAPSVHSFHTHGNVPNPTPFLTRGIVATEAVGGLAKDRCGPDSAVAHHPATAVTYTNQTRRRGIAHHTRLLDGIDSRAQPDLSRSERRVVIWPPLVPAPMVVAAPVQLNLDEQGQDRLFPLPALLLIGLQFLKQQHLRSYTRSPRERQVPEVPVSPGIQWRLDHNRLTGPIPRELAGLPNLGIVDFSNNDLCGAIPTDGAFQNIPRSRCQRFIYNYTKLTVRNTVNYSGQEKLFGKTGQARTVRALAADRPQHKDVSRTEPMQKYKFPLRTVRRKS

SEQ ID NO: 49217 - protein, 41 aa, Zea mays
  Coding DNA Sequence Number=SeqID_5842
MANFFRGFVYLPLQVFETQKVEVSSPEVGANVGDLFSNAKS

SEQ ID NO: 49218 - protein, 312 aa, Zea mays
  Coding DNA Sequence Number=SeqID_5843
MSWARGPVTSKCRTESPNFGLEWVQEELQALPTVVEGFMSYASLVTCEGAMNALSREGCRHFKVFDQADEDFERDIYKVEDPIVKESAGAIYDRMWGPHGREVVRERAETARAQAACGESMDDFGALNSALPDPEPTPAEAVSGAALEPPPEIAGGAPDTSASAVAGGDLPPETAEGAPDAFAAAAPSAEDPATVVAEATAEAPQVQDFGPAHATATTKFLAASTADGGNECGGSASEFSDFADSGSSVEWTEESSEEDLDYFAALDVAAAEASPHAADTEDVPGPSTGRRRRRAVAKRRVSGAEGGSASCE

SEQ ID NO: 49219 - protein, 119 aa, Zea mays
  Coding DNA Sequence Number=SeqID_5844
MARGIARCQRLCRAGLRRRNGQREVDNERRPWISTRMAELDLSREVYGARTTPWKMGNMTCGYRVQPLQSVKLLYPLFIDQPYTSHELPSLLRYITPPPAGEEQVVEEEPPYNEAYEFI

SEQ ID NO: 49220 - protein, 119 aa, Zea mays
  Coding DNA Sequence Number=SeqID_5845
MAVARERLRPETEPTTWGRRRHEGDAPRAHEWSRRGGGGHDRAPARATTACLVDDGTRGRARARPRRSLGQRGRDLGRRDQGYQGGAGAEERREEVASGRREAAPGGKVESPGGSNGRQ

SEQ ID NO: 49221 - protein, 118 aa, Zea mays
  Coding DNA Sequence Number=SeqID_5846
MAEPTVSRGHRTVRCAPDSVRCANGSKAATANGWLLLGAFGFRRYLRTRIGTTAEAQRIRRLIQRRRYEQESFGVIAEKETDLKMKKAIQTSVDYYRITTKCKGYGCNFTWAVSHAYK

SEQ ID NO: 49222 - protein, 513 aa, Zea mays
  Coding DNA Sequence Number=SeqID_5847
MAHRGGAHNLAETAPSSGRRNPKSWPRAPSQVHSEAQDCNRIAYGYAGEALRVVQYDGNRMAKMRRLLIPSPPPPWLTFAGIGGMRPVAGARGEDHAESTDSVEQPDPNLTGPSSHGEEGTTAEGVPHGDVRREGTSLPPLPRRSHAKAPPPLIAAVPSPFLRRRWSPAVPSATSPRSATVDPGHRRAFAATEESPGFALRGTRGVVASPSCRQWGPGTVLALPRLSAESVLCAAPCPVSRVTWRDCTTAYVRSRNADAPPAPPRDAPAVGGGPGGDPDDDDSDHSTESSEPQEAEGWVARPITRDAARGCHFHDALDTLLRQAFDRHTWSIEYRCVVYQHSRGRYPDRWEATCLVRRPEDDLRGAEAVSEHYSISERDTAEAAMQDAARRALSQYCSLFGGVADGLNLRYYPRCPTGNTESVVVSPVGEDNPRLSSTVNLVAVLNTELDHSLDELSRARTEIAELRAELAERRHQEGGSPAPVGTQHPYRSPPRGHHTYGSPACKTRIDLDP

SEQ ID NO: 49223 - protein, 50 aa, Zea mays
  Coding DNA Sequence Number=SeqID_5848
MAASQPASWPLAEAAADLNRQSDRHGFFHQPSSVDDDDPISHGRLWNGTL

SEQ ID NO: 49224 - protein, 247 aa, Zea mays
  Coding DNA Sequence Number=SeqID_5849
  Gene Ontology: Mol. function=methyltransferase activity; Biological process=metabolic process
  Homolog annotation: Hit_ID=Q5Z7K6; Match level="QueryCoverage=22%, HitCoverage=19%, E-value=8e-19, Identity=66%"; Hit description =Putative coclaurine N-methyltransferase
MCCKPIEEGVVAADDNSVEAPFLVHVGVEDRQRPVLLQALEVWTLPIAHCDPARSFGLSLENKLSNILPLQFCFRENKMPNIEIIVADISKFEHMKNYKSLLKKISRWMKEDGLLFVHLFCHKTFPYHFEVIRSSLRRSATMAHGSYDQKLSWSPKLPFNRPFAGGPKEYHGRRASRVIQERIATQMIVDGRSRNVIRRGALRPTSGTHVMPRIEQSRRDDLESLCYVLMYFLRGRVADHQRVSMTF

SEQ ID NO: 49225 - protein, 92 aa, Zea mays
  Coding DNA Sequence Number=SeqID_5850
MGIGCLRDKNLNKDYGVVPGHIPSRDLRRGLPFRLWWVQVRSLHDGSRGQWGIVRQGGSLEEMVAGVTWPSILPPGWIVEWDPASAEEDHEE

SEQ ID NO: 49226 - protein, 655 aa, Zea mays
  Coding DNA Sequence Number=SeqID_5851
  Pfam annotation: Domain name=TSC22; Domain location=239-299; Score =4.8; E_value=0.011; Accession=PF01166.9; Description=TSC-22dipbun family
MSSPELQESSARMLEVTGGRWPKNVPIPRAAGKDFFTSRMACDLKVFPYGRNIAVVVSAVMERDRQDAAHKRRAVVRIADPMREAKKVRWSAKAAASGGSKPVAAAKPAAPGHNKAAASVKAAAPGGSKPPPGGLRKGRRPLSPARRIADFGTDISVKDYFVSSGEGQLIVVPPPVVTTLPTAVVGAKGAARDPWATFCASGEILSAAAAKDVAGSMSQRLREASQQLSQQLKQAADFTDLVASGALTADVAAEVERLRAQHADAVRKKSAAESKNRRLSEKVAAMEVEKTDLRRQLAEEREANKAIADAQAAQAEAKLAWAEGSLARQRAEELEARFNALRSRVDKAESSTRAEVERTHAQFVDTYRELGAWTADFEVPGQEAGLHFLEWLQEELLVLPTIVTGFMSFASLITCEGAMNALSREGCRHYEVFDQADENFEHEIFKVEDLVVKQSAGHSLIGCGMAHAEDVEDLVGLDGALPEAAEVLGSGPAHATATNNDIFVVASTVAADANSFGSVSKCFESDDSGSSIAWTEESSDEDLDYFAALDVAAAEPLPRAEGSEELPGMSTGYRQRRAVAKRRVSELSQSGRRYSSEVERGRLRVDGTGKRELLSSPIGVRVGEGELRNLFEGEELRIMLFNYREMGIIPKVEPM

SEQ ID NO: 49227 - protein, 592 aa, Zea mays
  Coding DNA Sequence Number=SeqID_5852
MGGLVVSDGFARELMRTCAAPGERMSSPELREPSARMLKVTGGCWPRNVPIPRAASGDVFTSRMVRKWRVFPYGRNIAAVVSAVMDKDRQGAAQKRQAAIRIVEARPKRQKRGSAKDAAPSGGKPPLAAKSGVPASSKALEAAAGAGGSKPSKVVPPLSRVAEAAKAARALPSAGKRVADFATDICVEDYLGGSDEGQLAMVAPAAAIATAGIVPKARGEALGSGGEVSALAVVRDEAGAATRRLKGVTEALSQVTEALSQVAVLEKEKADLRRQLAAERREANEAIAKEQAAQAEAKLAWAEGNLAKELAEHLQERLTALESRAKGAEAAMRAEAERTRTQLMDAYRGGAGTPRCRGGFMSYASLVTCEGAMNALSREGCRHFEVFDQADEDFDRDVYKVEDLVVKDSAGALYDRMWGPHGREVVRERAETAMAQVQDFGPAHATATTEFLAASTAEGGNGYGESASEFFDFTDSGSSVEWTEESSEEDLDYFAALDVAAVEATPHAADAPDVPGPSTGRRRRRAVAKRRVSAEEGARLRVSRAGRRELLSLPAAASTGEGELRSLFAGEELRIMLFNYREMGIIPKVEPM

SEQ ID NO: 49228 - protein, 60 aa, Zea mays
  Coding DNA Sequence Number=SeqID_5853
MRKRQHRRRPPVPAAPDVACANRRHRPGSCPDAGCPDSSSVPPTPTTVPPSSLILKFLYV

SEQ ID NO: 49229 - protein, 57 aa, Zea mays
  Coding DNA Sequence Number=SeqID_5854
MESHDLRAERESRLVGGNETDGFGYGYGAGCQHCNHCSGEDEAVEGDFQEFQDYDEF

SEQ ID NO: 49230 - protein, 292 aa, Zea mays
  Coding DNA Sequence Number=SeqID_5855
TAPKEGDSCARAPASEPGLLVSVEMKERTTAGGSMLFTRQTGPLLSAKAKRRIYRGRWRAPHAVDWPTPEEYDSWARASALETGSLVAAEVKRRATMGQYYASCVVVRLLLTRRPTPKEYDSWVRAPVLETRSPWRTSGEVFYGASGRQWGNPSLKRDSPKRAAMALPDPPERLQPEVALNLVRNPLGWGVLAFAGRIRVGVSPHGDLTTGEFVFFVSKLPNGLVLSIPSFFVLLLEGLGLQPLHVTPCFILQATVIAYLHGMSMEATLLPSSSSSIPGKDDHQPREGGQRA

SEQ ID NO: 49231 - protein, 255 aa, Zea mays
  Coding DNA Sequence Number=SeqID_5856
  Gene Ontology: Mol. function=RNA-directed DNA polymerase activity; Biological process=RNA-dependent DNA replication
  Homolog annotation: Hit_ID=O48967; Match level="QueryCoverage=76%, HitCoverage=53%, E-value=3e-38, Identity=44%"; Hit description =Putative uncharacterized protein
  Pfam annotation: Domain name=Retrotrans_gag; Domain location=107-181; Score=-0.6; E_value=0.061; Accession=PF03732.8; Description =Retrotransposon gag protein
  Subcellular localization annotation: CTP_CleavageSite=51; ConfidenceScore=5.21e-01
MAHSGSTRSRPRSSRHQHEASTSVRSPSVRGAQTNDLRAELNRRRAGEDVRVSLERAHERQLNIEGRNLDQDFVAVAPQPPVGARFQTGVPFTGGLHRSRGSPPHGDLATQVPAAPTRKIRRSARFTANFASAYQQHGVEAHLHAVRQEPGETLWTFISHFTKMRGTIPHIFDASIITNSRHSAAECREIIDLAKRVSERHEQSSKDGSPPRRRPGKERVDDGEVATAEQDLGYQSPEGVLKDVITGGSASGDDS

SEQ ID NO: 49232 - protein, 97 aa, Zea mays
  Coding DNA Sequence Number=SeqID_5857
MTEKKTTTSSDGGTPKKAKVVEDEEEARLEDEEEATVTLSVEKDALKNGHSGCAKKNYMLRFVSAFLLIVRNDLFSIEDLCSTISKDPWVIFVTYLT

SEQ ID NO: 49233 - protein, 54 aa, Zea mays
  Coding DNA Sequence Number=SeqID_5858
MESHDLRAERESRLMETLWFTSGYEIDGFGYDYGAGEDEAVEGDFQEFQDYDEF

SEQ ID NO: 49234 - protein, 91 aa, Zea mays
  Coding DNA Sequence Number=SeqID_5859
MTLVGAIDEERTTPRNQGQRFTSALISSGTTTARPPHQNSSRSNGLIHGPIALGYREYWKALSAVLTATEAALAPGYQMSEARRFLMTRLS

SEQ ID NO: 49235 - protein, 117 aa, Zea mays
  Coding DNA Sequence Number=SeqID_5860
MAVRRGILASALPITVADIINGHLSMYHHKMVNTRKVGGIDLPASPFNRRVLRQQQQLAKMNPPNPLPAGVDLAVAAQMRIMQHMADTMADMHAQMRQERQEMRQEREEICRKLRQE

SEQ ID NO: 49236 - protein, 142 aa, Zea mays
  Coding DNA Sequence Number=SeqID_5861
MQVRMTVPRVTCYGTSQGINPTYRCPCPKDLRQSCRCAQWLDRFDYLYLHHIAQERLTHNADITHHHKTTELSNFLTYNNMGLKTLSTECTFASLTHQRKKNLKDMLAFGNQGKAYQDSKTPFAEKLTMSGSLKIHFTYQVK

SEQ ID NO: 49237 - protein, 70 aa, Zea mays
  Coding DNA Sequence Number=SeqID_5862
MDTAGARASAFCLSWAGSENEEEVTVEEEETTPSTENPPAGNCFFTSVEQSPTLLQHKASPSAFATSLLF

SEQ ID NO: 49238 - protein, 57 aa, Zea mays
  Coding DNA Sequence Number=SeqID_5863
MGSSSLRAEWESRLVGGYEIDGSGYDYGAGCQHCNHCSGEDEAVEGDFQEFQDYDEF

SEQ ID NO: 49239 - protein, 129 aa, Zea mays
  Coding DNA Sequence Number=SeqID_5864
MWCNRVSHVKDVWAMYPDLVGRVTVKCMSALYRLQALQSDAMAHLANLAQTTKLTLDSQEDFKDLQVERLSQRVTTLEQQVEIRYNTIDVLENQLHDVQQELEEANVHLDMHHLEMEANEAGSEGEEAP

SEQ ID NO: 49240 - protein, 46 aa, Zea mays
  Coding DNA Sequence Number=SeqID_5865
MAMMGSTLEKMYLYQVKKQQTFVASIPRWSLKKKIKTEAAGRRVLR

SEQ ID NO: 49241 - protein, 44 aa, Zea mays
  Coding DNA Sequence Number=SeqID_5866
MALVYSAPPEKVTAVEYSRLRPAWEICRKKYKNGKIMRPILLDC

SEQ ID NO: 49242 - protein, 151 aa, Zea mays
  Coding DNA Sequence Number=SeqID_5867
MALNEVKSRGGNRLSLTTNCDVINGDHHSDGRMATSPGKWVRQACSRAQVHPLGDLFTLSSYPHITGTNRNAGVDRGAGITGGRFREPRIFFSSLFTTEWLIHRPDSPNFGEFLFDFHVVNYQSDCIKVVALYTSFNSVIGTLVICSLDRP

SEQ ID NO: 49243 - protein, 172 aa, Zea mays
  Coding DNA Sequence Number=SeqID_5868
MDVILFMMRQLNDLNMDKNQNLAYAPYIMALIKAKTRFEGRCETAHTPFRPFKNEIGFLTRPLTPFPDNEEAQGHAFDDQPAAHPAQHMPPPPPPQQQVVDTQLDGVHTQFNDLRSHIHTTVHDPIMSRMNNMQQSFQDNMGALSSQFETLSTSDSVHTLDERQQQLQNDFS

SEQ ID NO: 49244 - protein, 24 aa, Zea mays
  Coding DNA Sequence Number=SeqID_5869
MAGGIKLAGAKGKWLAGEENTDDL

SEQ ID NO: 49245 - protein, 203 aa, Zea mays
  Coding DNA Sequence Number=SeqID_5870
  Subcellular localization annotation: CTP_CleavageSite=60; ConfidenceScore=5.09e-01
MTNYKRLTGNRSSSSDNDLRLGRQDSCSNGFRANAVAEKPSPTNDENQPFKPKRRRSGVRAALAVSPAKTTSSGCHHLSADGHLLTNAAPAYDVRSESAPAGPRPRPCHKNENGTVPEHERRPHGTSSLAPLSITGEVPTDILQETGGRKGGLPRDKHPTAPQLDRERDIVERILLGGGSGPRALLLIRGSKAGPSEGFRQQP

SEQ ID NO: 49246 - protein, 25 aa, Zea mays
  Coding DNA Sequence Number=SeqID_5871
GYGALHTLPRFFGRGVWGLINSVAN

SEQ ID NO: 49247 - protein, 31 aa, Zea mays
  Coding DNA Sequence Number=SeqID_5872
MASIVECLSAENPYELQIGPFQFLNFCNIIV

SEQ ID NO: 49248 - protein, 237 aa, Zea mays
  Coding DNA Sequence Number=SeqID_5873
  Gene Ontology: Mol. function=kinase activity; Cellular component =ornithine carbamoyltransferase complex; Biological process=amino acid metabolic process
  Homolog annotation: Hit_ID=Q6QP54; Match level="QueryCoverage=39%, HitCoverage=32%, E-value=1e-16, Identity=52%"; Hit description =Putative kinase
MAPPVDVVGPCPRLGEVEAPPRSRSSLSSKVEVESEPPGRTRLRPSAEVRAESEPWGRAKRSSSSFGAEPESEPWGRVKRSSSSSGAEPESEPWGRVKRSSSSSGAEPESEPWGRAKAEFVVFPGLSPSPSPGVGAEQSSSSSGAEPESEPWGRVGADLTLSSGSAVGAAQAALSSCQTGQWSGEATFALNAPAIWSVGVAIWPRSLLGEDWASGEPKLCVDGGYQLCLEGTPNYGP

SEQ ID NO: 49249 - protein, 226 aa, Zea mays
  Coding DNA Sequence Number=SeqID_5874
MALPPLLAERRRRGVCKKAESTPDRPLALCRGSGAALANPAPAEPLTASTYQTENLGPDRTPGLRPVRMRERPDQPKHYSRSDRRHFAAPLTGLTKGQRRLRHTDYSATGQSKTDKARTRAKSQKTTISAPPDPGLGLGLSPGRRRTPPDPGLGLGLSPGRRRTPLRPTQGSDSGLVPEDNDLRLARPRARTWARPQKTTISASPDPGARTQPRLRRSFHIAQPRA

SEQ ID NO: 49250 - protein, 173 aa, Zea mays
  Coding DNA Sequence Number=SeqID_5875
AFGAGADAGAERGRAGAVVAGALWQGAAAAQGGGAVGRARGGCGVGSEGEERKKEVSSKFDGSLALASPPTSSDDSDDSQGLVAEVWMYIRSIERVGLEGSDESEVSSDEEDSFGSSEERSSDDSDDEGGGGGDNSDDGDGGEGDDDGGKGGEGSNGGSGSGGGKASGKAQLV

SEQ ID NO: 49251 - protein, 409 aa, Zea mays
  Coding DNA Sequence Number=SeqID_5876
  Pfam annotation: Domain name=DUF1777; Domain location=96-231; Score= -84.2; E_value=0.076; Accession=PF08648.3; Description=Protein of unknown function (DUF1777)
MRVEWDALSLVIRGTRGVVGFAVVPSMGFGHSTCFAECSGGDVGNMEDFEEFQDYDEFYFTLVANPQSAACRSVHCVARCQVSLVTWRDCIVACTRSRSTDARSRSRTRSGRTRSRSRTRSRSRTRSRSRTRSSRTRSASAGGGVWKAAFSCTLARDAPAPPQGIPAAEGDPDGDGDDNDDGGSSSHGTELSEGLEPEGWIARPITRDAARGCHFHDALDTLLCRAFDRHTWSIEYRCVVYQHHCGLYPDQWEATCLVRRLDDDLRGAEAFSEHYSITERDTAEAAMQDAARRALSQYCSLFSGVADGLDLKYYPHRSTDIAGGVIVSPVGEGNPRLNNMVNLVAVLNTELDHALDELGKVRVEVVELCAECAARHYLDGGSPAPVGIQHPYRSPPRGRFDYGTPDCRT

SEQ ID NO: 49252 - protein, 92 aa, Zea mays
  Coding DNA Sequence Number=SeqID_5877
MASGCLLWRSLSCCSSPSGFVLHSRSMHDLLLALELLGYSGWLLGQEGEMPGYSDAGTDFLQVGCSNSTAAAAEETASGTGADADADAGDLA

SEQ ID NO: 49253 - protein, 407 aa, Zea mays
  Coding DNA Sequence Number=SeqID_5878
  Gene Ontology: Mol. function=hydrolase activity
  Homolog annotation: Hit_ID=A2YQ08; Match level="QueryCoverage=36%, HitCoverage=24%, E-value=2e-25, Identity=49%"; Hit description =Putative uncharacterized protein
MGSGAHAATRPEIRAGALHHPAGDLLFDTYLHGAPKVSSIAGHRNRCGKVVLGEPVPPNKGRTSETINAEFLGEGDIEVSDGDEGREDKRRRRKGWRGGKKLCLDPKKFNVIFGPFDRHHSLYAIGYGAEVSSALAQARHRGADVAPSSAPQTLALSSVVSRSKRAQVHSLALTALSFTAVQVKCMIHPGPSLCGCPSRFFHPHARGFGKLRRQSSRRTKCDGRPAGEGTRRAALSLDSIFLLRAARTDTLEPPQQEAVKPSPTNGRIRYRTPSATDLLPADDVAADATAATAVAARIRRYSSAGARQQQQTEAVADHVHRYRRVLMVLLSPVLLISFVLLLMPRTPATASGGVLLTVGGRRWGPRAVKDGLNKYVVIFDAGSSGSRMHMYCFDENLDLASAHREGD

SEQ ID NO: 49254 - protein, 284 aa, Zea mays
  Coding DNA Sequence Number=SeqID_5879
  Gene Ontology: Mol. function=protein serine/threonine kinase activity; Biological process=protein amino acid phosphorylation
  Homolog annotation: Hit_ID=A3A3S1; Match level="QueryCoverage=17%, HitCoverage=11%, E-value=6e-09, Identity=60%"; Hit description =Putative uncharacterized protein
  Subcellular localization annotation: CTP_CleavageSite=24; ConfidenceScore=5.43e-01
MSSRPLPAASSRTPPLPAHASTPRASSRAAPPARQPHTAWPPALHLHGLDLSGAVKPRSRSPTALKPHGVDHPWIHPAALPLTPSAGLIGALPGGSEGGAGSMWKGKKSGPLAPRGRKREFPIRAADYELLEPIGDNATAVVRRARCLPHGRSSSSSSYSVVEVELVLLDSPFASPTKEEASYADAVTAAAARNGSSSSPRHVASLSLFAPASSTTLDLPPYSSSCFFQLGVISYGAEITAALAQILALSSVVNLCTYSDELATRPMSRLRFIEKRVLENKAKR

SEQ ID NO: 49255 - protein, 184 aa, Zea mays
  Coding DNA Sequence Number=SeqID_5880
  Subcellular localization annotation: CTP_CleavageSite=36; ConfidenceScore=5.36e-01
YSMFTGVIDSTELRSHGGSSSQAGCGSSSRSRRSVSSMEDAMREQQEKFREELRQQQMAFLKEQSEYMAAYNAQAQQAMNSSFPEQAQQQLFVFHEFLPLMPQWGLHAPPPPPPPQGSGVMGHNTPPPMIPAPGGAYAREGATPGENQNLLHDFVNEFFASGGVVTTPMTPICDGVSFVPNCAL

SEQ ID NO: 49256 - protein, 444 aa, Zea mays
  Coding DNA Sequence Number=SeqID_5881
MAAEELHPGDTVEFGVSWISSFEVAEDDEDEGALRCAARMSSGRDLVEEFIGYGVWPLAHGWALGQMMNKDRQDAAQKRQAVVRLADPMREAKRARGSAKTAAASSSSKPVPAAKPVVPGPSKASASAKTAVSGGTKPPPGGPAKGRELPSPGRRVADFGMNISVEDYFAGSGEGQLVVVPPSAATTSPTAVVGAKGAAQDPWAAFCASGEILSAAAAKDVAGSMSQRLREASQQLSQQLKQAADFADRMASGVLTANVAAKVESLRAQHADAIREKSAAESKNRRLAEKVVAMEAEKPDFRCQLAEERREANQAIAEAQAARAEAKVARAESSLASQRAEELEARFNTLRSRVDKAEASTRLEVKRMHAQFVDAYRELGARTADFEVPDREAGLRFLEWLQEELLVLPTIVEGFMSFASIVTCEGTMNALSREGCRHYEVFDQ

SEQ ID NO: 49257 - protein, 187 aa, Zea mays
  Coding DNA Sequence Number=SeqID_5882
  Pfam annotation: Domain name=MAP7; Domain location=6-168; Score= -65.2; E_value=0.0086; Accession=PF05672.2; Description=MAP7 (E-MAP -115) family
MAPKRASSKAAPSVDEAAKAALLAEKKGKALADTTHQEACEDDAVSKRQRNDQPTPEGSLRTCSSGGQPQEPPQCFALQEGEDATEHGEVIGVLAEEQLQLRALRIKNRNLQKQKEILEAKRQRVSVQAKVRQMIRDEEQRAQESSKRLRSCSAKANMICSTARPSNSARQSETYSFLNADPSPRTP

SEQ ID NO: 49258 - protein, 169 aa, Zea mays
  Coding DNA Sequence Number=SeqID_5883
MGVVLTIVTGFMSFASLVTCEGAVNASSREGCRHYEVFDQADENFEREIFKVEDPMLKQSAGALFDRMWGPHGREAVRERSDQAIDQMAHAEDVEDLGGLDGALPEAAEVDPVPPSDAGEGPSATPAPTAAGGDPAPAPASTCEDASRAVVEPGTEDPVTATGPSQVAG

SEQ ID NO: 49259 - protein, 375 aa, Zea mays
  Coding DNA Sequence Number=SeqID_5884
  Homolog annotation: Hit_ID=Q6QP51; Match level="QueryCoverage=19%, HitCoverage=23%, E-value=8e-07, Identity=46%"; Hit description =Putative growth-regulating factor 1
KAPGGYTHLLVAIDKFSDTLQGPPLRRGGWVPHVMQTGSEQKKPNRPVVASDPPLLPRPTGERGEQPCRRHATAPSGRASPTPNTPSMEAQAHASCNRRADCFVHATAPPLAPPPRLLDCRTNTATRGDPAHDPAAPAWRGDNAPAFRSSNGSRTRNGRPANHSPHRINSAAGTGGASRRRSGRRFAFAIMSSSGPGKRDTPKRILPREGTRLRASLLIRGSKAGPPEGFDSRLRSRGPYTHYWSEAGPRRVHSRLRRRARDDHGYVRYLTKARAALPSSPETPCSAPIEGNMTLPPLLLAERRRRGVCKKAESVPDRPLALCGGSGAALANPAPAELLTASTYQTENLGPDRTPGLRPVRMREQPDQPKHYARH

SEQ ID NO: 49260 - protein, 152 aa, Zea mays
  Coding DNA Sequence Number=SeqID_5885
MKKSEKDIHDSRESAKKAKKAAELERRIEKRDDPMWCNRVSHIKDVWAMHPDQALQSDAMTHLTRLTQTAKITLDDREDFVVDQSSELVEKDLQVEQMRNHIQALEQQVAIWDNTIEVLEYQLQDVQEELEEANSHIEMHHQDMNDMEAGNE

SEQ ID NO: 49261 - protein, 102 aa, Zea mays
  Coding DNA Sequence Number=SeqID_5886
MVSPVSCKRVIRVDVRAPFVRGRLGAQRHAQKYLRVICRTRSPGDGGPRDLRWLSNPSGGPGFEPLISREARSLVPSRGRILFGAKRRPLLLPEAPPVPPRS

SEQ ID NO: 49262 - protein, 190 aa, Zea mays
  Coding DNA Sequence Number=SeqID_5887
MARGGSGWPDDEESRRQRVPIGAREMLSVDRVEELRKGETTAGFQCAELRRSSLWPMRCRSPATTAERRSNRGGGAAGWMSARAWRERMRGRGELGGGRRVFTERSGDVGEKWGRGRDLIGRGKHAMGADAAVAGEGTDLTSGTRGPARASERECATALTERPQWSERRSERVRASERSATPTGETIDGQ

SEQ ID NO: 49263 - protein, 591 aa, Zea mays
  Coding DNA Sequence Number=SeqID_5888
  Gene Ontology: Mol. function=phosphatidylinositol binding; Cellular component=clathrin coat; Biological process=clathrin cage assembly
  Homolog annotation: Hit_ID=Q5N9P9; Match level="QueryCoverage=100%, HitCoverage=100%, E-value=1e-141, Identity=71%"; Hit description =Clathrin assembly protein AP180 short form-like
  Pfam annotation: Domain name=ANTH; Domain location=29-323; Score =358.2; E_value=1.4e-104; Accession=PF07651.7; Description=ANTH domain
  Pfam annotation: Domain name=ENTH; Domain location=29-174; Score= -1.5; E_value=3.7e-05; Accession=PF01417.11; Description=ENTH domain
  Pfam module annotation: Pfam domain module=ANTH::ENTH; Domain location=29-323::29-174
MASMQSWRKAYGAIKDTTTVSIANLNSDFKDLDVAIVKATNHVECPPKERHLRRVVAATSITRPRADVAYCIHALARRLAKTRNWIVFVVLLVLYKASPAYSPVALKALVVIHRLLREGDPTFREELLNFTQRGRILQLSNFKDDSSPIAWDCSAWVRTYGLYLEERLECFRVLKYDVEAERLSKQGQGPEKGHSRTRELDSQDLLEQLPALQQLLYRLVGCRPEGAANNNYLVQYALALVLKESFKIYCAINDGIINLVDKFFEMPRHDALKALEIYRRAGQQAGNLSDFYENCRGLELARNFQFPTLREELPERLLLTYKPEESEEILEPAPVEEEKVPVEEPVLVPPVTEVVSPPPKAEVPDTGDLLGLDDTNPAVSAIEESNALALAIVPTDGASTTGNTAFQDKGFDPTGWELALVTAPSNTTSSTSVGQLVVVLAFGAYFVRSWGQRPEQSLHALSISDLQSCILQGGGLDKLILESLYDDGAYRQRQQQQLYGSAAPNPFMANDPFAMSNQVAPPPSVQMAAMSQQHQQIPTMMQPNPFGPPMHPQVSMAPATNNPFLDAGFGAFPAANNGHQQHNPFGSAQLL

SEQ ID NO: 49264 - protein, 133 aa, Zea mays
  Coding DNA Sequence Number=SeqID_5889
MARDSGDRNRPIARCPLGEYPDTKEQHKRHQAQQRICLPTRPVGMPLAEHELVAAVATSALGVAFGVCLLVALSRSRALKALAAATSAAALWTPRTLATASSPVAAILAASKAASKSCKAARKLGLASYLSPS

SEQ ID NO: 49265 - protein, 95 aa, Zea mays
  Coding DNA Sequence Number=SeqID_5890
MASLREVRPPGLSRQQLQLAARPEDDRGSTSTTPLPMTDTTIVDRRIRVEYRRFTPRLRDIQWPPNFKVSNVDKVRAQAGPGRLFGCLHYRCPGC

SEQ ID NO: 49266 - protein, 266 aa, Zea mays
  Coding DNA Sequence Number=SeqID_5891
MAERYQLPRSCVPPTIRRKDYGHPPSGGSEGGKTRCIREREDMVAFQGGHPPFKGDSPYLRPQPSGAESSPTRSKVLPLRRGDWVPHVMQAGPEQKKPNRRARPTRHATGASDASCEQLHHHSLHYRASSTAEPIPRLEETQRTTQQRQPGATDNAAKNGPAGPGKGDTPKRILPREGTGLRASLLIRGSKAGPSEGFNCRLRARGLHAHYWSEVRRPAPRKGSTTASGYSGSAPTTDQGFEGWPSKGFTAASDAERGMTMGTFDT

SEQ ID NO: 49267 - protein, 158 aa, Zea mays
  Coding DNA Sequence Number=SeqID_5892
MGVAKGRLVTVVGDERLPPAPINRALASLRKREPSPPSKDFGDSEYSEEFSSESEGSLSYASPLVSSDDSDDSQGIAAEVWTYIWVVERSGLEGSDESEVSSDEEDSPDSSEEGSGGDGDDEGDDDGGKGDGGSGMGDGGTGKDDGSSGRASGKAPLA

SEQ ID NO: 49268 - protein, 102 aa, Zea mays
  Coding DNA Sequence Number=SeqID_5893
MNQRLLKVIHSKLGGYTHWVAAEVWTYIWVVERSGLEGSDESEVSSDEEDSPDSSEEGSGGDGDDEGDDDGGKGDVGSGMDDGGSGKDDGSSGRASGKAPLA

SEQ ID NO: 49269 - protein, 165 aa, Zea mays
  Coding DNA Sequence Number=SeqID_5894
  Subcellular localization annotation: CTP_CleavageSite=72; ConfidenceScore=5.13e-01
MTPLTVVIFTTLSTPCCIGPSTDIFGPLSIVVSSTSIVAAYTRTSGRLLAWCAVWTMISGVADDLDLKYYPRRSTGSARGVIVSPVSVGNPWLSSMVNLVAVLNTELDHALDELGKARAEILELRVERAARHQQAGGSLAPIGIQHPYCSLPRGCYAYGTTDCRT

SEQ ID NO: 49270 - protein, 131 aa, Zea mays
  Coding DNA Sequence Number=SeqID_5895
  Subcellular localization annotation: CTP_CleavageSite=51; ConfidenceScore=5.32e-01
MVALGRLWRVAGRSPELMAGSGKSGVVRRRQRGRQPSTGTGFIAVARAWSRAAAGMRGFAHGRALSVPPGVSPRRTRGSSLLPWFNGRFEHLSVRILAKINTGVVVNFLFNVSEIATAGDADAGVLEGDFA

SEQ ID NO: 49271 - protein, 390 aa, Zea mays
  Coding DNA Sequence Number=SeqID_5896
MTKVIIPFIIIDWAFLTKLRVLGPSVLVILSEVTHFFGSFVDLSLKIGEPKHVFPLPLHLLVNSLQVPDLLVQLLLLRCWASSLSLLAPSFCRESVSWFVSSGCMATPGAVVFFGGMVKVDAYQRWSFELTGGRGTDAWGPRVSDVLRARGPLAARSQINSSGAALSVVVVTQSSEARQTGDSRVLRGGLGSRRGWGGLGKHYGEVWVARTGLRWANGGGASGRGWGCSIPKFGLGEGLQCPDAMKTRRPDEGRLRRAKFPHGKAELAQKRGGERSLTQRQRLGQFGTARGGFGWPDDEESRRRRAPTCARETLSADQAEELRKGKTNVGSRCANLRRSSPWPRRRQKPGDDDRTVKQQRGRRYGLGECEGRERVNAGQGRAGGVCGVVT

SEQ ID NO: 49272 - protein, 307 aa, Zea mays
  Coding DNA Sequence Number=SeqID_5897
  Gene Ontology: Mol. function=ATP-dependent helicase activity
  Homolog annotation: Hit_ID=A2ZI24; Match level="QueryCoverage=55%, HitCoverage=31%, E-value=5e-61, Identity=69%"; Hit description =Putative uncharacterized protein
  Subcellular localization annotation: CTP_CleavageSite=54; ConfidenceScore=5.09e-01
MIQLEFVPWLAPAARVAGPPRASQRAWLAHPARPSAQAPTPRPPGQRPLPGPATAAHPARSRERVWPSCLAPAWASVAPALVPLGPPATLSNYSSSLGTLRDVRSHSAKNHPTARAPVDLPPLHSLTVGGCLAEATQPAHPRWRRATGAEEGRGDFDRLSKFLVVCLNAIRDAVAPEEGGNSIHGTGDWGVEFWRCCSAQASSDVLDASGACATVTQTAWLVSTACDIIARKERHGMVVSCPFLLYLVSSQDKAAQVRSICKPLKPLGIHSVSLHPGASIEHQISGLETCEPEFLIATPESFLILFR

SEQ ID NO: 49273 - protein, 387 aa, Zea mays
  Coding DNA Sequence Number=SeqID_5898
MSSPELQESSARMLRVTGGWWPRNVPIPRAAGKDFFTSRMGAAQKRQAVVRLHEARPKRQRGAAKAAAPGGGKPPLAAKSATPASSKAPEAAAAAGGSKSAKAAPASSRVPEAAKAARELPPPGKRVTDFATDISVDDYLVGSDEGQLVVVPPAAATTTAAVVPRAKGGALSAGGEMPTLTAVRDEAGAVSRRLKEMKEALSQAADFADRAASGALTAVVSAEVERLRTQHADAVREKSAADSKCRKLADKVAALEGEKTDLRRQLAEERKEANEALAKAQAAQAEANLARVEGSLARERAEQLAERLSALQSRVERAEAATRTEAERTHKQLMDSYHELGARTADFEVPDREPGLPAWSGYQEELQALHIGEGGLCLMLPCHCEGR

SEQ ID NO: 49274 - protein, 96 aa, Zea mays
  Coding DNA Sequence Number=SeqID_5899
  Gene Ontology: Mol. function=ATP-dependent helicase activity
  Homolog annotation: Hit_ID=Q2QXQ5; Match level="QueryCoverage=44%, HitCoverage=8%, E-value=2e-14, Identity=88%"; Hit description=ATP -dependent RNA helicase, putative, expressed
MAKGDGRRGGSRGLRSAVQFPGVSLHPGASIEHQISGLKTCEPEFLIATPERLLNLVSLKAIDISDCDPFPSLEELKIKRWRPSDPALRVLQSLRS

SEQ ID NO: 49275 - protein, 28 aa, Zea mays
  Coding DNA Sequence Number=SeqID_5900
MNGGAKVTHCNVIKAPKHVEQGREVPNS

SEQ ID NO: 49276 - protein, 85 aa, Zea mays
  Coding DNA Sequence Number=SeqID_5901
  Homolog annotation: Hit_ID=Q338H6; Match level="QueryCoverage=68%, HitCoverage=28%, E-value=7e-08, Identity=50%"; Hit description =Retrotransposon protein, putative, unclassified
MGTTLTVQMATTQRPILGHPLVAHEPPLVLLTLWWYALTDHVLGDLVAPRSLSWCLMDSVVLSWLHGTITIELQDIICDQADTAR

SEQ ID NO: 49277 - protein, 203 aa, Zea mays
  Coding DNA Sequence Number=SeqID_5902
  Gene Ontology: Mol. function=carboxyl- or carbamoyltransferase activity; Cellular component=ornithine carbamoyltransferase complex; Biological process=amino acid metabolic process
  Homolog annotation: Hit_ID=Q8SA97; Match level="QueryCoverage=55%, HitCoverage=21%, E-value=1e-13, Identity=43%"; Hit description =Ornithine carbamoyltransferase
MAPPVDVAGLRPRLGDVEAPPKPRSSQSSMAEAESEPLGRARWRSSAEARAESDPWGRAKRSSSSSGAEPESEPLVGRSGVRRLPGLSPSPSPGSGGAEFAVFWDLARVRALGRAKRSFLWCLWQGLTVCQSHSVKWHCSQSGTGGAVLLSGRASGEPEICPPLEGGLGRDGNPPGPLQLYADGGYQLRIRSLEGTPNYGPRH

SEQ ID NO: 49278 - protein, 76 aa, Zea mays
  Coding DNA Sequence Number=SeqID_5903
MDGGDQRGVGGGCHGGHNNVSPGGCSKCGKAQRGAMAQLLSCDDHRRCVMEGPEGGDVGGPSNSELATEAVGDNVG

SEQ ID NO: 49279 - protein, 119 aa, Zea mays
  Coding DNA Sequence Number=SeqID_5904
MRRVDEEWARLVNHTRSARHRTTVTGRGAPRSSDQGRASGEGWARRGARGTDRWGRGVGAKDSLGCAVRLPWVGRIGVCRPSVGPYAVHVLRTCCRAASHVAIFVSRRYFVSLIITNAM

SEQ ID NO: 49280 - protein, 492 aa, Zea mays
  Coding DNA Sequence Number=SeqID_5905
  Gene Ontology: Mol. function=transferase activity, transferring glycosyl groups; Cellular component=cytoplasm; Biological process =metabolic process
  Homolog annotation: Hit_ID=A2YJS4; Match level="QueryCoverage=95%, HitCoverage=96%, E-value=1e-146, Identity=58%"; Hit description =Putative uncharacterized protein
  Pfam annotation: Domain name=UDPGT; Domain location=22-479; Score= -14.5; E_value=7.1e-10; Accession=PF00201.9; Description=UDP -glucoronosyl and UDP-glucosyl transferase
  Subcellular localization annotation: CTP_CleavageSite=38; ConfidenceScore=5.04e-01
MATAAVPASRTGSGGVVRRRRRRVLMFPLPFQGHLNPMLQLAGALHARGGLDITVFHATFNAPDPARHPPGYRFVPVGDGVPSADLVPSGVDADIPGALLRINRRLREPFRDCLRQALALPEDDGDEGGAPPACLVVDSNLRGMQLVAEELGVPTLVLRTGAAACLVAYLAFPALCDKGLLPPTSKDKSQLDIPLDGLTPLRLRDMVFSPTTTHANMTECLKCLVDATRSCSGVIFNTFRDLEDSDLQRIANGVVGVPIYPVGPLHKISPCTEDSLLAPDRACLEWLDKQEADSVLYVSFGSLARVDGKELLEIAWGLADSKMPFLWVLRHGLLVNSSSSDDDDDQDKVRRLLLPGGFEEATRGRGVVVPWVPQQEVLRHRAVGGFWTHSGWNSTLESVCEGVPMMCRPQFADQMINTRYVQEVWRVGFELDGDQLERRKIAGAVTKLLCTEEGRRMRQRARDLRDKAIECVQEEGASKSAIQLLIDRIASF

SEQ ID NO: 49281 - protein, 67 aa, Zea mays
  Coding DNA Sequence Number=SeqID_5906
MSSVQRLLDGLLAAPMSAGPSLDDIVPHGSRGELASGGLFRIGEAFWKNRSSVDRLGPCGGPSATPK

SEQ ID NO: 49282 - protein, 181 aa, Zea mays
  Coding DNA Sequence Number=SeqID_5907
  Gene Ontology: Mol. function=binding
  Homolog annotation: Hit_ID=A2YIA3; Match level="QueryCoverage=53%, HitCoverage=7%, E-value=3e-26, Identity=54%"; Hit description =Putative uncharacterized protein
MSSIVTVVCKEILGCYRKLLGIPDMLNQPNMSILKQLLQTLQPTENFDDVLSEFQPSLAPCNVDYLYCEAFVVLLDKSEEPNGKIYTWDALKQSFPFYESVLDTQLISCSVLISLAKMLEKDGRVKCWMNFKWFSLTDIKINIKRVPKNTTLIMVLEEASNDEAYSVDPFSTIALYSSSRL

SEQ ID NO: 49283 - protein, 34 aa, Zea mays
  Coding DNA Sequence Number=SeqID_5908
MAPPLGTEEPVTEDTGEKQVEVAEQELIEGKLCP

SEQ ID NO: 49284 - protein, 241 aa, Zea mays
  Coding DNA Sequence Number=SeqID_5909
MTPPQYAVQQFEKHRVPRCRVRMTLEPHPLQPGWRSLDSESFGYRAEDTIEAIALHGLTTFCGFHPLELATHPIGLFPAEKEDDPMWKDRVEHAKDIWAIYPGQTAHLTVMRGEAMSHLMALLEATKITLDNREELVVDLSQEMVEKDLQVEQLSGEIHELEELVGTQENTIEVLEDQLLNTQQQLAEANEHLDMHHQEIQDQEDDEDVDIEGGDEPASSVDTAGSGRPPSPESSVASFAH

SEQ ID NO: 49285 - protein, 318 aa, Zea mays
  Coding DNA Sequence Number=SeqID_5910
  Subcellular localization annotation: CTP_CleavageSite=45; ConfidenceScore=5.26e-01
MSSSLHYASRLFTFQAPGWGEPAVFSPHRWRNATPRELVPSAIVRLQGFSSHSPVAPLRWWSPKTVTSSSWMGRGKPGCDPALSIGGVRHPRWGGERGEPGLYLLRGSADHLFFQLLVVAIVLPRCDGDVLQSCRGRRTVAAQLGCNIPPSPLHSRRGWQRGSAGALGSGPLFGSNSWFASLERDREREPSGGRIHPGPWLLLQRSLASLSMFVAPQARGCSYPRGRNQSSVYSPVDYLNRFTKHESPRVKVTSEKMVGRGPRGNRPNRLLGPDSQRSPWTASPSEAGSDLAEGVVDAEGATAPFQREDPSLQDQIVL

SEQ ID NO: 49286 - protein, 171 aa, Zea mays
  Coding DNA Sequence Number=SeqID_5911
  Subcellular localization annotation: CTP_CleavageSite=85; ConfidenceScore=5.39e-01
MVAFRKGSPSLLKATLPTCAPKRHGLSLLQTRSKALPCGAGGWVPHVMQTGSEQKKPNRPRVVHTTAQRLQETPTSAQTNGRKGRAAMQAACNCARDPGKGGYPEKGSFPVKEPGSEPPTDQRFEGWPPEGFNSRLRSRGPYTHYWSEVRRPAPPKGSTGRLRLLGLRAHY

SEQ ID NO: 49287 - protein, 259 aa, Zea mays
  Coding DNA Sequence Number=SeqID_5912
MENDVVETPTLDIVACNITGFDKIPEGIDAMGCVAHLNYGWGEVEAPPRSRSSLSSEAEVESEPLGRARRRPSTEARAESEPWGRAKRSSSSFKAESESEAWGWAMRSSSSSGAEPESEPWGRAKWSSSSSGVEPVSEPWGRAKRSSSSSGAEPESEPWGQAMRSSSSSGAEPESEPWGRAKQSSSSSGAEPESEPWGRAKRSFLWRLKPGLAAVSLTLSSGTAVGATQAALSSCQARQWSGEVTTVTSALSTGGRASG

SEQ ID NO: 49288 - protein, 50 aa, Zea mays
  Coding DNA Sequence Number=SeqID_5913
  Gene Ontology: Mol. function=DNA-directed RNA polymerase activity; Cellular component=DNA-directed RNA polymerase II, holoenzyme; Biological process=transcription
  Homolog annotation: Hit_ID=A9NKF0; Match level="QueryCoverage=92%, HitCoverage=86%, E-value=4e-15, Identity=76%"; Hit description =Putative uncharacterized protein
  Pfam annotation: Domain name=DNA_RNApol_7kD; Domain location=12-43; Score=78.1; E_value=2.9e-20; Accession=PF03604.4; Description=DNA directed RNA polymerase, 7 kDa subunit
MDPPQQPEPVTYVCGDCGAENTVKLVDVVQCRECGHRILYKKRTRRKNGS

SEQ ID NO: 49289 - protein, 307 aa, Zea mays
  Coding DNA Sequence Number=SeqID_5914
MARLRHTARKSVIPFLPSRLAERPLRRPVTGQSSHLERLHRCLHEEQERRRQELEQQGSSSLLQQEVESVRSYSPVPPLEAPPAPPLGVPATGVAVGGDPDVGSDDNSSSHNTDLSEEQEPEGWVARPITRDAAPQSRGLPGPLGGDLLGAPSGEQSPGAEVCSEHYSISERDSAEAAMQDAARRALSHYCSVFGGVADGLNLSYYPHRPSGSTGGVVVSPIGEDNPRLSSAVNLAAVLNMELDHALYELSRARAEIAQLRAERAKRRHLEDGSPAPVGTQHPYRSPQRGHHAYGNPDCRTKINLEP

SEQ ID NO: 49290 - protein, 116 aa, Zea mays
  Coding DNA Sequence Number=SeqID_5915
MSDDLVVPVHFEVGQELCFRLLDHPLLVLLKLELLVSGQGAGRSAAWCEARWCYLRKGGLSAAWGRTVRGLVRCWDFCLTAGRSAPWGRTVRTYAGTAEDRRWRLDLAPGRDPVGE

SEQ ID NO: 49291 - protein, 79 aa, Zea mays
  Coding DNA Sequence Number=SeqID_5916
  Homolog annotation: Hit_ID=Q5NKP3; Match level="QueryCoverage=50%, HitCoverage=16%, E-value=9e-09, Identity=72%"; Hit description =Putative uncharacterized protein 9C20.7
MRSNKQKQSAGGEKSWIGRKLFLYNVTVGLYAMDPWERYLFNDEKKLGDCQFDLRKQSYVAACAAVYGKLRRSRSLDAV

SEQ ID NO: 49292 - protein, 123 aa, Zea mays
  Coding DNA Sequence Number=SeqID_5917
  Gene Ontology: Mol. function=catalytic activity
  Homolog annotation: Hit_ID=A2Y3P0; Match level="QueryCoverage=72%, HitCoverage=34%, E-value=6e-21, Identity=47%"; Hit description =Putative uncharacterized protein
MSRAFDDYYIKDYGVISAPEVTQRRTDNNDHSPSSGRRLDAIQSDCTALSIVKQGDLMVVANADDSRVVLGTATDDNVYYLADEPGVHFIWQPSQESSVLTMSRAFDDYYIKNCGVISAPEVT

SEQ ID NO: 49293 - protein, 50 aa, Zea mays
  Coding DNA Sequence Number=SeqID_5918
MGIGCPRDKNLNKDQGSLEEMVAGVTWPSILPPGWTVEWDPASAEEEHEE

SEQ ID NO: 49294 - protein, 521 aa, Zea mays
  Coding DNA Sequence Number=SeqID_5919
MNKTPAFKVPLQTKLRFHLRRYEQPHTIGGPAEQQKADGRLAVARSSSIDDDDFCSGGPNSSSDDLRADAAAIRPSPMPSLERQGRAEGRRVGGQSVGGTGYLVGGETSSGCRGGRRRRKRLRSHSGRRAGHAAAASASNGERPSPQSLREGAGRRPHRDRPQLGTLPSPALMMKILEAERGAEAAARLASPHPGAGGHRLGAEEAKPPRAVHATAQRLRAFLHYRPDQRVKGRTAMQAACNRAKWAHPSDFQRTQHGGLGPHVMQPARRLLRASNCTATRTTIAPPRLRNQYRDSRQPCAGRSSGHDVSQAHVTSWDSERTLSHGVKTTRPSSVPRTARARATAAPRTTRPVALTPRWDEQHLWQEKRATLHLRHNDRVKKVRHVISIPYSFLFPLSLSYNRDRERGIPRKGILLHEGNRPRAPLLIRGSKAGPSEGFNSRLRALGLRAHYWLEVRRPSPRKGSMAASDHPGPAPTTDQGENDLVTESHQREASSPRTPSKGDRVRQITRRYFWSAPPGL

SEQ ID NO: 49295 - protein, 84 aa, Zea mays
  Coding DNA Sequence Number=SeqID_5920
  Subcellular localization annotation: CTP_CleavageSite=50; ConfidenceScore=5.45e-01
MGLGVCGSLCQGWFAPWVVMRMMVMTMLMVMVVHVATTTQEKMKSWRKTSRSSKSTMSSRRGLAANPQSAACEGRVYLRFFSAL

SEQ ID NO: 49296 - protein, 34 aa, Zea mays
  Coding DNA Sequence Number=SeqID_5921
MELNEKDTEEGSSMQMNLAGWLASCWYLITNTYY

SEQ ID NO: 49297 - protein, 60 aa, Zea mays
  Coding DNA Sequence Number=SeqID_5922
MGSSSLRAEWESRLVGGYEIDDDDGYDHAYGNGCQHCNHCSGEDEAVEGDFQEFQDYDEF

SEQ ID NO: 49298 - protein, 252 aa, Zea mays
  Coding DNA Sequence Number=SeqID_5923
  Homolog annotation: Hit_ID=A7Q6S9; Match level="QueryCoverage=53%, HitCoverage=28%, E-value=6e-11, Identity=36%"; Hit description =Chromosome chr12 scaffold_57, whole genome shotgun sequence
MYLECWHLLDFPTLRLRPFYSRRARLCQRSGAILPALRPILSPASFLVELTRLCAAATPEDVILSTPETTTGEHQVQLGFLSSIAEQFLLRPFLVGIFFDPALDKSSRLFELVFKRLTLGDNVLLEDDIDAIAAQLACPRTGAKKATTMVFSPVGTLSNKVLVGLTRLRATTTLDDVILSPLETATRMWMTGRRGCEEDGRGWGSRQGGGCARGGMGRHHGDDAGFAHATRICCGGGGEERWGIRVGEDRGH

SEQ ID NO: 49299 - protein, 430 aa, Zea mays
  Coding DNA Sequence Number=SeqID_5924
  Subcellular localization annotation: CTP_CleavageSite=2; ConfidenceScore=5.34e-01
MSSSSLMRRVFPSSKPPDGGYPPSFRLLVGGTQLRGSWYLSAIVRLQGFSSHILVAPLRRWSPKTVTSSSWMGRGKPGCDPVLSIGGVRHPRWDGERGEPGLYLLRGLADHLLFQLLVVAIALPCCDGDVLQSCRGRRTVAAQPGCNIPSFPSHSRRGRQRGSVEALGSGPLFGFDGWFASLERDREREPPGGRVRPGPWLLLQRSLASLPMFVAPQAQGRSYPRGWNRSSACDGTLNASSSSLVKGTPWPLFDEPRPGVAISVRTEAELARKWEPGWPEPSRVARQRGSTSESIRSGTVVGDDGVWDPEAMDDVGEERHRLLRPNAVQGSDLDPLGEFVDGDQQVRVAPGRLLQGTDEVQTPYSEGPGDGYRLQSLSGQVGLLRIELAPFAGADNSSGEFLTFGDGDASLEDARGAPVVELLLIAQQEE

SEQ ID NO: 49300 - protein, 123 aa, Zea mays
  Coding DNA Sequence Number=SeqID_5925
  Homolog annotation: Hit_ID=Q6J9V9; Match level="QueryCoverage=51%, HitCoverage=30%, E-value=6e-15, Identity=54%"; Hit description =Putative uncharacterized protein
MAKSGLAVIAAADEQKQRSNRLQDSRPLLKRQESPLPRRTGEGDNSERILLGEGSGPRALLLIRGSKASPSEGFDSRPRAHRVRDVSGYVRYMVEAQATLPRGSGAARAPGYGQTVDSVNKPA

SEQ ID NO: 49301 - protein, 364 aa, Zea mays
  Coding DNA Sequence Number=SeqID_5926
MENPVGVGHRMEIDGCEVFISSYLTAALGRAGPAQYNHWHDATAHEQQLASVVHEQQPRASRDSLSTMVTGGHGEEIDSPTNAVEVEHQGACRRRFGGSLTAGGTEAYSAARLAPTVVPPARVKLTTVKFSLRRNRNLRLARPPGLGLNLGLGGWSPPRPTPGLGLNLGLGGWSPPRPTPGLSLNLGLGGWSLPRPTPGLGLNLGLGRWSPPRPTLGLGLNLGLRRWSPPRPTPGLGLNLDLGRNRVLARPRPRPRPQEESPLCPTLGSDRPRHGGYIITLPLASSGYGGTRPASHPGSPWDPPSGSKRRQLARQQPLQPGTLLRFGSLEFMSLDGSYDMRKSSIRVCPAAYLAAGGGGRVIVA

SEQ ID NO: 49302 - protein, 146 aa, Zea mays
  Coding DNA Sequence Number=SeqID_5927
MAHRTVRCATGAPTVRHRCANGHFQRLVLTASRWTHGAPDSEQFTVRCTADSPVRCPGPRCFQPLFLGAPDTVRCTPDTVRCTPDSPVNYSGAPLEIPEGGKFELESSGAPDTVRCTPDSPVPQTRGAFGCPFAPLLNPIFDLFIG

SEQ ID NO: 49303 - protein, 485 aa, Zea mays
  Coding DNA Sequence Number=SeqID_5928
MQPGCLMKILEAERWLKGTNFREVAFLQRQQDESDAIAPHPGARKPSRTESSPTRSKVLLLRHGGWVPRVMQAGPGQKEPKPPRVVRATAQQLQAFLHYRPDQRVKGRTSMQAACNRTKGAHPFDFDASSMEAQAHTSCNRHAGYYVQETTQPLTPVPRLLDCGTGAATRGDPAHDPTVPTEHIGHRDRERGYSERDPSPRRKRAPSPPTDQRLAPRKGSTAASGHSGSAPTTDQGFVGWPPKGLTTASEHAERGMTLGSGAALANPTPAKPLTASTYQPENLGLDYAPGLRPTAVPLDRVRLTAAKSSLGRHRKLRLARPQGSGSISTLEDELRLARPQDSDSALAPEDDKLFLARPQGSDTTSAPEDDELRLARPRARTQPRPRENVFASPDPGVRLSLDLGRRTRPRPRRSLRLARPRARTDRVTGGAIITLPLASSGYGEQDRRPIWLTLGPPGVETPTLPEASRHWMISPRGKDDTTITG

SEQ ID NO: 49304 - protein, 122 aa, Zea mays
  Coding DNA Sequence Number=SeqID_5929
  Gene Ontology: Mol. function=phosphoprotein phosphatase activity; Cellular component=nucleus; Biological process=amino acid biosynthetic process
  Homolog annotation: Hit_ID=Q60EX6; Match level="QueryCoverage=51%, HitCoverage=7%, E-value=1e-28, Identity=92%"; Hit description =Serine/threonine protein phosphatase BSL1 homolog
MATQGGIGPAGHSTDDLYVLDLTNDKFKWHRVVVQGAGPGPRYGHCMDLAAQQYLVTVSGNDAHDVPVRVKNSYNPKAPGTLITRQRDMDKVVLTSIVLKSNVTMLDILSTQMLGQYGFPGK

SEQ ID NO: 49305 - protein, 285 aa, Zea mays
  Coding DNA Sequence Number=SeqID_5930
  Homolog annotation: Hit_ID=Q6QP54; Match level="QueryCoverage=23%, HitCoverage=24%, E-value=3e-08, Identity=48%"; Hit description =Putative kinase
MAPPVDVAGLRPRLGDAEAPPKPRSSLSSVAEAESEPLCRARRRSSAEARAESEPWGRAKRIGVAQAALSFCQAGQWSGEVMAAGPSEGFNSRLRALGLRAHYWSEVQRLAPRKGSTAASGHSGSAPTTDQGFIGWPPKGSTAASEHAERGMTLGQGSSQRTRSRLARAQPRAKAADPGGFTSCPRAPSSDGHTFGSPEAQSLRRSNLGQIATPTDRLGLSLDPRRRTPPHPTPGLRLSLDIGRRTPPRPTLGLGLSLDLGGASASPDLGLGPATSQGRPSLPYP

SEQ ID NO: 49306 - protein, 363 aa, Zea mays
  Coding DNA Sequence Number=SeqID_5931
MDESGVKKGDRPPGTSNCITFESQRTGTLQVVSELLGWPQDVTLSLIKRSQPEYDGREFIEHGTEKCVVTVYIGSSPHHAEWSVTTAGHRFKDTCQVIARKALRALCQIYEEEVADTPLRFFPPFQRDRPVWMARMRALEEQQLLEDDPTVVYLTAYLLTLDAQYDFLARHHRQMIARAEDVEKLNRKLHVDLTTAQARATALESREVIAVEALKQAKDEHVQKLMEAYLVTHNPTAEDPQILEGHPVSIRGEKKAWELLEGAIVLEGIPVFPQAMDKQEHPESSQDPPPELFEPLTMKKIPAPSLEVKEEAASTLPAPPPSKELQEPVQLEEEFDHVLPSQSSPEEVINISSLLTHPGDVSD

SEQ ID NO: 49307 - protein, 135 aa, Zea mays
  Coding DNA Sequence Number=SeqID_5932
MRDTGRAGEQQHSTDELRKRNNRGRGRPEESTGGEAALDGAGGAAHWSRWRGGTGAKAMRRTEAEAARRTEAEVALDGGAAARRTGADSRGGAQDGGEAAANPKTVRLKPCLYAREAAALKNSLVRGGTGCHGDA

SEQ ID NO: 49308 - protein, 114 aa, Zea mays
  Coding DNA Sequence Number=SeqID_5933
MEGKARTRVSTGPLHTPGSFSFRDPAGVRTYPEAPDLYVYRGPVSFCGGPDLLRCGVFPCHVTPFGLPIRWGQAPSSVWLGDVAWVRCLYAVEEGTPDFGYRQFRISFYSILFM

SEQ ID NO: 49309 - protein, 397 aa, Zea mays
  Coding DNA Sequence Number=SeqID_5934
  Subcellular localization annotation: CTP_CleavageSite=69; ConfidenceScore=5.46e-01
MAPRMLCDDGGSQPPYGSKRTSARTQPLRKLSLRQAPSLLRRPRHHTSWVPKSLRLPRRHGPLREGWPRGDEDENRRSLGAARSLSRVDACNPLLQAHPTWAWDEHEGRRIPTSLTPVSGRLALPPFALALALDPSGLGHAATFTRRPRDPPVSKRRQVGGSGPASFAEKDPFRIIMAEVKRRLLCLPKVPPVPLQSSPAASPRRWSPKTVTTSSMVGRSEPGCGLCPALSFKDLHHPCWGGGRAEPELYLPHGFVGHPLLQHSGERVLTGLAEGADSDNAGLVGRERRQLQRVGLAGSTGSGLAPGAPFRRTRGRRAARTRGPPKTSRAARAAFVFLGYPAFAPVRRLLRGGRCSPVREDPSGDLPVGIWLPSSTLRWWRLKKSSLPTRSPPPSAL

SEQ ID NO: 49310 - protein, 190 aa, Zea mays
  Coding DNA Sequence Number=SeqID_5935
  Gene Ontology: Mol. function=kinase activity; Cellular component =ornithine carbamoyltransferase complex; Biological process=amino acid metabolic process
  Homolog annotation: Hit_ID=Q6QP54; Match level="QueryCoverage=32%, HitCoverage=21%, E-value=1e-09, Identity=54%"; Hit description =Putative kinase
MAPPVDVAGLRPRLGDAEAPPKPRSSLSSVAEAESEPLGRARRRSSDEARAESEPWGRAKRIGVAQAVLSFCQAGQWSGEVTAVTSALPGGARQDKEVRRLAPRKGSIAASEHSGSAPTTGQRLAPEGFDSRLRARRARDDPGYVRYITKARATLPRGQLGAQRHAQKYLRVICRTRSPGDGVRGLDASL

SEQ ID NO: 49311 - protein, 692 aa, Zea mays
  Coding DNA Sequence Number=SeqID_5936
  Homolog annotation: Hit_ID=Q6JAD6; Match level="QueryCoverage=100%, HitCoverage=98%, E-value=0.0, Identity=69%"; Hit description =Putative uncharacterized protein
MPRTKNVSAPGGGDDEDPRRPFRQVKGKTVYLEQQEGRKKRRTDRAARAATAAAAAAAQAELGDQPQTPSDQIAYRVRRLTSRPRSSTHTSASTPPPTLPAPVTPIAPSTSTAIPTTSTTPASTASPAPAPASAPSVPPPRFWERDETEVRPLVSDPRLFDLQRATAARVRRFRYVPVESWLPAQRDPAAGDLFSTWIQESFFRAQMSAQIALRVHRLLDLPAFLLAAGADSEAHLTYLSGLQTLLTISGRYVEEWVCVFYASVWIDPDHHWMRFRFEREDVTITASQIRQLFGFPESTTRLHSLCYGTSDPPRCPHGGVAPGTAHVAALFRPPFTDGSRRSPADFTTAAKYLYELIRRTLLPRMGYREATTHIQLWLLGALVSHSEFDVVDFLICEIEDTVLDGIRARRQLPYAHYLCHIFAQLIQPPRFQSTLEASRLVFGSYRPAPEIPVPASASVFDSQAEDAALRQFDTQGTAADDDDDDDDFGVPPPPPPPMPPRSHDHEAGSSSAAPAPPQAMDPALASILANLAAEQARLSERMLSMFQNMQDRQDALQQQLLQDRAETRAFMALMLQHSGISVPPVQSAPPPPLHAPVVPSILSGPPVGTSPLWPVTLAFTSPVLSSVCPQPPVPPASAVTTTAVAVSVTASVPVAPAARPQSESVPAPASTADPGSETDSDPPPAFALLPRP

SEQ ID NO: 49312 - protein, 223 aa, Zea mays
  Coding DNA Sequence Number=SeqID_5937
  Homolog annotation: Hit_ID=Q6J9V9; Match level="QueryCoverage=55%, HitCoverage=34%, E-value=9e-18, Identity=49%"; Hit description =Putative uncharacterized protein
MQAACNRTKGAHPFDFDATSMEAQAHTSCNRRAGYYVRETAPPLALVPRLLDCRTGAATRGDPAHDPTVPTEHIGHGSVSRGRRRDGRYDQKWAGRTEKGDTPKGILLHEGSGPRAPLLIRGSKPGPSEGFNSRLRELGLRAHYWSEVRRLAPRKGSTAASGHSSSAPTTDQGFVGWPSKGSDSCLRARRVRDDPGYVRYITKARTTLPRYPRTFPRPTGTIL

SEQ ID NO: 49313 - protein, 276 aa, Zea mays
  Coding DNA Sequence Number=SeqID_5938
MAERYQLPESCVPPTTGRKDGGSPPSGGLEGGKTRCIREREDMVAFQGGHPPFKGGSPYSRPQPSRAESSPTQSKVLPYGAGAGSHKSCKPTQGRRSQIAARGAYNRPAVTSDPPLLPRPAGERVGGHAGGMQPCQVGALLRLPTRPARRPRPTRHATGAPTASCMQLHRHLRHHRASSTAEPIPRHEATQRTTQQHQPGAAGPGKGDTPKRVLPREGTRLRASLLIRGSKAGPPKGSTVASDHVGPTPTTGQRFEGRPPEGFHGRLRLLGLRAHY

SEQ ID NO: 49314 - protein, 222 aa, Zea mays
  Coding DNA Sequence Number=SeqID_5939
  Subcellular localization annotation: CTP_CleavageSite=34; ConfidenceScore=5.16e-01
MGEGLRSNRRLTGGSLPPALTATTTTPAPGGRTAAAQASGWVLLQSCPRPRRRSRGEDKYKEPEARSADGGGGPVGDGDFSSRLHLGTDDRSRSRQIPTQILPDEWGTDLRAEAPYRRGSRLPTGGAAGSQADELDTLGLTTPAVDQPRVVEVRPARRASERPHPRTPRERVTHEPAREVELRLSPASTPARMMNILEAEGGTKIAAWLTSPHPGAGSRRLG

SEQ ID NO: 49315 - protein, 147 aa, Zea mays
  Coding DNA Sequence Number=SeqID_5940
MSFVLFDYFEKWILKTTEYTRHTLQDDLILQARVLTLEGGSSTLGIDDTFGEVRPSLGRRRGPRISALKDDVIATPGQSLPGSSPEIWPEQAARPVTLGPWPTIFQGRQPDPRPRLVNSSAGPANGRPGWAPANQVSFSSQLRPCSC

SEQ ID NO: 49316 - protein, 170 aa, Zea mays
  Coding DNA Sequence Number=SeqID_5941
MAVVAVHGMVAAGVPKGPTRPSATRTERLCNLAEEALCGFAGGESGFFQVSTWGVKAVTPRSDGVTAFITVKEDCNYRDAFTNWARNARWPRRARYNGPDRTWASELDEAALWDDFVAGLRLVLIKRRVSLPVLSVRPVAAAKTSSEGWRLCLRPNICPPRDQFDEVTWC

SEQ ID NO: 49317 - protein, 94 aa, Zea mays
  Coding DNA Sequence Number=SeqID_5942
  Subcellular localization annotation: CTP_CleavageSite=54; ConfidenceScore=5.33e-01
MAHCYTSHCTPGPSPYAYKRKVQGSLTRRLATREDGTARRVPRSPPTQTLVTPYCKRTQGSDSGSVPEDNELRFARPQGSDSGSVPEDDKLRLA

SEQ ID NO: 49318 - protein, 398 aa, Zea mays
  Coding DNA Sequence Number=SeqID_5943
MVTRSAITKQKRWRWRGLGAWFPFSGYSLGLRKPEWEASSRDRRHRWQAKQVTLHLRHDDRVKKGTRKGDTPKGILLREGSGPRAPLLIRGSKAGPSEGFNSRLRALGLRAHYWSEVRRLAPRKGSTAASGHSGSAPTTDQGFVGWPPKGSDSRLRARRARDDPGYVRYITKARATLLSAACVAPTAVPLDRVRLTAAKSGLGRHRKLCLARPQVSAPVSASNDGLRLVRPQGSNSASAPEDDEFRLARPQGSDSASASEDDEFRLARPQGSDSALASDDGLRLARPGARTRPRKTDSTSTSEEPPPCPTQGSDRPRHMGAIITLPLASSGYGEQDRRPIWLAPGSRTRRLAARENRPARKALALSHVDASEAIAVASCIEDPPPPPLPQDDFYSQGD

SEQ ID NO: 49319 - protein, 126 aa, Zea mays
  Coding DNA Sequence Number=SeqID_5944
MGVPAFCALWRALIVVAAVAVSRSWRVPEAPFLGAPDTVRCTPDSPTLLLHHAAAELDIAPEVANCEMKLELMQVAEMANKHEARELGTKPTVWARAEPGMARFYAGLGRARHGPVLCGPRPTRHE

SEQ ID NO: 49320 - protein, 36 aa, Zea mays
  Coding DNA Sequence Number=SeqID_5945
MAVMGSTSEKMYLYQDRLDVGLLIEDLLTGHNPHHG

SEQ ID NO: 49321 - protein, 349 aa, Zea mays
  Coding DNA Sequence Number=SeqID_5946
MPDARPRMPRVTPSQASTVACAHAYKATRGFDRTPPHARDLTGALDDRRCPAHVTLNRIQMTSHGSSDEGNAQSHTDGLAREGFPRILWEVLQGAGYTTPPQYAVQLFEKHRVPRCRVRMTLEPHPLQPGWRSLDSESFGYRAEDTIKAIALHGLTTFCGFHPLELSTHPIGLFLAEKEDDPMWKDRVEHAKDIWAIYPGQTAHLTVQRMNALYRLQVMQGEAMSHLMALLEATKITLDNREELVVDLSTEMVEKDLQVEQMSNEIQELEELVGTRENTIEVLEDQLINTQQQLAEANQHLDMHHQEIQDMEANEDVDIEGGEEPASSLDTAGSGRPPSPKSSVASFAH

SEQ ID NO: 49322 - protein, 172 aa, Zea mays
  Coding DNA Sequence Number=SeqID_5947
MGKKNKREREPTPPSEDFGDSEYSEEEFSSESEGSPAPVSPPASSDDSDDSQGIAAEVWTYIRAVERSGLEGSDESEYSSDEEDSDGGGEDEDDDDDDDGGDDGDGDGDGNGRGGNGGGRGGDGGSRSGNGGSSRGSGGGGSSQGSNKYQRFRGNAEPLRGDVGVLEATPSD

SEQ ID NO: 49323 - protein, 40 aa, Zea mays
  Coding DNA Sequence Number=SeqID_5948
MALAVGSYFVYCSASHKPHRQGHVPSDEKHEGYRDEFGED

SEQ ID NO: 49324 - protein, 280 aa, Zea mays
  Coding DNA Sequence Number=SeqID_5949
  Gene Ontology: Mol. function=kinase activity; Cellular component =ornithine carbamoyltransferase complex; Biological process=amino acid metabolic process
  Homolog annotation: Hit_ID=Q6QP54; Match level="QueryCoverage=26%, HitCoverage=26%, E-value=7e-15, Identity=58%"; Hit description =Putative kinase
MAPPVDVVGPCPGLGEAEAPPRSRSSLSSEAEVESEPPGRARRRPSAEARTESKPWGRAKRSLSSFGAEPESEPWGRAKRSSSSFRAEPDSEPWRSSSSSGAEPESEPWGRAKRSSSSSGAEPKSGPWGRAKRSSSSSGAEPESEPWGRAKRSSSSSGAEPESEPWGRAKQSSLSSGAEPESEPWGRAKRSSSSSGAEPESEPWGRAKRSSSSSGAEPESEPWGQAKRSSSSSGAKPESEPWGRAKRSFPWRLGPDLAGVSLTLSCGTTVRAAQAALSSC

SEQ ID NO: 49325 - protein, 114 aa, Zea mays
  Coding DNA Sequence Number=SeqID_5950
  Subcellular localization annotation: CTP_CleavageSite=30; ConfidenceScore=5.35e-01
MTSTCGGGGSSIRINGGGSQVGGGGSPIRRASGGVPEFPRRRHFQGRRASGGVPEVPRRWHFQGRRASGGVPEVPRRRHFDVRVATATHEARSSSERRHRRPEMRATMIARDIL

SEQ ID NO: 49326 - protein, 81 aa, Zea mays
  Coding DNA Sequence Number=SeqID_5951
MAREEIIAEGVTNVEAEQTMAKAKSENESEDDDNEGKSRWLAQERRMLQLCIPEGHKGPRDRLPHQVADRVDRRMVLREGR

SEQ ID NO: 49327 - protein, 327 aa, Zea mays
  Coding DNA Sequence Number=SeqID_5952
  Subcellular localization annotation: CTP_CleavageSite=70; ConfidenceScore=5.18e-01
MSSHSLHASRPSTSRAPEWGALASLCLAVVGGTQLRGSWYLSAITRLQGFSSGSPAASPHRWSPKTVTTSSMVGRSEPGCDLSPALSFKDLHHPCWGGEQGEPGPAFAWAGVPPLPASGGGNHPPTLQRRHPPAMPGKANCCCPARVQHSVLCPGDGGQPHREVSLHSRFRGEDGSEDLPVRFGAAGARWCGVGGQVDAAVGAEVVAAGEVGFSTDETVSATRGPTSGSLALISGSRPLSGDANESLPVAASVLGPWLLLWRSLASHPESVVPQALRCGGCSYPRGCNRSSVCNGTLSAGVCSLWLSGPEHVGIFGCNTVSFPHCEH

SEQ ID NO: 49328 - protein, 201 aa, Zea mays
  Coding DNA Sequence Number=SeqID_5953
  Subcellular localization annotation: CTP_CleavageSite=28; ConfidenceScore=5.14e-01
MQSACNRARWAHPFDSNAPSMEAQAHTSCNRRAGCYVRATAPPLVPLPRLLDCGTSTATRGNPARDTTVPARRIDHGPVGRGRRRDGRCGQKWVGSNGGGRRAEAAVTSSAKLTDRERGIPRKGILLREGNGPRAPLLIRGSKAGPSEGFNSRLRALGLRAHYWSEVRRPAPRKGSMAASGHSGSAPTTDQGFVGWPSKGS

SEQ ID NO: 49329 - protein, 80 aa, Zea mays
  Coding DNA Sequence Number=SeqID_5954
MEGSSKIYLTKDQYREVMVPWMAPVPDAYYAWCRYWASEGFQKKLQVAKTLVTLRSTRRATKDQTLTTLTNYAARQPRIN

SEQ ID NO: 49330 - protein, 1228 aa, Zea mays
  Coding DNA Sequence Number=SeqID_5955
  Gene Ontology: Mol. function=helicase activity; Biological process =viral genome replication
  Homolog annotation: Hit_ID=Q10GM7; Match level="QueryCoverage=84%, HitCoverage=71%, E-value=0.0, Identity=45%"; Hit description =Expressed protein
  Pfam annotation: Domain name=DUF889; Domain location=1090-1228; Score= 149.7; E_value=8e-42; Accession=PF05970.5; Description=Eukaryotic protein of unknown function (DUF889)
MSAEKKNELKKRRESRKKGNVMHHEYSEVCNIPANKDNNNHQNNEIEDVDDDSYQLHKNNSFEDLIGIEDPKFTPELVWSSTDAEAPHGSLCSSEGMAIPKLSPTPFVPNPSQTEDVEKDSMTESPRRQRHKRHVSSGQRQTLVSRQNQKFHLAIGTNFATATRDRVMENDVDNEIDHQTVSEIDNNEDDDEAVLFEDDEDEGYLFAGQDGESGEDIDIDETQDAFTVIPDIPDPYDKVYSIIPEETYLLNTVADCDYCKAKKFQYEPPGFCCRNGQIDLAPFETPSQHRRLWECADADARHFYDNIRFFNGHFSFTSLYCCLDNMTTNMDRGKLGGEQKHLELYFYDDDPSLEHRYRKCRQEQLDKDKAVIKHLVEILKGNPYSEHLRSMGHVDNIEDYHIALNLDQTLNQKLYNATITSEVAAVWIEGSERRGQFNNSVMLHGKDRSSHGIRSYHGCYDALSYPLFFPKGELGWHANIPKSNVSMDEVEAYRDQHRTRDANDDDTGIFNPILHGKRLFQQFAVDSYIKVESSRLDFIRRNQDRLRADLYKDLVVRIFRAKLEELKKRLTKQHILGKIHAYVYVVEFQKRGLPHAHFLLIMQRKYKLTCPDQYDLLISAEIPDKKKYPQLYKMVIKHMMHGPRRDDGRKETVRCCELDNRWVIPYNPYLLWLFNCHINVEACESIKVVKYLFKYIYKGHDRAFVAVTDANKADGDVDEIKQYRDARWVTPPEALWRIFSFDLSQNSPPVMQLQLHLENMHMVSCHERAKVNHVVQRPGADRSMLTAYFEANRLHEEARGILYRDFPEWYTLQQGKVWQRRKRNTGGQVGRIVSAHPAEGERFYLRLLLNHVTGATSYADLRTVDGDTLPSFREAAQRRGLLEADNTIDECLNEAAIYQMPSALRRLFATILVYCEPNDVAELWQRHLDSMSEDYHRSTQSKTHVQQMVLIDIRNILQSMGKDINTFPLPAIIDIYDDSHGTDREIYEEECIEPTIEDVAMKETLNEEQSFHIAWGRTAHSRFKISLTIDDGVVCSFTKQSGTTKLLQKASLIIWDEAPMTKGQAIEALDNSMRDIMGRPRLPFGGKTVVFGGDFRQVLPVVRKGSRAQIVAASLQSSYLCESMCHLKLVQNMRAQSDPWFAEYLLRVGGGTEETNNDGDVRLPDEMMYHSFDTAVDDPNNYYPSEFLNTLTPNGLPPHVLKLKVGCPIMLLRNIDPANGLCNGTRLV

SEQ ID NO: 49331 - protein, 270 aa, Zea mays
  Coding DNA Sequence Number=SeqID_5956
MTLGTSDTWPRLGLRSRGTLGHFRDQQERFCNEIPSEGGIEPSDPIKRDRVRQITCRVRPTAAKSSLGRHRKLRLARPQGSDSTSTSDDSLRLARPQGSDSTSTLEDGLRLARPQGSDSTSTSDEGLHLARPQGSDSTSTPEDGLRLARPQARTPPRPRKHVSASPNPRARTQPRPRRSHCLARPRARTDHVTRGAIITLPLASSVYGEQDWRPIWLAQVKQVTMAPHVLHDDGGSQPLMEARRRQQGPDSPDSCAPTRLKRSSDGHDLT

SEQ ID NO: 49332 - protein, 178 aa, Zea mays
  Coding DNA Sequence Number=SeqID_5957
  Subcellular localization annotation: CTP_CleavageSite=35; ConfidenceScore=5.12e-01
MSSSSLMCRVFPSSKPSDGGPAAPLHRRSPEMVTSGLMVGESEPGCGLCPSLSLKDFHHQGWGGECAELSCSVPGLQTRVASEPLAAPASATAAGRGSSAGTIAGASHGLTSNSTAFCPSLPHEFCRGRGPPGSSIRPRVSAAAVRPPGAEVVVVADAEAGDGAPSDGLPLLRRTFTL

SEQ ID NO: 49333 - protein, 87 aa, Zea mays
  Coding DNA Sequence Number=SeqID_5958
MVVVVGAGARKLVNDLPKQQKLHVDYPRILVYRESSTKQCTQGQDRYIIKEMFTNDDVSTKVNAKYKPLRNNHGRRALDYNPSKHIT

SEQ ID NO: 49334 - protein, 299 aa, Zea mays
  Coding DNA Sequence Number=SeqID_5959
  Gene Ontology: Mol. function=transcription factor activity; Cellular component=nucleus; Biological process=regulation of transcription, DNA-dependent
  Homolog annotation: Hit_ID=Q5W6X0; Match level="QueryCoverage=98%, HitCoverage=97%, E-value=6e-39, Identity=39%"; Hit description =Putative uncharacterized protein OSJNBa0065C11.6
  Pfam annotation: Domain name=AP2; Domain location=101-152; Score =79.9; E_value=8e-21; Accession=PF00847.11; Description=AP2 domain
MSAADSLTSGRGRRAEPPLPRLKRVRVYFVDADATDTDSSGNEDERGKRRVREVIHIDVESASALTRSAQPLVLPKKRPLPSQAAAAALVRRRSSGAGFRRRFPGVRLRPWGKYAAEIRDPHQRKRLWLGTFDTAEEAAAAYDDAALRLKGSRHVVTGFPAEAPPPWPRLGLRPRREVPKEAAEGAAEEDGEALASAPVPAAAPASLDSQAVDGTALVCPFSSPISVLRHAADEAPAAPALPAFEFLYSGLGELGDLGSATAPSKAVAAEFDCLPWWEGEDFVTVTGLTASAGAAVSVI

SEQ ID NO: 49335 - protein, 231 aa, Zea mays
  Coding DNA Sequence Number=SeqID_5960
MATEGLGEVVCECDEVVEAAVHRMAALVGAAYAGDEVGDIAGRRSGDERGDDRLGFSGSKTRADLGNVEAMTRADLKNVEEGEEAEHKEETASVEAARSQPLKYVATSTARRSKEMTTRALMKWRPPHRLRTSVLPTATLCLAAPASATVAEASEARHPAVGARLEEQQPHGLVGVLGRPRWRTTRATERPYRRRQRLEIWRPVARKDWSEGFLGDLSETGNANQRYVKEN

SEQ ID NO: 49336 - protein, 256 aa, Zea mays
  Coding DNA Sequence Number=SeqID_5961
MNRSTPPESTPPLLGDPLPGGYVPLSPSLHSQCAIVFSYVRPTRKLGECWQHDNKETVGRWQRGSGKATRVLDEENDGLDDAVELRASSMRKRTRLGLAWRRERHGVRGTDEHSGPGVQAPSRGRLKKPTLGTAVERFLGVMQRQPIARGRRRPWEREPAGNPAPGIENREAGARAQAESPARCRSLRGAAMARENKTWAQGTKGMEDRKPRRHGSSRPGSRKPTEGCARGRREIRLAEGRSRGEQGSQRGWGELV

SEQ ID NO: 49337 - protein, 166 aa, Zea mays
  Coding DNA Sequence Number=SeqID_5962
MNRSTPPESTPPLLGDPLPGGYVPLSPSLHSQCAIVFSYVRPTRKLGECWQHDNKETVGRWQRGSGKATRVLDEENDGLDDAVELRASSMRKRTRLGLAWRRERHGVRGTDEHSGPGVQAPSRGRLKKPKLGTVVERFLGVMQRQPIARGRRRPWEREPAGNPARE

SEQ ID NO: 49338 - protein, 240 aa, Zea mays
  Coding DNA Sequence Number=SeqID_5963
  Gene Ontology: Mol. function=kinase activity; Cellular component =ornithine carbamoyltransferase complex; Biological process=amino acid metabolic process
  Homolog annotation: Hit_ID=Q6QP54; Match level="QueryCoverage=50%, HitCoverage=28%, E-value=7e-22, Identity=52%"; Hit description =Putative kinase
MAPPVDVAGPRPRLGDVEAPPKSMSSLSSVAEVESEPLGRARQRPSAEARAESEPWGRAKRSSLSSRVEPNPSPSPGSGGAEFAVFRGLARVRALGRAKWSSPSSGAEPKSEPWVGRSGVRRLPGLSPSPSPGVGRSGVRRLPRLSPSPSPGSDGADPSPSPGSGGAELAVFRGLARVRALGRAKRSSPSSGAEPKVRRLLRLSPSPSPGSGGAEFAVFRGLARLRALGRAERSSPSSGA

SEQ ID NO: 49339 - protein, 377 aa, Zea mays
  Coding DNA Sequence Number=SeqID_5964
  Subcellular localization annotation: CTP_CleavageSite=26; ConfidenceScore=5.28e-01
MSSCSLMHRVFPPSEPPDGGCPRSFRLAVGGTQLRRSWYHSAIVRLQGFSSCSSAAPLRWRSPKTVTSSLMVGESKPGYGLCPSLSLKDFHHRCWGGESVELGCRVPGSRTRVASEPLSAPASATAAGRGSSADEIAGAAYGPTSNSTAFCPSLPHEFGHGRGPPGSSIHPEVFAAAVRPLGAEVVVAAAGAGDGVPFVGLLLLRRPPIEWGCSYPRRWNRSSVRNGTLNANSPVGCLNRFTKRESPRVKVTSEHGQRQSWLEKEDLVGRSLAGSSVSGTDAGIDLPRPRAGLMSSEDSWPRPRGDQPSRLLEPDSWRKPGRRWPGRDDEVVLQSGDPRTASPSEARSNLAEGVVDAEGAAAPFNCPDPSLQDRIIL

SEQ ID NO: 49340 - protein, 357 aa, Zea mays
  Coding DNA Sequence Number=SeqID_5965
  Homolog annotation: Hit_ID=Q6QP51; Match level="QueryCoverage=23%, HitCoverage=38%, E-value=9e-34, Identity=85%"; Hit description =Putative growth-regulating factor 1
MMKILEAEGGAEAAARLASPHHRTGGHHPGWNIGEGMQPGCLMKILEAERWLKGANLREVTLLQQQDEGNTGAPRPGARKVEGRDARGECEGMATARGVDPFLKAALPTRVLRRRGLSLHRRAPGSSPYDTGAGSHASCKLARNRRSQTAARGACNRLAVMSTPPSSPKPAVERADRHAGGVQTAPQGRTPSTSSHPAWRPRPTRHVTGAPVTTCKKLHHHLRQCRASSTAEPVPRLEATLRVAQQCQSSTSITGVRRLAPRKGSTAAPEHSGFKLITDQGFEGWPLERVRQPPQSTRAPRPLLIRGSKAGPSEGFDSRLRARKARDDSGYVRYMAEARATLPRYPRTFPRPAGVIL

SEQ ID NO: 49341 - protein, 153 aa, Zea mays
  Coding DNA Sequence Number=SeqID_5966
MYPLVAWSVRAQGRARRRLLLRPRSGEDAILPEVEVEAEPWGRARQRPPSEVEAEAEPWGRARRSFLLRLRLDLAVVSLTLAGGTVVEEGRAALFSCQASWPRLLHNEACPSWALNESRVRPLLEKALGRGVNSPGTTVPARGWARARRDRVP

SEQ ID NO: 49342 - protein, 369 aa, Zea mays
  Coding DNA Sequence Number=SeqID_5967
MDGDEVASGTDCIVISGTRLMPSKREVNARHVPRWGAGVVDSLDSRRGAASCLATVAPPPPPVARKVAGQTRMLLFHHGGKTSPSPPPPGELTAVVVAVALRGKEYHVVAAVEGHELETPETEQRPGLKRLLETTHLELNGKLFVNTQQAPTWRANCRRFDPGGSLGRQGDALAVGVTSVREGERASLFVSPSSHATTLSYVGPGPSFYRCKEMVQVYNGVRAQGRARRRLLLRPRLGEDAILPEVEVEAEPWGRARRRPPFEAEGEAEPWDRARRRPPPEAEAQGRARWSFLLRLRLDLAVVSLTLASGTAVGEGRTTLFSCQVGQWKGEVTAVTSTLPTEARELAKVASQRSLPELGFGRVEGAPVA

SEQ ID NO: 49343 - protein, 231 aa, Zea mays
  Coding DNA Sequence Number=SeqID_5968
MPPPADAGARGRARRRCGQGPRPPRREGRMPRTHRDGEESAPAALTATERRARPPKPGPEVAPATAVARGRVLARVVEWGPRPLAPGGRWGSAPPSGLRPGATSVQGPPSPVPCKADILPLLQAWRAEPVGGGGAVTVGIAGTGAGAEAARAWADDGGAAMDSAMMVGRRWRFPGIARPRAGHGEDVGDSEAEPCTAPLWTPTSDLLTGRLTVSLPQAVQPVLHSQNQSNG

SEQ ID NO: 49344 - protein, 143 aa, Zea mays
  Coding DNA Sequence Number=SeqID_5969
  Subcellular localization annotation: CTP_CleavageSite=60; ConfidenceScore=5.51e-01
MAGSAAPPPCLARLGRPTAGSAAPCAAPCPAGSAAPALRRFGRPALASPAARSPARAPPRAENDPVEEPEEFAGEAPEQQSFGGGNRAHGYERPRELQRLVILDQRHCGTDGYEIDGSGYDYGIGEDEAVEGDFQEFQDYDEF

SEQ ID NO: 49345 - protein, 190 aa, Zea mays
  Coding DNA Sequence Number=SeqID_5970
  Pfam annotation: Domain name=RVP_2; Domain location=44-135; Score= -38.3; E_value=0.001; Accession=PF08284.2; Description=Retroviral aspartyl protease
MSDLGMSTTSDVTKCKECGVLASQNSIINKTTDEQTFKTQKMHNPNQQTSELGTFIHKTIATVLYDPRITHSLISAQFATKYGIFKCPLRSRKTISTPEGKMLVNYICPKMMNPNGNEVNGANNNIPTLTTMNEKNESPRYSMNGMKNNKRNRKMFGYMISPPQAKATKHIDTQTEESSQAQLHEIQTPK

SEQ ID NO: 49346 - protein, 32 aa, Zea mays
  Coding DNA Sequence Number=SeqID_5971
GYEIDDKGKEYDAGEDEAVEGDFQEFQDYDEF

SEQ ID NO: 49347 - protein, 146 aa, Zea mays
  Coding DNA Sequence Number=SeqID_5972
MGDAWPQYEMLARKRRYVPPSMRLSHLYAASVVEYCFEVVYHRDVAVMLKQQEAPHHQEPTNRQTQQHQDKRVQRYRAPEDGANLEPVEQMDQGGMAIPMASTPGGVDAGMDEGECGGDLEKGKTPSSKITSREIYTRPESTSRHL

SEQ ID NO: 49348 - protein, 372 aa, Zea mays
  Coding DNA Sequence Number=SeqID_5973
MAATRGMNLFLKADSPARAPKRHMQSLPRCAPGFPSYDTGAWPHMSYSWAAGPKARKRRIAARGVCYRPAVGALLHLRRDQRPNLLRGGPGPHVTHLACRFLSTKKANHRVKSAHPPTVVRLFASAKTNSPVPGIRARAYESSSLGAAVSRHPAHGPAEPSSTEVMGQSVAGTGVTFGANMQLVPSSEAGPGATVGTLNQGHPLLQYEDMVPVRQSLAARMQSVGPDLHEEAPDPCTHSPDPRIRSGTPKEDTPSVHPADRRCAASAFIVTCPLSWQAGDPGHPVGGVPVQSIAKQYARAARCIVSIITYALPGKFPLHANTTQIADVRVQEDCSSNSKYYIHYIPGPTCRGSVLLVVATMMVCVVPTEYDG

SEQ ID NO: 49349 - protein, 72 aa, Zea mays
  Coding DNA Sequence Number=SeqID_5974
MARTLRWSPPLGRLLGAEGLVWEAKLCVRTPWTVVLDTRTPVTEWWSVQAHGLGPDPGFPSAFDDGVLVLVL

SEQ ID NO: 49350 - protein, 188 aa, Zea mays
  Coding DNA Sequence Number=SeqID_5975
MNPASGTDPAGNPTSCRDARAGPRQSTNKRGGITSDSAIYDYRDPAAHMRLRSRWWAGGERVVRCVPALPVPGRDGARRTPVPRRSAGRRRWLEMKGIFGWVVAVEKAIVGCTKRTHQHSKQMRTNPGRASLLNESDKSNEMAAIGESSRSMQETVFDTISQIMPLTSKQPELPSVGHGTLEHNIEML

SEQ ID NO: 49351 - protein, 211 aa, Zea mays
  Coding DNA Sequence Number=SeqID_5976
MSKVTYSLHALGATPNDRAILPTGKVPACYPTVDHHGVCVWSAAHVNVPGVEKDLGDAEAVLVEPTPLDGAGKHGWVDAGFARCGRVAGGDNPLLGARYLRRETSNRICAAVVSICGLFLLRHCCGLGGVFLTMGGLPGWVLIGYVVHLLMIAIVPAGVWLRRPGPGSAGLRRVLGLSLRFNLALMELPNLAYFSNNWYSSCSFLGGSLMQ

SEQ ID NO: 49352 - protein, 294 aa, Zea mays
  Coding DNA Sequence Number=SeqID_5977
  Pfam annotation: Domain name=Transposase_28; Domain location=1-146; Score=-38.5; E_value=0.00079; Accession=PF04195.3; Description =Putative gypsy type transposon
MELQPGHTVEFGTSRISSVCILEMQWLGYVGDGVGRAPCAEEVPEPEGELVVFEAFFVAGLRLPTHRFVVEVLRRFELQVHQLTPNAVVAQAKMATLGVQLVRSPALVVDLCGRNPVAFVREVEAEAAKTVGKYVPKTEALRSWDIHGSNVRLNCVFEFNRLSYAGYPGDDDADAVTYVVPGETMSSPELRESSARMPKMEKDRQDAPRKRRAFARVGDPRREGEVLLVSFFREVCVSTVTNDVGGESGQLAVVPAPVAAGPVAVAKGSSQDPWSRFYASGEIASPGATKDVAA

SEQ ID NO: 49353 - protein, 25 aa, Zea mays
  Coding DNA Sequence Number=SeqID_5978
MGQISHTGWEVSHPGFRGTKTRART

SEQ ID NO: 49354 - protein, 376 aa, Zea mays
  Coding DNA Sequence Number=SeqID_5979
MGSELSSLLCQVAAFAEHIASGALTSEFSAERRRLEGRIERLRTQHTEAARDKSVVENKSRNLLEKMSAAEVEKEDLNRRFATEKEDAEKAHAEAQATRADANLTLKRWSPGREVCVAMWTKWRPPPALGSTEHTRCSWTRTGSLGCRHFEVFDRTNEDFDCGIFQVKDEVLKWSGGALYDRMWGPHGRDTFQERSDRALEQRRGKLGDPAEDARTGVEEQPAPLTGPGGDPAVAAAPADEDPTTSAAPWQVPTSGPAQATHTDDINFVAAANAVPVSEILSGSETGSWSSDGGEFGSPFSWTKESLDEDLYYFAALDVATAESLPQLEMCEASAPRLGDDRRAPSAKGGVEAQCWRDVVKWEASTYGNGTIPSSA

SEQ ID NO: 49355 - protein, 144 aa, Zea mays
  Coding DNA Sequence Number=SeqID_5980
MTQLETWKLGWSNFGQNYVIGIRHMPSQTRAHDGSGTSRGGEDTPNLPPLPPTLAEAITALVNATADKTRFLREMAGNQFQQHGGRVPPQGPRDTTYLDFSETRESLFIKEEEPLEADEWVRVMEQKFGLIRCMKTQKPLFATQ

SEQ ID NO: 49356 - protein, 65 aa, Zea mays
  Coding DNA Sequence Number=SeqID_5981
MAAEIQDTGGNIGVLFRRGANLPEIGDDMWAQRVPSDLNQNHSVKMHKEYEGWRRVEAMRRGASA

SEQ ID NO: 49357 - protein, 130 aa, Zea mays
  Coding DNA Sequence Number=SeqID_5982
  Gene Ontology: Mol. function=nucleic acid binding; Cellular component= chromatin; Biological process=chromatin assembly or disassembly
  Homolog annotation: Hit_ID=Q75HA0; Match level="QueryCoverage=81%, HitCoverage=30%, E-value=1e-10, Identity=32%"; Hit description =Putative uncharacterized protein OSJNBa0056E06.12
EFLSTQPPLFTRAEDPLDADVWLRVVESKFLLLHGVCSEAFNDLCQYAGYHADTDEKKRDRFRRGLSTKLHDRLNTVRANSYNELVNMAISQEDCITTCQAEKKRKTPVAGPSAQPQRFRIVSDTQNRGQ

SEQ ID NO: 49358 - protein, 146 aa, Zea mays
  Coding DNA Sequence Number=SeqID_5983
MAWHGAVPNTNTTAWVGTAQFERNTRFGGDPGLLFCGGGVEVAAAAFMDRELCSAMNKTLCAVSWNGKREQRRPAGAQGVGGGAYWLKEEEGEEGFQLPCLKGAPWKGARLLELCRRHGSRREQSADWGRSQRESSRRAAAREMEV

SEQ ID NO: 49359 - protein, 241 aa, Zea mays
  Coding DNA Sequence Number=SeqID_5984
  Subcellular localization annotation: CTP_CleavageSite=69; ConfidenceScore=5.73e-01
MGGGLLAAASILRSALPLLGPSKQKSSSSPLLEQVTARHSSAFRCSAGLPPRSGVVRTCGGGTRVPFVMASRMPVFFVHCGCRGLNIGGVWLENGEPGCPEPSRVVRQQSRRQSRSAEALGSGWRPWKPVDRGPRGNRPTRLLGPDSRRSPWTASPSEAGSDFAEDVVDAEGAMAPFGVKTRACRIRSSCSDPLSEVVKKHERNPAKKRSFFEEKFDAEGVSPLLAPEGGSGFAEARPTLP

SEQ ID NO: 49360 - protein, 161 aa, Zea mays
  Coding DNA Sequence Number=SeqID_5985
  Gene Ontology: Mol. function=phospholipase D activity; Cellular component=membrane; Biological process=phosphatidylcholine metabolic process
  Homolog annotation: Hit_ID=Q43270; Match level="QueryCoverage=21%, HitCoverage=4%, E-value=1e-11, Identity=97%"; Hit description =Phospholipase D alpha 1
  Subcellular localization annotation: CTP_CleavageSite=46; ConfidenceScore=5.73e-01
FPSNSPAPAGGDHSPAFSFSNWPLTQRSGTRWCGASWRSSRETPSSASATTSVPAADAEPAARAIEAEAFDAVAAAGGAAASVEEGIEALQCYSKEILLHGTLHATIFEAESLSNPHRATGGAPKFIRKSCQLAMSDAVSTADSRQVNHSMNFMNSTTACL

SEQ ID NO: 49361 - protein, 678 aa, Zea mays
  Coding DNA Sequence Number=SeqID_5986
  Homolog annotation: Hit_ID=Q2R3Q7; Match level="QueryCoverage=22%, HitCoverage=26%, E-value=4e-73, Identity=85%"; Hit description =Expressed protein
  Pfam annotation: Domain name=IQ; Domain location=249-269; Score=25.0; E_value=0.00028; Accession=PF00612.18; Description=IQ calmodulin -binding motif
  Pfam annotation: Domain name=IQ; Domain location=291-311; Score=27.0; E_value=7.2e-05; Accession=PF00612.18; Description=IQ calmodulin -binding motif
  Pfam module annotation: Pfam domain module=IQ::IQ; Domain location =249-269::291-311
MRWRRGGRSSSRLLQRALLLAAFSAAALILLVLQHHHGPKRPNPSAASHARDSSDELLDDSPPAERDPDASDPAVVVDRATCATVEMMGEEAAGAGRGSPEQASLRVREMIRRHFELHDSLYARPNTFGELMRAIISPSSKVQEAVDWALKEPSLRQRGITSPEKTAIPMDRRSITPGISSRLSSPPPAAHPSPPPVAAPSATATPSHPPSPTPDAFTRLEESFGRLEEKWDQFVVMFHRYKEKTEKELQAAVRLQAAARGFLARRQVQSLRGEKHLAVASRATPWSSSHEQAVVRLQAAVRGFLVRRAVRKLYLLISSSLHQLAPCVPNHQVSSILFEPPAEVEIWVCSPPARPKRVVSFIRATALVLDKPNIRTGWFLLHLSSNVKSVVQLFPWDPGGQEDIAAVQIYILVSQLFCIFVLNNKEPSLRQRGITSQEKTAIPMDRQVILTTTSRPSLTTTSRRAICRRNVLPPALSNSRCIYSARREVGSIRCDVPPLQGEDREGTPSSGAASGGSARVPGTPPAAQARYAVVTGAHRRVGTTYAQLITALAAANRHGREPSGTNFTFLSSVHSNLLVEGLSTQVGWGHIWNRYAGPLSCRRQPHQCALTPLLPPAWWDGRWQSPIPRDVRRLLEYGVRLSDTGEVDERHLLSYCRSRKDHVKRFHVLPPYKNPARL

SEQ ID NO: 49362 - protein, 166 aa, Zea mays
  Coding DNA Sequence Number=SeqID_5987
MVSPVSCKRVIRVDVRAPFVGGRLGAQRHAQKYLRQLARRLLDAWAWASKLACQKSEKRVHLARLHAACMAACPFRPLVWAKVGGRLGGPWSVSPSEAGSDFAEDAVDAEGAMAPFGVKTRACRIRLSCSKVMSEVSVSRRRRSPSARSALAAYVYSVVSRIRFPK

SEQ ID NO: 49363 - protein, 326 aa, Zea mays
  Coding DNA Sequence Number=SeqID_5988
  Gene Ontology: Mol. function=ATP-dependent helicase activity; Cellular component=nucleus
  Homolog annotation: Hit_ID=Q650T9; Match level="QueryCoverage=28%, HitCoverage=14%, E-value=2e-21, Identity=59%"; Hit description=DEAD -box ATP-dependent RNA helicase 7
  Pfam annotation: Domain name=KOW; Domain location=284-315; Score =19.6; E_value=0.012; Accession=PF00467.20; Description=KOW motif
MAAPPGSLPARPLSRGWCRPFLQHVVLPPLAPSSPTPEMPLLLHQPLLLLNASADHHLPWRRSSPISSCQGAVAELALPQPWTPSGHPSPISPRPHPLAAAPSYSWWLSLLPWMLAVLPSLVLTSAPCVGWPVAPALDYPHARPRYNSNSHETPSCRALDVFDGISQHVPTRSAALVARTSNPGNTGVAVMLYEPRYKHSVSRLEREPGVKFKHISAPQPTDVAQSAGSEAADAIASVSDRQQAEQLLSSSSLSAADLLVKALAKAVYTTSSNWQTDVVTWFDVGNVVMVTGGRNTGCVGVIKNWEKHKGIFEVIDVLLGVFACYV

SEQ ID NO: 49364 - protein, 31 aa, Zea mays
  Coding DNA Sequence Number=SeqID_5989
MVGITAADEFAVFLLGAILSLAGETEQECYF

SEQ ID NO: 49365 - protein, 171 aa, Zea mays
  Coding DNA Sequence Number=SeqID_5990
MGNNNKRKREPTPPSEDFGDSEYSEEEFSSESEGSPAPIPLRESSDDSDDSQGLAAEVWTYIRAVERSGSRARISQSTPRMRRTRTVAARTRTTTTKAMAAVKVTAAAGAAAAATRTVTAAAAGAAAAVAAAAGATAAVAATAGAATGAAAAAAATGPVARCHWSLDVSIV

SEQ ID NO: 49366 - protein, 172 aa, Zea mays
  Coding DNA Sequence Number=SeqID_5991
  Homolog annotation: Hit_ID=Q6J9V9; Match level="QueryCoverage=72%, HitCoverage=43%, E-value=3e-57, Identity=87%"; Hit description =Putative uncharacterized protein
MTGDRERGYFERILLSEGNGPRALLLIRGSKVAPCGVRQPPQSTRAPSPLLIRGSKVGPSEGFDSRPRACIVRDDPGYIRYMAEARATLPRYPRTFPRPVGTICNGIPPKGGTEPSDPIKWVRVQQITCRVRLTIVSRGLSRVQPRAQQGGPPRPTLGLGLSLGLGEGLRLA

SEQ ID NO: 49367 - protein, 142 aa, Zea mays
  Coding DNA Sequence Number=SeqID_5992
MGKSNKRKHELTPPSEDFGDSEYSEEEFSSESEGSPAPFSPPASSDDSDDSQGIVAEVWTYIQTVERSGLEGSDESEYSSNEEDSSNSSEEGGGGDGGDEDDDRGDDDDGGDDGSRGSKGGDGGSSRGSNGGDSKGSNKASG

SEQ ID NO: 49368 - protein, 97 aa, Zea mays
  Coding DNA Sequence Number=SeqID_5993
MNKNTRDTRFIPRFGHTTKVHYFLVEAPTKSWVSFNPNPPFADHKGPDTGSTAWGSDWQSVCQSGGQTGQVTLTPVEPPLGPVQPVLTSEVRGKYPG

SEQ ID NO: 49369 - protein, 167 aa, Zea mays
  Coding DNA Sequence Number=SeqID_5994
MDAENDVTQEWLDRVKIARKGLRGTKRRNRRTIKGDPKGRLVFCQSSSLYIQKLFFENQKSLSNSMVDRAELQLGSRQVQLGFRAGSTGVQGKFSRGIFLGPHWSKPVEPVLGEVQPVSGSPDRSDLLTGRLTASLTPRRLNRCQDLFLQSDLQSASQTGRLSVSLP

SEQ ID NO: 49370 - protein, 78 aa, Zea mays
  Coding DNA Sequence Number=SeqID_5995
  Homolog annotation: Hit_ID=Q2QTF5; Match level="QueryCoverage=83%, HitCoverage=98%, E-value=4e-08, Identity=45%"; Hit description =Retrotransposon, putative, centromere-specific
METRALLFCLGIREKTEREKDLNMLDSDCRRTPTCDGHHDLDECPSGQGVTLHKIVTAIGGGVSVAKAQRLVKAVVGP

SEQ ID NO: 49371 - protein, 123 aa, Zea mays
  Coding DNA Sequence Number=SeqID_5996
  Subcellular localization annotation: CTP_CleavageSite=46; ConfidenceScore=5.03e-01
MARVACTLHGKRLDGAVSVLSVGVNPICHWRFATSLTVAAAALAVVAAPAAVVAVIAAVTAIVVDVAAAPFLERVGRVLLVRGDLRLIQTLKPGVLDGPDVSSDLNQKGRSSKDTKVDTVPKL

SEQ ID NO: 49372 - protein, 165 aa, Zea mays
  Coding DNA Sequence Number=SeqID_5997
MTVPSSSPRGPVSNHPPEESSCIVAPSGRISFLCSDGTIGVYRQFSEYPILLAEHLKTEDDYYVMLPTQNQALLSQLDQQAGVPMPTYGMPPLDFALSMPMLAPPPPHPSQFPMGFQTPPASVAAPRDGSGQDDTSHSWVNNLFNTQSPVEGSGYNSNQLGDGYE

SEQ ID NO: 49373 - protein, 129 aa, Zea mays
  Coding DNA Sequence Number=SeqID_5998
MSGGDRALHTKEDPIGSEDPLSPSSSILCSLNRGPDTDEKKRDRFRRGLNIKLRDRLSTVRANSYNELVNMAISQEDCITARQAEKKRKTPVAGPSAQPQRFRIVSDTQGRGPQQQQGRWVIRPQQQQQ

SEQ ID NO: 49374 - protein, 77 aa, Zea mays
  Coding DNA Sequence Number=SeqID_5999
MPGLRKEKKTLDKLTDQPGNLIPIDEAEVPDLSASRDNSDLAEDDPCDPTTTSKPEAPMQSLNQLPVVTDLADARSA

SEQ ID NO: 49375 - protein, 118 aa, Zea mays
  Coding DNA Sequence Number=SeqID_6000
MQIIERKCEAQKGAGIRRKKTLDKLTDQPGNLIPLDRAGVPDLSFNSLARARVTGPGGRGGAWTGEDGAWAGEGAAGVDVLVLVLMSSSHEISTLIRFDSIQTLEVSETLINPWKTLD

SEQ ID NO: 49376 - protein, 78 aa, Zea mays
  Coding DNA Sequence Number=SeqID_6001
MTTLDADEDSDPMDQRSIGFPLTSHKQDVKHIKRYLRFTPEFFVWLFGCKFYGMPLGSQVHFWDLSFYGICIGFLVFS

SEQ ID NO: 49377 - protein, 112 aa, Zea mays
  Coding DNA Sequence Number=SeqID_6002
MKEITECDTTIDWAVNSRSFAWDCEAKALTRVEKLSTSLENLQEYCNTLHEDLHVLYDRLHPNVAPEVAAMGAGPSGTTDGELDLFGAPPSMNLVDERSLEADSGAAKDEED

SEQ ID NO: 49378 - protein, 66 aa, Zea mays
  Coding DNA Sequence Number=SeqID_6003
MTILGEAVTGLRRGASRGSVRRKVVAEHQLTAGGSLGSAWAQAGERRRAGHSLRMGEVEQGRESGG

SEQ ID NO: 49379 - protein, 98 aa, Zea mays
  Coding DNA Sequence Number=SeqID_6004
MTKEASFRGHSTAHSLHDSSKAPSGHQLQGAEAAGASEEDMGISPGKSIAYSVVKTRMKYIFFTDLRSSKVVPKGAQHKFFAQKSFLRECRARIDEAT

SEQ ID NO: 49380 - protein, 35 aa, Zea mays
  Coding DNA Sequence Number=SeqID_6005
MAAAMAPSGEGKGTENVSSTLDFREGFKSDRRTTT

SEQ ID NO: 49381 - protein, 78 aa, Zea mays
  Coding DNA Sequence Number=SeqID_6006
  Subcellular localization annotation: CTP_CleavageSite=32; ConfidenceScore=5.42e-01
MPLHATVPSARIPVGRAPYFSGPVKFFPTSPRVVSDWCSHRQKHSKKMWRSKPVVDAPSARRKARTRIIAVYAKFYLI

SEQ ID NO: 49382 - protein, 141 aa, Zea mays
  Coding DNA Sequence Number=SeqID_6007
METFTQEHVIGIPLTSFAYADEERQGKSSCSAMVHKKVIAVRDWQPEWRGFLAGVATSLLRRAIAWAEPPSARIELTNPPSSSPFRLQRVSRFKSQIRARERVVDFSGHGVRRGLERAAALSRRGWGEVICTVGSVDDGSD

SEQ ID NO: 49383 - protein, 116 aa, Zea mays
  Coding DNA Sequence Number=SeqID_6008
  Subcellular localization annotation: CTP_CleavageSite=53; ConfidenceScore=5.20e-01
MASSPGCPCTQLCPLLEFLLATPPISLGRSSSFRPPHVLSPTGIRADKSILKRCGEASPWSMPQVLGERLEQESSLFMRSSTKYEEKVKLRSILVSELIKDFIQKLSTFSQAFSRI

SEQ ID NO: 49384 - protein, 149 aa, Zea mays
  Coding DNA Sequence Number=SeqID_6009
MGKSKKGGSSSHHSGDKRKREPTPPSEDFGDSEYSEEEFSSESEGSPVHASPPASSDDSDDSQGLAAEVWTYIRAVESAGLEGSDESEYSLDEENSSDSSEEGGGDGDGGDDDDDGGDGDGGEGDDKGGEGDGEGGSKGSSQGSNKASG

SEQ ID NO: 49385 - protein, 147 aa, Zea mays
  Coding DNA Sequence Number=SeqID_6010
MGKSKKGGSSSHHSRDKRKREPTPPLEDFGDSEYSEEEFSSESEGSPVHASPPASSDDSDDSQGLAAEVWTYIQAIERAGLEGSDESEYPSDEENSSTSSEEGGGNGDGGDDDDDGGDGDGGEGDGEGGSKGSSKGSNKAVARRHWF

SEQ ID NO: 49386 - protein, 227 aa, Zea mays
  Coding DNA Sequence Number=SeqID_6011
MTARRRCADPANQDAETVEPRRSTTQHGAVQTPTRRLGSGLRSSVSAYRNSELVAGEREPRRGSLAGEMEAREEELLLPCGPGHRKKAGVELLDMGVAGCCCKGAAPWPLAGARAEARSATEGTRPWGRRGGKEEGEPAALRGIGIGRAPGRGDGSGELGGHHGWAVKQRELAGVNAAGALRATGKDPATWVLSAMAGRGEEVEELSSLLAARRGQQREGGRFLCQE

SEQ ID NO: 49387 - protein, 42 aa, Zea mays
  Coding DNA Sequence Number=SeqID_6012
MEDEHQKQEVHNQVRPSPASRGSRVKIMGKKPLPSAMQDYGC

SEQ ID NO: 49388 - protein, 356 aa, Zea mays
  Coding DNA Sequence Number=SeqID_6013
  Gene Ontology: Mol. function=oxidoreductase activity, acting on paired donors, with incorporation or reduction of molecular oxygen, 2-oxoglutarate as one donor, and incorporation of one atom each of oxygen into both ...
  Gene Ontology: Mol. function=donors; Biological process=protein metabolic process
  Homolog annotation: Hit_ID=Q5GAV6; Match level="QueryCoverage=21%, HitCoverage=15%, E-value=4e-09, Identity=50%"; Hit description =Putative uncharacterized protein
SGRLIRHGELFEEKLVPHGVEGGERHAPLDESLQVAVAGAEATQEVQHQGTISDWLDEIAERVSQALHLAAVFSHGEPREDNAVHEAPGARRRSVVVDKDVIVEDETPQREKDLSSPTGVVGRRRIQHHGHEGPDVVQSSGLSVESSDEVSVEVRGEGVLRGFHRGDRRATEEALRGGHLGGQSGTQGTLSLQGEGGGTLALPRGRHCSLDRSEGADERGVGGGEYGGRDGVAPGWGSEGGKTRRGAATQGQRGSDVEWPEAGDVGGPSMGELAADCSRGNGGCVAGLVVPMAASMAAVVATLSASIGAMAQQGVGAGCERRGGAGERRGGVPGGLAAAHGVSAVGSSGDDPRRRD

SEQ ID NO: 49389 - protein, 25 aa, Zea mays
  Coding DNA Sequence Number=SeqID_6014
MTSTTWEMLLLPCLVSIALIPDQDS

SEQ ID NO: 49390 - protein, 79 aa, Zea mays
  Coding DNA Sequence Number=SeqID_6015
MAHEIIKKSEKDTHDAREAAKAAEKTAELERRIAELSPPPEPFESQADPEAKKEDEITKMAEAVTRLLNEAAEAVLKEE

SEQ ID NO: 49391 - protein, 312 aa, Zea mays
  Coding DNA Sequence Number=SeqID_6016
MEVRCQTSFCQNEDGFPKLLRACTVRLGIRSQPEYDGREFIEHGTEKCVVTVYIGSSPHHVEWSVTTAGHRFKDTCQVVARKALRALCQIYEEEVADTPLRFFPPFQRDRPAWMARMRALEGQQLLEDDPTVVYLTAYLLTLDAQYDFLARHHRQMIARAEDAEKLNQPCGSKSLLPSNPVQPRRAEDPQILEGHPVSIRGEKKAWELPEGAIVLEGIPVSPQAMDKQEHPESSQDPLPELFEPLTMKKIPAPSLEVKEEAASTPPAPPPSEELQEPVPLEEEFDPVLPSQSPPEEVINVSSLLTHPGDVSD

SEQ ID NO: 49392 - protein, 299 aa, Zea mays
  Coding DNA Sequence Number=SeqID_6017
  Subcellular localization annotation: CTP_CleavageSite=28; ConfidenceScore=5.12e-01
MGRITRGPLSWTRLHCGMPFVANLRLVRYMRRVSLPVLSLLAQLLQQRLRAKGGAFAFAPTPMPPGYGYLTRHLCTGRLTLGPDSHNEQKTGIQGAITNGTPVPSPRDGRGDRKALVRVPAQGTRTRHQSQRAGRSKAHRQVLAPVLATKTRKKAECCILAGQQQFAFPGMTGGRLLRRAGGWFPPPEAGRGGGQPTRAGGRAPARLALCLSKDDQRAKGRAAMQAACNRAKGSERRFAFAIMTASKKGPGKGDTPKRILLREGNRLRASLLIRGSKADPTGGFNSRLRARGFCTLKVA

SEQ ID NO: 49393 - protein, 246 aa, Zea mays
  Coding DNA Sequence Number=SeqID_6018
  Subcellular localization annotation: CTP_CleavageSite=63; ConfidenceScore=5.01e-01
RFDPSSLDMLQFQSFVNGVFGIMFKQLQLKLFLFAGPSATKHGPNTQEWTSLKKEIGSQMEVQCQTSFCLNEDGFPKLLRACTVRLGIRSQPEYDGRELIEHGTEKCVVIVYIGSSLHHVESSVTAAGHRFKDTCKVVARKALRALCQIYEDEVADTPLRSFPPFQRNRPVWMARMRALEGQKLLEDNPTVVYLTAYLLTLDAQYDFLARHHRQMIARAEDAEKLNRQLHVDLTTAQAPCNCLGKS

SEQ ID NO: 49394 - protein, 366 aa, Zea mays
  Coding DNA Sequence Number=SeqID_6019
MVLDLFRGHRRVPTLSVALLGRIVDTSNSGHPSVCPFPLCLSVLALMGLLTVQTKVAAVQAPQSPLSRGALLKDALAEGVWVLFWPSDLIPACRIKSCRLRGGSSPNQRTQPGGRPTAAAPSPDPTQFRHCSALILVLTPAKWDWHDGEHEGGEYYLKSGAQTGCSRVGAARRCSHYSGEGFSRRPRLSRPQSATDTIHEPKQITPTSCQHRNNGEGTSRRRRIHSSVHTLAHGASGRWLSRRWKRSPLRPPAHLIEAKGGEGFDPESVPSFNGEPAIHVTELARVKRRKRGKTPTAWAPRGSGRWSKLSSGPAMSAIEHQASARLERLQVGPAGQRARERGERHGMVRAGEKAYWAEYEFRAQLG

SEQ ID NO: 49395 - protein, 118 aa, Zea mays
  Coding DNA Sequence Number=SeqID_6020
  Subcellular localization annotation: CTP_CleavageSite=55; ConfidenceScore=5.84e-01
MAPAKLKQPSFPPRPSVLPAPSPSRSSKKPLLSQQPWRPTSLCSGADPKQRPRIPSAPRASPDLRSPNIDAVHPGETTEKASRSTLVDVRSYAQIEITVVLANAIWLYEWKRVDRKMK

SEQ ID NO: 49396 - protein, 23 aa, Zea mays
  Coding DNA Sequence Number=SeqID_6021
LKPYMAENEELSSRDDFTFRGEG

SEQ ID NO: 49397 - protein, 261 aa, Zea mays
  Coding DNA Sequence Number=SeqID_6022
  Homolog annotation: Hit_ID=A2YGC2; Match level="QueryCoverage=56%, HitCoverage=62%, E-value=6e-09, Identity=31%"; Hit description =Putative uncharacterized protein
MASSQVHCHGILDARGDPDGDRDDDDIGGSSSHGTERLEEPEPDGWIARPITRDAARGCHFHDALNTLLRRAFDRHTWSIEYRCVVYQHRRGLYQDQWEATCLVRCPDDDLRGAEAFSEHHSITERDTAEAAMQDAARWALSQYCSLFSGVADGLDLKYYPRRSTGSAGDVIVSPVGEGNPRLSSMVNLVVVLNTELDHALDELGKVRAEVAELCAECAARHYLDGGSLAPVGIQHPYRSPPRCCFDYGTPDCMTCIDLDP

SEQ ID NO: 49398 - protein, 51 aa, Zea mays
  Coding DNA Sequence Number=SeqID_6023
MPLSTDPTMSSAILAIQAVGLQNIRSLMFVVLDPAPSHYPRWRGCNTLNLG

SEQ ID NO: 49399 - protein, 69 aa, Zea mays
  Coding DNA Sequence Number=SeqID_6024
MASARVANLVPFGLGLPDYPVPDLSASRDNSDLAEDDPCDPTTTSKPEAPMQSLNQLPVVTDLADARSA

SEQ ID NO: 49400 - protein, 340 aa, Zea mays
  Coding DNA Sequence Number=SeqID_6025
  Homolog annotation: Hit_ID=Q6L5E0; Match level="QueryCoverage=31%, HitCoverage=12%, E-value=2e-07, Identity=32%"; Hit description =Putative uncharacterized protein OJ1651_G11.5
MPSLVAKFLGLDGLPSPKGKYTVKDDKIKTASSPRAMFDIERPKPKRLLQQLFRQKSGSGTEMPRPERSHESNFVSKGILPVHRTSSSSCTTRAIQEADVEPKPVASILYTLVEAAEGIDVEAPSMSANAQGSSTPDANEDDIEKYADLEEDNTESLISPGQVFASGKDIQSEYTAVVSHVDEGSIEKTDDFQLNGLPFEHNQNLNGDVSTATTLFDHFTLHGGRLLGKYYENVMGMLRQFLMMIQLTNQMADLRSSEAKLFIKMALFRLVVWHVMMASNHQCYRWPPQARGLLQLLDRDRSEAFLTMESFVGSSISFIGGHVIRVDLVLLRPCLQARYY

SEQ ID NO: 49401 - protein, 178 aa, Zea mays
  Coding DNA Sequence Number=SeqID_6026
MPLYNPDEDPKPHYHIGGQLMKWKLESNFEEASKCYHLIFLWQEVASSPPSLIISISLMYSNLFIASICPFFMVDFSKYTWLGFDDRSSQSSSSNSNSLLSLLDSSARSAKMSSMTSSTAVESSTTPTKAPLATTGISHALPIASEDATMASSILDLSPSIANGMNLAKHEDYEKAEG

SEQ ID NO: 49402 - protein, 440 aa, Zea mays
  Coding DNA Sequence Number=SeqID_6027
  Homolog annotation: Hit_ID=A2YYT9; Match level="QueryCoverage=26%, HitCoverage=40%, E-value=2e-28, Identity=50%"; Hit description =Putative uncharacterized protein
  Subcellular localization annotation: CTP_CleavageSite=70; ConfidenceScore=5.19e-01
MALKEVALVGHKFIWSNGHTLVKLPPSRLSLKDVVAANPDLSAVCSSPPTREPVVPCDQPCVRRRPAVPCAQSFFADQIRPPSTCRPMRPGRPDPLHLHQRGHLAQICFADVATSDCPDPLHHLHKGESVISVCAEPRIRLPLVPICWEFAQFCSGYLPGILTILRGHGLLFHLTEDSQVLAADRSNATAIKTWQINDGKDSGALLHTLMQQTHVIEQHAVSCPTHKFIEKFFTYRFVMGVRSEFDSLHARLLHSFVTLTMAQALSKLLAEETRLKSMSSITEKLADFRVCRATRGRGTGPSPRGSVVVAATSSAGALSSSWVLDSGASFHVTSHQSLLATTTPVTEGTFVQTADVLNTKAIVVMIHLLVVFEFLEMDIVFVTVVPLNLQIAMVSHELARFRKRKNFIATMSTEDRQLFSAQEDKAQRFLTSIRASSTLM

SEQ ID NO: 49403 - protein, 232 aa, Zea mays
  Coding DNA Sequence Number=SeqID_6028
  Gene Ontology: Mol. function=structural molecule activity; Cellular component=chloroplast envelope
  Homolog annotation: Hit_ID=A2XXA2; Match level="QueryCoverage=62%, HitCoverage=38%, E-value=4e-38, Identity=60%"; Hit description =Putative uncharacterized protein
MSSCLLHLSAFALVPRSLQWGHDGSSPHGAESQRSRLEPQRRTQASYRGPADAVYIHTYCADRQVKGIDREVLLPKDGHQEVAEVALQLGKYCIDDPVKSPPGGRRMVIRTAKRMGGCVLLGANLAGRALPDALGRLVFKTDEMVQAVEAPDVVRNKVSFSVFGLEGAVSLKGKLNVLDSKWIQVVFEAPELKVGSLGFQYGGESEVKLEKGRRWEKTTARGRRIVIRSLND

SEQ ID NO: 49404 - protein, 382 aa, Zea mays
  Coding DNA Sequence Number=SeqID_6029
  Homolog annotation: Hit_ID=Q108Z7; Match level="QueryCoverage=53%, HitCoverage=9%, E-value=2e-29, Identity=39%"; Hit description =Transcriptional regulator, putative, expressed
  Subcellular localization annotation: CTP_CleavageSite=58; ConfidenceScore=5.53e-01
MEMRAAPDRATPRMVAAMSPPTPERGTLGRRVAAVAVSAGSPRSSPDRGRPALVERSSATALAGRRRKERRPPTPKRYADDREMAGVKVVPQLLALAPKLLREIAQSFSQQRKQREGGGPTYHETFAYAQGPFARVPEALSSKPGHLSASQQRVYEDFVHVWHPHNQNVGATGSGLSGVATVSSTLGVLRAYSPNSTSASSSNLSTVHMGGLTCITQPTELGSEDTVIAQFLSNPAQVGPSESPVLFSGTVGAASTFSPLASNDLPVSEISAMVPPPSTSADRLGSILPEPLNTGDALERYKQVAQKDKVDARQAKEKASAAALERQQAYDAALACLAKVEDEDHVHLDAPVPSPDWDQMDCVVKSWILDSLVDDLAENVSS

SEQ ID NO: 49405 - protein, 70 aa, Zea mays
  Coding DNA Sequence Number=SeqID_6030
  Gene Ontology: Mol. function=nucleic acid binding
  Homolog annotation: Hit_ID=A3AD66; Match level="QueryCoverage=61%, HitCoverage=5%, E-value=2e-16, Identity=93%"; Hit description =Putative uncharacterized protein
MASPGSSAAIASASTSYSELPFDVLMTTYDIALMDQDFLSQIPWHYAVIDEAQRLKNPSSVSRHLIFVIT

SEQ ID NO: 49406 - protein, 96 aa, Zea mays
  Coding DNA Sequence Number=SeqID_6031
MEQAVDVGGQWLSSRFVQIERERGRGSWTKGTNERGEVGEQGVGLKRGMRARTWPENAVMGASTAGRSWARGFSIQVSNSNQIKYVQQFKEYLGSI

SEQ ID NO: 49407 - protein, 110 aa, Zea mays
  Coding DNA Sequence Number=SeqID_6032
  Subcellular localization annotation: CTP_CleavageSite=32; ConfidenceScore=5.22e-01
MAPSPSLPNSGDPGATLAHASLNSGDLTAAERSSAARSHSFPLYCVFLRCVPMFVHVGCDVHLYFPNVLNACLLYLDNEQSEVPECVVGDLPEQQPGEGKCPLTYYVLHT

SEQ ID NO: 49408 - protein, 118 aa, Zea mays
  Coding DNA Sequence Number=SeqID_6033
  Subcellular localization annotation: CTP_CleavageSite=65; ConfidenceScore=5.55e-01
MAPSPSLPNSGDPGATLARASLNSGNLTAAERSSATRSRPFPPGLIPSIRLDRTAQITDNASCTRALTPWPACQRPNPLALGPLDNEQSEVPECVVGDLPEQQPSEGKCPLTYYVLHT

SEQ ID NO: 49409 - protein, 371 aa, Zea mays
  Coding DNA Sequence Number=SeqID_6034
  Homolog annotation: Hit_ID=A7QJ94; Match level="QueryCoverage=31%, HitCoverage=24%, E-value=5e-23, Identity=46%"; Hit description =Chromosome chr8 scaffold_106, whole genome shotgun sequence
  Pfam annotation: Domain name=Wbp11; Domain location=42-146; Score =0.6; E_value=0.07; Accession=PF09429.1; Description=WW domain binding protein 11
MELPIGSATLRVHLPPTVDDPGPPPALLPANPSVPYGEISQGPNFMPWFRQRRAAAEQEQQRLWRQARMNVNIEKLMSNMSEIERIDSFDAVERYLLREMEFVWRKKIERDVSQGQKVNISVKSEKKKQQERMAEIEKVKKIREERAIEKAHHEEEMFHFDQSKVKSEIRLREGRTKPIDVLLKNLNFSDEFDIELNDPYLVFKLMHGNEYEDAIDPEEDKAELIVNLTFDGNAPYGGLNLRAFISVLDKNVGTRVLKVKNVGTVELNVQPTQTHFPVVISKLCQGEVLIPVLATIDRTSPQHIFKNLVHPLSLTISLWVLFPKSGNQWGSSVRDNGLGQSVQTHDSVNVQLCILLSLISGVHWEKMCHFH

SEQ ID NO: 49410 - protein, 223 aa, Zea mays
  Coding DNA Sequence Number=SeqID_6035
  Homolog annotation: Hit_ID=Q6QP51; Match level="QueryCoverage=38%, HitCoverage=30%, E-value=7e-23, Identity=68%"; Hit description =Putative growth-regulating factor 1
MQAACNRTKGAHPFDFDASSMEAQAHTSCNRRAGYYVRETAPPLASVPRLLDCGTGTATRGNPAHGPTVPTEHIGHGSVSRGRRRDGRYGQKWAGSNGSGRRAEAAVKSTGGTFGRRSRRRFTSAIMTASKKAPSPPTDQRFEGWPLGRVRQPPQSTRAPSPLLIRGSKAGPSEGFDSRLKALGLRAYQWLAPEGFDSRLRARRVRDDSGYVRYMAEARATLP

SEQ ID NO: 49411 - protein, 175 aa, Zea mays
  Coding DNA Sequence Number=SeqID_6036
  Subcellular localization annotation: CTP_CleavageSite=24; ConfidenceScore=5.38e-01
MGAIKVKAQSTQGTRSRLARAQPRAKAADPRGFTSRLRPRAPWEAPPRPTPGLGLNLDAGRRTPPRPTPGLGLYLDLGRWTPPRPTPGLGLSLDLGRRSPPRPTLGLGLSLDLGRWSPPRPTPGLGLSLDSGRRTPPRPTPGPGLSLDLEGASASPDPGLGPTTSQGGHHYPTPS

SEQ ID NO: 49412 - protein, 37 aa, Zea mays
  Coding DNA Sequence Number=SeqID_6037
MARRDPYVGVLVVLTSSSHFFYDEYFPPAFLLGTLHK

SEQ ID NO: 49413 - protein, 648 aa, Zea mays
  Coding DNA Sequence Number=SeqID_6038
  Homolog annotation: Hit_ID=Q6JAD6; Match level="QueryCoverage=85%, HitCoverage=82%, E-value=0.0, Identity=63%"; Hit description =Putative uncharacterized protein
MEKCKPIKTPMPTNGHLDLDEGGDPPSTAATVSDCAPATSCPSPSLSVTLIARVPSPILPGSSPLVHQFRMPRTKIVSVPGGGDDEDPRRSFRQVKGKTVYLEQQEGRKKRRTDRAARAAAAAAAAAAQAELGDQSQTPSDQIAYRVRRLASRPRSSTHTSASTPPPTLPAPVTPVVPSTTTAIPATSTTPASTAPPPPAPASAPPVPPPRFWERDETEVQPLAADPRLFDLQRATAARVRRFRYVPVESWLPGQRDPAAVDLFSTRIHESFFRAQMSAQIALRTLLTTSGRYVEEWVRVFYASVWIDPDHHWMRFRFEREDVTITASQIRQLFRFPESTTRLHSLCYGTSDPPRRPHGGVAPGTAHVAALFRPPFTDGSRRSPADFTTADKYLYELIRRTLLPRMGYREATTHIQLWLLGALVSHSEFDVVDFLICEIEDAVLDGIRARRQLPYAHYLCHIFAQLIQPPRFQGTLEASRLVFGSYRPAPETPVPASAPVFDSQAEDAALHQFDTQATTVDDDDDDDDDFGVPPLPPMPPRSHDHEAGSSSAAPAALPAMDPALASILQSITQQQAHLAAEQARLSERMLSMFQNMQDRQDALQQQLLQDRAESRAFMALMLQHSGVSVPPVQSAPPPPLQAPVVPAI

SEQ ID NO: 49414 - protein, 42 aa, Zea mays
  Coding DNA Sequence Number=SeqID_6039
PRAKAADPGGFTSRPRVPSSNGRTLDSPEAKLGQASRRSNLG

SEQ ID NO: 49415 - protein, 47 aa, Zea mays
  Coding DNA Sequence Number=SeqID_6040
MESVLHYSNVYPELKACVDLTSDLGLCWVKFFVKDSIGRRQLRMQQN

SEQ ID NO: 49416 - protein, 299 aa, Zea mays
  Coding DNA Sequence Number=SeqID_6041
MGSTLVSISAKIESLMIEKPYLDSHITSIPLRVFSLVGWFRKKKNKTEVREDSVLHLGSFAFSFSGGVCAFLEKVPPRTRLTARKSTGPIGVPRHQLAPRHESSSSGSNDPIGDLEARLSRLQTALQHRTDAWVADGDRINELRRDIRHLQDQLADRDLALDWAVQSRLLMCAKEARAQARVKELSSTVDNLQVYCNTLHEEVHILYSQLHPSEPAQPTEAEAGPSHVAGRALGGELDLFEPPPSLRLVDVWTPTPDDEAAKSGDEDDGFDYAYGNGKEREEGIEVDLQEFQDVDEFED

SEQ ID NO: 49417 - protein, 90 aa, Zea mays
  Coding DNA Sequence Number=SeqID_6042
MALFSLSQLCLGALDSVPVVHRTVSVAHPSLTPCFFVNIKCKGERLQVVEIPRKRDKEKQSKTPWYSSGSLDRLRGVDCNPRPLGCHNVE

SEQ ID NO: 49418 - protein, 65 aa, Zea mays
  Coding DNA Sequence Number=SeqID_6043
  Subcellular localization annotation: CTP_CleavageSite=21; ConfidenceScore=5.47e-01
MVETRRSSTAAAGKRTSPSPSSSSVPPPKRPKFADAAIEASDGTVHSSDASTPAVPPPEFEDRKS

SEQ ID NO: 49419 - protein, 67 aa, Zea mays
  Coding DNA Sequence Number=SeqID_6044
  Subcellular localization annotation: CTP_CleavageSite=58; ConfidenceScore=5.51e-01
MGEGLMAAASALRSSLLLFGPPEQKSSSLPLPGRATTSRSSVFYCSAGPPNRVGLFVTAEVEPEFRL

SEQ ID NO: 49420 - protein, 214 aa, Zea mays
  Coding DNA Sequence Number=SeqID_6045
MGRPSRAAVGPGRGGEGREERGRGTSPGTGTGGRTGDEQGRRLGQGRRLERKWEKGRERGGFGEKREGRLGQLGPKGARGGGSGWAGWGGPRRGREKKEEKEKEKEKERKVLGHAQGCIESRHRFHSREGAILAMVTTGSMVGRSKTGCGLCPALSFKDLHHPCWGGGRAEPELYLPYGPAGHLFLQHSGERALTGLAEGADFNNAGPIGRKRR

SEQ ID NO: 49421 - protein, 271 aa, Zea mays
  Coding DNA Sequence Number=SeqID_6046
  Subcellular localization annotation: CTP_CleavageSite=36; ConfidenceScore=5.00e-01
MGKVTGQARMLLFRHGGKTSSIPPPSGGLTAVVVVVARRRKEYHVVAAIEGHELETPEMEQHLRRERLLETTHLELDGKLFVNTQQSPTWRANCRRFDPGGTGLQAFARDRESLLVSPSSRAATFSYEVPGPSFYRCKERVQVDSSEVEVEAEPWGRARRRPSSEVEVEAEPWGRARRRPPAEVEVEAEPWGRARRRPSSEVEAGPEPRGRARRSFLWRLRLDSAAVSLTLAGGTAVGAGQATLFSCQVSQWRGEVTVVTSALPSEERASG

SEQ ID NO: 49422 - protein, 295 aa, Zea mays
  Coding DNA Sequence Number=SeqID_6047
GDKSRRAGGLEHAVLLTNNLDLAGRTFVVEKVQVRQAPALLEVIQRAFCDPKRKWVVRIPSTLKLRHIARISNEIEVVVAVVIPQLLRDNVDPTGARLLRRYAWSICHAARKVGRPEPRHHLGSLLPDGVPPGSEIQALPATSAASAYARTVRPQEGTATVLVECLALQKSVNILLATPLGTTYLSLSNRPSMAGSRDSSDISPSNIIEPTWETLPADEQLQFEEHKERMIQEAKAKFLANFKVDRNNKVVRHRATDPASLQPTPDIPDVSNTNDLQSLRNYVEDQREQMQNIIG

SEQ ID NO: 49423 - protein, 338 aa, Zea mays
  Coding DNA Sequence Number=SeqID_6048
  Gene Ontology: Cellular component=spliceosome; Biological process=RNA splicing
  Homolog annotation: Hit_ID=A2YMU9; Match level="QueryCoverage=55%, HitCoverage=44%, E-value=7e-54, Identity=61%"; Hit description =Putative uncharacterized protein
  Pfam annotation: Domain name=PRP4; Domain location=80-109; Score =40.4; E_value=6.5e-09; Accession=PF08799.2; Description=pre-mRNA processing factor 4 (PRP4) lik
  Pfam annotation: Domain name=Prp18; Domain location=199-318; Score= -24.6; E_value=0.00065; Accession=PF02840.6; Description=Prp18 domain
  Pfam module annotation: Pfam domain module=PRP4::Prp18; Domain location=80-109::199-318
MDLLKRELEKKRKAATADFGGKSFVWRSELEKKQLQKRLDEHRQLLAKAGTSAPSANSAAAATGSEERRIDELDLPRHEVVRRLRVLREPVTLFGENDDARLARFKLVLKSGVIDDIDMTEGQTNDFLRDMIEMRKRQKAGRDTYAKGKSKRVDGGDGGAAGGSADDGDAKGSGDDADADKDSKRMRTKFEELCNEDKILVFFKKLLNEWNQELDEMTELEKRTAKGKSIVATFKQCARYLSPLFEFCRKKHPGSCPARLPHQTGRRHVCFRASLPPHPSAPLPVADGELLVPPVVSRILSASGELLAMFCSPLFPTIVSSKQFGFVEFSLPLFPAPC

SEQ ID NO: 49424 - protein, 179 aa, Zea mays
  Coding DNA Sequence Number=SeqID_6049
  Homolog annotation: Hit_ID=A3AJE1; Match level="QueryCoverage=22%, HitCoverage=23%, E-value=3e-07, Identity=55%"; Hit description =Putative uncharacterized protein
  Subcellular localization annotation: CTP_CleavageSite=23; ConfidenceScore=5.28e-01
MVAHHPGSLAHSLAYTMSRRGKSAKQRKGPLTGTAFDPLSLPTGVSVPMCFCGDPCKVDKSEDHVTYRQRYWMCANYAFEPTIVQRRMNLMWIDTEISHKDKKWLENLKKWDTEDKERIEERREKLAIEQQSVDKQEMRHIAECREEKEKKLERARRAKDAIGENSDAFRKGKWPYCTQ

SEQ ID NO: 49425 - protein, 163 aa, Zea mays
  Coding DNA Sequence Number=SeqID_6050
MDLTSIDYHLGIIFVVILSICRMSRCGKSAKQRKGPLTETAFDPLPLPTGVPVPMCFCGDPCKVDKSEDHDTYRQSVGMNLMTPPPLCDFEQWIDTEISQKDKKWLENLKKWDTKDKERIEKRREELAAEQQWVDKQEMRHIAECKEEKEKKLERCNTLNLGV

SEQ ID NO: 49426 - protein, 92 aa, Zea mays
  Coding DNA Sequence Number=SeqID_6051
  Gene Ontology: Mol. function=ion channel activity; Cellular component= spliceosome; Biological process=RNA splicing
  Homolog annotation: Hit_ID=A2YMU9; Match level="QueryCoverage=56%, HitCoverage=11%, E-value=4e-20, Identity=96%"; Hit description =Putative uncharacterized protein
MNDETTRKYLQSIKRLMTLSQRRYPALPSKSVEFNSLANGSDLQALLSEENDAQVFIVSFSGNEQDGVNDCSKMVRADRTRDSGQDLQVRAA

SEQ ID NO: 49427 - protein, 115 aa, Zea mays
  Coding DNA Sequence Number=SeqID_6052
MGKGNKRKHDSQGIAAEVWTYIRAIERSGLEGSDESEFSSDEEDSDGGEDEDDDDDDGDDDDGGDSDGDGSNGGGGSGGKGSTRGGSSTGSTRGGSSKGSTRGGGGKGSSSKASG

SEQ ID NO: 49428 - protein, 248 aa, Zea mays
  Coding DNA Sequence Number=SeqID_6053
MAPKPLGFYTKYVQYHLGHPLEKVELETRTFDMPWHGFCRVMPTLGARKRSAADFCKDSHGCDLWRPLNTGRNKPPRVRRRLPRQSTPACAPAPRPSQASVLVRVRGYKTPRSFGRTPPHALKPHRSSVRHRLPIRDAPAATRAPCHRRPASPALPSPVQPSEKIVRVSVKLPERGIGLCFTGEAGPRSPDFNRPPATVDRDCNLADGEYILVPEQGAAQEVAPDPAPEPAPEDLPATALEGKPRFYA

SEQ ID NO: 49429 - protein, 181 aa, Zea mays
  Coding DNA Sequence Number=SeqID_6054
  Gene Ontology: Mol. function=ion channel activity; Cellular component= spliceosome; Biological process=RNA splicing
  Homolog annotation: Hit_ID=A2YMU9; Match level="QueryCoverage=72%, HitCoverage=30%, E-value=5e-61, Identity=91%"; Hit description =Putative uncharacterized protein
  Pfam annotation: Domain name=Prp18; Domain location=6-137; Score =178.1; E_value=2.3e-50; Accession=PF02840.6; Description=Prp18 domain
MTINLLLSLSNHLIKGGSIIEYHSHTLHVNELSISITILFHDASMVLPDDIRRALLVIVECCMKRDYLAAMDQYIKLAIGNAPWPIGVTMVGIHERSAREKIYTNSVVHIMNDETTRKYLQSIKRLMTLSQQRYPALPSKSVEFNSLANGSDLQALLSEENDSVKASEERLRLMPAYAFAD

SEQ ID NO: 49430 - protein, 53 aa, Zea mays
  Coding DNA Sequence Number=SeqID_6055
MESHDLRAEWESRLVGKEEGVEADLQEFQDFNEFEDYASNLPQSAACVSNNVI

SEQ ID NO: 49431 - protein, 145 aa, Zea mays
  Coding DNA Sequence Number=SeqID_6056
MLRRSTSFGPTCWLASSPKVGPGATVGTLKLGAATWPEKVIYSKASTVSPDPHGKVLDPWIYSPDLQVGPGPPRVRTGPLEWDPDPLYGVQTAHSGVLRPYLRPRRGSRADTLSPDAATWHTARGISQWAEPGVMPLGYARLPGG

SEQ ID NO: 49432 - protein, 200 aa, Zea mays
  Coding DNA Sequence Number=SeqID_6057
MASLGHPERFQSEGALNLVRGLLGWSAPGLAERIRAGAAPLGDLATGEFVLFISYISCGLALPISPFFLLLLDVVCHVAASGLCLSGEQECMRIGLERTRAGLDTCQLWTPAWALSKVLGPHCGRSRPHTGGSGSHSRGPVHTRGGPGPTWRSRLYIQGSGTFPWGPDSLLMPWSISLSLAMWRPRSHPRGGSGAVAGPE

SEQ ID NO: 49433 - protein, 57 aa, Zea mays; identical to SEQ ID NO: 44951
  Coding DNA Sequence Number=SeqID_6058

SEQ ID NO: 49434 - protein, 63 aa, Zea mays
  Coding DNA Sequence Number=SeqID_6059
  Homolog annotation: Hit_ID=A2YMU9; Match level="QueryCoverage=55%, HitCoverage=7%, E-value=9e-12, Identity=97%"; Hit description =Putative uncharacterized protein
MVLPDDIRRALLVIVECCMKRDYLAAMDQYIKLAIGFLLTFYADLIKWADGITGWSGTFSKPA

SEQ ID NO: 49435 - protein, 380 aa, Zea mays
  Coding DNA Sequence Number=SeqID_6060
  Gene Ontology: Mol. function=ion channel activity; Cellular component= spliceosome; Biological process=RNA splicing
  Homolog annotation: Hit_ID=A2YMU9; Match level="QueryCoverage=95%, HitCoverage=96%, E-value=1e-132, Identity=79%"; Hit description =Putative uncharacterized protein
  Pfam annotation: Domain name=PRP4; Domain location=80-104; Score =19.3; E_value=0.012; Accession=PF08799.2; Description=pre-mRNA processing factor 4 (PRP4) lik
  Pfam annotation: Domain name=Prp18; Domain location=192-336; Score =312.1; E_value=1e-90; Accession=PF02840.6; Description=Prp18 domain
  Pfam module annotation: Pfam domain module=PRP4::Prp18; Domain location=80-104::192-336
MDLLKRELEKKRKAATADFGGKSFVRRSELEQKQLQKRRDEHRQLLAKAGTSAPSANSAAAATGSEERRIDELDLPRHEVVRREPVTLFGEDDDARLSRFKLVLKSGVIDDIDMTEGQTNDFLRDMIEMRKRQKAGRDTYAKGKSKRVDDGGAAGGSADDGDAKGSGDDANADKDSKRMRTKFEELCNEDKILVFFKKLLNEWNQELDEMTELEKRTAKGKSMVATFKQCARYLSPLFEFCRKKVLPDDIRRALLVIVECCMKRDYLAAMDQYIKLTIGNAPWPIGVTMVGIHERSAREKIYTNSVAHIMNDETTRKYLQSIKRLMTLSQRRYPALPSKSVEFNSLANGSDLQALLSEENGSAKASEERLRLMPAYAFAN

SEQ ID NO: 49436 - protein, 373 aa, Zea mays
  Coding DNA Sequence Number=SeqID_6061
  Gene Ontology: Mol. function=ion channel activity; Cellular component= spliceosome; Biological process=RNA splicing
  Homolog annotation: Hit_ID=A2YMU9; Match level="QueryCoverage=84%, HitCoverage=74%, E-value=1e-127, Identity=75%"; Hit description =Putative uncharacterized protein
  Pfam annotation: Domain name=PRP4; Domain location=66-95; Score=43.9; E_value=5.8e-10; Accession=PF08799.2; Description=pre-mRNA processing factor 4 (PRP4) lik
  Pfam annotation: Domain name=Prp18; Domain location=185-329; Score =313.3; E_value=4.6e-91; Accession=PF02840.6; Description=Prp18 domain
  Pfam module annotation: Pfam domain module=PRP4::Prp18; Domain location=66-95::185-329
MEVDAEIHGTDLGTEIHGAEIHGAEVVPRQLLAKAGTSAPSANSAAAATVSEERRIDELDLPQHEVVRRLRVLREPITLFGEDDDARLARFKLVLKSGVIDDIDMTEGQTNDFLRDMIEMRKRQKAGRDTYAKGKSKSVDGGDGGAAGGSADDGDAKGSGDDADADKDSKRMRTKFEELCNEDKILVFFKKLLNEWNQELDEMTELEKRTAKGKSMVATFKQCARYLSPLFEFCRKKVLPDDIRRALLVIVECCMKRDYLAAMDQYIKLAIGNAPWPIGVTMVGIHERSAREKIYTNSVAHIMNDETTRKYLQSIKRLMTLSQRRYPALPSKSVEFNSLANGSDLQALLSVENGSAKASEERLRLMPAYAFAD

SEQ ID NO: 49437 - protein, 86 aa, Zea mays
  Coding DNA Sequence Number=SeqID_6062
MESHDLWAEWESRLVGKVCDLCRGLETDISVVLTVMSGLGSSLIRDTDGKEEGVEADLQEFQDFDEFEDYASDLPQSAACVSNNVI

SEQ ID NO: 49438 - protein, 48 aa, Zea mays
  Coding DNA Sequence Number=SeqID_6063
MDSTSVKMYLCQVRKRQIFVAFAPRWFARKKNKSEAAGGLGPPYRTFV

SEQ ID NO: 49439 - protein, 51 aa, Zea mays
  Coding DNA Sequence Number=SeqID_6064
MAVMDSTSEKMYIFQVRKRQIFVAFAPRWFPRKKNKSEAAGGLGPPYRTFV

SEQ ID NO: 49440 - protein, 94 aa, Zea mays
  Coding DNA Sequence Number=SeqID_6065
MVLPVAHRTLSGAPGQAPRELATFGFIREALRYNSPGLSETINQAKDGGKKRFEIPSAREKVKETRNPKPGVKKTCKVKVDRVKKSYGASRITT

SEQ ID NO: 49441 - protein, 117 aa, Zea mays
  Coding DNA Sequence Number=SeqID_6066
MSATSGSGIQALPRRTSVTRKVWTYIRSVERAGLEGSDESEVSLDEEDSFGSSEERSGDDSDDGDGGGGDDDGGTSGEGDDGGRGGEGDDGGNGGSGGGGGKDGSGGGKASGKAPLV

SEQ ID NO: 49442 - protein, 79 aa, Zea mays
  Coding DNA Sequence Number=SeqID_6067
MRLILWYLFLTCGGCETARVSSHTFIAQQVVGNNVHELAKGGSSREVSSRKKRLLAEAVCMRWPKVPLHEASVLQTDLK

SEQ ID NO: 49443 - protein, 93 aa, Zea mays
  Coding DNA Sequence Number=SeqID_6068
MSVARDNRRRGVWVSPDSGRRGCRQGSIPPPTLGVRNLGADGRLGMGSPSLTSIWAMSASSPGDFSPASLLPLGSVGHREQGYRRTGNRLKWN

SEQ ID NO: 49444 - protein, 158 aa, Zea mays
  Coding DNA Sequence Number=SeqID_6069
MSGKANYCCPARMQHSVLYPRFRDEDGSGDLPVRFGAACACWCGVGGQADAAIGADVVAAGESFSAVKAVSAAYGPTSGSLALIACPRPSSGDEGEGIVAAASALRPSPLQFGHLERRSLSLLPEQAALAEASGWPAESSARAGFLEKTLAAMARARC

SEQ ID NO: 49445 - protein, 874 aa, Zea mays
  Coding DNA Sequence Number=SeqID_6070
MPSHGGKLVRSPAFALDLQSRDPAAFVREAEDGAVRIVGRYVPRTEGQRSWDIRGSNDRLNRVFELNQLPYNGYPGQDDVDRRGKKPVVESGDDPAPAAAPSSKKRKLGTAVGGLGVSDGFARELMRTCAAPGGRMSSPKLRESSARMLRVTGGWWPRNVPIPRAADEDFFTSRMVREWKVFPYGRNIAAVVSAVMDKDRQGAAQKRQAVVRLHEARPKRQWGAAKATAPGGGHPPKSAVPASSRAPEPAAAAGGSKAAKAAPASGRVTEAVKSARGLPPPGKRVADFATDISVDDYLVGSDEGQLVVVPSAAATTTAAVMPKAKGGALSAGGEMPALAAVRDEADAVSHRLEEMKEALSQAADFAGRAASGALTTVVSAEVERLRTQHADAIREKSAADSKCRKLADKVAVLEGEKSGLRRQLVEERREANEALAKAQAALAEANLARVEGNLARERAAQLEERLNALQSRVERTEAATRAEAERTRKQLVDSYHELGARTGDFEVPDREPGLRCLEWVQEELQALPTIVEGFMSYASLVTCEGAMNALSREGCRHFEVFDQADEDFERDIYKVEDPIVKESAGAIYDRMWGPHGREVVRERAETARAQAARGERVDDFGALNSALLDPESNPAEVVSEAALEPPPETAEGTPDAPAAAAAGGGPPLETAESVPDAPAAAAAGEGPPPTAVPRVEDPATVALEATAEAPATAGSSQVQDFGPAHATATTNFLAASTVDGVNKSDGSTSKFSDFGDSGSSVEWTEESSDEDLDYFAALDVAAAEASPHAADTEDVPGPSTGRRRRRAVAKRRVSGAEGGRLRAFVRLCPWATSAWMVFAVDFGLPHLLCLSGCTLRRLLRGFVPREGGCCGASW

SEQ ID NO: 49446 - protein, 27 aa, Zea mays
  Coding DNA Sequence Number=SeqID_6071
MSKIDDLPKVVEKVRMREWHKSDYNPA

SEQ ID NO: 49447 - protein, 226 aa, Zea mays
  Coding DNA Sequence Number=SeqID_6072
  Homolog annotation: Hit_ID=Q8SA97; Match level="QueryCoverage=67%, HitCoverage=21%, E-value=4e-08, Identity=36%"; Hit description =Ornithine carbamoyltransferase
MALPVDVAGLCPRQGDMGAPPKPRLSLSSVAEAESEPWGRARRRSFGRGQGGVRALGSGEAEFCRLPGLSPSPSPGVGQGGGRSAEARAESEPWGRARRSFVVFRVLARVRALGSGGAEFAVFRVLARVRALGSGGAEFAVFRVLARVRALGSGGAEFAVLRVLARVRALGSGGAEFAVAPLARPDCLSDSLCRVAPQSEWRRRRCPSVRLLYADGGYQLRIRRLE

SEQ ID NO: 49448 - protein, 57 aa, Zea mays; identical to SEQ ID NO: 48612
  Coding DNA Sequence Number=SeqID_6073

SEQ ID NO: 49449 - protein, 119 aa, Zea mays
  Coding DNA Sequence Number=SeqID_6074
MDKFGFVFMICASRRTAPKVLAEFKDIPDCDVRAWNKMMVDFVNRDVDPVWKVFQDMPNHDVLAWNIMMGGFVTNGINMKPSLSELLRHMFHVNLAESSTSKEARIQEIEAKFIHCKAI

SEQ ID NO: 49450 - protein, 552 aa, Zea mays
  Coding DNA Sequence Number=SeqID_6075
  Gene Ontology: Mol. function=molecular_function; Cellular component =membrane; Biological process=auxin mediated signaling pathway
  Homolog annotation: Hit_ID=Q10RR0; Match level="QueryCoverage=65%, HitCoverage=96%, E-value=1e-150, Identity=72%"; Hit description =Integral membrane protein DUF6 containing protein, expressed
  Pfam annotation: Domain name=DUF6; Domain location=275-404; Score =66.1; E_value=1.2e-16; Accession=PF00892.11; Description=Integral membrane protein DUF6
  Pfam annotation: Domain name=DUF6; Domain location=99-232; Score =22.6; E_value=0.0015; Accession=PF00892.11; Description=Integral membrane protein DUF6
  Pfam annotation: Domain name=TPT; Domain location=266-404; Score= -10.3; E_value=0.0023; Accession=PF03151.7; Description=Triose -phosphate Transporter family
  Pfam module annotation: Pfam domain module=DUF6::DUF6::TPT; Domain location=275-404::99-232::266-404
  Subcellular localization annotation: CTP_CleavageSite=45; ConfidenceScore=5.39e-01
EPQSLTLRRSLVSSGVSVNSSSRSQGRRRGEQSRDSEMLCRRLAVAAVVACVTGWERIEQRGRGRNIMAEREVVEGGTTTGGGLWRRYAPHVQMVLAQLCYTLMYFITEAAFNQGLNPYVYITYRHLLVAVLIWPFAYYLEKGLRPKMTLMLFVEIFVLSLLGVSLTLNMYFTSLKYTSPTFVTSVVNTIASMTFVIAIILRMEIVDVKSLRGVAKVAGTVVSFAGVTTMTLYKGAAITSLWKSPVQIAGSGSGGGGVAHDSWVKGSVLAVASCVCWSIWYIMQASSLKRYPAQLSLTAWMCTVGGIQSTVFTLFMQHEPEEWRIGFGVKFWSIVYSGLACNGFTVFVQLWCTEKKGPVFVTMFNPLSTIMVAILAYFIFGENLYVGSIVGGGVVILGLYMLLWGKEKDQERGTGKEREQLETDCEKQAKKVSDCVYEAPKTTKVTDPVSPHQLFSTLICPTLSLQALAGAMRDWAPSIIATALFALLCPGGVLQMPGRHRPVDLMNMKTSFPSTPSSTSCCSCSSSSSCSLTSTSDVSVFPTPSHKLLACF

SEQ ID NO: 49451 - protein, 225 aa, Zea mays
  Coding DNA Sequence Number=SeqID_6076
  Homolog annotation: Hit_ID=Q6QP51; Match level="QueryCoverage=68%, HitCoverage=60%, E-value=5e-32, Identity=53%"; Hit description =Putative growth-regulating factor 1
MMLFRHGGKTSSRSPPPGELTIVIVAVALRGEEYLVIAAVEGHELETPEAEHRPRLKRLLKTTHLELNGKSRQGRSDRSNFALPLTDLTGKQRRSPLSDCCATRQGEADKQLSSALGATGSSASPDLGPRPQEEVSASPDLRARPPPRPRKVVSALPDSRARPQPRPRKVVSASPDPRARPQPRPQKESRPRSTPVSASGGVSASPDLGLGPTAPRGMHHYPTPS

SEQ ID NO: 49452 - protein, 53 aa, Zea mays
  Coding DNA Sequence Number=SeqID_6077
MGLGVCGLLCQGGNETDGFGYVYGAGCQHCNHCSGEDEAVEGDFQEFQDYDEF

SEQ ID NO: 49453 - protein, 115 aa, Zea mays
  Coding DNA Sequence Number=SeqID_6078
  Subcellular localization annotation: CTP_CleavageSite=39; ConfidenceScore=5.16e-01
MGKCRTPAYTDWTSGQGLGPPRVQTGPPGWVPDPSVWVRVTTGSRDSGTKNYRALVKARRGSGADTCPDHTVYASAPRSGGDPMLPCGPLPVTRYAHAAAYTVLIMARALPREQP

SEQ ID NO: 49454 - protein, 72 aa, Zea mays
  Coding DNA Sequence Number=SeqID_6079
MVSHSGYGGYKCGHCTTAVGISEALYAKAPCLWHNFTGSLEDMVAGVTWPSTLPPGWTVEWDPTSAEEEHEE

SEQ ID NO: 49455 - protein, 188 aa, Zea mays
  Coding DNA Sequence Number=SeqID_6080
  Homolog annotation: Hit_ID=A2ZLC0; Match level="QueryCoverage=76%, HitCoverage=52%, E-value=2e-34, Identity=59%"; Hit description =Putative uncharacterized protein
MACDHSHTTVSRLSLEMRKEELLPVEEKISELSESQSELLGRLRGLKEDLLSWRSNLDSQVTKYKVGSFRIVKELSDIKSALNNEIEQLRSDFQELRTTLKKQQEDVSLSLKNLGLQDATENDGNKGNGDGTNEVLSANLGNLKLDGSSENYDESRESKEDKVENTDTAGDGIVDKATKETSSTDEQF

SEQ ID NO: 49456 - protein, 136 aa, Zea mays
  Coding DNA Sequence Number=SeqID_6081
  Gene Ontology: Mol. function=aspartic-type endopeptidase activity; Biological process=DNA integration
  Homolog annotation: Hit_ID=Q850V8; Match level="QueryCoverage=97%, HitCoverage=47%, E-value=6e-11, Identity=34%"; Hit description =Putative uncharacterized protein OSJNBa0037J17.18
MEDLIPKFETCGVYHFMGQRSDFSEMAVKQFLATSEIDIDEESITWMTGFKRYSATFAEFAAANSLDYGTISAGIDLYTEDNFEDFVQFYEPARLGIPRRFGETAGLRHHPAMINKIARVTILSKSGDKSKIRDKF

SEQ ID NO: 49457 - protein, 249 aa, Zea mays
  Coding DNA Sequence Number=SeqID_6082
  Gene Ontology: Mol. function=hydroperoxide dehydratase activity; Cellular component=chloroplast; Biological process=fatty acid biosynthetic process
  Homolog annotation: Hit_ID=Q5Z9P5; Match level="QueryCoverage=26%, HitCoverage=19%, E-value=3e-18, Identity=62%"; Hit description =Putative brain and reproductive organ-expressed protein
MGQSPEYEVYFRKSYPTKEKDSQGYAGFRNQGKAFSKNQLRYFCKNSLLKSIYKGVDIKILDGEPHRETSSGELDGPEGAKTGASEWQKPNRTPPAHSPQHNFTKGYLVCSGRSDRGPCGQMHTFPAIGDYLSELYIEYQKERVHMVDDARLAFELSTVLSKEPDDAKFAIPLMESDFDFTKLVPGCPWRLPQKIHLQDKQCAGKDFVVLIARLLVAELFLRYDSFDVQVGASMLGSSVTITSLKKATF

SEQ ID NO: 49458 - protein, 419 aa, Zea mays
  Coding DNA Sequence Number=SeqID_6083
  Homolog annotation: Hit_ID=Q6JAD6; Match level="QueryCoverage=99%, HitCoverage=79%, E-value=1e-117, Identity=60%"; Hit description =Putative uncharacterized protein
MKNVSAPGGGDDEDPRRPFRQVKGKTVYLEQQEGHKKRPMDRAARAAAAAAAAAEQAELGDQPQTPSDQIAYRAQRDPAAVDLFSTRIQESFFRAQIDRYVEERVRVFYTTVWIDPDHHWMRFRFEREDVTIHASQIRQLFGFHESSTRLHSLCYGTYNPPHRPHGGVAPSTAHVAALFRPPFSDGSRRSPADFTTAAKFLYQLMRWTLLPRMGYREATTHIQLWLLGALVSHSEFDVMDFLICEIEDTVLDGLRARRQLPYAHYLCHIFAQLIRPPQFQGTLEASRLVFGSYCPAPKDPLPAPAPVFDIQVEDTALHQFEAQDATVDDYDDDFGILPPPPMPPRSHDHEAGSSSATPAAPPAIDPALALILLTLTQQQAHLAVEQTRQAAAHQQLSERMISMLQTIQDMKDSLQQQLL

SEQ ID NO: 49459 - protein, 265 aa, Zea mays
  Coding DNA Sequence Number=SeqID_6084
  Gene Ontology: Mol. function=cysteine-type endopeptidase activity; Cellular component=nuclear chromosome; Biological process=proteolysis
  Homolog annotation: Hit_ID=Q10716; Match level="QueryCoverage=41%, HitCoverage=29%, E-value=3e-41, Identity=75%"; Hit description =Cysteine proteinase 1 precursor
  Pfam annotation: Domain name=Peptidase_C1; Domain location=90-263; Score=-38.8; E_value=7.4e-09; Accession=PF00112.14; Description =Papain family cysteine protease
MTSNLGTEHLLAGMVGKNSMKVARDLVMQEVESAHPAAMAAESAIDTNTEHPEPEHKDLLRVYEVGDGSTMGCLHSIGSDLTQTRELPELQQNVSMRSGQEASTVGKDSSRTPTSVRELVVPVCSLESGVLGKRIKRSLTGGNEMQSTQDKRSRKASMNFGVVSVDESQNVAILIKHGPLAIGINAAYMQTYIEGMPCPYICGRHLDHVVLLVGYGAAGFAPIHLKDKPYWIIKNSWGMNWRENEYYKICRVPTFATSAVTPFMY

SEQ ID NO: 49460 - protein, 245 aa, Zea mays
  Coding DNA Sequence Number=SeqID_6085
MGNGHEPVQGRPANDGIEWEVNLRTVELDVLRAEVFLCPECNRERDAPKGIHRLRAHSGEWTRGSQSGPWDLQLPERSVADDIVPSPTVDQDVMQLDVGDDRAVMSSIGCPEGDSCAPPPLVWGRFRDPWGHRQDLTAQGLHVPAGGELPASTVHHVQLLAAVGIITGVGVSNEDVFEDLLGGLIPEVPFSRGHITVVDPLLARPATRWGAILGRLLTPLTNALRELDDLAALHGAVATVGVPRA

SEQ ID NO: 49461 - protein, 118 aa, Zea mays
  Coding DNA Sequence Number=SeqID_6086
MAPDEAVELGGWRSNSLATDKALGAALDALDACTGVCYRTERTTAAPGIGRLEARGVEDTTSSSIEVFGIEVMVLDDLDHGVEQENKQKPNAKAPTWRAKCRRGNSPAGWRNAPTLNP

SEQ ID NO: 49462 - protein, 261 aa, Zea mays
  Coding DNA Sequence Number=SeqID_6087
  Pfam annotation: Domain name=Transposase_28; Domain location=93-255; Score=-55.7; E_value=0.017; Accession=PF04195.3; Description =Putative gypsy type transposon
  Subcellular localization annotation: CTP_CleavageSite=6; ConfidenceScore=5.04e-01
MAAPRRGGAGASGGSTSLHAGPGSRARDWAVGFGGEAHCGRRWRAPHVAVRLLRTRRPVPKEHDSWARAPVSEAGPLLLVEMKSTLSLLSSPRSSAVVAAMVLLDPPERLQPEVALNLVHNLLGWGVPAFTGRICVSAFAYDDLTAREFVVSVSNLPSGLALPVSSFFVLLLEELGLQPQHFTPCFILQAAVIAYLLRMSMGRRSFPLLPPAFGGEGCLRYGTRLSGYTAPDHPRGQAFGYGTKLSGHTAPDDPMERAPVL

SEQ ID NO: 49463 - protein, 84 aa, Zea mays
  Coding DNA Sequence Number=SeqID_6088
MTNGIIKKNEKESHDAREGAKRAEEAAERARRIAELSLLPEPYDPQADLVMKEVLDVMSVANTIVDKVVDRLLNEATEKILKEN

SEQ ID NO: 49464 - protein, 159 aa, Zea mays
  Coding DNA Sequence Number=SeqID_6089
MARRPSPRPRMGVRTRPSKNAAATSTAYDILYDSPGDIGAAWPAVAGGAGRATGAVDLHTARPLPVRWTGSHAPLGGGRRYRSHQSQRNGAATRLASHPKELGARGMELWLSPLSTFMRLVIILPPNAGGRSGKECRLHGHPAEVGDDGRLKDEAGRNV

SEQ ID NO: 49465 - protein, 104 aa, Zea mays
  Coding DNA Sequence Number=SeqID_6090
MEQRRTARRLQGRAAWREMSTRTEHEARRREDARQGRDGARASLGADGCFRSTRTGGLASPLAPQPISQSGPDAWISEIRDYLKKNILPEDHVSAERIVRLAKR

SEQ ID NO: 49466 - protein, 149 aa, Zea mays
  Coding DNA Sequence Number=SeqID_6091
MSSVIPNPTGQQQQPFNSALGYYSRLQANTEFVLAHTVKGPTAQMGGRETEREGGKKAAGDGRERWKSRGLRVCPAPRSGALVVGGYKRPRGRGSERPHASACPVLFSARPTLSKRALVLPFIGVRRGSRCTMGGVAECYVCSGGELAP

SEQ ID NO: 49467 - protein, 61 aa, Zea mays
  Coding DNA Sequence Number=SeqID_6092
  Homolog annotation: Hit_ID=A9PCJ8; Match level="QueryCoverage=85%, HitCoverage=46%, E-value=6e-15, Identity=69%"; Hit description =Putative uncharacterized protein
MRRVLPPDYLTPIKVDGRIAVCEGASEGVGLGHPIEYICLDLEAPNVCKYCGLRYVQVHHH

SEQ ID NO: 49468 - protein, 131 aa, Zea mays
  Coding DNA Sequence Number=SeqID_6093
MSHLMALLEATKITLENREELLVDLSTEMVEKDLQVEQLSNEIQELEELVGTRENTIEVMELPLDAQSSGRRLDVDERVEQCRAVAGVLHVLALFVLVLQMQHLRGIHTYREEAPRTELLGSRWRLGEGER

SEQ ID NO: 49469 - protein, 207 aa, Zea mays
  Coding DNA Sequence Number=SeqID_6094
  Gene Ontology: Mol. function=nucleotide binding; Cellular component =microtubule; Biological process=embryonic development
  Homolog annotation: Hit_ID=A7NU96; Match level="QueryCoverage=16%, HitCoverage=11%, E-value=9e-09, Identity=80%"; Hit description =Chromosome chr18 scaffold_1, whole genome shotgun sequence
MVFGQVVIGPPGSGKTTYCNGMSQFLSLLGSLLLFTLLMPIYAVILETFNLDFYTDVQDLSYLQYHLEQDPRSAKYRGLQAELPTFGKIQRRSAIIHRTVRCSKEERLWNSPASGICSAIIHRTCPVYTGLSGEPAEQRLLHANGHLQAHLMRARSAQKSGTRETVHRTIYSSCPVYTGQPGGPRSQKLQRSNPNGLVTWLAHRTCL

SEQ ID NO: 49470 - protein, 552 aa, Zea mays
  Coding DNA Sequence Number=SeqID_6095
  Homolog annotation: Hit_ID=Q75HB0; Match level="QueryCoverage=29%, HitCoverage=45%, E-value=3e-71, Identity=83%"; Hit description =Expressed protein
VRIPTAILAGIVALPPPYEPPPRRRPHYRQAPAHHKPRTPQPSSATEPPFSPVAPHPRKRSTPTATVNPVDTAAAYIRQTTKRVERLKERKRELVASARASSSSHGSRSRSSSVGAAEVERTAERGASFHCSVHAVEEADGEVQNAHFSIVSARAIYTIHALTRASCVHTPSVLACSCPRPCLRSHAPARPRASCLRPARRARTPPARSCLERVPAVSHAPQSCTRNNQARGSPRSSFPRTRLHSGHPQWIPHFPSLVLLITNAVLAVAHTIVVAAVEQSRFLIPGWVSFGSRSIVQQQHGNYVIARRSIQFISTTKNTEFENCREMQFAAMKRGDLLELCRQHGFATRGSKFVLTCALLNLKCNVLILYITLPFMQLNAMSSFSAGHGRRPKKKVYHREPGLDRAMDLQKKPALLLCLCDLILAQKTGSLLVRDLEKEVGFVQKWNFLSLIERHPNIFHVSGGSASQEPISVTLTEKARKISSEEAEARELMEPILVRNLRKLLMMSMDCQIPLDKIELIQSELGLPNNFKRNLIPRLREIQCLYIEQQRF

SEQ ID NO: 49471 - protein, 111 aa, Zea mays
  Coding DNA Sequence Number=SeqID_6096
  Gene Ontology: Mol. function=binding
  Homolog annotation: Hit_ID=Q69QZ3; Match level="QueryCoverage=45%, HitCoverage=7%, E-value=4e-12, Identity=70%"; Hit description =Neurochondrin protein-like
MRYGRLVRRFVQGCFTTKPARAGLQASRGCIVCYRTDLAITEECFELVSLIAIASEDGAYEFCEPGVIDMIFLQILSLTDDIEGVVKDIEGPLRDIEGTLIATEGALMAIE

SEQ ID NO: 49472 - protein, 371 aa, Zea mays
  Coding DNA Sequence Number=SeqID_6097
MEVAPNHDAFLKSVLDGTLVIGARLLEHLVEQVGHFGRLPRVPVLGSSDKICVSGVALRLRLLLGLLLRATLGGRLGDVFLLPSLRLLVLPEDGFDHLLARGELGGDVHQFARLGGSLASQFAHQVSASGAGEEHPDDIRVGDVGQLASEIPRVPKAYVRTLEVSNEGFDQVVLVGDLCRRQMLQPGPGGVGEEQVEIADDEVVVVRSSQLACQPVVRKPQLWPCFPRVLGDGSRGPELGWERRPSYGPAEGLRTQCFGRGTSILLTVVASSAPGVVASAHLLIEAGSTVAAVVLLAEAIRGCRRPVPRAPGADRGLPHESGGRCAMLRGAPLPSGGRAFGPSDRGILQEILEFSLDTPPLGGGWLWHCSE

SEQ ID NO: 49473 - protein, 519 aa, Zea mays
  Coding DNA Sequence Number=SeqID_6098
  Subcellular localization annotation: CTP_CleavageSite=15; ConfidenceScore=5.12e-01
MSSSSSSAAATPPVAASSEETLSSLMAELRASDSVDFGVSRMSSARVEDMQRLGYFGGGVARAPGTEEVPEPEGELVVFEAFFVAGIRLPAHRFVGEVLRRVGRRPTCLWLRPAAATAVAAAAPKAKGGALSARGEVSALAVVMDEAGAATHRLKEVTEALSQVADFTSRTASGALTAAVAAKVERLRTQHADAVREKSAADSKCRKLADKVATLEGEKADLRRQLAGERRETNEALVKAQAAQAEANLARAEGNLARERAEQLQERLTALESRVERAEAMSRAEAERTRQLLVDTYRELGAGTGDFEVPDREPGLRCLEWVQEELQALPTFVEGFMAYASLVTCEGAMNALSREGCRHFEVFDQVEEDFERDIFKVEDPVVKESAGAIFDRLWGEHGREVVRERAETARVQAARGERVDDFGALNSMLSDPEPTPAEAAPGPVLGPTPEAAGDAPGASASAEAGEGLPPEVAEGAPDASAAAAPSAVDPAAVAAEITAEATAEPTAEAPATSGPSQVA

SEQ ID NO: 49474 - protein, 133 aa, Zea mays
  Coding DNA Sequence Number=SeqID_6099
  Gene Ontology: Mol. function=hydrolase activity
  Homolog annotation: Hit_ID=A2YJE5; Match level="QueryCoverage=51%, HitCoverage=21%, E-value=1e-26, Identity=83%"; Hit description =Putative uncharacterized protein
MPKSFPGVKPEFWDGMRSRLAALRPNRSISRWFLADLPTVLVVGDSVFIHGGFLEANVEYGLERINADQRGSTGLLRCFGDVVAEFWGNKYIAILIVQPAIRDYFKVYLKVSSAPHQSRFKMHFRVSLLGSDL

SEQ ID NO: 49475 - protein, 231 aa, Zea mays
  Coding DNA Sequence Number=SeqID_6100
MAPRMPCDDSDSQPPYGSKRTALIQRVGRAGKDGTALAQGRSLPPAWTPVTPYCKRTRPGRGANTKAAGSTSHACLPPAASPPFAFCLAPTHLGWGTRRRFTRRSRDPPELHPASISLPEGSSEKAELKTAKIPDDDSAAMTDEVGSCADKAGSRSSSYNTKPARNTKSARQSNVRQRHRGRSATSSLIRTPEGSRASAAISQWTRPAGVPSSPHFQPREQTVRVLASSWV

SEQ ID NO: 49476 - protein, 204 aa, Zea mays
  Coding DNA Sequence Number=SeqID_6101
MAAHMAKEKKSLEKRRVYNKQGRVSATRGGSGLTGRAQRQGAQAPTGGTQRQSARAGIVIHGSEPRDRDRSVELNVGKALWLRAVPLLLLGGKVAGDKGNDHGRALGVWGRGSSMLKAIWQTQSWAQYQRGGTRGRGTRRGDLMAARINSGEELRGRWGRIRRNKGIGRLLTSSANSGALGRRRRRGEASGRRWQTSAARGRLR

SEQ ID NO: 49477 - protein, 290 aa, Zea mays
  Coding DNA Sequence Number=SeqID_6102
  Homolog annotation: Hit_ID=Q6QP51; Match level="QueryCoverage=66%, HitCoverage=79%, E-value=7e-17, Identity=36%"; Hit description =Putative growth-regulating factor 1
  Subcellular localization annotation: CTP_CleavageSite=53; ConfidenceScore=5.52e-01
MKAGPGQKKPNRRARCAQLPSGYKHSSTFAQTSGTGGTFGKRSGRRFAFPIMTASKKGPGKGTPQKGSFFAKETGPEPPLLIRGLKAGPSEGFNSRLRALGLRARYWSEAGPRRVHSRLRRRARDDPGYVRYTTKAQAMLPSHFAAPLTGLTKGQRRLRHSDCCATQQNEADSSQGSDSGSAPEDDELRLARPQGSDSGSAPEDDELRLARPQGSDSALASVDGLRLARPRDSDSTSASEDRLDLDLGGASTSPNPGLGPTTSEEAPSLPYPKLTQAMGNKTGVPSGSPR

SEQ ID NO: 49478 - protein, 235 aa, Zea mays
  Coding DNA Sequence Number=SeqID_6103
  Subcellular localization annotation: CTP_CleavageSite=67; ConfidenceScore=5.25e-01
MHRVFPPSEPPDVGHSQFFRLVIGGTQLHGSWYLSAIVRLQGFSSGSPAASPRRRSPKTVTTSSVVRRSEPGCDLGPALSFEDLHHPGWGGGRAEPELYLSRGFVGHLLPQHSRERALTGLAGGSDFDNAGLVGGERRQLQRVGLAGSAGSGLAPGAPSCRKSSCRATRTGGPPKTSRAARAVFMFWGCPAFAPTASAVGAEVAAAEEVLVADGTSATIRAPGLRLFVLVLAPRA

SEQ ID NO: 49479 - protein, 194 aa, Zea mays
  Coding DNA Sequence Number=SeqID_6104
  Homolog annotation: Hit_ID=A2YTZ6; Match level="QueryCoverage=68%, HitCoverage=82%, E-value=6e-25, Identity=51%"; Hit description =Putative uncharacterized protein
  Pfam annotation: Domain name=LEA_1; Domain location=8-80; Score=42.2; E_value=1.8e-09; Accession=PF03760.6; Description=Late embryogenesis abundant (LEA) group 1
MQAGKTAVEATKEAAANVGASANAGMQKTRAAVQGQVEKATARNASDKVAAEERQRERVRAAELEKQDAVRANAAAKERAIGGAATYQHQHPSQGAPGIGAQQEYGGGRVAPAGGHVEAGVGETRPVARGTGTARPSAAHNPLVGSDFSQARGTGGQYHFDGLLSIKSGRRFRPSGGRFALRNRSRPSSLNIKG

SEQ ID NO: 49480 - protein, 415 aa, Zea mays
  Coding DNA Sequence Number=SeqID_6105
MALLDPHERFQPEVALNLVRNPLGWGVLVFAGRTCVGVSPLSDLTAEEFVFFVSKLPSGRPSSPTSVGCPWRRRSFPLLPPSFGGEDDYQPHEGGQRAKPRLHPSRPNSFGVGSEPCCGSIFLAMMASVPPPMLPPAAERGATVRPPHGRWSRRAQVRRTRSVPCTAGHAVPTPPGGPYKTSYVVEVAAAFLDEVVASAGEPLGASYPRDPTGVEGLVWEAKLCVRTPWMVVLGTRTPVTEWWSVQAQGFLVRDQAKRPHRLRTTPWNGLPLFRADQQARLMRADLTGLAYTDAPVVRKRYSFSHSKIVTLRSAYSRHLEGSFLVGGALQSPSRCLNPWGVQKGFRGKVPLGRLILEVPFSYGHLAVIDLFFARSVTRWGAVLGRLLTPLADAFREVNDLTTLRDAVATVGVYRA

SEQ ID NO: 49481 - protein, 351 aa, Zea mays
  Coding DNA Sequence Number=SeqID_6106
  Gene Ontology: Mol. function=hydrolase activity; Cellular component =cellular_component; Biological process=metabolic process
  Homolog annotation: Hit_ID=Q7XXR4; Match level="QueryCoverage=35%, HitCoverage=51%, E-value=6e-44, Identity=76%"; Hit description =Putative uncharacterized protein
MAPCDMVGPSPRSGEGGGSSEVEDESEPWGRARRRPSSEVEVESEPWGRARRRPSSEVEVESEPWGRAKPHPDRWHSSRSSAGGAVFLSGDSCIECSCDPVGWRSDLAKVASPRSLPELGLGRVEEFLQAYGDEREPFIMFDFDHNTEIPWCGPWSLREKRMRTPIGNPPKIPFSQSPLPVPDLVHSHSRNPAAPRLMASCGAGDAASAQPRASISHVIFDMDGLLLDTEGFYTEVQEKILARYDKVFDWSLKAKMMGKKAAESARIFVDECGLNGLLTPEQFLEERESMLQALFPSCTKLPGVSLMNLDAVGVDLVNGTERDCESGMGTERLRPVDFLERNGSGSEENIP

SEQ ID NO: 49482 - protein, 41 aa, Zea mays
  Coding DNA Sequence Number=SeqID_6107
DTLIRDGWFTGGDKDDVYDYGNGPKRYRENLAVRSAMDVPD

SEQ ID NO: 49483 - protein, 274 aa, Zea mays
  Coding DNA Sequence Number=SeqID_6108
MVIRRDDHQPCGGEKQAGLRPLPRPQLQGCSSSGLGRRVHRVGDPLLPPVFGGEGHPPVVRRRRPPAMRGKVNCCCLARVQLSVLHPGDSRAVRRRLLSPVLKRRPPLERLPTAAVVASADETVSATCARGLRLFGFNGWFSSPPPETEVIVALLVQWSPASHREFVIPQAFRCGGCSYPREWSRSPNLQSLCDELEPEAAVSVWTEAESTRKEASSAREHNPCGEPGRGGPSVVLASSFEVEILPLVSPSEAGPGSAEGGNVAEGAVAPPAYV

SEQ ID NO: 49484 - protein, 100 aa, Zea mays
  Coding DNA Sequence Number=SeqID_6109
MAVGEVLEPCVRDNMAVGEVPEPCRSIASGAAGILLTSPCFRRGLRTTDVMDAHGEPSLPVTGSYPGGWHSSRSGASGAVFLSGRSVKGRSDCGHFDLAD

SEQ ID NO: 49485 - protein, 40 aa, Zea mays
  Coding DNA Sequence Number=SeqID_6110
MGLGVCGSLCQVWVRPLGRSARHCGTGGYEIDGFGYDYGA

SEQ ID NO: 49486 - protein, 284 aa, Zea mays
  Coding DNA Sequence Number=SeqID_6111
MTSHGSSDDGNALSHTDGLAREGFPRILWEVLQGAGYTTPPQYAVQQFEKHRVPRCRVRMTLEPHPLQPGWRSLDSESFGYRAEDTIEAIALHGLTTFCGFHPLELSTHPIGLFPAEKEDDPMWKDRVEHAKDIWAIYPGQTAHLTVRCMNALYRLQVMRGEAMSHLMVLLEVTKITLDNREELVVDLSQEMVEKDLQVEQLSTDIQELEELVGTRENTIEVLEDQLINTQQQLAEANEHLDMHHQEADEEADIEGGDEPASSLDTAGSGRPPSPESSVVSFAH

SEQ ID NO: 49487 - protein, 340 aa, Zea mays
  Coding DNA Sequence Number=SeqID_6112
  Gene Ontology: Mol. function=nucleic acid binding; Cellular component= intracellular; Biological process=regulation of transcription
  Homolog annotation: Hit_ID=Q336T7; Match level="QueryCoverage=100%, HitCoverage=100%, E-value=4e-49, Identity=51%"; Hit description=Zinc finger, C2H2 type family protein, expressed
  Pfam annotation: Domain name=zf-C2H2; Domain location=215-244; Score =3.4; E_value=4.9; Accession=PF00096.17; Description=Zinc finger, C2H2 type
  Pfam annotation: Domain name=zf-C2H2; Domain location=270-292; Score =17.4; E_value=0.053; Accession=PF00096.17; Description=Zinc finger, C2H2 type
  Pfam annotation: Domain name=zf-C2H2; Domain location=4-26; Score =13.4; E_value=0.4; Accession=PF00096.17; Description=Zinc finger, C2H2 type
  Pfam module annotation: Pfam domain module=zf-C2H2::zf-C2H2::zf-C2H2; Domain location=215-244::270-292::4-26
MDRHTCKLCFRRFHNGRALGGHMRSHVMAASSAAAYYSPPPLSLASTSSTEMDDDADPAPQKPPTPCVAREEGAKKAFCFPELSGGGRAARGESSVVQDGESDTESSPRFAVSRRRSKRARRRAPPPAASDPEHPASSVSDATPEEDVAMSLVMLSRDSWTRRSRPGPGPGPDPRWGPASSGADRSKDGGVRSFVGADDEADREHGDVARPRGRHRCGVCRKVFRSYQALGGHRASVKKGKGGCVPVPVPPSAAAPSPKARRGQTGPAVHECPFCSRVFESGQALGGHKRAHVAHGAPAPWTPARCGDSSGSIDLNVPAATDDDFELSAVYDAEFGSARQ

SEQ ID NO: 49488 - protein, 66 aa, Zea mays
  Coding DNA Sequence Number=SeqID_6113
MAQAHAWNGPYTVPGSLGPTKSSVHAFSNAHRDTLIRDGWFTGGDKDDVYDYGNGKEREEGIEADL

SEQ ID NO: 49489 - protein, 143 aa, Zea mays
  Coding DNA Sequence Number=SeqID_6114
MTVVVVVPQGEEYHVVAAVEGHELETSEAEHRSGLKRLLKTTHLELNGKLYANVSGREVPKPCVHANVAVREVLEPCVRDNVAVGEVPEPCRSTAGGAAGILLTSPCFRRGLRTTDVMDARGEPSLPVTGVSQMGRWSYSLVA

SEQ ID NO: 49490 - protein, 184 aa, Zea mays
  Coding DNA Sequence Number=SeqID_6115
  Gene Ontology: Mol. function=FMN binding; Biological process =pyridoxine biosynthetic process
  Homolog annotation: Hit_ID=A2XBR4; Match level="QueryCoverage=46%, HitCoverage=33%, E-value=4e-20, Identity=58%"; Hit description =Putative uncharacterized protein
MPEKTRVLDARQVFDGRWFSGGVVYTAVPFYKRVLMVEGERLANVQTAVEVVEHVVEVTEKLAADAASSLLENGSLHKVAVEVECVAEAVDKDAHKVEAVIDKHKEKAWFSSSVKSRLQYLGPQPGIPVLDDEHVKGVHLDPLAGPVDAFCLLVLDPEKGVLDKESLCLKIGGYKKLEWLSEGF

SEQ ID NO: 49491 - protein, 27 aa, Zea mays
  Coding DNA Sequence Number=SeqID_6116
MVDSLPIVAIKSLKVSDFQGTQSGISS

SEQ ID NO: 49492 - protein, 43 aa, Zea mays
  Coding DNA Sequence Number=SeqID_6117
MAPPCGVFAPPCLFAEEEPVTEDPGEQQVEVAEQELIEGKLCP

SEQ ID NO: 49493 - protein, 43 aa, Zea mays
  Coding DNA Sequence Number=SeqID_6118
MAPSCGVFAPPCLFAEEEPVTEDPGEQQVEVAEQELIEGKLCP

SEQ ID NO: 49494 - protein, 92 aa, Zea mays
  Coding DNA Sequence Number=SeqID_6119
  Subcellular localization annotation: CTP_CleavageSite=57; ConfidenceScore=5.05e-01
MANIAVSSRIRAWPGFDAAIGLASWGRAYHYVWASSGTPSGSHHVWSSSFRPTVTAPAMTDCNDIAPFIIANRPLIWNPGAMIANRFDVVAI

SEQ ID NO: 49495 - protein, 237 aa, Zea mays
  Coding DNA Sequence Number=SeqID_6120
  Subcellular localization annotation: CTP_CleavageSite=56; ConfidenceScore=5.08e-01
VHYPLGARFCHTPPPRFASLPLLVEGRNSRMPPRPPRHPRTRPAHLRKGAIPGNTYAAAPPSSPPPAPTIHKGGTMPPLLSPPRHPCPARARTSRKGAPSPAPVVSAQGPVVSQGRPFPCPRRLRAILGSGVRSGCLASQGPHHARSGSMVGGEDREEQRSRARTTAEQELPQRRRMAPWYWARASVPRMLEFAERAPSSSDASRFHKREISQARLQKYHGVTNLDMTSGGSFIATG

SEQ ID NO: 49496 - protein, 126 aa, Zea mays
  Coding DNA Sequence Number=SeqID_6121
MATRAAWAPRSRVSCAEANQPAWRAAALAAEANTVLRAFRGATPAEPCLRLLKGRDRAGSGHTEKEPKQRYPQILTRSGARPIGPAGRPLGPRSPQAPPRIAPLPTPVPPPPRAPEAPKGRPSQAS

SEQ ID NO: 49497 - protein, 327 aa, Zea mays
  Coding DNA Sequence Number=SeqID_6122
  Gene Ontology: Mol. function=DNA binding; Cellular component=nucleus; Biological process=regulation of transcription, DNA-dependent
  Homolog annotation: Hit_ID=Q8LMR9; Match level="QueryCoverage=100%, HitCoverage=100%, E-value=2e-71, Identity=51%"; Hit description =Putative RAV-like B3 domain DNA binding protein
  Pfam annotation: Domain name=B3; Domain location=37-145; Score=111.0; E_value=3.5e-30; Accession=PF02362.12; Description=B3 DNA binding domain
MEFTAPPPATRSGGGEERAAAEHHQQQQQATVEKEHMFDKVVTPSDVGKLNRLVIPKQHAERYFPLDAAANDKGLLLSFEDRAGKPWRFRYSYWNSSQSYVMTKGWSRFVKEKRLDAGDTVSFGRGVGEAARGRLFIDWRRRPDPPVVHHQYHHHRLPLPSAVVPYAPWAAAAHAHHHHYPAAGVGAARTTTTTTTTVLHHLPPSPSPLYLDTRRRHVGYDAYGAGTRQLLFYRPHQQPSTTVMLDSVPVRLPPTPGQHAEPPPPAVASSASKRVRLFGVNLDCAAAAGSEEENVGGWRTSAPPTQQASSSSSYSSGKARCSLNLDL

SEQ ID NO: 49498 - protein, 1224 aa, Zea mays
  Coding DNA Sequence Number=SeqID_6123
  Gene Ontology: Mol. function=ATP-dependent helicase activity; Cellular component=intracellular; Biological process=RNA-mediated gene silencing
  Homolog annotation: Hit_ID=A7PXV4; Match level="QueryCoverage=99%, HitCoverage=70%, E-value=0.0, Identity=70%"; Hit description =Chromosome chr15 scaffold_37, whole genome shotgun sequence
  Pfam annotation: Domain name=Helicase_C; Domain location=147-214; Score=29.2; E_value=1.6e-05; Accession=PF00271.22; Description =Helicase conserved C-terminal domain
  Pfam annotation: Domain name=PAZ; Domain location=534-673; Score =95.0; E_value=2.4e-25; Accession=PF02170.13; Description=PAZ domain
  Pfam annotation: Domain name=Ribonuclease_3; Domain location=707-854; Score=144.2; E_value=3.7e-40; Accession=PF00636.17; Description =RNase3 domain
  Pfam annotation: Domain name=Ribonuclease_3; Domain location=929 -1033; Score=144.8; E_value=2.4e-40; Accession=PF00636.17; Description=RNase3 domain
  Pfam annotation: Domain name=dsRNA_bind; Domain location=247-320; Score=-10.2; E_value=0.022; Accession=PF03368.5; Description=Double stranded RNA binding domain
  Pfam annotation: Domain name=dsrm; Domain location=1057-1117; Score =42.9; E_value=1.1e-09; Accession=PF00035.16; Description=Double -stranded RNA binding motif
  Pfam annotation: Domain name=dsrm; Domain location=1141-1213; Score =42.7; E_value=1.3e-09; Accession=PF00035.16; Description=Double -stranded RNA binding motif
  Pfam module annotation: Pfam domain module=Helicase_C::PAZ::Ribonuclea se_3::Ribonuclease_3::dsRNA_bind::dsrm::dsrm; Domain location=147 -214::534-673::707-854::929-1033::247-320::1057-1117::1141-1213
DELRLVYGVSERTESDGAANLIQKLRAINYALGELGQWCAYKVALSFLTALQNDERANYQVDVKFQESYLRKVVDLLHCQLTEGAAMKSDSNDVEMHNSENPKPNELEEGELPDSHGEHVDEVIGAAVADGKVTPRVQALIKILLKYQHTEDFRAIIFVERVVTALVLPKVTLLVATSVAEEGLDIRQCNVVIRFDLAKTVLAYIQSRGRARKPGSDYILMLERGNMSHEAFLRNARNSEETLRKEAIERTDLSHLDGTSMLSPVDISPDSMYQVESTGAVVSLNSAVGLAVCLAACKKLHEMGAFTDMLLPDRGSGEGEKTEQNDEGDPLPGTARHREFFPEGVAEILHGEWILSGRDGYQSSQFIKLYLYSVNCVNIGTSKDPFVTQLSNFALIFGNELDAELILLKSFHVRLMSIVLDVDVDPSTTPWDPAKAYLFVPVGAEKCMDLLREIDWTLVNSIVNSDAWNNPLQRARPDVYLGTNERTLGGDRREYGFGKLRHGTAFGQKAHPTYGIRGAIAEFDVVKASGLVPGRGWGHFNDYQNKGKLFMADSCWDAKDLAGMVVTAAHSGKRFYVDSICYNMNAENSFPRKEGYLGPLEYSSFADYYKQKYGVELVYKKQPLIRARGVSYCKNLLSPRFEHSEASNGEFSENLDKTYYRLPSIMRRVESMLLAIQLKDIIGYPVPANKILEALTAASCQETFCYERAELLGDAYLKWVVSRFLFLKYPQKHEGQLTRMRQQMVSNMILYQYALNKNLQSYIQADRFAPSRWAAPGVLPVFDEETRDSEPSIFDEEFTPSSELQKNLYDDYDGDSMQEDGEIEGDSSCYRVLSSKTLADVVEALIGVYYVAGGKIATNHLMKWIGINAELDPQEIPSSKPYNIPESIIKSINFDTLEGALGIKFQNKGLLVEAITHASRPSSGVSCYQRLEFVGDAVLDHLITKHLFFTYTDLPPGRLTDLRAAAVNNENFARVAVKHKLHVHLRHGSSALETQEELSKPGFNSFGLGDCKAPKVLGDIFESIAGAIFLDSGCATSVVWKPLLDPMVTPDTLPMHPVRELQERCQQQAEGLEYKASRTGNVATVEVLVDGIQIGVAQNPQKKMAQKLAARNALVVLKEKETAAKKDTEKDGEKKNGSQFTRQTLNDICLRRQWPMPQYRCINEGGPAHAKRFVYAVRVNTSDSGWTDECIGEPMPSVKKAKDSAAVLLLELLNRNYRGKPDGK

SEQ ID NO: 49499 - protein, 165 aa, Zea mays
  Coding DNA Sequence Number=SeqID_6124
MNSRLPKRRHCPGLERLLETAHLELDGKLFVNTQQGPYLVRQLSAFRDRGVPRADELGEVEAPPKLRSSLSSVAEAESEPLVRRGGGRRLGPGRSPSPGVGRSGVRRLPGLSPSPSPGSGGAEFAVFRGLSPSPSPGSGGAEFAVFPGLSPSPSPGSGGAEFAVF

SEQ ID NO: 49500 - protein, 110 aa, Zea mays
  Coding DNA Sequence Number=SeqID_6125
MVSPVSCKRVIRVDVRALFVGGRLGAQRHAQKYLRQLARRLLDAWAWVPKLACQKSEKRVRLARLHAACMAARPFCPLVWAKMGVASSESQGRALERVGEDSARGAWGRT

SEQ ID NO: 49501 - protein, 446 aa, Zea mays
  Coding DNA Sequence Number=SeqID_6126
MGNTRSLSALSSEERNFAEVGTFQPSFGFKDFHQAARPHPLAGGHPRQERGEPGLYLPHGSAGHLFFQLLVVETILQLCGGGVLQPCRGRRTVAAQLGCNIPSSSSLSWRGRERGPASALWSGPRSPVRALVERRTPPSVLTWWQLEGSFPTVEAVSAAYGPTSGSLALMSSSRPLSGDANESLPVAASVLGPWLLLQRSLASRPELVAPQAPRCGGCSYPRGRNRSYVCNGTLSAGVYSLWLSGPEHESLGSFGLAARGFSCLVKGNPRPLFDEPKPEAAVSARTEAELARKEDFRSLAEPSTGGSDAGVELPRPRAGLMSSGDSWLRLWGGRPSRLLGPDSWRRPWRRWPGRGADVVLRSGDPPTALPSEARSDFAEGVVDAEGADAPPPSRIVCPSESYFSRKVMSEKVMSEVSVSRRCRSPSARSALAAYVYSVVFRIPLSK

SEQ ID NO: 49502 - protein, 123 aa, Zea mays
  Coding DNA Sequence Number=SeqID_6127
MQVACDRTKGAHPFDFNASSMVAQAHTSCNWCTGCYVQETAPPLAPLSCLLDCGTSTATRGNPAHDPTVPTRHIGHGTGGTFGGRSRRCFASAVMTASKKGPGKGIPRKGSFSVKEAGPEPPY

SEQ ID NO: 49503 - protein, 54 aa, Zea mays
  Coding DNA Sequence Number=SeqID_6128
MAPSSASFCSSAVTNMLAEAPAREDASAMLSDSGSSGLAVVSSDMWAVVNDQFN

SEQ ID NO: 49504 - protein, 310 aa, Zea mays
  Coding DNA Sequence Number=SeqID_6129
  Homolog annotation: Hit_ID=A7QSZ9; Match level="QueryCoverage=35%, HitCoverage=13%, E-value=8e-15, Identity=39%"; Hit description =Chromosome chr14 scaffold_164, whole genome shotgun sequence
  Subcellular localization annotation: CTP_CleavageSite=7; ConfidenceScore=5.18e-01
MQLPRVVAALASRTKPSRGASTCRLPQQPLSCVGRHALWLDTRNQAHIVRRVTHSRTPELMLADAVGPGTRDHQPALSRATGRRRHTTKREEGLADAKPAGCTALPVHLTERLDALLHPCSFPTPKQAPPLEDHHLHGADPQVGKCNSIESLNTAIVSGKTENGNNGYISTPPETKASIRSLSSYSLLDGHVDGMLSPNSASHKPETTNNSVLSNAASTDVQNGCLTTVDSGQQEASHSHSSVEFTQYFQEGYCKISELDDCRELTEAVTDADSSSSHCEREKPEEDGDNDDLLGGVFAFSEEGSSHLFI

SEQ ID NO: 49505 - protein, 444 aa, Zea mays
  Coding DNA Sequence Number=SeqID_6130
  Subcellular localization annotation: CTP_CleavageSite=40; ConfidenceScore=5.07e-01
MKIPEAKRWLKGTNSHRVAFLQRQGGRIAGVPHPGARKPSWAESSPTRSKVLPVRRGGWVPRVIQAGPEQKKPNRRARCMQPPSGYERSSTFAQTSGRKGGQPCRRHATAPSGRAPPTSNAPSVGAHAHASCNRRAGRHVQATAPPLAPLPRLLDCGTSTATRGNPAYDPAVPARHDGRYGQKWAGSNGRRQAGRSSGHVVSQAYVPSRGSERTLSHGAKTARPCSVPRTTRARATATSRTTRPVALTPRRDRRRLRQEKQATLRLRHNDRFQREGQRRLRRSDCCATRQSEADRQPGPASSTKGNSASPDPGLGLGLSPGRRRTPLCPTQGSDSGSAPEDGELRSARPRARTRAQPRKTTNSAPPDSGLRLGLSPGRRRTPLRPTQGSDSGLAPKDAPKDDELRFARPQGSDSALASADGLRLARPRGSDSTSTSEEPPHRPT

SEQ ID NO: 49506 - protein, 438 aa, Zea mays
  Coding DNA Sequence Number=SeqID_6131
  Gene Ontology: Mol. function=aspartic-type endopeptidase activity; Biological process=proteolysis
  Homolog annotation: Hit_ID=A2Y4I4; Match level="QueryCoverage=92%, HitCoverage=92%, E-value=1e-150, Identity=68%"; Hit description =Putative uncharacterized protein
MARHPLAAAVLFLCLLSVCRAAGAGAGAAGKGKPSAVLLPVSKDGATQQYVTGFRQRTPLVPVKAVLDLAGATLWVDCEAGYASATYSRVPCGSSLCRLSRSAACATSCSGAPSPSCLNDTCGGFPENTVTQVSTSGNVITDVLALPTTFRPAPGPLATAPAFLFTCGATFLTQGLAAGAAGMASLSRSRFALPTQLASTFRFSRKFALCLPPAAAAGVVVFGDAPYAFQPGVVLSDTSLSYTPLLVNPVSTAGVSTRHDKSDEYFVGVTGIKVNGRAVPLNATLLAIDRKGVGGTKLSTVAPYTVLQSSIYKAVTDAFAAETAMIPRAPPLAPFKLCYDGSKVGSTRVGPAVPTIELVLGNEATSWVVFGANSMVATEGGALCLGVVDGGKAPRTSVVIGGHMMEDNLLQFDLEASRLGFSSSLLFRQTNCNNFHLG

SEQ ID NO: 49507 - protein, 100 aa, Zea mays
  Coding DNA Sequence Number=SeqID_6132
MPSGGKPKEKVPSREKHKGKKEESQGSSRSHKMKDDNKERMRMNISEIGNEDYDPDEVAQIIHRNPSHNGITYLFVYGRIQQGEWVENRQGDLGHTQDNK

SEQ ID NO: 49508 - protein, 188 aa, Zea mays
  Coding DNA Sequence Number=SeqID_6133
RGGEKGGGAYRRRDCSGEVVEDEGEVAGITTGGPRDAREVMSERNWAETHWIARSTRGGGRPKSGEVDLGPPVKSGRVRGLGKLHGLLAELAEALACPEDGWRGLATVAEALAAMAGGIELAGAKGKWLAGEGECGAKRAAVEHVFPLPLPLFKRRLGANLREFGQDHCKGFVHQTKLCLLCMDDVRF

SEQ ID NO: 49509 - protein, 111 aa, Zea mays
  Coding DNA Sequence Number=SeqID_6134
  Gene Ontology: Mol. function=kinase activity; Cellular component =ornithine carbamoyltransferase complex; Biological process=amino acid metabolic process
  Homolog annotation: Hit_ID=Q6QP54; Match level="QueryCoverage=81%, HitCoverage=28%, E-value=6e-13, Identity=47%"; Hit description =Putative kinase
MAPPVDVAGLRPRLGDVEAPPKPRSSPSSVAEVESEPLGWARRRPLAEARAESEPWGRAKRTRVRALGRAERSSSSSGAEPKSEPWVGRSGASYGRSVERRSDGGHFGSVG

SEQ ID NO: 49510 - protein, 303 aa, Zea mays
  Coding DNA Sequence Number=SeqID_6135
MVTSSLTAGESKPGRDFCPSLSLKDFHHQGWGGDCRVPGSRARVASEPLSAPASATAAGRGSSADEIARAAHGPTSNSMAFCPSLPHEFGHGRGPPGSSIRPEVIVAAVRPPKAEVVDVAAAGAGDGAPFVGLLLLRRPPPSSGVESLGSVSLVVRGFPCLVRGNPRPLFDEPRPGVAVPARTEAELARKEDLVGRSLAGSFVSGIDAGIDLPRPRVGLMSSEDSWPRPRGDRPSRLLGPDSQGRPWRRWPGLGDDVVIQSGDPWTVSPSEARSDLAEGVVDAEGAAAPFKRQDLSLQGRIIL

SEQ ID NO: 49511 - protein, 150 aa, Zea mays
  Coding DNA Sequence Number=SeqID_6136
  Homolog annotation: Hit_ID=Q6QP51; Match level="QueryCoverage=45%, HitCoverage=30%, E-value=8e-28, Identity=89%"; Hit description =Putative growth-regulating factor 1
MELGEADEGFAPAQPADERGRAAGFPALRLSWKTAPLTPAPTVVPATRARLTTASSASDVTGSFASPDLRPRPREEVSASPDPKTRPQPRPREESRLRPTPASASGEVSASPDLELGPTAPQGIHHYPPLASSGYEGTRPASHLARPGNK

SEQ ID NO: 49512 - protein, 245 aa, Zea mays
  Coding DNA Sequence Number=SeqID_6137
MSSEPVTLTPLVKMSLSSEAPVLAVPASPPPAAALAPAPVGASAPTLSHQYIGNAATHGAAPALTATILSLGFPSIAFSLPDAALLRSQLLAPGFPHVPLGTMVGAPVRDCTSPMTAYSQPSAITSSLCAPSDDAAAILAATRAAVTTARQRAQDAARALEQEQAVVDAIERHYTKTCRRLAGKGVSDGSPTSAHHCVDTFKSAPAPASTLRASLHAQAAAFTSIRATITDVLVPDSSQYPRWHD

SEQ ID NO: 49513 - protein, 239 aa, Zea mays
  Coding DNA Sequence Number=SeqID_6138
  Homolog annotation: Hit_ID=A3BAY7; Match level="QueryCoverage=36%, HitCoverage=17%, E-value=1e-09, Identity=40%"; Hit description =Putative uncharacterized protein
MADTLRTLGAPITDESLVFNLLHGLSPRFDRMTPILTRMKPFATFAKVKNDLLLEELRLSATTTSAPAMTLYSVPRATPSDSGGFLFTALRPHRPLELFDSLLAPWGSRPRSQEWSQQPVGRPGHLSGWLLVALPLQPVDWHHPHVARAIRGCCGPSLHHLSAGLLCRSPTGCVLGSPPVSAGAPPSPGASGSARVGDLDQWVGHAVFRQLLFHDDADPTHLGLTGWLTPVPPTTPPRT

SEQ ID NO: 49514 - protein, 237 aa, Zea mays
  Coding DNA Sequence Number=SeqID_6139
MTSHGSSDDGNALTHTDGLAREGFPRILWEVLQGAGYTTPPQYAVQQFEKHTVPRCRVRMTLEPHPLQPGWRSLDSESFGYRAEDTIEAIALHGLTTFCGFHPLELATHPIGLFPAEREDDPMWKDRVEHAKDIWAIYPGQTTHLTVEQLSTDIQELEELVGTRENTIEVLEDQLINTQQQLAEANEHLDMHHQEIQDMEANEDVDIEGGEEPASSVDTAGSWRPPSPESSVASFAH

SEQ ID NO: 49515 - protein, 246 aa, Zea mays
  Coding DNA Sequence Number=SeqID_6140
  Homolog annotation: Hit_ID=A2WX95; Match level="QueryCoverage=92%, HitCoverage=95%, E-value=2e-32, Identity=69%"; Hit description =Putative uncharacterized protein
  Pfam annotation: Domain name=DUF623; Domain location=179-240; Score =88.1; E_value=2.8e-23; Accession=PF04844.4; Description=Protein of unknown function, DUF623
  Subcellular localization annotation: CTP_CleavageSite=45; ConfidenceScore=5.48e-01
MSSGTGTGRSSTRRGRGGSFTLRHQPPVVDIGCNCRRPKLFSVFSSSLFRGGGKPKSPNASSTSTTTAFTATTAGGRSRSGTTTATSTDSSSWGPASFVATNSLYEEPVAAAVAPPQEREQQEARRRRRQQQQRRRRSRRAPAPARHGAVAEEEVDGEEQEQEYGRRVARESVAVAVDSAEPYEDFRESMVQMVVEKEIYAWDDLNDLLHQFLSLNSPRHHPLILHAFADLWTRNGLFCPPSPCQF

SEQ ID NO: 49516 - protein, 50 aa, Zea mays
  Coding DNA Sequence Number=SeqID_6141
MAVGGAAMSMEGERGGLVDGSSRNGVNSVVFLSERSVKGPSDCGHFDLAD

SEQ ID NO: 49517 - protein, 210 aa, Zea mays
  Coding DNA Sequence Number=SeqID_6142
  Pfam annotation: Domain name=PAM2; Domain location=28-45; Score=28.0; E_value=3.4e-05; Accession=PF07145.6; Description=Ataxin-2 C-terminal region
  Subcellular localization annotation: CTP_CleavageSite=32; ConfidenceScore=5.04e-01
MEVPTNQIPAGWFTEPASEQPMGLPRTGSSSRLNAQAPEFVPRGPPPPTPAVVLPPPPQGSAAVLGVVAGLALIVGFVRCDTCEVNNLWKLGSLYCIRCKKELELQLDPIAQGLALPPARHVALCYTPIVHLDPLLTPIKGRTRAFLEKVVGVVFIATNYFTVVALVLPTVDDKVVADGLAVHPGRSASLKSSHLGALETLKLWRLSSEV

SEQ ID NO: 49518 - protein, 122 aa, Zea mays
  Coding DNA Sequence Number=SeqID_6143
MEKGAGTRRWRLVERGSDRLAFINSQTRSLSCDPIPDVETGPKLRKHHRRKPLCEDVDELGGGRDVKNANSSTDDPFADKVKIDLDMFCALVLDGVGGEVDGADVVAEDQGARGQRTVELLE

SEQ ID NO: 49519 - protein, 158 aa, Zea mays
  Coding DNA Sequence Number=SeqID_6144
MNTSNCVSVQLQVLLPRHKAQEEEEEEEEGGAPVRLRPPLNPSMASLCNHANATRSTGARLTDRCSRRHRTIVHTEQSENTVKQATAVAVEYSFGAGGGPSAKRQDSEAHTLCPDPDPAESNVESQTPALASCVDRIRFASAGNSASTGTAYELRGGA

SEQ ID NO: 49520 - protein, 170 aa, Zea mays
  Coding DNA Sequence Number=SeqID_6145
MGDAGFALLVALAAALAALFLVLLGAAVLRHYCWRRRLDAVAPPRRGFVLFDVCFADDRQQRHAVRPPPPSVERGWARRAAGEGRVEHAPGGGGEAAADDDPVVEPDELEIARWRKIFRGPNRSMSTIDEGTEKDGTTPAFSTPSASPDRRDARAPALGMETVAVQLRQA

SEQ ID NO: 49521 - protein, 238 aa, Zea mays
  Coding DNA Sequence Number=SeqID_6146
  Homolog annotation: Hit_ID=A2WX99; Match level="QueryCoverage=60%, HitCoverage=68%, E-value=9e-30, Identity=46%"; Hit description =Putative uncharacterized protein
  Pfam annotation: Domain name=Hin1; Domain location=70-186; Score =79.7; E_value=9.7e-21; Accession=PF07320.4; Description=Harpin -induced protein 1 (Hin1)
MAAYEKQQRPETPLNAAYYGQPIPPPQPPAYYPPPPPPPPVPRRGGRSRCLLGSVVALVVALGVATLVLWLIFRPDNLRAYADSAALSRFDLGSGGDLLQYNLTVDIRVRNPNRFGIRYDYAEAQAFYDGDRFGGSAAMDDGGDALRTYRRESGEGFYYVTVKVYSDLSFRVRVVRRHDFKSKITCVLRLPVPAAGGNANSTTAMTTLGTRRRTQFTSAFRWPPACAGQGRNGNGNGP

SEQ ID NO: 49522 - protein, 348 aa, Zea mays
  Coding DNA Sequence Number=SeqID_6147
  Pfam annotation: Domain name=zf-CCHC; Domain location=233-250; Score =18.5; E_value=0.0024; Accession=PF00098.14; Description=Zinc knuckle
MSRGEEKRPQSHMLLHVMKGRAKRRLPLQVPQAKKRKKKKKVMMMKIINHVHHPPRTKKQSDASERSRIFSLILTGKSKGREDASHVGRRATSGTTVQIWPNPKRRGAKARRSQVLELGMTLQVKMNLQGRAATGPRHDHHGHHTNALWQEKDASTSCFDLIDDSNPCNQVVVENIVVETCSDEVAKENEQLKQEVARLGKALYDKKGKAKQIRPPQDNTTAGVNKPVEGETVICRLCHKEGHKSFQCKAMTGNKQRQKLKQKPTSKISSTYIKKVNKKDATPYLIKKKKNGKVIAIKANKQANKGKGAKRIWVPKEIISTMKSTKKVLDPEREMSEPKVIGKFWRLG

SEQ ID NO: 49523 - protein, 125 aa, Zea mays
  Coding DNA Sequence Number=SeqID_6148
MAPVPSVKLDSGSNFVGSLLYIDNKSTLALTKNLVLHDRSKHIEICFHFIQDYISNKSLETLQARLRLQMHAPTPPELVVPSTTKERGHHLRSPSSTVHTTLHEAGKSLIMLRERHNAYHYAKLR

SEQ ID NO: 49524 - protein, 150 aa, Zea mays
  Coding DNA Sequence Number=SeqID_6149
  Homolog annotation: Hit_ID=A2XS04; Match level="QueryCoverage=57%, HitCoverage=13%, E-value=2e-13, Identity=43%"; Hit description =Putative uncharacterized protein
  Pfam annotation: Domain name=Transposase_23; Domain location=65-136; Score=2.0; E_value=0.00072; Accession=PF03017.5; Description =TNP1ENSPM transposase
MGYLDAPLSPPTDVRPAMKRQEDENEDDEYEELHSHYKCSKIQDKSKPPQSRREALHASRVSASIKVSTDIFLKSTRYPNRKVALGRVLSQDPKTKVGDVALGKEFWMVCVSLVSVRNEPLIRPYNNFQVLGQVGNNPIAWPSSCIEKVN

SEQ ID NO: 49525 - protein, 147 aa, Zea mays
  Coding DNA Sequence Number=SeqID_6150
MLVDYTTVLDGPCVSVEGPTQQGIKSVVEVTPSSGVMSDGSSDPSIRLWLLRKFHAVARTATDVIVSVSGKAASQTPPFAEVRGKSPAAPAPTPGINAPAPRAGDDAVSLDAKPTQAADWGFATKKELELIVVLKLLEIFHVASITS

SEQ ID NO: 49526 - protein, 156 aa, Zea mays
  Coding DNA Sequence Number=SeqID_6151
MAYRLLSAWVHIYTPSVLQLEGLRLSLTVAILAKGRSLYPKGDNASKDKGRCRYPETGVPLTTVRRHGARATISSRVVNSTRPHHVDDSGVATWPGKTISSKVSTVGPDPHGKVPDPCIYRLDLRDGSRTSLCGVRATLSGVLGFWDKEYPCLNQA

SEQ ID NO: 49527 - protein, 107 aa, Zea mays
  Coding DNA Sequence Number=SeqID_6152
MNLNEWHQHEFGVPFVTPEDEAEEFDDSFYTSAPPPYRGPGPIPGDPRLSGSSHPPPPYQGPRPIPGDPRPSSSSHHHPPPPYPSPSSSSGFPSTDDPLGNRHLGNI

SEQ ID NO: 49528 - protein, 231 aa, Zea mays
  Coding DNA Sequence Number=SeqID_6153
  Homolog annotation: Hit_ID=A2Z131; Match level="QueryCoverage=72%, HitCoverage=94%, E-value=9e-59, Identity=62%"; Hit description =Putative uncharacterized protein
MDPSYDGSAPAAGGSADDHGQTWACRRAEIRAAAGGIRRLLDHVGDLTVEESYRASDLVDASAKDWMGENMGSRGAGMGLSDATKFVWDCLNQDDDELMGLLGNQTPLRDCRDFFADLGGTSETGPMTESFIMQETRKLCTLKVSKGSSSTLVKVKENLTTSVAYPFTLIKPSWEEGDVTLQDINQRIRAPPKKAPEILGTSAFSGKPVIGKTRIRTEGGKGSITILRTKG

SEQ ID NO: 49529 - protein, 122 aa, Zea mays
  Coding DNA Sequence Number=SeqID_6154
  Homolog annotation: Hit_ID=Q6JAD6; Match level="QueryCoverage=68%, HitCoverage=11%, E-value=2e-28, Identity=77%"; Hit description =Putative uncharacterized protein
MPRTKNASAPGGGDDEDPRRPFRQVKGKTVYLEQQEGRKKRRTDREARAAAAAVAAAAHAALGDQPQIPSDQIAFRARRLTSRVLLRHGYVGSAGADSEAHLTYLPGLLTLLTISGRYVEEW

SEQ ID NO: 49530 - protein, 404 aa, Zea mays
  Coding DNA Sequence Number=SeqID_6155
MRLRAHPTDWLEVCLGHWVRQPGPVYGAEVTQLDAIGYGAELVNPISTKLQRPDGRDSGQGSVHSRDTISPRPSPASGRNSRPRQIQASPEGLLKQRTHLRLARGLARAGFAEKQPWPDRYANRPYRRSIQCKDRLTPYPDARSSVDKAEEAPPRPTLELGLNLDAGRRTPPRPTPGLRLNLDAGRRTPPRPTPKLGLSLGRHRKLRLTRPPELGLNLDAGRRTPPRPTPELGLNLDLGRRSPPRPTLGARTQPRLRKAVSASPDPRARTQPQPRTTISASPDPRGSDSTSTSDDGLRLARPPGPDSASTSEEPPPRPTSGSDPTTSQGAIITLLLASSGYGEQDRRPIWFAPVNKIMMAPRVLHDDGGSLPLTEARRRQQGSDSPDSCTSTGLKRSSDGHDIT

SEQ ID NO: 49531 - protein, 158 aa, Zea mays
  Coding DNA Sequence Number=SeqID_6156
MAHRTVRCATGAPTVRQRCANGHFQRLVLTESRWTHGAPDSDQSTVRCTPDSPVRCPMLSTGKVTGQTRMLLFRHAGKTSSIPLPAGGLTAAIVVVTRRRKEYHVVAAVEGHELKTPETKHRPGLERLLETTHLELDGKLFVNTWQSPTWCANCRRFE

SEQ ID NO: 49532 - protein, 219 aa, Zea mays
  Coding DNA Sequence Number=SeqID_6157
MTKPDARKFACAKKETIHLGLTESDHICMRGTRESTEGERGLTGGTGDEDDNGAAALLNPDGWRSCGCLGRVPVRRDRAGREKWEDARDCDAVEGEGRCLREPAAMMGGEGCILGGERSCDVGEGAGLAAKKRRTDCGGRAVRGAGGVAGDSWEIEERLHRRGAGGGGFRVGGGARFVVLEARTGVRVGFATGEARDSRSLRSERLYAELEARRGIRGA

SEQ ID NO: 49533 - protein, 120 aa, Zea mays
  Coding DNA Sequence Number=SeqID_6158
  Gene Ontology: Mol. function=kinase activity; Cellular component =ornithine carbamoyltransferase complex; Biological process=amino acid metabolic process
  Homolog annotation: Hit_ID=Q6QP54; Match level="QueryCoverage=70%, HitCoverage=25%, E-value=5e-12, Identity=52%"; Hit description =Putative kinase
MALPVDVVGPCPRLGEVEAPPRSRSSLSSEVEVESEPPGRTRRSPSAEARAESEPWGRAKRGSSSSGAEPAKRSSLSFGAEPESEPWGRAKRSSSSSGAEPESEPWGRAERSSSSSGAEP

SEQ ID NO: 49534 - protein, 199 aa, Zea mays
  Coding DNA Sequence Number=SeqID_6159
MAERYQLPRSCVPPMIRRKDCGRPPSGGSEGGKTRCIREREDMAAFQGGHPPFKGDSPRLRPQPSRAESSPTHSKVLPLRRGGWVPRVMQAGQGQKKPNRRARDREKGDTPKRILLREGNRPRASLLIRGSKAGPSEGFNGRLRALGFCAHYWSEARWPAPRKGSTAASGHSGSAPTTDQGFVGWPSTGSQSPQTQSEG

SEQ ID NO: 49535 - protein, 129 aa, Zea mays
  Coding DNA Sequence Number=SeqID_6160
MARCGTGCRSQYRLKDLPGSQTGRTVPPFAGNKRKSRIRTHEEGAGTEVSSDTYPLRTKANRACGEAPRASVPTGTTEVCPAAGFGTIPASGARDAEGTVCPGAVATTGGSTSCAAGTGDSSWGTGGSA

SEQ ID NO: 49536 - protein, 257 aa, Zea mays
  Coding DNA Sequence Number=SeqID_6161
  Gene Ontology: Mol. function=kinase activity
  Homolog annotation: Hit_ID=Q6QP54; Match level="QueryCoverage=21%, HitCoverage=19%, E-value=8e-09, Identity=66%"; Hit description =Putative kinase
  Subcellular localization annotation: CTP_CleavageSite=45; ConfidenceScore=5.27e-01
MVAPPPPPAAGKVTGQTRMLLFRYAGKTSPIPPPSGGLTAAVVVVARRRKEYHVVAAVEGHELETPEMEQRPGLERLLETTHLELDGKLFVNTQQAPTWRANFRRFDPGGSLDRRPKVGRGEESSEVEVESEPWGRARRRPSSEVEAESEPWGRARRRPSSEVEAESEPWGRARRRPSSEVEAGAEPQGRARRSFLWRLRLDSAAVSLTLAGGTAVRAGQAALFSCQPTSIGGDFGGLEFTKYMGRGFDLHFLEEDC

SEQ ID NO: 49537 - protein, 213 aa, Zea mays
  Coding DNA Sequence Number=SeqID_6162
  Subcellular localization annotation: CTP_CleavageSite=38; ConfidenceScore=5.35e-01
MAAASALRSSLLLFGPSEQKSSSSLSERAAASHPSAFCCSAGPPIVWGCSYLRRWNRSSVCKGTLSAGVLFIAAVGPEHGSVAVVVEKARKIVSAEELSSVKTCSVRGVTYPSVSYLSQKVMSEVSVSRRRRSPSAWSALTTYVYPEVAVSARTEAELARKEDLVGRSLTRSSTGGTDAGVELSRPQVGLMSSGNGWLRLRGGRPSRLLEPDS

SEQ ID NO: 49538 - protein, 327 aa, Zea mays
  Coding DNA Sequence Number=SeqID_6163
  Gene Ontology: Mol. function=endodeoxyribonuclease activity, producing 5'-phosphomonoesters; Cellular component=nucleus; Biological process=DNA fragmentation during apoptosis
  Homolog annotation: Hit_ID=A2XWP2; Match level="QueryCoverage=66%, HitCoverage=80%, E-value=1e-75, Identity=68%"; Hit description =Putative uncharacterized protein
  Pfam annotation: Domain name=Amidohydro_2; Domain location=15-315; Score=-11.0; E_value=0.0037; Accession=PF04909.5; Description =Amidohydrolase
  Pfam annotation: Domain name=TatD_DNase; Domain location=15-314; Score=242.2; E_value=1.1e-69; Accession=PF01026.12; Description=TatD related DNase
  Pfam module annotation: Pfam domain module=Amidohydro_2::TatD_DNase; Domain location=15-315::15-314
MAQAPARAASAVRLFDAHCHLQDPRIAAVAPALIRAAGASGVARFAVNGTSEKDWHLVKQMAEDHPAVVPCFGLHPWSHHFGRWVPERSPDWMNLLRRFFAETPEAAVGEIGLDKGSHGKTINFGEQVHNNSKLLSQVEVFQRQLELAKELERPVSVHCVRAFGDLLEVLKQTGPFPAGVLLHSYMGSAEMVSALANLGCYFSLSGFLTGMKSTKAKHMLKSIPLDRILLETDAPDALPRLDNVSVSPVHVHSSDADTEKRHMDSESQAANASNESLNHPENIHIVLEYVASLLEMTESELAELSYKNATKLFSYPGSKVQHEPEDI

SEQ ID NO: 49539 - protein, 191 aa, Zea mays
  Coding DNA Sequence Number=SeqID_6164
  Subcellular localization annotation: CTP_CleavageSite=65; ConfidenceScore=5.55e-01
MGSATLAASARSAASVQLPLGVAGGQWPPNRRVQRPEGAKARRLLAACRNRRKRRAPRTEIEMFVGEATRAHSFCSLSFLGAHRLQKGRDASKAVGSSDVSSSEIGLAMSPSLFVAKTGHIIATSETWLCQAGRCRDDDGAGVEAPGRVGVGQRCVKRRRQSKRASRQTGLGGIENIRVEVIDARTGLERI

SEQ ID NO: 49540 - protein, 133 aa, Zea mays
  Coding DNA Sequence Number=SeqID_6165
MEAGATGDGAGGGGSGLRGELGRGSGRAELRRPRGGSGRAGGAPATSGRQWAELGRGRGRAASSGDVGRGSRRRAGAGPGRAGGGEPESWQAAAIEDGGGGVGLERAEDKKRAHREGGLQFFPSSAPRSVAPS

SEQ ID NO: 49541 - protein, 357 aa, Zea mays
  Coding DNA Sequence Number=SeqID_6166
  Gene Ontology: Mol. function=oxidoreductase activity, acting on the CH-CH group of donors; Cellular component=integral to membrane; Biological process=lipid metabolic process
  Homolog annotation: Hit_ID=A2YLH3; Match level="QueryCoverage=54%, HitCoverage=51%, E-value=2e-77, Identity=72%"; Hit description =Putative uncharacterized protein
  Pfam annotation: Domain name=Steroid_dh; Domain location=154-280; Score=5.8; E_value=7.2e-07; Accession=PF02544.7; Description=3-oxo-5- alpha-steroid 4-dehydrogenase
MGEAYSAKPGGEGSRDGIGEVGRDRDGADNSDDGFMSRPNPGDQALDTPVPRCDVPAPTGGGMTTVRGSPFHKNSSSIFMWSVLRRLYETEHVFHYSPSARMHIIGYLTGIFYYVAAPLSLASSCLPETIQYLRYQIAEFIVKGRAKMPDLAIVPSHLLKPLLKLGWCQWIGAIIFIWGSLHQIHCHAILVCIRFCHSTSYLFVANANNIQQQLGSLREHKDSDEYVIPCGDWFSRVSCPHYLAELITNLSFAAVQTHKWYLRKFEDYPRSRYAIIPFKSHNLERSSDYLADNETNGVIVHYTFIVSAFHVINDTCLISWSRFVPTQVLSAPCIISRWHLCKERPKPIAYSKTPEKL

SEQ ID NO: 49542 - protein, 93 aa, Zea mays
  Coding DNA Sequence Number=SeqID_6167
MAAAAAAPPWASLGPNTTPLLDKQLVLELQHNGGVAHGDGDAVNEDDVTKFGVVPRDGHTGVQDVVTKLAGDAAHGDRDVGCQDDVTKVVCGA

SEQ ID NO: 49543 - protein, 157 aa, Zea mays
  Coding DNA Sequence Number=SeqID_6168
  Homolog annotation: Hit_ID=Q339R3; Match level="QueryCoverage=35%, HitCoverage=9%, E-value=5e-07, Identity=47%"; Hit description=Zinc finger family protein, putative, expressed
MARASRSRGAWCLNPRSFLEVPVPSPCIARVPRRESRPAQREEKKKEGSFSRFFCLFCGSFLGAVMRRHGWQLPYHPLQVVAVSVFLALAFAFYVFFAPFVGRNVFQYVVIGLYTPLARCCLMGLAMVAGGLELRKAPNKCGLIMKRVAWQSCVFFW

SEQ ID NO: 49544 - protein, 183 aa, Zea mays
  Coding DNA Sequence Number=SeqID_6169
  Homolog annotation: Hit_ID=Q6ZJE5; Match level="QueryCoverage=100%, HitCoverage=100%, E-value=2e-48, Identity=89%"; Hit description =Putative uncharacterized protein OJ1579_C03.19
MVLVVKQHRCTHSASCVCIKGHLSEDALFLVFRHMNWNPRLIAILSCVCKWFDEVAKQVLWKEFCHARAPKMMLDLHSDPCEHLDQGEEGDIGFFRGIFMSFATSRVKKMLIEKRARFHPRELCPYCKAKLWNMFQENMIPRSASARLGAYDDSVEYFVCLNGHVIGLGTLLPLSDSEEAADE

SEQ ID NO: 49545 - protein, 1272 aa, Zea mays
  Coding DNA Sequence Number=SeqID_6170
  Gene Ontology: Mol. function=phosphoprotein phosphatase activity; Cellular component=nucleus; Biological process=actin cytoskeleton organization and biogenesis
  Homolog annotation: Hit_ID=A3BLT8; Match level="QueryCoverage=91%, HitCoverage=82%, E-value=0.0, Identity=62%"; Hit description =Putative uncharacterized protein
  Pfam annotation: Domain name=FH2; Domain location=862-1155; Score =110.1; E_value=6.9e-30; Accession=PF02181.14; Description=Formin Homology 2 Domain
MVYKQARRDFIQQFFPLNPQPSHLRYLHYITRQGGGSEWPPISRPLILDSIVLHVVPRFDTDGGCRPYLIVHGQDSSPGNKSAKVLYEMPKTKKHLQRYGQAEVPIKLSVSCHVHGDVVLEFIHIGDNIENKETMFRVMFNTAFVQSNILELNRDDIDVAWNVNNQFPRDFRAEVHFSDPVSFKPAATIEEVADDGDETDVASVDTGEEFYEAEEYWHDARKDPATHSIDGGISLNDIAEFDGGATTEERSSLEKHRSDEGVKIAVSQNFGSMNEKVAIAPTSSFENQEGLQQPREVLPNAKLSKNNDQENSDVHDIQVVATSVDSEGHKFGSTGQEDTKGVIAQTLVTTVDLSGSDGIHCQTDEQTKMSEYPDLDYTAFGSPRSLSRTDGDAHMRTKKNEGLQNGDIKIITENTISVDNELVIYEEKTIVVNGNAIQVVKNVVNEESIAAKIGKPITESRTSLDNDNGKIQTAKPSDIANGKLDGCRLESCLETVPTKKTTVHDRIVVLPATGVATEIKAKQEVLVDKQDFGIVLPQSRTVARARSPRLGSDDRGQIPDKAVLSVLKEMVVGNAKMEDQPKLAKPKIMRRWISPKKESDATSVRRPSHPPSRYYSSPAALGIRSISTDGKISVVNDAPLLSLKQPYGSNLTREATSAQSAPSPPQKSLLLGAQSASRSQVTGSTKTCICPSRSSPAPTSTPEQHHLPRHLLLAEEHPHPFPLVEEHLHPHPHHHHLAEEHPHPHLLLAGEHPCPHLLPLAEEHPRPHLLLFHVQDLHHLRLLQVLAVDLHLLHPLQVQVLHLHLLLQERGQELHLPHPHLEVVEEDLYHLVHQRTWGCTPYGISYWGCCLTQVNFEAIALGQSDKGPSSVSEFDVSELESLFPAAVPKSDDSSKSERRKSLGSKPEKVHLSAALTLDQSTLDVDQVENLIKFCPTKEEMELLKNYTGDKQILGKCEQFFLELMKVPRMESKLRVFSFKIQFGSQVADLRRNLDIIDSSCNEMGTDDVDVGVSNAEGSTGNRCDGSGTITSQTTGVGLKEVVLAARSPQLLNFYADLVSLDAASKIQLKMLAEEMQAVSKGLEKVQLEYDASERDGPKLKEFTDNAGSDVQSLSSLFSEVGKKADALIKYFGEDPVRCPFEQVISTLLTFVTTFRKAHEENLKQAELEKKKAEKEAEAEKAKNAQLTGKNRLGNETEALEKKVVEWGEPSVPSGKQGKKADAMIKHFGEDPIRCPFKQVDEDEAAVERSDAVEDVLEESRTSQSFFTPSPPL

SEQ ID NO: 49546 - protein, 1602 aa, Zea mays
  Coding DNA Sequence Number=SeqID_6171
  Gene Ontology: Mol. function=zinc ion binding; Cellular component =intracellular; Biological process=mitotic spindle elongation
  Homolog annotation: Hit_ID=A7PDF6; Match level="QueryCoverage=81%, HitCoverage=80%, E-value=0.0, Identity=50%"; Hit description =Chromosome chr17 scaffold_12, whole genome shotgun sequence
  Subcellular localization annotation: CTP_CleavageSite=69; ConfidenceScore=5.10e-01
MDNDNGDVDDLGSGWFEVKKKHRSSSKYTLQRSSGGSSHKIPNLLSRSGANSDSSRWHDKLQHPSPSINANVGVDGSGSGETTNVHGEGCNDVSTSPSGLNSGLNASASEDRVERLEELAVAEKTSESPENDLADHADPSLPHEPSTCSGSPAKCADLSQHVKCSPKTESVGVLSITPVKFGDFDEVPGLSLPSDSYRDNNTSRGHRHTEDVAHLKNVQKDASELKPETDTCTTIDEASPIMVQGTETPNHDSGLIASVDSVTLSCSKNDHEVPVTSSSVPVASMEGRTLLHDEAPASADFGSETAESKERFRQRLWCFLFENLNRAVDELYLLCELECDMEQINESILVLEEAISDFQELKSRAEHFDNTKKSPGVPKEGMPMAVKADHRRPHALSWEVRRMTSSPHRQEILSSSLEAFQRIQLELACKQAGIAAERFTSSSSEKVLGSSSKLTTASATVRNISLKVESQVKLPDTSVKKIAGEKLSRDAFKSGKSYPQSMPSYSARSRRGSLEPISEIEKHTFKKDRELLENKFDRLKSTDVVKKTTAHLEKEKQITAPWKSMDAWKEKRNWEDILKSPVRSSRVSHSPGVGRKVTDRARVLHDKLMSPEKKKRSALDMKKEAEEKHARALRIRSQLESERVQRLQRTSEKLHRVNEWQAVRSSKLREVMNARHQRGESRHEAYLAQVAKRAGDESTKVNEVRFITSLNEENKKFLLRQKLHDSEMRRAEKLQVIKTKQKEDTAREEAVLERRKFLEAEKMQRLAEIQRKKEEAIFRREEERKASSAAREARAAEQQRRKEIRAKAQQEEAELLAQKLAEKLRESEQRRKYYLEQIRERASMDLRDQPSPFQRRFPSKDCQNRSSSANSGEDSQTTGNSSAADSMVKSSNNAQIKRRIKKIRQRLMALKHEFIEPSIGESTGITHRSGLGAAKAKLSRWLQDLQRLRQARKEGAASIGLIVSDIAKYLEGKDLELHASRQVGLLDFIASALPASHTSKPGACQVTVYLLRLLRVLLSLPANRTYFLVQNLLPPIIPMLSASLENYIKVAASNSGSSNLLSNKTSAETTESSGEVLDGFLWTVAMIVGHVHINGEQLQMQGGLIELIVAYQIIHRLRDLFALYDRPQVEGSPLPSSILFGLNLLSVLTSKPGNFSTIDWESCKCRTLGGNIVQEYEYLSSQDSLGCQSMTLDQFGDAKSPTIYSELAEDSKSCKQHDLSIPVDRKLVDEASKDLLVMAAGLNNSAMQPSDLGITTEKHSGNPSQGDENNTVDSFLEGRKTNNVCALYSSSGKGNEMNLKQPAMLLLSALAETGLVTLPSLLTAVLLQANNNRSSSEQTLAILPSNFEEVATGVLKVLNNMARLDITLLQHMLSRSDLKMEFFHLISFLLSHCMNKWRVPNDQVGLLLLESLLLLGYFSLFHAGNQAVLRWGKSPTILHKVCDLPFVFFSDPELMPILAAALIAVCYGCDQNLSVVQQEISTDMLRCLLKSCQTSGSNSPDSIAVDGSGNNSTESILDIRNSQGDIPTRSSRKIGRPVIGKGVSGGIRFNRNKVQKDGRGTRAIDDGPLKQRAQEAASNFMLHRKIPASFLDRAEEFFCSET

SEQ ID NO: 49547 - protein, 117 aa, Zea mays
  Coding DNA Sequence Number=SeqID_6172
  Homolog annotation: Hit_ID=Q6ZBG7; Match level="QueryCoverage=44%, HitCoverage=19%, E-value=4e-13, Identity=73%"; Hit description =Putative uncharacterized protein P0623F08.43
MRTSKPTPAIWIWSSQKGLTPEGLSPENLRVGWGAAATAGNPSLAGLVESGALVRVSWRQFGPVPAWWLLNFMELEDVWILGTSHLSASSTPSNPTTSSSSSAGAGKDVHPLKCYAA

SEQ ID NO: 49548 - protein, 140 aa, Zea mays
  Coding DNA Sequence Number=SeqID_6173
MVVVPLRWRPLPIGGGKGEGNRAGPVGCLLRKRRDSDTSAAKDVAGTMSQRLSQQMSQAADFSDRVASGVLTADVAAEVERLWGSTRMPSRRSRLRRAKTVLWQRKWPTWRPSRRTPAPTGGGKEGGAQPSQRHLKQRSS

SEQ ID NO: 49549 - protein, 128 aa, Zea mays
  Coding DNA Sequence Number=SeqID_6174
  Gene Ontology: Mol. function=phosphoenolpyruvate carboxylase activity; Cellular component=cytoplasm; Biological process=carbon utilization by fixation of carbon dioxide
  Homolog annotation: Hit_ID=P29193; Match level="QueryCoverage=42%, HitCoverage=5%, E-value=1e-10, Identity=64%"; Hit description =Phosphoenolpyruvate carboxylase, housekeeping isozyme
MVGLCVLVDPTVSVNEAMYNLFKKISSAVIDDGLINKVSKLGSGGTNFMAWDNKLKKGDFVDENLATTESDIKETLKRLMHQLKKYSLEAQQSIEEGDDEAVLRGPPGSEMENPYAHATATDSVGPAY

SEQ ID NO: 49550 - protein, 81 aa, Zea mays
  Coding DNA Sequence Number=SeqID_6175
MGLPLDAQSSGRRLDVDERVKQCRAVAGVLHVLARFVQVLQMQHLRGTLDDMVAGVTWPSTLPPGWTVEWDPASAGEEHEE

SEQ ID NO: 49551 - protein, 277 aa, Zea mays
  Coding DNA Sequence Number=SeqID_6176
  Subcellular localization annotation: CTP_CleavageSite=42; ConfidenceScore=5.27e-01
MEPSVPSLQPPTPALPYPWPGNTQDPTAPAYAPSRRPRSTTPSAMVRCLCSIPYLACPYISHGNQPTSSHPPHTASAGDLLPHGGRTPLPAIAFPFSSLLLLPRCRRMELSLWPTPCSEDEARHSLPGLPGMAQHHSPRLQDRGQSLPSLLFAVRRVFNIMPEREMCCCSTAEAHRLLYVLRSPNIDVIHPRIVMGLPLDAQSSGRRLDVDERVEQCRAVAGVLHVLARFVQVLQMQHLRGIHTYREEALRTELLGSRRRLGEGERRAAAAGLQVAN

SEQ ID NO: 49552 - protein, 262 aa, Zea mays
  Coding DNA Sequence Number=SeqID_6177
  Gene Ontology: Mol. function=glutamate-5-semialdehyde dehydrogenase activity; Cellular component=cytoplasm; Biological process=amino acid biosynthetic process
  Homolog annotation: Hit_ID=Q0GH81; Match level="QueryCoverage=88%, HitCoverage=40%, E-value=1e-113, Identity=89%"; Hit description=P5cs
MKQYSLEDNEPWTKVDENIITKISVLAKSIHTLARMEDPINQILKRTEVSENLILEKTSCPLGVLLVIFESRPDALVQIASLAIRSGNGLLLKGGKEAMRSNKVLHKVITGAIPSNVGEKLIGLVTSRDEIADLLKLHDVIDLVIPRGSNKLVSQIKASTKIPVLGHADGICHVYIDKSANMNMAKQIVMDAKIDYPAACNAMETLLVHKDLIKAPRLDDLLLSLKTEGVAIFGGPVAHEVLCILEANSFHHKAATPSSGGR

SEQ ID NO: 49553 - protein, 118 aa, Zea mays
  Coding DNA Sequence Number=SeqID_6178
MLGEESQKMKEKEVDNNKKNEVEKPQGNNEKSIDSSHKKNDGKNKRMKKVVYYETDSSTSTSTSTSKDKKGKKVEKKKSNRKKKGEAHIGKEWHSDVSSSDSYNEGLTNRLKQVFSLS

SEQ ID NO: 49554 - protein, 141 aa, Zea mays
  Coding DNA Sequence Number=SeqID_6179
  Homolog annotation: Hit_ID=Q6JAD6; Match level="QueryCoverage=85%, HitCoverage=16%, E-value=3e-11, Identity=38%"; Hit description =Putative uncharacterized protein
  Subcellular localization annotation: CTP_CleavageSite=15; ConfidenceScore=5.44e-01
MTLMLQHTGVSIPPVQSAPPPPLQAPIVPAIQPGPPLPTFGSSSSPLRPVTLVFTSPVIGSISSQPPVPPAPAVTTATVAVSVTSSAPTAPVAQLLSESVPAPASTADPGSETDSDPQLAFALLPRPRPDAPPPPPPSSDV

SEQ ID NO: 49555 - protein, 239 aa, Zea mays
  Coding DNA Sequence Number=SeqID_6180
MLLFRHGGKTPSSPPPPGELTTVVVAVALRGEEYHVVAAVEGHELETPEVEHRPGLKRLLKTTHLELNGKLFVNTQQAPTRRTNYRHFDPEGSLDRRVNLSLCVPSQMGWREMEHKGETRLMLSRARGDKVSGDPRIECACDTVGWKCDLAKVASRQSQLELGLGRAEGTLERTSKDLGKAKVLRRSRKGVHNRKEIKSESAATPSRVSGPVCTKMYAQDASGLRLRRTGYGWKDNEII

SEQ ID NO: 49556 - protein, 194 aa, Zea mays
  Coding DNA Sequence Number=SeqID_6181
MARLVRAQGRARRRLLLRPRPGSGEDAIPPEVEVEAEPWGRARQRPPSKAEVEAEPWGRARRSFLLRPRLNLAIVSLTLAGGTVVGAGRATLFSCQVSGDPRIKCACDTVGWRGDLAKVASRRSLLELGLGRAEGAPTAFGGPRARRNSVRDYSSRPRLGSGEARSRPLGRRSLDLNRAHQSLQLVLMVVTSRV

SEQ ID NO: 49557 - protein, 80 aa, Zea mays
  Coding DNA Sequence Number=SeqID_6182
MVHIVEHHDFLPEDFVVEEEAASSTPRATNFPAPGEASCRRDDEHSAPHDTGALFVNKLDRCAVCWMTLTPSASGLDRTH

SEQ ID NO: 49558 - protein, 153 aa, Zea mays
  Coding DNA Sequence Number=SeqID_6183
MWAQGHNEYELQMFADGEIFLCPDIRDLRIFGAQGKLLVEGMMSTVRRMAQRLRGFRGLTSGSVRWLMSRATSHAAAAGLRLSEERRARPGHVPAPDPYSCWGPPRPGTLPRPGPYSKGPGAHPRDSACLLESSGLRLHTVEEGTPDLGYRQG

SEQ ID NO: 49559 - protein, 95 aa, Zea mays
  Coding DNA Sequence Number=SeqID_6184
MMVQELDYGYIMDITSKMDIAKVILGCVARRQLIKPRTKARKASRYQVHGRRSRRLRNPKPRDVGANKCQSRSSQADLMIYESNIKAQAYEMLQM

SEQ ID NO: 49560 - protein, 239 aa, Zea mays
  Coding DNA Sequence Number=SeqID_6185
  Subcellular localization annotation: CTP_CleavageSite=44; ConfidenceScore=5.19e-01
MAVSTPGQGLGWPGRGSPPRAPRWQAFRPPRWATEQGLGELEPRVGARRASRPAAARRSYWRGGQGVATRSYLAWACLQGPEVGWGQGRPWVLEGEGWSRTFRDGAAAAPLRPGNSPASGNQNACSAIIHRTCPVYTRLSGEPAEQRILRANGHLQAHSMRARSAQKTGVPILAHRTMNRRCPVCTGHPGGPRSQKLQRSESNGIDDVAGAPDMSGVHRTVRHTKEIKSSPNSTQRPSD

SEQ ID NO: 49561 - protein, 297 aa, Zea mays
  Coding DNA Sequence Number=SeqID_6186
  Subcellular localization annotation: CTP_CleavageSite=55; ConfidenceScore=5.13e-01
MPCSSCIHRTLPPSGPPDGVHWYSLERSVSGSSPPVISPLESSCSWWRCRSCLLLAVVRGAQPCEGWRSFAIARLQGFSSCSPAAISRQWSSRGMTTSLVVERSESGCGLPLLSALRMFIIRAGDEGEPSWGPAVCMDWWPASSSSIRGRRAFASLAKEANFGYAGLTDCRRRQPPRARCLGLGGFRRRLRRCLLLPGQGVAARPPHGRRVAPVHRSATSTGFSPRRRPHWRGRTRRRTPRGRRPRSWMVLSSLRRRTGARTSSRVLRQPPPTGAEMAAVVGAEVVAAAYEKSSNFV

SEQ ID NO: 49562 - protein, 136 aa, Zea mays
  Coding DNA Sequence Number=SeqID_6187
  Subcellular localization annotation: CTP_CleavageSite=54; ConfidenceScore=5.46e-01
MEWWSVQAFGYGTSLSGHTGSGPPHGMGSRSLGPAPRLSDLPTFVSGALSCKPSCSIWMSSRQYRWEPYGWTNMTGLWGRTLPGWRTCLGPNPGSPSAFDTGALVFGCGHSCMYLSEAWTRGESRRVSGGRQASAP

SEQ ID NO: 49563 - protein, 427 aa, Zea mays
  Coding DNA Sequence Number=SeqID_6188
  Homolog annotation: Hit_ID=O48967; Match level="QueryCoverage=26%, HitCoverage=24%, E-value=2e-46, Identity=78%"; Hit description =Putative uncharacterized protein
MVGRLGEQSSVALGVRSPRKSISYPSQYSSDFARRVHSSGEVGIQVAPEEWILPALPCILLSLFLSSSAITSSGVPSFSEDAFFRSFSYFRDLISRDRLLRIPLSGRMMSSNVPAPVPPSSGLSLRRFFPGYGRLVVGDDRRLHSPDEEDVGVEWCCCRGSGVLRVSEPSAPDFSETIFVRKAGGCASPKVTAIELAWIVDTPPTWRASCRCFGSDRTPGVAPQGVFRSRTVSTTVAKWFVPIARGTVDKIYRGYLSPTETVPTLFALADKCAKAAEGRAWHSAPQTGAAQSGGLGAIPRDGKKKKKKDRDYHKPQSTALVVAAMAGGQGDRNKRPRPQRGNSGSCPMHPNGRHNAAECHEIIDLTKRVSERREQSSKDGSPPHRRPGKEKVDDGEVAAAERDLGYQSPEGDLKDVFAGGSYSGGDN

SEQ ID NO: 49564 - protein, 75 aa, Zea mays
  Coding DNA Sequence Number=SeqID_6189
MKTHLRIGKECGLSIELLGRELVPRMGILARGSNPLRVCLHRVASPLHRPATAPLAWLHRHPRYNLYIRIMVVDH

SEQ ID NO: 49565 - protein, 773 aa, Zea mays
  Coding DNA Sequence Number=SeqID_6190
  Gene Ontology: Mol. function=protein serine/threonine kinase activity; Cellular component=barrier septum; Biological process =protein amino acid phosphorylation
  Homolog annotation: Hit_ID=A2YL64; Match level="QueryCoverage=93%, HitCoverage=93%, E-value=0.0, Identity=59%"; Hit description =Putative uncharacterized protein
  Pfam annotation: Domain name=Pkinase; Domain location=48-421; Score =174.7; E_value=2.4e-49; Accession=PF00069.16; Description=Protein kinase domain
  Pfam annotation: Domain name=Pkinase_Tyr; Domain location=48-421; Score=-76.6; E_value=1e-07; Accession=PF07714.8; Description=Protein tyrosine kinase
  Pfam module annotation: Pfam domain module=Pkinase::Pkinase_Tyr; Domain location=48-421::48-421
MSRVASLSPSLSGDEVEVEEEDDEGVDGYRKGGYHAVRPGDQFAAGRYVAQRKLGWGNFSTVWLAFDVQSQRYVALKIQKSAPEFAQAALHEIEFLSEITKRDPLNCKCTIQLIDHFKHTGPNGQHICLVFELLGDSLLKLVQYNRYKGIGFDRVRQICKSILVGLDYLHNELGIIHSDLKLENILLVSTIDPSKDPIRSGLKPNLERPEGYPNGEAGLNAIENKLKMRARRVLAKLAEKRKSAVESSRSERSLDGIDLTCKIVDFGNACWADKQFTDFIQTRQYRAPEIILGAGYSFSVDMWSFACIAFELATGEILFTPKEGHGYSEDEDHLALMMELLGKMPKKIATMGTRSKEYFDRHGDLKRIRRLKLSSIERVLVDKYKISESDAREFANFLCPLLDFAPEKRPTALDCLKHPWLKHDEDKTCGSLNNNDAKSIDLVQSTGSITTVDCTNIDLTSKKGSSTGTCDKTVDAKYNTRSITSNATMNTYVQPTSGSFANRLAKNVDVNPNIGSISNRDAKSSDMKAHMGSNTISDAKSSIVKLDTGNITDRNAKPVDIKPNSDNISSRDDKSSNVDTTTSCVVKKDVKHSIRSVVNSYIKNFDAKCNTASTANSDASNSSEIKPSTRIFTSTDNAKCMDIKPISESAKSNDTSAKSNDTINANVKSNTGIVANTDAKSTDEQTNTGSVDSSGDYSADSKQNIGRVAASIQRLESSMSKVQIGKYRIITTYPGTTFLKIEDLAVVENIAVPFMVDALEREELYSDQPQHLF

SEQ ID NO: 49566 - protein, 909 aa, Zea mays
  Coding DNA Sequence Number=SeqID_6191
  Gene Ontology: Mol. function=endoribonuclease activity, producing 5' -phosphomonoesters; Cellular component=endoplasmic reticulum membrane; Biological process=protein amino acid phosphorylation
  Homolog annotation: Hit_ID=Q7XIT1; Match level="QueryCoverage=100%, HitCoverage=99%, E-value=0.0, Identity=60%"; Hit description=OsIre1p
  Pfam annotation: Domain name=Pkinase; Domain location=490-775; Score =183.3; E_value=6.2e-52; Accession=PF00069.16; Description=Protein kinase domain
  Pfam annotation: Domain name=Pkinase_Tyr; Domain location=490-775; Score=22.6; E_value=8.9e-14; Accession=PF07714.8; Description =Protein tyrosine kinase
  Pfam annotation: Domain name=Ribonuc_2-5A; Domain location=780-908; Score=167.0; E_value=4.8e-47; Accession=PF06479.3; Description =Ribonuclease 2-5A
  Pfam module annotation: Pfam domain module=Pkinase::Pkinase _Tyr::Ribonuc_2-5A; Domain location=490-775::490-775::780-908
MRSLRRVLIPLVLLAGLVFRVDDGGGAFLPPPPPALPAPPPRLALNGEAAPEDDGAAVSRSTEIVAAEARSTEFVAPARPKKQSFRELLVRPQPARHEPASLVTDEAKAESSSVLQFWDNGTIQLVDKLSQSPLWEITTGPPLSDQINTAESGLNYLIYPFNENKNMNGTELWEVYNGNTVRLPWKLEEFVARSPYIRDSVVTIGSKVSTVFVVDSDSGEIIYRHSIPAVLNELEGPGIEGTPSKLNARTNYDSDNIMVLVRNDYSLSASDLGKHLFNWTRTSFSVKYNHPDIPCIRSEGLPLALPDSRSANVIVLKEGTPFISIHGSDALEPVQTPRKLPNTAGKSDIVLDDSQNQTYDGARSHVISADSEATETPTRNTYVWLFSFFPIFLVIGYLLSLTSASKSCRQFVIQLIKPFTRDKKSVDIRGRSEGSPKRRKTRKKDGLVNSPETLTASDKECSETGGSTEAPMENSALKDALGGRHIGKLYVSNKEIGRGSNGTVVFEGSYDGRQVAVKRLLRSHNDIAEKETQNLIISDHDPNIVRLYGCDYDSDFVYISLERCHCSLADLIQKHSYLSSGESVSNNEASFSIKSKISNVKGMDVELWTHDGLPSAQLLKLMRDVVAGLVHLHDLGIIHRDLKPQNVLISAGGPIRAKLSDMGISKHLQDDMTSVSHHGTGFGSSGWRAPEQLRHGRQTRAMDLFSLGCLIFYCITKGKHPFGEYYERDVNIANNRFDLFMVDYIPEAVHLISHLLQPNPEARPTAVYVMHHPLFWSPELRLSFLRDTSDRIEKTSETDLINTLESIGSLAFGGKWGEKLDAALVTDMGRYRKYNFGSIRDLLSQFNLSFVSHKLTIDGYKFQGILGSLPEGFDRYFASRFPKLLIEVYKVLWVHCKDEEAFSKYFKGS

SEQ ID NO: 49567 - protein, 296 aa, Zea mays
  Coding DNA Sequence Number=SeqID_6192
  Gene Ontology: Mol. function=ligase activity; Biological process =metabolic process
  Homolog annotation: Hit_ID=Q7FS85; Match level="QueryCoverage=48%, HitCoverage=60%, E-value=2e-42, Identity=57%"; Hit description =Putative 4-coumarate-CoA ligase-like protein
MEATTLTALLKEAAAAFPTRRVVVVPGRLELTHVALDALIDAAAAQLAADAGFLPGHVVAFSFPNTVEEEFEFYLSDSEPCLLVTNVEGNMAAQAATAKLRLAHAATSLHDAVGPVHLAGLPVPALENGSHVGGAAGSLSPGAIALACSLYATSAARPSARGGHFLPPTLGALLDPNDIAFLTNRATAYLHMGKIEYGLYAVSLDHEAVKTWIYPSEGPRAQQGAPPRPTSGLGLSLGLGRRSPPRPTLGLDLGRRSPPRPTLGLGLSLGLKRSLRLARPQPRTDYATGDTSLPYS

SEQ ID NO: 49568 - protein, 118 aa, Zea mays
  Coding DNA Sequence Number=SeqID_6193
MALGKEGNLGTGKDIFAECYCQGTRQRDWQRGPLEGSLPSTCPTDTRQRVLLCRVPTRALGTGTGSGAHWVSLCRGPLERTLGKVELFAECRRWHSAKYPSPLLGAVMVTFLCRVPDK

SEQ ID NO: 49569 - protein, 227 aa, Zea mays
  Coding DNA Sequence Number=SeqID_6194
  Subcellular localization annotation: CTP_CleavageSite=34; ConfidenceScore=5.07e-01
MGEGLRSNGRLTGGSPPPALTATTTTPAPGGRTAAAQASGWALLQSCPHPRRRSRGEDKYKEPEARSADGGGDPVGDGDFSSRLHLGTGARSHQPSGRSPLKSSRTSGAPIPARRCHTSAKAGPPQNTNAALAACGVLGGPSVHTARQPPSGRRGRQGPSRRARYAGGDDARRRPAPRCRSPGRPQGQRAPSPSNVAGEGDPRTRAGGRAPAQPGLHPSEDDEHPRS

SEQ ID NO: 49570 - protein, 187 aa, Zea mays
  Coding DNA Sequence Number=SeqID_6195
QDSAESGSTGLSGGAPDSVRCIRLARAKWPLSGIHRRRTAIIHRTVRCAPDCPVSQRSGRANGQPRNLRRDTWPEPNGLEGGTGLSGVHRTMSGAPNGSQAAQQSTAPFYGRKSGPRPVSGVPPGLSGAASRQKARSAFLDCSQRLLQDEGAIKGTPRRMEEHTKHSYNIPKHQDIDSAPLILCDSN

SEQ ID NO: 49571 - protein, 465 aa, Zea mays
  Coding DNA Sequence Number=SeqID_6196
  Gene Ontology: Mol. function=nucleic acid binding; Cellular component= nucleus; Biological process=neuron development
  Homolog annotation: Hit_ID=Q5VPG5; Match level="QueryCoverage=62%, HitCoverage=86%, E-value=4e-80, Identity=50%"; Hit description =Putative CCR4-associated factor 1
  Pfam annotation: Domain name=CAF1; Domain location=216-443; Score =221.7; E_value=1.7e-63; Accession=PF04857.11; Description=CAF1 family ribonuclease
MKGAHSDSNFYGYKAIKRAQNCIPRKKKLKHARSLCEGVGNTLTSDVEVRPQDDEEEHEQQEVDDGVDEHGREAGLHVHEVDGAVPAGHLQHAARAQEREQRRGDDRRRPVPHRVGCAEPYSVYSVLLQTLTKGGPLRRCPNARDVRLPLPIKPGHHAHVPRSKRLDKAQPPEAMPMYSKSELIHVPPPPCSRPRYVMAPPLVFTSIGASMNAAVRDVWASNFDEELSNLSAVLPRYPCVCVDTEFPGAVHDSNLPRYMRGPRESYELVKRNVDDLNLLQVGIALSGPAGRFPIAWQFNIRGFDPALHPHAPASIAMLREQGMDFAMLNEFGIDPEDFAAGFRRSGLACGWLTWTAFSGSYDFGYLAKALTGGQPLPDTLDGFLALVRRLFGHSVFDVKHLARCCAMRGGLEQVATALGVKRAAGRAHCAGSDSLLTTDVLLLMMHRFFRNVDVLAHAGTIVDLT

SEQ ID NO: 49572 - protein, 408 aa, Zea mays
  Coding DNA Sequence Number=SeqID_6197
  Gene Ontology: Mol. function=transcription factor activity; Cellular component=integral to membrane; Biological process=regulation of transcription, DNA-dependent
  Homolog annotation: Hit_ID=A7R3V4; Match level="QueryCoverage=20%, HitCoverage=33%, E-value=4e-27, Identity=72%"; Hit description =Chromosome undetermined scaffold_574, whole genome shotgun sequence
  Pfam annotation: Domain name=AP2; Domain location=101-157; Score =28.3; E_value=2.7e-05; Accession=PF00847.11; Description=AP2 domain
  Pfam annotation: Domain name=CBF; Domain location=293-400; Score= -29.7; E_value=2.1e-05; Accession=PF03914.8; Description=CBFMak21 family
  Pfam module annotation: Pfam domain module=AP2::CBF; Domain location =101-157::293-400
  Subcellular localization annotation: CTP_CleavageSite=59; ConfidenceScore=5.18e-01
MDLAHQRISSFPRRAPSSIFSPGQPAIVPHRAPRHHTTSLSPNKEETRKKKTSRGGGARGIAGAGGAATGEGGARGGCPSVTTFFRGCWIAFSGNQEREANKEMVVYLVDASPKMFTPTTTQIREPNKRTRLWLGSFATAEEAALAYDEAARRLYGPDAFLNLPHLRASAVSSTAAHQRLRWLAASARGAAAVPAYDLLNLNAQHNIYNLLAHVPLMDFQKESTFDMWSTVGLISVLTLDFWFCTSDEGLSSKGENDSFKVLALIHQNVIPSMSNPSILCDFLTRSYDIGGVISVMALSGLFILMTQHGLEYRKFYEKLYALLTPVVFMAKHRSVFLQDKQLKSHPPKNVESEILCEHIKKEREAAKAGKRPYYLKKSELRERKLMNKYNELKLYDSAIEFVILSIDL

SEQ ID NO: 49573 - protein, 457 aa, Zea mays
  Coding DNA Sequence Number=SeqID_6198
  Gene Ontology: Mol. function=carbohydrate binding; Cellular component= 6-phosphofructo-2-kinase/fructose-2,6-biphosphatase 1 complex; Biological process=fructose 2,6-bisphosphate metabolic process
  Homolog annotation: Hit_ID=Q947C1; Match level="QueryCoverage=100%, HitCoverage=44%, E-value=4e-89, Identity=93%"; Hit description =Fructose-6-phosphate-2-kinase/fructose-2, 6-bisphosphatase
  Pfam annotation: Domain name=6PF2K; Domain location=1-137; Score =125.5; E_value=1.6e-34; Accession=PF01591.9; Description=6 -phosphofructo-2-kinase
  Pfam annotation: Domain name=PGAM; Domain location=139-416; Score =57.4; E_value=4.9e-14; Accession=PF00300.13; Description =Phosphoglycerate mutase family
  Pfam module annotation: Pfam domain module=6PF2K::PGAM; Domain location=1-137::139-416
MEDMIDWMNGGGQVGIFDATNSTRKRRYMLMKMAEGNCKIIFLETICNDPNIIERNIRLKIQQSPDYAEQLDYEAGLEDFKERLINYEKVYEPVGEGSYIKMIDMVKGQDGQLQVNNISGYLPGRIVFFLVNSHLTPRPILLTRHGESLHNVRGRVGGDTVLRILRFMVGVLALLSSGLHVFTSSPPPIIVVMTADRPMHPNYPLWAVAVTIVEGARIRTACRALPGFSDRAPPSPAWIRRSHAANACLARPRSLDPSAAHCLRLPWGPCRETGELYAKKLANFIEKRLKCEKTATIWTSTLQRTILTASPIVGFPKIQWRALDEINSGVCDGMTYEEIKKIMPEEFESRKKDKLRYRYPRGESYLDVIQRFQFPCNYTLTADVIITLRLEPVIIELERQRAPVVVISHQAVLRALYAYFADRPLREVPEIEMPLHTIIEIQMGVTGVEEKRYKLMD

SEQ ID NO: 49574 - protein, 169 aa, Zea mays
  Coding DNA Sequence Number=SeqID_6199
  Subcellular localization annotation: CTP_CleavageSite=74; ConfidenceScore=5.00e-01
MAAPPSAPFFLLLSVAAASLAGAADPYCYFTWTVTYLVHMTTLSLAFPLLHLVASPPLACTLLHLVAPLPLVPRVSTVVRVRADTQCSVKTINKKEVKAHRNAEDNAYILDKVGTKGSICGDVRLTFHARAFGVHATSVRLRVSATTDAMVRLDLTSLVMRAPKDIIGA

SEQ ID NO: 49575 - protein, 84 aa, Zea mays
  Coding DNA Sequence Number=SeqID_6200
MPPKLVPFETLHGGSTIRFLGSVYATGQNIFFFLRDMTREAGQGSGSSERMGGLYMFHIFTSVVSYVVMELSHLVLSYYNMLYQ

SEQ ID NO: 49576 - protein, 297 aa, Zea mays
  Coding DNA Sequence Number=SeqID_6201
  Gene Ontology: Mol. function=hydrolase activity, acting on carbon -nitrogen (but not peptide) bonds; Cellular component=intracellular; Biological process=nitrogen compound metabolic process
  Homolog annotation: Hit_ID=Q2QQ94; Match level="QueryCoverage=82%, HitCoverage=75%, E-value=1e-133, Identity=93%"; Hit description =Hydrolase, carbon-nitrogen family protein, expressed
  Pfam annotation: Domain name=CN_hydrolase; Domain location=24-198; Score=136.9; E_value=5.9e-38; Accession=PF00795.13; Description =Carbon-nitrogen hydrolase
  Subcellular localization annotation: CTP_CleavageSite=33; ConfidenceScore=5.64e-01
MALASLAASLPVAATAAAVRFPFRFRIGRAMASAAAGASPARVAVEAAASGVKFLCFPEVFSFIGSKDGEAMKLAEPLDGPIMQRYCSLAKESSMWLSLGGFQEKGPDDSHQYNTHVLIDDTGKVRSSYRKIHLFDVDVPGNMVYKESRFTAAGDTIVAVDSPFGRLGLTVCYDLRFPELYQILRFKHQAQVLLVPSAFTKITGEAHWEILLRARAIETQCYVIAAAQAGKHNEKRESYGDSIIIDPWGTVIARLPDRLSTGFAVADLDLSKVEAVRTRMPISEHRKFDSDWKPTPL

SEQ ID NO: 49577 - protein, 234 aa, Zea mays
  Coding DNA Sequence Number=SeqID_6202
  Homolog annotation: Hit_ID=UPI0000F34A83; Match level="QueryCoverage =83%, HitCoverage=96%, E-value=4e-14, Identity=37%"; Hit description =UPI0000F34A83 related cluster
  Subcellular localization annotation: CTP_CleavageSite=64; ConfidenceScore=5.48e-01
MANSAPPDPGLGLGLSPGRRRTPLRPDPGLGLGLRPRKTTNSASPNPRGSDSASADDLRLARPRGSDSASADDLRLARPRGSDSASAEDLRLARPRGSDSASADDLRLARPRGSDSASADDLRLARPRGSDSASADDLHLARPRGSDSASADDLRLARPRGSDSASAMEDRLDPGFGGASTSPNLGHRPATSTGSAIITLPRADSGRREQDRATSARTQPFQQLSLRQAPSLLR

SEQ ID NO: 49578 - protein, 483 aa, Zea mays
  Coding DNA Sequence Number=SeqID_6203
MAERPTGERGGQPCRRHATAPSGCTSPTPDTPAWKPRPTRRAIGAPDAACKQLHRLRHHRAFSIAEPIPRLEATQRATQRRQPDTAANAAKGGPAVMTVADAREQRARRQPSSRPIRGQRESPLSRCEDNAPVIRSSNGSRTPNGCPANYSPRRINSAAGQVTLLAGATGDASPSPKQPHQKRLRASLLIRGSKAGPRRVQQPPQIAWALHPLLVRGSKAGPPKGPTAASGYSGSVPITDQGGSDLVTESHQREASSPRTPSPGDRVRQITRSSPETPCSVPIEGNMALSPLLLAERRRRGRLWGCSRKPGSGRTVDSVNIPARELGPRPYTRATASSHEGTTRPAEAIRKALRPRRSETTPPRPRGLHPAGALARTHRNQMQPRKAGPLAKKCDESLQASANTPFEARGLLSRTIIRGTLKTLNSQLVTPISIKLQRPDGARTRAKPRKTANSALPDPGLGLGLSPGRRRTPLRPTQGSDSG

SEQ ID NO: 49579 - protein, 143 aa, Zea mays
  Coding DNA Sequence Number=SeqID_6204
MGKSNKRKREPTPPSEDFGDSEYSEEEFSSESERSPAPVSPPASSDDSDDSQGIAAEVWTYIRAVERSGLEGSDESEYSSDEEDSDGGGEDEDDDDDDDDDGGDGDGSGDGRGSGDDGKGSTKGGSSKGSTKGSGGSRGRASG

SEQ ID NO: 49580 - protein, 32 aa, Zea mays
  Coding DNA Sequence Number=SeqID_6205
MKLSQSSDMDFYQQRKDNSTILQQSMVSLSVP

SEQ ID NO: 49581 - protein, 188 aa, Zea mays
  Coding DNA Sequence Number=SeqID_6206
  Gene Ontology: Mol. function=cysteine-type peptidase activity; Biological process=proteolysis
  Homolog annotation: Hit_ID=Q5NKP7; Match level="QueryCoverage=97%, HitCoverage=55%, E-value=8e-31, Identity=74%"; Hit description =Putative uncharacterized protein 9C20.3c
MRKGFSNILYMTVDALCSRSHLRWLMDKLDHKDMIIRPGPGKELKITKDTMHLILCVPNHGGGKPLGIDEAVAAKKLVGYDLEVGKACSAIKDTLSKIIEKQYDLADNFIVLIDEQCLAYNGGDTTADDIEHNDSGPVFDQTPSSHDETRKCTTRSGSTPHLTELNYVRSLWDLLCSKDIDPSRWEVS

SEQ ID NO: 49582 - protein, 118 aa, Zea mays
  Coding DNA Sequence Number=SeqID_6207
  Homolog annotation: Hit_ID=Q5NKP8; Match level="QueryCoverage=34%, HitCoverage=6%, E-value=3e-07, Identity=70%"; Hit description =Putative uncharacterized protein 9C20.4c
MDELLEVLSRLETDIGVDESCGTSGGDGMHEIQVNSQVNADMNESGGHAQNVDAKKENRVRLASLAGHKRGRPLGSRKKLEVMLLIGMRRQLKKYAVDIDNRYENCIMDKLSDQKSDE

SEQ ID NO: 49583 - protein, 66 aa, Zea mays
  Coding DNA Sequence Number=SeqID_6208
  Subcellular localization annotation: CTP_CleavageSite=31; ConfidenceScore=5.21e-01
MKLWKETSRSSKTTTSSRSGLAATPSRLPVKAAVIYVSFPHFDLLTRNEEENLNYNFFLHAEAGKN

SEQ ID NO: 49584 - protein, 261 aa, Zea mays
  Coding DNA Sequence Number=SeqID_6209
MQVACNCTTETHPFDFDASSMEAQAHTSCNRRAGCYVRKTASPLTPMPRLLDCGTGATTRGNHAHGPTEPTKRIGHESVSRGRRRDGRYGQKWADSNGGSWRAEAAVKSSAGSRPLLEQQGSPLPRREDDAPMFRPSNGSCNGCPANHPSRCINFVVGQVKRATFHLRHDDRVKKGTEKGDTPKGILLREGNGPRALLLIRGSKAGPSEGGSGAALAIPASAKLLTASTYQPENSEPDHAPELRSDYMREQPDRPRHHERH

SEQ ID NO: 49585 - protein, 342 aa, Zea mays
  Coding DNA Sequence Number=SeqID_6210
MMTTSSMVGRSKPGCGLCPALSFKDLHHPCCGGRRAEPELYLSYGPAGHLFLQHSEERALTGLAEGVDFDNAGSVGRKRRLLQRVWLAGLAGSSSASGSTSHRWAECGYLPVVRAAIAPRAPGDRPRRRTPLGRRSCSWFVLPSLRHDAFAWRSVLARPGGLEWGSAGGQVAAVIGAEVVVAGQGFSANKTVVAPPPPRTDLRLFGFDSLSSPLEWGRGRGPCRSSVCPEPLKASLAQLRNPRLLCEELEPEAAVSAWTEAESARKGASSAQKQDQPRSRAAEAMSQADVLRGAAPTSSFEVEILRPCRRPRPGQIPPKVETTPRVLLFPLLMVEPAGTVRL

SEQ ID NO: 49586 - protein, 187 aa, Zea mays
  Coding DNA Sequence Number=SeqID_6211
  Gene Ontology: Mol. function=kinase activity
  Homolog annotation: Hit_ID=Q6QP54; Match level="QueryCoverage=37%, HitCoverage=24%, E-value=2e-09, Identity=56%"; Hit description =Putative kinase
  Subcellular localization annotation: CTP_CleavageSite=37; ConfidenceScore=5.06e-01
MAIGGALEPYRSTVVGADGTLLTSPCFRRGLRTAVVMGARGVSSLLVYRGEPDGTPPEPKVGRGSGSSEVEVEAEPWGRARRRPSSEVEVEAEPWGRARRRPSSEVEVEAEPWGRTRRSPSSEVEAGAKPWGRARQSFLLRLRPDLAIVNLTLAGGTAVGAGQEALFSCQVSQWWGEVTAVTLVLPT

SEQ ID NO: 49587 - protein, 118 aa, Zea mays
  Coding DNA Sequence Number=SeqID_6212
MQDVACGVADGLDLKYYPHGSTGSIGGLIVSPVGEGNPILNIMVNLVAVLNIELDHTLDELGKARVEILELRAEHVERCHQEDGSPVPIRTQHRYRSLLCGHHAYGTPDYRTEIDLEP

SEQ ID NO: 49588 - protein, 144 aa, Zea mays
  Coding DNA Sequence Number=SeqID_6213
MQESLAGPPSQQNPPEGLPTLTTPLLPLPLSEHGWVKEVIKGTTCLGLEIPGANLLFRKPQGLLRKKSETQSNVTGGRRVQSIKLRGLFCESATTKGYGGSPAAGLEIKGHDQLRRFNETMLIQNRRSRDPRPRFYVDEGVYII

SEQ ID NO: 49589 - protein, 201 aa, Zea mays
  Coding DNA Sequence Number=SeqID_6214
MARQTTIEQVWTRAKNEQQQVRDTEASAWEMGEQGKGKGLAGTVSDFIEEKGERKRHQGERKGRPGASWPLMAFIELEWREKEEETEALISNNAEEDERLGTSVSVAGAAPVLGTVGLHSSLAAARGVRGSCRGSSAGGLVGPGAWAAQGRRREGARVVWGTRDAQATTRLGKKARAGPPASERRGGGRKVGVRLGLNGPF

SEQ ID NO: 49590 - protein, 57 aa, Zea mays; identical to SEQ ID NO: 45068
  Coding DNA Sequence Number=SeqID_6215

SEQ ID NO: 49591 - protein, 148 aa, Zea mays
  Coding DNA Sequence Number=SeqID_6216
MGKSKKGGSSSHHSGDKRKREPTPPSEDFGNSEYLEEEFSSESEGSPDYTSPSASSDDSNDSQGIAAEVWTYIRAIERFGLERSDESEVSSGEENSSDSSEEESGGDGDDEGDGDGDGDGDGGKGDGDGGDGKSGSGSSKASGKAPQT

SEQ ID NO: 49592 - protein, 135 aa, Zea mays
  Coding DNA Sequence Number=SeqID_6217
  Gene Ontology: Mol. function=kinase activity; Cellular component =ornithine carbamoyltransferase complex; Biological process=amino acid metabolic process
  Homolog annotation: Hit_ID=Q6QP54; Match level="QueryCoverage=82%, HitCoverage=45%, E-value=2e-11, Identity=38%"; Hit description =Putative kinase
MEPGGGTAVGAVESLLTSSCFRKGAESRRRHRVCGAPSLPIWRSEPDGTPVLFPAARVSSGSGNVEAPPKPRSSLSPVAEVESEPLGRARRSSSSSRAEPKSEPWVGRSGVRHLLGLSPCPSPGSGGAEFAVFRG

SEQ ID NO: 49593 - protein, 119 aa, Zea mays
  Coding DNA Sequence Number=SeqID_6218
MGRPKDATRQGKTPHPGGVKVIQQTARLPSLLVDSMSVLSGALYSPTLPPEASPVHQGYADLGRQAAGGLSRQQILEDPSTIFFMSLGPHVGAQSLCACPPSAIKGEACDVTHTQSQTR

SEQ ID NO: 49594 - protein, 131 aa, Zea mays
  Coding DNA Sequence Number=SeqID_6219
MGCAGVLWKDPCQGHLFRRLHRRRACACGGVADLVFLKGKCALGPFLSILVIECQHKCLSVNLCKVVDKVQIKSKVLETVEIKLKRRWLCSANVCSVWVHRTVRWCTGQCPVRQAGSGELAALGTSSAAYD

SEQ ID NO: 49595 - protein, 125 aa, Zea mays
  Coding DNA Sequence Number=SeqID_6220
  Homolog annotation: Hit_ID=Q9FVG4; Match level="QueryCoverage=53%, HitCoverage=10%, E-value=1e-10, Identity=41%"; Hit description =Transposase DOPA
VDIGLPKASKKHQRITGNVEEPKKMEATRGQKPSDIEVYEEGHSRPDPNNPDQLCNQTIMDRLKMVWRHSPNFDWRHEPVDPSVDTQVVVEKCMDAGTVFVDSLFAFPPPGGGGGSGQSSNHPSG

SEQ ID NO: 49596 - protein, 104 aa, Zea mays
  Coding DNA Sequence Number=SeqID_6221
MSSNRWIPTIGASVFWATRQSGDDHWREVAVAPLAHRTLSGATPDSPVNYSGAASRIPEGEQFGIGVLGAPDTVRWDTGQSGPLYESRGSGSLGASSREWVLVS

SEQ ID NO: 49597 - protein, 162 aa, Zea mays
  Coding DNA Sequence Number=SeqID_6222
  Homolog annotation: Hit_ID=O48967; Match level="QueryCoverage=76%, HitCoverage=26%, E-value=3e-43, Identity=68%"; Hit description =Putative uncharacterized protein
MLEKLATHDVETVTTLFALADKCARAAEGRAWHSAPQIGVAQTGGSSVVSQDGKKKKKNRGHEKPSSAALVVAAATGGRNERNKRPRPQIGNNGSCPVHPNSRYRAAECREIIELAKHVSEQREQTSRDGSPPRRRPSKKGLTASRWPWENGTSGINHPRGS

SEQ ID NO: 49598 - protein, 55 aa, Zea mays
  Coding DNA Sequence Number=SeqID_6223
MYPDYRYPSRGQKRKSATSGKDDASAAQSEPAPKRKKEKGYLKKKSEKLNTMPGN

SEQ ID NO: 49599 - protein, 284 aa, Zea mays
  Coding DNA Sequence Number=SeqID_6224
  Homolog annotation: Hit_ID=Q6J9V9; Match level="QueryCoverage=22%, HitCoverage=33%, E-value=4e-07, Identity=44%"; Hit description =Putative uncharacterized protein
  Subcellular localization annotation: CTP_CleavageSite=60; ConfidenceScore=5.80e-01
MVAFQGGHPPFKGGSPYSRPQPSRAESSPTRSKVFPYGAGAGSHTSCKPAQSRRSQIAVRGAYNRPAVTSDSPLLLRPAGERAGGHAGGMQPRQVGALLRLPTRLAWRPRPTRHTTGAPSASCMQLHRHLRHHRASSTAEPIPRLEATQSTTQRRQTGATVNAAKNGPAVMAVAGGQEQRTGGASGRRSGRRFAFAIMTASEKGPGKGDIPKRILPHEGTRLRASLLIRGSKAGPSEGFDSRLRSRGPYTHYWSEVRRPAPRKGSTTASGYSGSAPTTDQGFEG

SEQ ID NO: 49600 - protein, 97 aa, Zea mays
  Coding DNA Sequence Number=SeqID_6225
  Subcellular localization annotation: CTP_CleavageSite=82; ConfidenceScore=5.42e-01
MEPGGGTAVGVVESLLTSSCFRLSPSPSPGSGGAEFVVFWGRAQVRALGRAERSSSSSGAKPKSEPWVGRSGVRRLPGLSPSPSPGSGGAEFAVFRG

SEQ ID NO: 49601 - protein, 210 aa, Zea mays
  Coding DNA Sequence Number=SeqID_6226
  Gene Ontology: Mol. function=nucleic acid binding; Cellular component= ribonucleoprotein complex; Biological process=ribosome biogenesis and assembly
  Homolog annotation: Hit_ID=Q6ZJR6; Match level="QueryCoverage=93%, HitCoverage=67%, E-value=1e-91, Identity=83%"; Hit description =Putative U3 snoRNP protein IMP4
  Pfam annotation: Domain name=Brix; Domain location=86-210; Score =110.6; E_value=4.8e-30; Accession=PF04427.9; Description=Brix domain
MLRRNIRQRREYLYSKSLEGPQRALFEKKRRIRAALEEGKPIPTELRNEEHDLRRQIDLEDQERQVPKSIVDNEYATATIREPKILLTTSRNPSAPLTQFVKELKVVFPNSQRMNRGGQVISEIVEACRSHDITDLILVHEHRGQPDGLIVSHLPHGPTAYFGLLNVVTRHDIKDRKTMGKMSEAYPHLILDNFSTQVDHTCIVSYAQFF

SEQ ID NO: 49602 - protein, 169 aa, Zea mays
  Coding DNA Sequence Number=SeqID_6227
MGDTRRLSASSLEERNSMGVGTFQPSFDFKDFHHTARLYPSAGASRMFIILAGVEAGAEPELYLSPRSVGRPLLRRSRERALTGPTGGSDFDNAGLVDGGRRQPQRVGLVGLAPGAPSCRKAAAAPCAREDRPRCHALLGRRSCSGAVLPLHRYDASARRSVPHSSGRI

SEQ ID NO: 49603 - protein, 27 aa, Zea mays
  Coding DNA Sequence Number=SeqID_6228
MDSMVFEVAELDGAAMICHANIKRKET

SEQ ID NO: 49604 - protein, 74 aa, Zea mays
  Coding DNA Sequence Number=SeqID_6229
GLLSTRERLRAIAANGQANPTRESVLHMRRDPLVHLEPSVATKELTDGVGPHDSATRDAVRAKQVCPWGQSVSV

SEQ ID NO: 49605 - protein, 80 aa, Zea mays
  Coding DNA Sequence Number=SeqID_6230
MGRLRLRDTGMGQARIGREISGGRGEGEGRGVDHAAPMSPLVTVAAGMRRRGGRGSAGARLRAAGTGRARIGSEISGGRI

SEQ ID NO: 49606 - protein, 511 aa, Zea mays
  Coding DNA Sequence Number=SeqID_6231
  Subcellular localization annotation: CTP_CleavageSite=4; ConfidenceScore=5.06e-01
MAVRQTGGRNPHRGIRISDAPAGGPQSAGVAPSAFVAAPRPLDKGKGAAGSSSTPGGTGRSEEERRRRLRCADGSFILDPPEASEDYWWGRGGRLPSPGHAETRAPPPAAATKAAVAPLPGLLEGPGPQGFLPLCSQGRTSSAPGYCHRDSATGLPCSSWGSGSCGANVKRRRSGGGGPNCSDGYHSLNNGDAVDSIPPPTPEETEVVFGRRLRSGAEPEAAPVPLPRLEERTKAVSRQFASKRSELERDRMDYKKDLQKVYARELEVGQKEKRLAKKVEALNQREEVVTKLQAKLSAFNEILKEQRVQQTAAVESLQKLQQELEGKARDVALTEEKLKVKGESLDRREADLARREKDLAFKEEMLERREKLLAEHELEAEEKERTLEERRIATWVGKASTTLVPLEVSPIPVSELPTSISDALPVLDSAADHLRRLDQILGARLEAEGGRLCRAVIEYILTCFRSHDPSIFLEPVIAGPVADTEDAAREAVQDVVELVVERFQRDPADDE

SEQ ID NO: 49607 - protein, 1444 aa, Zea mays
  Coding DNA Sequence Number=SeqID_6232
  Gene Ontology: Mol. function=nucleoside-triphosphatase activity; Cellular component=integral to membrane; Biological process=transport
  Homolog annotation: Hit_ID=A2WLB7; Match level="QueryCoverage=100%, HitCoverage=100%, E-value=0.0, Identity=79%"; Hit description =Putative uncharacterized protein
  Pfam annotation: Domain name=ABC2_membrane; Domain location=1144 -1381; Score=191.2; E_value=2.6e-54; Accession=PF01061.15; Description=ABC-2 type transporter
  Pfam annotation: Domain name=ABC2_membrane; Domain location=498-711; Score=207.7; E_value=2.8e-59; Accession=PF01061.15; Description=ABC -2 type transporter
  Pfam annotation: Domain name=ABC_tran; Domain location=169-392; Score= 70.6; E_value=5.1e-18; Accession=PF00005.18; Description=ABC transporter
  Pfam annotation: Domain name=ABC_tran; Domain location=903-1093; Score=99.2; E_value=1.2e-26; Accession=PF00005.18; Description=ABC transporter
  Pfam annotation: Domain name=PDR_assoc; Domain location=716-780; Score=115.8; E_value=1.3e-31; Accession=PF08370.2; Description=Plant PDR ABC transporter associated
  Pfam module annotation: Pfam domain module=ABC2_membrane::ABC2 _membrane::ABC_tran::ABC_tran::PDR_assoc; Domain location=1144 -1381::498-711::169-392::903-1093::716-780
MWAAEAAFSRSGSWREAEDEREALRWAALQRLPTVTRARRGLLRSPAPDGAAAVEGDDVLCEVDVAGLSSGDRTALVDRLVADSGDSEHFFRRIRSRFDAVQIEFPKIEVRYEDVTVDAYVHVGSRALPTIPNFICNMTEAFLRHLRIYRGGRVKLPILDNISGVIRPSRMTLLLGPPSSGKTTLLLALAGRLGPGLKMSGNITYNGHHLNEFVPQRTSAYVSQQDWHASEMTVRETLEFAGRCQGVGIKYDMLVELLRREKNAGIKPDEDLDVFMKALALEGKQTSLVAEYIMKILGLDVCADTIVGDEMIKGISGGQKKRLTTGELLVGSARVLFMDEISTGLDSATTYQIIKYLRNSTHALDGTTIISLLQPAPETYELFDDVILIAEGQIVYQGPREYAVDFFGAMGFRCPERKNVADFLQEVHTSSLLNSIPTGISRGFTFLSSQVLSKKDQQQYWCHYDYPYQFVSVSKFAEAFKTFIIALCTSSYGVKRLELLKSNYQWQRLLMKRNSFIYVFKFIQLLLVALITMTVFFRSTMHHDSVDDGIIYLGALYFAIVMILFNGFTEVSMLVTKLPVLYKHRDLHFYPPWAYTLPSWLLSIPTSLYESGMWVLVTYYVVGYDPQFTRFLGQFLLLFFLHQTSLALFRVMASLGRNMIVANTFGSFALLVVMILGGFIITKESIPVWWIWGYWVSPMMYAQNAISVNEFHGHSWNKQFANQNITMGEAILTGYGLFKEKYWFWIGVGALFGYAIILNILFTMFLTLLNPIGNLQAVVAKDQVRHRDSRRKNDRVALELRSYLHSNSLSGNSRRMNYFSVTPTSQKQFSVQETAFAMNIDCVPPKGGNLKEQKGMVLPFQPLSMCFRNINYYVDVPVELKKQGVAEDRLQLLVDVTGAFRPGILTALVGVSGAGKTTLMDVLAGRKTGGLIEGSITISGYPKNQETFTRISGYCEQNDVHSPCLTVIESLLYSACLRLPSHVDADTQRAFVEEVMELVELNPLSGALVGLPGVNGLSTEQRKRLTIAVELVANPSIVFMDEPTSGLDARSAAIVMRTVRNIVNTGRTIVCTIHQPSIDIFESFDELLFMKRGGQLIYAGPLGAKSRNLVDFFETREIVEALSRPSSESKELTFATKYAQPFCAQYMACLWKHNLSYWRNPQYTAVRFFYTVIISLMFGTICWKFGSRRGTQHDIFNAMGAMYAAVLFIGITNATSVQPVISIERFVSYRERAAGMYSALPFAFSLVTVEFPYILVQSLIYGSIFYSLGSFEWTAAKFLWYLFFMYFTLLYFTFYGMMTTAITPNHTIAPIIAAPFYTLWNLFCGFMIPRKLEGALAALLTDRLFSLVNALHVQRIPVWWRWYYWANPVSWTLYGLLTSQFGDLDQPLLMADGVTSTTVVAFLEEHFGFRHDFLGAVAAMVAGFCVLFAVVFALAIKYLNFQRR

SEQ ID NO: 49608 - protein, 82 aa, Zea mays
  Coding DNA Sequence Number=SeqID_6233
MPWGRIKGLRNEGHTGNPLHQDFQLIPRQRRDPALQEVSDHVHRRQTAHRQALNPVQYKLELRRQGWLGPPLLPVESWPVAR

SEQ ID NO: 49609 - protein, 404 aa, Zea mays
  Coding DNA Sequence Number=SeqID_6234
  Gene Ontology: Mol. function=sugar:hydrogen symporter activity; Cellular component=integral to membrane; Biological process =carbohydrate transport
  Homolog annotation: Hit_ID=Q2R0P9; Match level="QueryCoverage=22%, HitCoverage=19%, E-value=1e-33, Identity=81%"; Hit description=Sugar transporter family protein
MASCSRMRTTRSSSWNVGEVVVTLDLDLPPQVSEVVKFSFQSKSSWTAQGHKQVFKQIYKIENLSVDFNGNFSTLSNFVGHLTLKEDVFLFEIIGDQLTEWLSLSIILYSEMQQGQIIVHLENLWLKMKQRLLQAALNHPHRPISVATASVCRVATHGNTTLHPGRLISEFDELLMHRRKARDSSRKTVITSNPTDLTAERYDGSVNVSVGLGRKRLKIMKYSTKPKELNKNRANMGISPEEDIVTLPPCIQLITKRDRCAKLMLPTDPYTCPADLMLMSGTELFMREDVGLTDGEVEVLAGSMNVFMLASILAAGWVADHLGRRRTLVLANAFLMAGALAMSLGTSFAALMAARFVTSVGSGFARRILGTDADEEGAGEEAVVEGEVQTMRATDASVWFHRIQ

SEQ ID NO: 49610 - protein, 109 aa, Zea mays
  Coding DNA Sequence Number=SeqID_6235
  Homolog annotation: Hit_ID=A2ZU23; Match level="QueryCoverage=28%, HitCoverage=7%, E-value=6e-07, Identity=81%"; Hit description =Putative uncharacterized protein
MYSCTMHYEKIFHGRLVEADARRYFQQLIDGVDFCHKKRSLPLRLKGILITEGKTEFRKLLLFFVGISKWQPRKLEGNMELLRSIGTQQFYLLAVSRMSLRIQSFQSSI

SEQ ID NO: 49611 - protein, 231 aa, Zea mays
  Coding DNA Sequence Number=SeqID_6236
  Gene Ontology: Mol. function=nucleoside-triphosphatase activity; Cellular component=integral to membrane; Biological process=transport
  Homolog annotation: Hit_ID=Q7FMW4; Match level="QueryCoverage=54%, HitCoverage=53%, E-value=3e-45, Identity=57%"; Hit description =Pleiotropic drug resistance protein 15
  Pfam annotation: Domain name=ABC_tran; Domain location=35-183; Score=- 33.9; E_value=0.00046; Accession=PF00005.18; Description=ABC transporter
MAVPKSTEGVEDLLSRHQRKVSRIFYPCRGRHQRPPTHAVHGRCPRFHPIAPSSPSALPHPPLHTVDGARRSQVAEDPPLPCPRMRILGLDMCADIIVDNELIRGISGGQKKRLTTGEVLVGPTKVLFMDEISMGLDSSTTFQIVKCIQQIVHLGEATVLASPLQPAPEVFGLFDNVMLLSEGQIVYQGPRMLGLCFVAEGLEGRSGFRLKLFVWDGRRFLFMKLRYCKPT

SEQ ID NO: 49612 - protein, 128 aa, Zea mays
  Coding DNA Sequence Number=SeqID_6237
MNVCELTLAVLTSPQVKNRYHWMRRMKDVVRSSSLHLIMKLMDVAKTIGIQLYALTPHYPDKKPTIIRALGLKSKVDVGHLFSNVVGQEQGNTIVNYYGHSSSEALIPHEYNAHQTKVKKDIPSSFNM

SEQ ID NO: 49613 - protein, 348 aa, Zea mays
  Coding DNA Sequence Number=SeqID_6238
  Gene Ontology: Mol. function=signal transducer activity; Biological process=response to light stimulus
  Homolog annotation: Hit_ID=A7PNG3; Match level="QueryCoverage=16%, HitCoverage=10%, E-value=2e-11, Identity=63%"; Hit description =Chromosome chr1 scaffold_22, whole genome shotgun sequence
  Subcellular localization annotation: CTP_CleavageSite=34; ConfidenceScore=5.57e-01
MPSPPYPTRTRTPPSSSGSRPDAPLSRLLRLGVAASHKPTPCARFSHWMRPLPFDALALAVSPADEAFALREVLTEKEIQTAKSHILSTMLTATCLLEYRRLLNHRIADLTTHTADLTTHVLLLVAHAAPPLALQQTRQQCCAQVDVGLSDSSYERGWHIHCNLKYNFPCRNILVEQSAGNMIFSFIQDEAVQKVIEFMDTYSLSQEDFDTIVEVSKFKPAPSILLLASLPSSSVLLPTSTVDTVSSPPPPWLHPPLAIPRARWKGVTDPHAVPAALPPRRHALAGLADTAVHGVALVGGTTFSCRGLFWVLRIGSAVCLSREWQHKLERLMGLMLDQATLDDLLVRP

SEQ ID NO: 49614 - protein, 163 aa, Zea mays
  Coding DNA Sequence Number=SeqID_6239
MKTLLQDREEINKSGCLVITDAWTYMKRKSITNVCTHTSDEASFVKSKEMSDVSHKFKKTIDQAKAFTIFVYGHHKTLAYMRYFTLKKDVAVWAISWPAQLAVPSLGQGVCGTNTAEEMEDEDSGGARDGPARLQQTLMEEASKWMFNCCGERKRTRGKELLL

SEQ ID NO: 49615 - protein, 191 aa, Zea mays
  Coding DNA Sequence Number=SeqID_6240
  Homolog annotation: Hit_ID=Q2QMY6; Match level="QueryCoverage=34%, HitCoverage=5%, E-value=1e-07, Identity=48%"; Hit description =Retrotransposon protein, putative, unclassified
MSNRQAERANAEILKGLKTRTYDCLKKHGANWSTSFRAYYGGNRPHPAELPRRPRSSWSTGLKPVFPRKSLWARHGSSLSMNLCRNNCGVRTWTSSTNGRGPSPKASTEPRRVPQTLPQLGKTLQGDGNMPAQSCAMLSMVPYPKPARSTTLQRVRLHESRDERYQMVGPVGVLLKLQSRSYVQVQVPFQR

SEQ ID NO: 49616 - protein, 147 aa, Zea mays
  Coding DNA Sequence Number=SeqID_6241
  Subcellular localization annotation: CTP_CleavageSite=52; ConfidenceScore=5.15e-01
MGTSPGRSNVYFVVRTRATIQECVKSPSKSKKKLQKPKPRKISRSRSCTLLRVIHPTYQNMWVIIPHLLLLWLVSRKFLGHNFHLRRHYSLSTHETHENVEATKRYSFGNAVLKIPVKVSPKLQKVVLKECSPVGRMALGEEIVQLR

SEQ ID NO: 49617 - protein, 324 aa, Zea mays
  Coding DNA Sequence Number=SeqID_6242
MNALSREGCRHYEVFDQADEDFERDIYKVEDPVVKESAGALYDRMWGPHGREVVRERAETARGQATRGERVDDFGALNSALPDPEPNPAAAVSEDALEPPPETAEGVPDAPATTVAGGGPSPTAAPRAEDPVKVQDFGPAHATATTNFLAASTVDDGNKLDGSASKFSDFGDSESSVEWTEESSDEDLDYFAALDVAAAEASPHAVDAEVVPGPSTGCRRRRAVAKRRVSGADGGRLRVSRAGRQELLSLPAAVSAVVLQVFAVWRCEPVSTGGGLCLDNERALPLGLQLAPGLCPSCSDEYEGEDSVSIDEILRSGLVHVGDG

SEQ ID NO: 49618 - protein, 106 aa, Zea mays
  Coding DNA Sequence Number=SeqID_6243
MARHSVLTHINRPHRFPVNRSGLTALAQILDGRLWCWLLGYLLSNSLLRNEDVLPVSEITVGDKGGPTKGGAGGLIGGVCSGRGARSTCADGRLKSGDVDPVSPAR

SEQ ID NO: 49619 - protein, 65 aa, Zea mays
  Coding DNA Sequence Number=SeqID_6244
MEHLGISLPSKVFHLIFVLLFVKPKDASLFLMMKTHEMKPDLKRIRVNVEAITRWTTSAHNGDEV

SEQ ID NO: 49620 - protein, 574 aa, Zea mays
  Coding DNA Sequence Number=SeqID_6245
  Homolog annotation: Hit_ID=Q7XBD4; Match level="QueryCoverage=35%, HitCoverage=20%, E-value=3e-07, Identity=27%"; Hit description =Cinful1 polyprotein
MEVVELVPCARNKWGTWHEFWFYVAEGTVEDHPGLPVSEMCSHYYSAYPPFEVAEEDANEGALRCAAGLSSGRDLVEEFVAYGVWPLAHGWALGEVCPRQMPSHGGKLVRSPAFALDLRSRDPAAFVREAEDEAVRIVGRYVPKTEGQRSWDIRGSNDRLNRVFELNRLPYGGYPYQDDVDRRGKKLVVETGDDPTPADAPSSKKRKLGIAMGGLGISDGFARELMRTCAAPGGRMSSPELRESSARMLRVTGGWWPKNDPIPRAAGEDFFTSRMVRDWKVFPYGRNIAAVVSAVMDKDRQGAAQKRQAVVRLHEARPKRQRGAAKAAAPGGGQPPLPAKSAVPASSRASEAAKAAAAGGSKSVKAAPASSRVPEATKAARELLPPGKRVADFATDISVEDYLVGSDEGQLVVVPPTVATAATAMVPRAKGSALSAGGEIPALTAVRDEAGAVSHRLKEMQEALSQAADFADRAASGALTAVVSSEVERLRTQHADAVREKSATDSKCRKLADKVAALEGEKTDLRRQLAEERKEANEALAKAQAAQTEANLARAEGSLARQRAEQLEEWLSAL

SEQ ID NO: 49621 - protein, 154 aa, Zea mays
  Coding DNA Sequence Number=SeqID_6246
MGDHISGRVRGKVCGQVHSESVGPRAQAGGLVGGVCSDHGARSTCADDRLKSGDVDPVSPASVWGSNGSRGGLGFEPLCPRFKGQVGVGVLGYVPTPLGRKSGKRDRRKSSVSHVAFPWVSGHTSVTEIRGTHHELLTYEVATSTGMLQVHKSL

SEQ ID NO: 49622 - protein, 295 aa, Zea mays
  Coding DNA Sequence Number=SeqID_6247
MAPSPLDKGKGAASSASAPDGTEEASSQAHDAHRRVSPMIPPPPPPSGGLLPPLLPRPRLLRQIPGPPTSLALSSRNPLRVVPVAAEKVPAGGSAPTPNTGGDTGGASSSIPPPAPVEMEVAFGRRLRSGAEREAAPVPLPRMLSHAHQVFSEIEAAILREWEALEAEHQRLSDLRTQLEERTKTASRQFTFVWSQLERDRKEYKKDLQRVCARELEATRREKKVARREEAVTQREALMTEYQTKLSALDKTLEAQRAQQRGELLAEHELEAEEKERKLEEQIRQFDAAQAALGP

SEQ ID NO: 49623 - protein, 364 aa, Zea mays
  Coding DNA Sequence Number=SeqID_6248
  Gene Ontology: Mol. function=nucleic acid binding; Cellular component= nucleus; Biological process=abscisic acid mediated signaling
  Homolog annotation: Hit_ID=Q64M78; Match level="QueryCoverage=51%, HitCoverage=27%, E-value=2e-40, Identity=76%"; Hit description =Putative AML1
  Pfam annotation: Domain name=RRM_1; Domain location=67-133; Score =29.8; E_value=1e-05; Accession=PF00076.13; Description=RNA recognition motif. (a.k.a. RRM, RBD,
MGCFHSTAKRQHPGYEDPVHLASQTSFSVSEVEALFELFKSISGSVIDDGLINKDNPSEKDINQGMLAIFNVDPSITNNDIHQIFSEYGDIKEIHDAPQKGHHKIIEFYDVRAAEGAARALNRSDLAGKKIKLETGHLSGARRSTQHMSKELGQEEFGIYNLGSPSTNSPSLPSLGLGAIHPHSLPDVHNGANNGTPYNLNTITPVGVNKNSRTAEAVDNRHLHKVGSGNLNGHSFDRAEYRPVLLFRLDALAPFLHGLEATIPHISIGATLPFFALHLDAKDNGVRAADGLKSVLHLEDVAAIGCGAAMPPVALPDKEAGYLRDYRRSIMTPDEAGVATSALDVAGGRLMLAVAAAWGQRQSS

SEQ ID NO: 49624 - protein, 211 aa, Zea mays
  Coding DNA Sequence Number=SeqID_6249
  Gene Ontology: Mol. function=kinase activity
  Homolog annotation: Hit_ID=Q6QP54; Match level="QueryCoverage=33%, HitCoverage=24%, E-value=1e-14, Identity=61%"; Hit description =Putative kinase
MEHRPGLERLLETAHLELDGMLFVNTQHAPTWRANCRRFETGGSLGRRVKCHCVPQPRWVGARPSAKGGERWPETAMREVEIPRPSCSSRAQVGCACSRGLQASTRERERAASRERLSRPRPCAANPPPESARGRVMMAPPVDVAGPRPRLGDVEAPPRSRSSLSSVAVVESEPLGRARQRPSAEARAESEPWGRAKRSSSSSGAEPKSEP

SEQ ID NO: 49625 - protein, 148 aa, Zea mays
  Coding DNA Sequence Number=SeqID_6250
MTSHGSSEDGNALSHTDGLAREGFPRILWEVLQGAGYTTPPQYAVQQFEKHRVPRCRVEQLSTYIQELEELVGTRENTIEVLEDQLINTQQQLAEANEHLDMHHQEIQDLEANEDVDIEGGEEPASSVDTAGSGRPPSPESSVASFAH

SEQ ID NO: 49626 - protein, 100 aa, Zea mays
  Coding DNA Sequence Number=SeqID_6251
MEQWPRRRKEAEGLTGGDSALRASRDAREDVGARNWKKTYWLARSTRGVGRPKSGEGETASPVRQCLGSSLEKLHGFTDPGARARLGFNRKGWPRRSCLG

SEQ ID NO: 49627 - protein, 202 aa, Zea mays
  Coding DNA Sequence Number=SeqID_6252
MARTRKTARKSTGPFGVPRHQLAPRHEGSNSGSNDPIGDLEGKVEQLRSELRHWNRAWAQDSQRIAELSAGLSHLQYEISEQDLAINWAVNSHSIAWDREAKARARVADLSAALDNLQVYYNTLHEEMPSWTREHDGAGTSRCSEDTPSPPPVPPTLVEAIAALAISSNSTEAELLPKDCVILHIRNSLRLDPRSSSKQKNL

SEQ ID NO: 49628 - protein, 71 aa, Zea mays
  Coding DNA Sequence Number=SeqID_6253
MAMMDSTSNKMYVCQVPNFGILNDKAKTGLIPERPTRNGSGEMARVACTLRGKRLDDGVSVLSVGVNLVWS

SEQ ID NO: 49629 - protein, 41 aa, Zea mays
  Coding DNA Sequence Number=SeqID_6254
MVSHSGYGGYKCGHCTTAVGVSEALYAKALMRLLDPCCYIE

SEQ ID NO: 49630 - protein, 501 aa, Zea mays
  Coding DNA Sequence Number=SeqID_6255
MTRRPRTPQAHASLGRVVHHRQDFEARNIQAGQQSRRDINRGAAAPSALTPPSAEFDPASDGDTVRESPPQRKTSAPRLGHRRHGLLQKPGPSRRLDQPPRSLSQLSPEDVSPTHGLGSPTPGLVPLVDDPARLQPPLLRILGLGSPLLLADEENPRAARPTEPRDSYASGIRIPHSSPSARGNSHLVKRARTQPQLRKTVSALPDPRARTQPQLQKTVSISPDPRARTQPRLRKTVSVSPDPRGSNSTSTPEDDLCLARPQGSSTSEESPPRPDLGLGPTTSQGGVIITLPLASSRYGEQDRRPIWLAPVKQVMMAPCVLHDDDASQPLTEARRRQHEAAVPLTVSPLVFRLAPTHLGWDTQRQFTRRSRDPLGSKRRQQGTMGQGAERHGRKELSSKRGAAAGRRPWSSCWAPWKERSRQPGRKRSAHVQEKQREETWGEMERGAGFLRMEVQEKGRCAGRNEGAAGLRKKKGLGAIHGSGCSLLAAVCALNRGEESCA

SEQ ID NO: 49631 - protein, 329 aa, Zea mays
  Coding DNA Sequence Number=SeqID_6256
  Gene Ontology: Mol. function=helicase activity; Biological process =protein amino acid phosphorylation
  Homolog annotation: Hit_ID=Q1EPC6; Match level="QueryCoverage=55%, HitCoverage=12%, E-value=5e-54, Identity=54%"; Hit description=DNA helicase homolog, putative
  Subcellular localization annotation: CTP_CleavageSite=42; ConfidenceScore=5.71e-01
MSRQPPSPIAHRPAPVLSALRPKPQPPLRAGQPRPAATSPARCGAPAPSGRAATARFIFYSSISTGYQIPDGYPVGTDCNLADGEYVLIPEQGVVHEEDQEQAPKTAIEDLPAAPTIEGKPRYGGYKRGHCTAAAGVSGALYAKAMPSTLRRLFSTILVYCEPSNVAVLWWKRLDAMLEDYHARSMGNDIKAFPLPAIIDMYDDAIGTAREVYQEESIELAAAYVALKDTLNEEQRVAFDTIMSVIDTDHGGLFFVNGHGGTGKTYLYRVILMTLRSRDKIVVATSTSGVVDSIMPGGRTTYSHFKIPLTIDDIVVCSFMKQSGTAELL

SEQ ID NO: 49632 - protein, 77 aa, Zea mays
  Coding DNA Sequence Number=SeqID_6257
MILKTSPTSSTTSSEQSRRRCSNLIETLFKNSEHPNIESLNCNLADGEYVLIPEQGVIHEEDQEQAPETAIEDLPAA

SEQ ID NO: 49633 - protein, 119 aa, Zea mays
  Coding DNA Sequence Number=SeqID_6258
  Subcellular localization annotation: CTP_CleavageSite=44; ConfidenceScore=5.19e-01
MSSRSLGLWTTHDLSSLGLRALVAYRTLNTMGRTETQSTMARVRCDIETSMMAPMLFGTHAATHKERLGKPRRPRHIRTNTTLPRSNTPVYHNRVAPSLGSYRYSTPTLSNKKEEVAKT

SEQ ID NO: 49634 - protein, 118 aa, Zea mays
  Coding DNA Sequence Number=SeqID_6259
MSDAINATRRTAGSSDRGDVIFFSSSPTTSPDEESGAGPRYAIGLVKAGPTLVVSSHVEGSSLLPFMSDLRNLVDPCPRPSTTCDSRGAAITLAIAQFRTGPTFAFDEASSRRLAHGV

SEQ ID NO: 49635 - protein, 58 aa, Zea mays
  Coding DNA Sequence Number=SeqID_6260
MQVVVVAEVDAMARMPVADWPKQQTLQDGYPHTLEEWIDLTCLGWILPPKPLVISENL

SEQ ID NO: 49636 - protein, 116 aa, Zea mays
  Coding DNA Sequence Number=SeqID_6261
MWKRRSSAAESKGLGLNRMDIRELASGCEGDVRARHRLARQGKGGAGAAETRRHETGLRFHAWLVADCRKAVYIHRASSRISSVPVGKQWRTAPTEGDEGRFTCPGINRQLSVCAV

SEQ ID NO: 49637 - protein, 1086 aa, Zea mays
  Coding DNA Sequence Number=SeqID_6262
  Gene Ontology: Mol. function=protein binding; Cellular component =intracellular; Biological process=primary shoot apical meristem specification
  Homolog annotation: Hit_ID=Q5NBT9; Match level="QueryCoverage=100%, HitCoverage=100%, E-value=0.0, Identity=84%"; Hit description =Putative CTV.2
  Pfam annotation: Domain name=LisH; Domain location=6-32; Score=19.0; E_value=0.009; Accession=PF08513.2; Description=LisH
  Pfam annotation: Domain name=WD40; Domain location=1007-1046; Score =2.5; E_value=15; Accession=PF00400.23; Description=WD domain, G-beta repeat
  Pfam annotation: Domain name=WD40; Domain location=327-366; Score =11.6; E_value=1.2; Accession=PF00400.23; Description=WD domain, G -beta repeat
  Pfam annotation: Domain name=WD40; Domain location=389-427; Score =2.3; E_value=17; Accession=PF00400.23; Description=WD domain, G-beta repeat
  Pfam annotation: Domain name=WD40; Domain location=434-474; Score =35.3; E_value=2.3e-07; Accession=PF00400.23; Description=WD domain, G-beta repeat
  Pfam annotation: Domain name=WD40; Domain location=477-517; Score =30.5; E_value=6.2e-06; Accession=PF00400.23; Description=WD domain, G-beta repeat
  Pfam annotation: Domain name=WD40; Domain location=573-609; Score =9.5; E_value=2.1; Accession=PF00400.23; Description=WD domain, G -beta repeat
  Pfam annotation: Domain name=WD40; Domain location=822-859; Score =6.2; E_value=5.4; Accession=PF00400.23; Description=WD domain, G -beta repeat
  Pfam annotation: Domain name=WD40; Domain location=863-902; Score =13.0; E_value=0.78; Accession=PF00400.23; Description=WD domain, G -beta repeat
  Pfam annotation: Domain name=WD40; Domain location=906-975; Score =18.4; E_value=0.027; Accession=PF00400.23; Description=WD domain, G -beta repeat
  Pfam module annotation: Pfam domain module=LisH::WD40::WD40::WD40::WD4 0::WD40::WD40::WD40::WD40::WD40; Domain location=6-32::1007-1046::327- 366::389-427::434-474::477-517::573-609::822-859::863-902::906-975
MSSLSRELVFLILQFLDEEKFKETVHKLEQESGFFFNMKYFEEKVHAGEWDEVERYLSGFTKVDDNRYSMKIFFEIRKQKYLEALDRHDRAKAVDILVKDLKVFSTFNEELYKEITQLLTLENFRENEQLSKYGDTKSARSIMLVELKKLIEANPLFREKLVFPTLKASRLRTLINQSLNWQHQLCKNPRPNPDIKTLFTDHTCSPPNGARASPVSVPLAAVPKAGAAYPPLTAHTPFQPPPGPSLAGWMANAAASSSVQSAVVAAASIPVPPNQAVSMLKRPALTDYQSAESEQLMKRLRPGGHGIDEATYPAPTPQPAWSVDDLPRTVACSLSHGSNVTSMDFHPTRHTLLLVGSANGEFTLYEIGLRETLLSKPFKIRDINACSPQFQNAVVKDSSISINQVTWSPDGEMIGVAFTKHLIHLHGYQPPNETRHLLEIEAHSGGVNDIAFSRPNKQLCVVTCGDDKLIKVWDMHGHKLFTFEGHEAPVYSICPHHKESIQFIFSTSLDGKIKAWLYDNMGSRVDYDAPGKWCTTMLYSADGTRLFSCGTSKEGDSYLVEWNESEGSIKRTYSGFRKRSAGVAGVVQFDTAQNHILAAGEDNHIKFWDVDNNNMLICTDAEGGLPALPRLRFNKEGNLLAVTTADNGFKILANADGLRTLRALGSRPPFEAFRPQYEASSMKVSGAPVVASISPNIGRMDHLDRNSPAKPSPILNGGDTASRSIDIKPRISEEKPDKAKPWELMEVLNPQQCHVATMPETPDQARKVVRLLYTNSGVGLLALGSNAIQRLWKWSRNEQNPSGKATASVVPHHWQPNSGLVMTNDTADTNPEEAVPCIALSKNDSYVMSACGGKVSLFNMMTFKVMTTFMPPPPASTFLAFHPQDNNIIAIGMEDSTIHIYNVRVDEVKTRLKGHQRRITGLAFSTNLGILVSSGADAQWIPQDTLSASISHASYSCNSQLVFAAFTDGNLGVFDAENLRLRCRIAPSVINRSIRSVIELTQGFRQLGCLFCLCNPPVHPLVVAAHPHEPNQFAVGLSDGSVKVLEPLESEGKWGAPAPADNGIIPNGKTPASSATSNPAADQIQR

SEQ ID NO: 49638 - protein, 182 aa, Zea mays
  Coding DNA Sequence Number=SeqID_6263
MRVSTEAKSLGGSRPNPKGTRWESVGTSWSTGGDEVTSGADCTVVSDGARLRLRREDDARRAPSWGAGAVDSLDSRRSAASCLALVAPPPPPSAGEGTVQARMLFFHHVGKTSSIPPPVGGLSAAIVAVARRGKEYHVVAAVEGHELKTPETEHRPGLERLLETAHLELDGKLFVNTQQAPT

SEQ ID NO: 49639 - protein, 380 aa, Zea mays
  Coding DNA Sequence Number=SeqID_6264
MERAEASTRLEVERTRKQLMDAYRELGARTADFEVPDRESGLRCLEWLQEELLALPTIVEGFMSFASLVTCEGAMNTLSREGCSHYEVFDRSDEDFEREIYKVEDPVVKDSAGALFDRMWGPHGREVVRERSDRARDQAARAENVEDFGALNSTRPEAESNPVAAEAEVDPAPPPETGEGSLAAPAATVSGGGSSPTDVPRAEDPPKTATEPAAEDPTAAGSSQVQDFGPAHATATANFLAASTVDDGNESDESASKFSDFGDFGSLVEWTEESSNEDLDYFAALNVAVAEASPRAVDAEVVPGPSAGRRRRRAVAKCRVTEVDGGRLRVGRAGKQELLSSPAVASVGEGELRSLFEGEELRIMLFNYREMGIIPKVEPM

SEQ ID NO: 49640 - protein, 118 aa, Zea mays
  Coding DNA Sequence Number=SeqID_6265
  Homolog annotation: Hit_ID=A2WMY9; Match level="QueryCoverage=72%, HitCoverage=21%, E-value=9e-20, Identity=54%"; Hit description =Putative uncharacterized protein
  Pfam annotation: Domain name=Rep_fac-A_3; Domain location=1-99; Score= 64.9; E_value=2.6e-16; Accession=PF08661.2; Description=Replication factor A protein 3
MDTSSPAALVNAKIMNMFVGQRVRTVVQVQHNDGGMLVGQSPDGHQLSIKSAMDVPVSHFMEVYGIAENSQTIRAEVCTDFGPDFGNPKLSLLCCCHLHLDPEKLLQWLMQLDERKEF

SEQ ID NO: 49641 - protein, 93 aa, Zea mays
  Coding DNA Sequence Number=SeqID_6266
  Subcellular localization annotation: CTP_CleavageSite=33; ConfidenceScore=5.62e-01
MSGALSLPRCLGRRVALSALAVRFRRSLPSRTTAGTVSRRLREASQRLSQAADFADRVASGALTTVVSAKVERLRVQHADAVREKSAADSKCR

SEQ ID NO: 49642 - protein, 37 aa, Zea mays
  Coding DNA Sequence Number=SeqID_6267
MDLELPFLRVEEPLAKESGVQQVEVNEQGLIEGKLCR

SEQ ID NO: 49643 - protein, 266 aa, Zea mays
  Coding DNA Sequence Number=SeqID_6268
  Subcellular localization annotation: CTP_CleavageSite=31; ConfidenceScore=5.03e-01
MAAATGNRVGGVDGQRRAPVLRTVGTCSPGKAAAFTERIASGALTSEFAVERWQLEGRNERFRTQLTEAMRDKSAAESKSRNLMDKLSATEAKKEELGCLVAAEKEDADKACMEARAACADAKLACAEASLALQRAAEAEASHRSLRGFLDKAEASTHTGVKQARALLVDAYRQLGARTAPFDASGKEVGLCFLGWLQEELEVLPTIVAGLMSFASLITCEGAANALSREGCRHFEVFDRSNEYFQREIFQVEDAVLKQCAGATNL

SEQ ID NO: 49644 - protein, 169 aa, Zea mays
  Coding DNA Sequence Number=SeqID_6269
MRLILRYLFLTCGGCETARNCEGSFAYRIREGGIAITGPSDLRSRLPGGGATSHYGEALPESRYSDDPEPRSLPCKSANSHQDGPNRGGNVFILCGSINGYGSAGSYMPKSPDRVMDSDEVRPEIPRDRGDQVDEGGGSANTVPHDGETTVAAEQGKETAVGGLAAWSL

SEQ ID NO: 49645 - protein, 171 aa, Zea mays
  Coding DNA Sequence Number=SeqID_6270
MRLILRYLFLTCGGCETARNCEGSFAYRIREGGIAITGPSDLRSRLPGSGAASHYGEASPESRYSDDPEPRSLARKSANSHQDGPNRGGSVFILCGSINGYGSAGSYMPKSPDRVMDSDEVNEGGGSANTVPHGGETTVAAEQGKETAVGGLAAWSLEMGREEKKRPRTNL

SEQ ID NO: 49646 - protein, 106 aa, Zea mays
  Coding DNA Sequence Number=SeqID_6271
MAPRIRFNKIVRAGRQPEEQPSKRLHSTETDGHNVQEQTDANDDIPNSPTTPGDEAEVPDLSASRDNSDLSEDDPCDPTTTSKPEAPMQSLNQLPVVTDLADARSA

SEQ ID NO: 49647 - protein, 78 aa, Zea mays
  Coding DNA Sequence Number=SeqID_6272
MKGCRFCLHRRGVMAKQWAPRRFRATGWLEEGDEPCAIRSRDECPSGQGVTLHKIVTAIGGGVSVAKAQRLWKAVVGP

SEQ ID NO: 49648 - protein, 85 aa, Zea mays
  Coding DNA Sequence Number=SeqID_6273
MAQWLTRSTLAGGRRESGDLGLASPAKQTSIPRSGSFTEAMSSAGLWCDAGHARSGAGVPWRAQNASNTWKCSSARVQTPAEIAN

SEQ ID NO: 49649 - protein, 80 aa, Zea mays
  Coding DNA Sequence Number=SeqID_6274
MTFGASESSQSRHSRQITAEVGRTFSGGIFGIRLRVYKCLVKTKDKMIMTKDKTIMTKEKMITKLCAEKLRHDSRKGEPT

SEQ ID NO: 49650 - protein, 94 aa, Zea mays
  Coding DNA Sequence Number=SeqID_6275
MYNGSSSLISYEKQTIRTEFLSLQVTALVPTITGMGDHVSGRMRGYVCGQVQSDHASPWIRVHRPTSIGYESGYNQCPDLARVLEKSLDFYQDP

SEQ ID NO: 49651 - protein, 209 aa, Zea mays
  Coding DNA Sequence Number=SeqID_6276
MTSHGSSDEGNAQSHTDGLAREGFPRILWEVLQGAGYTTPPQYVVQLFEKHRVPRCRVRMTLEPHPLQPGWRSLDSESFGYRAEDTIEAIALHGLTTFCRFHPLELSTHPIGLFPAEKEDDPMWKDQVEHAKDIWAIYPGQTAHLTVMCGEAMSHLMALLEATKITLDNREELVVDLSTEMVEKDLQVEQLSNEIQELEELVGTRENTI

SEQ ID NO: 49652 - protein, 197 aa, Zea mays
  Coding DNA Sequence Number=SeqID_6277
  Subcellular localization annotation: CTP_CleavageSite=33; ConfidenceScore=5.13e-01
MALLHSAWYQQSLRLPRPPGGRLGASAATRRPRAAQAHASLGRAVRHRQGSEARDIQAGQQSRRGSDVDGGGAAAPSASTPPSAKSDRASNGNTVGGSPLRRMTSAPRPGHRRQGLLQESGSSRRLGRPPRSLSQLSPEDISPAHDLGNSTPAPVPAVDGPARLQPTKSSFRANSASVHADTAASGFGSSKSGRGFP

SEQ ID NO: 49653 - protein, 238 aa, Zea mays
  Coding DNA Sequence Number=SeqID_6278
  Homolog annotation: Hit_ID=Q6J9V9; Match level="QueryCoverage=34%, HitCoverage=30%, E-value=3e-11, Identity=50%"; Hit description =Putative uncharacterized protein
MEATCNRTKGAHPFDFDASSMEAQAYTSWTGKGDISKGILLREGSGPRAPLLIRGSKAVPSEGFNSRLRALGLHAYYWLAPEGFDSRLRHRARDDPGYVRYITKARATLPRLGGCSRKPGSGQTVDSVNIPARELGTRLCTRATATAKSGLGRHRKLRLARPQRSDSASAPEDDELRLARPQGSDSGSAPEDDELRLARPQGSDSASAPKDDELRLTRPHGSDSGLAPEDDELRLARP

SEQ ID NO: 49654 - protein, 102 aa, Zea mays
  Coding DNA Sequence Number=SeqID_6279
MTLGWAAKRSAHRAHQRGWASAGRRAGWRDGVIVGCGVQNNRESSTLATTMRPPCLTMDSDTCDHVGLLLEVELTVAKLLLVIDERRQRECLLLMVFVRGFK

SEQ ID NO: 49655 - protein, 149 aa, Zea mays
  Coding DNA Sequence Number=SeqID_6280
  Subcellular localization annotation: CTP_CleavageSite=35; ConfidenceScore=5.10e-01
MSFVDGPYQVHCTSVQSPGETASSPARGAGAPTLGAGAGAAGLFPLPQREVESERPPSPAPQREMPLAPPQGIPAAGRDPDGDGDDDNAGGSSSHGTERSKELEPEGWIARPITRDAARGCHFHDVLDTLLRWAFDRHTWSIEYRCVVY

SEQ ID NO: 49656 - protein, 62 aa, Zea mays
  Coding DNA Sequence Number=SeqID_6281
  Pfam annotation: Domain name=zf-CCHC; Domain location=19-36; Score =13.4; E_value=0.014; Accession=PF00098.14; Description=Zinc knuckle
MSLTKNKNGQQASYQIERRFCYKCGEQGHLQKRPKSYTCARPMLRSPRTSTNAISVPKALLD

SEQ ID NO: 49657 - protein, 255 aa, Zea mays
  Coding DNA Sequence Number=SeqID_6282
MLPQTRGGPTTAIPADTPTSTPAHALARDQSVGASDGWHAEAANLAHQIQPTARRRRSPGGVRSSPPRIRYASTQPRHTSNPEQQRLPSRRVGAAIGPASWTRTQPQARCLSGRTPPPWAGRATTDKAASIRPTPSPLAVRATRQLAPAAARQRDGEGGELAAARVTRGRSRGRPRRRATHGDLGGRARPDPLEGDEDAPPPPSPQAAGPSGGQLRQRRGRERPTKGRWRLLGIMGSVRVTRRGGNQDAAFPVKL

SEQ ID NO: 49658 - protein, 58 aa, Zea mays
  Coding DNA Sequence Number=SeqID_6283
MATELGGGRPNGEGKGGGEMGEGGEGEGDLTGDGDGRPSGGHRNSKPYPAITLEKIKV

SEQ ID NO: 49659 - protein, 175 aa, Zea mays
  Coding DNA Sequence Number=SeqID_6284
MAGAHLGTQDYDHMWKNLRSKSRICPGVSQLSDSPRCQEEVCAGLLQRFARLRPLATFEHWKKQTATCSTPSAAPEHARARARAAPKPSQCPAIPNPVQPSEKTVHVSVKLPERGIGLCFTGEAGPRSPDFNRPPATVDRGSLEDMVAGVTWPSTLPPGWTVEWDPASAEEEHEE

SEQ ID NO: 49660 - protein, 211 aa, Zea mays
  Coding DNA Sequence Number=SeqID_6285
  Subcellular localization annotation: CTP_CleavageSite=28; ConfidenceScore=5.14e-01
MVAPSPSPPVRRVVGLTQVFLFRHVEMPSSSGSSPPGLPTTVVVVVLRGEQYHVVAAVEGHELETSEAKHHPGLKRLLKATHVELNGKVFVNMQRAPTWRANCRCFGPVRTLNQLVNLLLIRCQAIPALNAHAIRSVGKAILVEVAARQSLPELGFGRAGGAPTAWGGPRARREFVRDYCSHPRLGSDEVASLGRRGLDLNCALSAVYGLF

SEQ ID NO: 49661 - protein, 309 aa, Zea mays
  Coding DNA Sequence Number=SeqID_6286
MAVATSASHPLLYLDGKPYGQLSVALPFSLTPDEGDDCSLRYALYSRKPTPARDGGKFQVDFSSSRRLLATGARRGDAAADLAAQGRFRAGGAHLIMASSKEDNMKALLKVLAAAPVGAAASFHSPSSSQIYPQGRLILVEYEMEAIGNTLPALGTLADNDMVLVEEQQQALEVVCPSPPPLLPLPEPVCGTVFLELLESASWVALTLRPPLVSTAMEAVEGRWEANVTLRCTSAHRPAQVPSPVLAFSVCPTATMIIVRKMGEVAPRIPATRRRTVSRKAAGAVEADRPAEDVSEEKTLKITIALNIA

SEQ ID NO: 49662 - protein, 113 aa, Zea mays
  Coding DNA Sequence Number=SeqID_6287
  Gene Ontology: Mol. function=transporter activity; Cellular component= mitochondrial inner membrane; Biological process=mitochondrial transport
  Homolog annotation: Hit_ID=Q66PX7; Match level="QueryCoverage=85%, HitCoverage=35%, E-value=2e-36, Identity=80%"; Hit description =Mitochondrial uncoupling protein 1
  Pfam annotation: Domain name=Mito_carr; Domain location=37-113; Score= 38.8; E_value=2e-08; Accession=PF00153.18; Description=Mitochondrial carrier protein
  Subcellular localization annotation: CTP_CleavageSite=29; ConfidenceScore=5.21e-01
MATASSFTAIFFSSAFVACFAEVKAFFVRCAVVGDVSLLSKILAALATGVIAIVVANPTDLVKVRLQADGKANTVKRSYSGALNEGIGALWTGLGPNVAHNVIINAAELDSYD

SEQ ID NO: 49663 - protein, 81 aa, Zea mays
  Coding DNA Sequence Number=SeqID_6288
MEEKAVANGAAFVDVATPDNKDNTKEEASETKEAENQDAQEKNKGSENGKHITSNLKLPADDAVNHNDHKEGSFYDAETVH

SEQ ID NO: 49664 - protein, 139 aa, Zea mays
  Coding DNA Sequence Number=SeqID_6289
MWKDRVEHAKDIWAIYLGQTAHLTVRCMNALYRLQVMRGEAMSHLMALLEATKITLDNREELVVDLSQEMVEKDLQVEQLSTDIQELEELVGTRENTIEDQEDDEDVDIEGGDEPASSVDTAGSGRPPSPESSVASFAH

SEQ ID NO: 49665 - protein, 299 aa, Zea mays
  Coding DNA Sequence Number=SeqID_6290
MRLILWYLFLTCGGCETARVSSHTFIAQEVVGNNVHELAKEVAHLYPQVMLPICHGVVRAPYTSTKEARQGIPRLIAIAAKSTKDLPTLTTLLLPLPLSGWRLLDSESFGYRAEDTIEAIALHGLTTFCGFHPLELSTHPIGLFPAEKEDDPMWKDRVEHFKDVWALYPGQTAHLKVRCMNALYRLQAMRGEAMSQLMGLLEATKITLDNREELVIQELEELVGAENTIEVLEDQLINTQQQLEEANQHLDMHHQEIQDMEANEDVDIEGVEPEPASSLDTAGSGRPPSPESSVASFAH

SEQ ID NO: 49666 - protein, 122 aa, Zea mays
  Coding DNA Sequence Number=SeqID_6291
MAVMDSTSEKMYLCQVPSFWVKKIKLRPGGIHFSKHFCKTESLIIEKPYLDSHITSIPLRVFSLVGWFPKKKNKTEVREDSILHLGSFAHNLSGGVCASLGLYNITTLHSLLALISDTGRRD

SEQ ID NO: 49667 - protein, 82 aa, Zea mays
  Coding DNA Sequence Number=SeqID_6292
MRNSGVLVDDRGWERVLQLHNYMAQLRARSIYRARGRWPVNFEEDARRPEVEESTGAREFVANGVATSPAMMGWPKGVTATR

SEQ ID NO: 49668 - protein, 152 aa, Zea mays
  Coding DNA Sequence Number=SeqID_6293
  Homolog annotation: Hit_ID=A2XFR6; Match level="QueryCoverage=95%, HitCoverage=41%, E-value=1e-21, Identity=39%"; Hit description =Putative uncharacterized protein
METCDRGFRALSPHESLTPLSTNASLVSNATRRTLWSLSHTYPQQLHITKYRHLPLRLHGESQTSIVPGGAEEDRLNTLAGVVAGLNTDLDTATLDLSRVHLELEDAHARIAALEGQLEARDPPEAQVPTMALSPPRKRIRYGEPGSITRLL

SEQ ID NO: 49669 - protein, 134 aa, Zea mays
  Coding DNA Sequence Number=SeqID_6294
MARPARHDKHQICREIRETGRLTAGNDDDMDGRHGVDERRPWTNGVDGGHGVDESAPMNGVDERRATRGDAERRGRARGPRAATRGERAGTGGGAVREGHERRRCSERAGAGDAWTPARRWWTGARLWWAAREV

SEQ ID NO: 49670 - protein, 129 aa, Zea mays
  Coding DNA Sequence Number=SeqID_6295
MVTTSSWVGRSKPGYDLGPTLSFKDVHHPRWGGGRAEPALYLPRGFVGHPLPRRSRERALTGPAGGPDFDNVGLVDGGRRHLQRVGVVGLTVPNLSSDLGTSTRLSDERFTRLADITEHQRYRNAEAIT

SEQ ID NO: 49671 - protein, 402 aa, Zea mays
  Coding DNA Sequence Number=SeqID_6296
MQAACNRARWTRFPDSQRACVEAQAHASRNQRAGCCMQATAPPLAPPPRLFGCGTNTATRGGPAHDPAAPAWRDGQCRRKTSGASGRRSGRRFAFAVITAPKKGPGKGDTPKRILPCEGTGLRAPPTDQRFEGWPPEGFNSRLRSRGPYTHYWSEVRRTAPRRAPRPPQATRAPRPLLIRGSKAGPRRVHSRLRRRARDDQGYVRYITKARLRSRGTLGHFRDQRERSCNGIPSEGGIEPSDPVARGPGPADHPQLTGDTMFGAHRGARTRAKPRKTANSAPPDPGLGLGLGPKRWRTPLRPTQGSDSGSAPEDDELRFARPQGSDSALASAERPPPRPTQELGLGLGHGIQTRPRLRRSLHVARPRAQARHVNRKRHHHPTPSRLGPQRTRPVSHLASSAR

SEQ ID NO: 49672 - protein, 96 aa, Zea mays
  Coding DNA Sequence Number=SeqID_6297
MVTTSSWVGRSKPGYDLGPTLSFKDVHHPRWGGGRAEPALYLPRGFVGHPLPRRSRERALTGPAGGPDFDNVGLERFTRLADITEHQRYRNAEAIT

SEQ ID NO: 49673 - protein, 274 aa, Zea mays
  Coding DNA Sequence Number=SeqID_6298
  Gene Ontology: Mol. function=L-ascorbate peroxidase activity; Cellular component=chloroplast; Biological process=hydrogen peroxide catabolic process
  Homolog annotation: Hit_ID=Q9THX6; Match level="QueryCoverage=55%, HitCoverage=47%, E-value=8e-61, Identity=72%"; Hit description =Putative L-ascorbate peroxidase, chloroplast precursor
  Subcellular localization annotation: CTP_CleavageSite=53; ConfidenceScore=5.46e-01
MAGANFLSTAALVARGVAACSSISTPTRRHPQVPFQTRGNRVILGLPLQIRVCCRADVEAMEAYAHEERLRFRRRDFIGTCVGTAIGLEMIDGSTSFSGVATAADLIERRQSKNQRHPLRSHKAQSALKRSFLDAAIAKCGGNEEKGRTLYSAYGSNGQWGLFDRTFGRADAQEADPEGRVPDWSKASVQEMKDRFVAVGLGPRQAATEGRLIADPDCRPWVEKYQRSRETVSRTDYEVDLITTLTKLSSLGQKINYEAYTYPKQKIDLGKLKL

SEQ ID NO: 49674 - protein, 184 aa, Zea mays
  Coding DNA Sequence Number=SeqID_6299
  Subcellular localization annotation: CTP_CleavageSite=65; ConfidenceScore=5.15e-01
MSGPLDGVQIPPSKVRATTGSRDRGYPGISKGPILTRVRLYPVRLRSPLRRRPAAAAWIVARDISQQAEPDHDGANRGAPRRDFNGFPGGGRSCFFHATGSQPPNDGHCCCARSTTAYNCADIPDSVEGGSGSIVSSQGVAMSPSKLHGLTGGHEAVAGRRRLATRHGTFYLNQVEATVIPAPT

SEQ ID NO: 49675 - protein, 366 aa, Zea mays
  Coding DNA Sequence Number=SeqID_6300
  Gene Ontology: Cellular component=integral to membrane; Biological process=maltose metabolic process
  Homolog annotation: Hit_ID=Q7XTQ5; Match level="QueryCoverage=95%, HitCoverage=86%, E-value=1e-142, Identity=74%"; Hit description =Maltose excess protein 1-like, chloroplast precursor
  Subcellular localization annotation: CTP_CleavageSite=31; ConfidenceScore=5.24e-01
MSSPSVASLRLPMLPASPPLSRRAIAGVTPSAAAPRALLLQPLAPKALAAYHQPALLLHQRRRHGPPPVAAVTASKPVLKDPKKYQEWDSMTAKFAGAANIPFLLLQLPQIVLNTRNLLAGNKTALFAVPWLGMLTGLLGNLSLLSYFAKKKETEAVIVQTLGVISTYAVLVQLAMAESMPVPQFVATSVVVAAGLILNFLNYFGWIPGTLLLLWEDFITVGGLAVLPQVMWSTFVPFIPNSVLPGIISGSLAVAAVAMARMGKLSNAGVKFVGSLSGWTATLLFMWMPVAQMWTNYLNPSNIKGLSAFSMLLAMLGNGLMIPRAVFIRDLMWFTGSAWASVLQGWALIASAEKFSLQHQLVCFYG

SEQ ID NO: 49676 - protein, 68 aa, Zea mays
  Coding DNA Sequence Number=SeqID_6301
MEAQAHASRNRRAGCCMQATAPPLAPPPRLLDCGTNTATRGNPAHDPAAPAWRDGTGKGGYPEKDPSP

SEQ ID NO: 49677 - protein, 457 aa, Zea mays
  Coding DNA Sequence Number=SeqID_6302
  Gene Ontology: Mol. function=DNA binding; Cellular component=nucleus; Biological process=transport
  Homolog annotation: Hit_ID=A7QW00; Match level="QueryCoverage=43%, HitCoverage=73%, E-value=3e-49, Identity=48%"; Hit description =Chromosome chr2 scaffold_196, whole genome shotgun sequence
MEAGGAGAGAGGRDERVPQWGAQETRELIMARGEMERETVAARRSAKTMWEAVAARLRERGYRRTAEQCKCKWKNLVNRYKGKETSDPENGRQCPFFEELHGVFTERARNMQQQLLESESGVSVKTKLKRPGGDWSSRESDDKEDDGEESDDEKPMHNRKRKADDKKQQHQRMSEKSRTGISSIHELLQDFLVQQQHIDVRWREMIERRAQERVKATAWTATPRTNRAAPQRQWRASRSLSSSVFAQPHHPRLILNHPTRLRLRRLGAGADALAALVFQLTVSSLPFLFPNRARVLALPPPLGAAAVVEATQEDWRRTRSGTWEAALQKWKTKTYALSVPLRKGALRGSFPPSWIKDFVEVQGKKLKFSAELRANLDGIFSEMSRCMDKGQVQPKSAMAADVVSLGDSWLGYAICKELLEPVKNAEEQDWFRRLSDRWKDWEDLWRPELAGRISMVY

SEQ ID NO: 49678 - protein, 435 aa, Zea mays
  Coding DNA Sequence Number=SeqID_6303
  Gene Ontology: Mol. function=nucleic acid binding; Biological process= metabolic process
  Homolog annotation: Hit_ID=A7QKP6; Match level="QueryCoverage=48%, HitCoverage=59%, E-value=6e-55, Identity=52%"; Hit description =Chromosome chr2 scaffold_113, whole genome shotgun sequence
  Pfam annotation: Domain name=RRM_1; Domain location=213-284; Score =18.8; E_value=0.0027; Accession=PF00076.13; Description=RNA recognition motif. (a.k.a. RRM, RBD,
MGACNSCEATAVAAAPGPATAEARVVLADGALRRFPGGTRASQAVKAAAAGAASWFLCSADGLELGGAVVPVRPEEALQPGQLYFVLPAAMRRRPLQAEEMAALAIRASAALAGDHDGPLVFPEAAAAAGAGARCGKGPARFTPFGLGGRRAHAAEAPTALAALRYATLRTAFLRFSGSPLRRKLLEMAAKSGYTRRLPLTGETAPPPPSAVLYVANCGPAVGVTDADVRSTFGAFGEVAGVQAADDSGARIIVRFHEPAAAEAAMAALHGRPCDLLAGRVLHIRYSVPVKPKARPGGSVPVAHAASELGIPGIYMVQEFVTAAEEQELLSAVDSKTWKRLAKRRVQHYGYEFLYETRNVDSKQFLGELPTFVSTVLEKIASFPGVKDCATRLVDQLTEKVVMPGITIYHIIKSMPWVVKSSKGIQGEFLSLSER

SEQ ID NO: 49679 - protein, 59 aa, Zea mays
  Coding DNA Sequence Number=SeqID_6304
MDTGVVEMVSVSVILMPVLEDIQAPSQSFDFSPSSALDPANWDPNYRYGILKSILVNLY

SEQ ID NO: 49680 - protein, 146 aa, Zea mays
  Coding DNA Sequence Number=SeqID_6305
  Gene Ontology: Mol. function=metal ion binding
  Homolog annotation: Hit_ID=A2XX75; Match level="QueryCoverage=35%, HitCoverage=15%, E-value=1e-17, Identity=78%"; Hit description =Putative uncharacterized protein
  Pfam annotation: Domain name=zf-C3HC4; Domain location=107-138; Score= 17.4; E_value=0.00095; Accession=PF00097.16; Description=Zinc finger, C3HC4 type (RING finger)
MAVPPPLLFLFILLCMVIITVSDMDEHMGRRTVGGLLFTKGGSILLFREDGSRPKAKNCCTRHGCSGQHPADRAKGKELENYFIFNDRHRGMRMDIDGMSYEEEYLAGEEVGEMACKHYYHLSCIDHWLRQKNWCPICKSVALKIN

SEQ ID NO: 49681 - protein, 410 aa, Zea mays
  Coding DNA Sequence Number=SeqID_6306
  Gene Ontology: Mol. function=protein serine/threonine kinase activity; Cellular component=cytoplasm; Biological process=protein amino acid phosphorylation
  Homolog annotation: Hit_ID=A2XX72; Match level="QueryCoverage=86%, HitCoverage=52%, E-value=1e-141, Identity=69%"; Hit description =Putative uncharacterized protein
  Pfam annotation: Domain name=Pkinase; Domain location=129-371; Score =29.0; E_value=2.3e-10; Accession=PF00069.16; Description=Protein kinase domain
  Pfam annotation: Domain name=Pkinase_Tyr; Domain location=129-347; Score=-118.4; E_value=3.7e-05; Accession=PF07714.8; Description =Protein tyrosine kinase
  Pfam module annotation: Pfam domain module=Pkinase::Pkinase_Tyr; Domain location=129-371::129-347
MELDSSGRCSVAPVNAESGGSCGKREDAAPPWRPSDSTAFGRFAAAASPPEASPSASANGAAARVSSLHGVRRKPSVARLTAGIIQTYLQCDPEFKYSEVLNPKRFLTNPSTPAHNDGLDNANWDLILFIVKEMLGQGTFGQVVKCWDTETNDYVAVKVIKNQPAFYHQAIMEVSLLRTLNQKFDPDDQHNIVRMLDYLSFQNHLCIAFEMLGQNLYELLKRNHLRGLKLKYVQAFSKQILDAMVVMREAGIIHCDLKPENILLAPSVTTAAEVKVIDFGSACLEAAITGLQRFSLAIRILGQPPDELLREAKNTARFFKHVGSIYPGNEAPTGLCSAYKSLSEEDVEVRDSKKPQMGKWYFPHLKLDKLICTYPWNNSELTEWAVDHPVSDGGSGFRGFLGRDHVSVSS

SEQ ID NO: 49682 - protein, 101 aa, Zea mays
  Coding DNA Sequence Number=SeqID_6307
MSGAPEDSNSNSPPSGISRGTRAIIHRTVRCAKEEQPQDSVRCAKEEQPQELACFGNLQRLVRYNSPDMSGVHRTVRCNSGATAIRRQRLPATQLMRALRA

SEQ ID NO: 49683 - protein, 676 aa, Zea mays
  Coding DNA Sequence Number=SeqID_6308
  Homolog annotation: Hit_ID=Q6JAD6; Match level="QueryCoverage=96%, HitCoverage=96%, E-value=0.0, Identity=57%"; Hit description =Putative uncharacterized protein
MPRTKNVSAPGGGDDEDPRRPFRQVKGKTVYLEQQEGRKKRRTDRAARAAAAAAAAAAQAELGDQPQTPSDQIAYRVRRLASRRSSTHTTSASTPPPTLPAPVTPVAPSTTTAIPTTSTTPASTAPPPPPPAPASAPPVPPPRFRERDETEVQPLVADPRLFDLQRATAARVRRFRYVPVESWLPAQRDPAAGDLFSTRTQESFFRAQMSAQIALRVHRLLDLPAFLLAAGADSEAHLTYLPGLQTLLTTSGRYVDEWVRVFYASVWIDPDHHWMRFRFEREDVTITTSQIRQLFGFPESTTRLHSLCYGTSDPPRRPHGGVAPGTAHVAALFRPPFTDGSRRSPADFTTAAKYLYELIRRTLLPRMGYREATTHIQLWLLGALLIQPPRFQSTLEASRLVFGSYHPAPEIPVPATASVFDSQAEDAALRQFDTQGTTADDDDDDDDDDDFGVPPPPPPPMPPRSHDHEAGSSSVAPATPQAMDPALASILQTLTQQQAHLAAEQARLSDRMLSMFQNMQDRQDALQQQLLQAQAESRAFMALMLQQSGVSVPPVQSAPPPPLHAPVVPSILSGPPVGTSPLRPVTLAFTSPVLSSVCPQPPVPPASAVTTTAVAVSVSASVPVAPAARPLSESVPAPASTADPGSETDSDPPPAFALLPRPRPDAPPPPPPASDV

SEQ ID NO: 49684 - protein, 300 aa, Zea mays
  Coding DNA Sequence Number=SeqID_6309
  Gene Ontology: Mol. function=calcium ion binding
  Homolog annotation: Hit_ID=A9P210; Match level="QueryCoverage=72%, HitCoverage=98%, E-value=2e-36, Identity=41%"; Hit description =Putative uncharacterized protein
HTPSSSPPSAMGQAWGNLQDRLQGRRWKEHQVRKITDKVFDRLTEDAQKRDKEALRFEEVYIAVLCVYNDINKYLPGPHHDPPSKEKLRAMMEYGQSNIVFFRLFLELEAKSQLLQLPQPTGSSWVESLSVVYHWLGSCNAQEYDVNLDGLLDREEFAEFIRKLTADSLCSISVKLLITLVAAPALAMATKRATEGVPGVGKVVRKVPNALYASAITLGVVLLQRSTEGVDHMLALRTRDERSTTTSEDTVHTDPLACARRPSSVGPLRQRLSGRPGRRARNRKAHVRPWPWDVDACRGS

SEQ ID NO: 49685 - protein, 30 aa, Zea mays
  Coding DNA Sequence Number=SeqID_6310
MAGGKELAGAKEGCLAGDEFPNEIPLERLV

SEQ ID NO: 49686 - protein, 114 aa, Zea mays
  Coding DNA Sequence Number=SeqID_6311
  Subcellular localization annotation: CTP_CleavageSite=29; ConfidenceScore=5.47e-01
MAAAPPRRLAAGLRVRGPRPGRPSQGRARAEATRAGATRPCRSRRGRGRLPGRDRRAPMPPGLAGAAPASRTAAGLRPPPGPMPVARAYSPWGRGRRADCSPSRGRVLAPGGRA

SEQ ID NO: 49687 - protein, 65 aa, Zea mays
  Coding DNA Sequence Number=SeqID_6312
MEGKQMMMRMVMIMLMVMPNGTFAEYVDVYSPLLSQNTRLPLVQSMLRCSRPIDAVLEDLPGPVG

SEQ ID NO: 49688 - protein, 67 aa, Zea mays
  Coding DNA Sequence Number=SeqID_6313
FYGISYIDVYLVVSNLARENLECLSGGYEIDGSGYDYGAGCQHCNHCSGEDEAVEGDFQEFQDYDEF

SEQ ID NO: 49689 - protein, 96 aa, Zea mays
  Coding DNA Sequence Number=SeqID_6314
MGSRHSACSAEAECRGSFVLLLLVTLLRGERVMKLVYQPCSRLRAALGSSLIRDTSIRDGWFTDDDEDGYDHAYGNGKQGVEADLQEFQDVDEFED

SEQ ID NO: 49690 - protein, 58 aa, Zea mays
  Coding DNA Sequence Number=SeqID_6315
DTLPDHLGSDQWGVMIPGQNGNHGSWVKCTTSAEGNETGKQGVEADLQEFQDVDEFED

SEQ ID NO: 49691 - protein, 75 aa, Zea mays
  Coding DNA Sequence Number=SeqID_6316
MGAQGGVLGARGAQAGAGRAGWAGLDWAGSGHFADQKPTTSATTNGLNREPKSGTERDEHSSSDKEMCFGMMQHP

SEQ ID NO: 49692 - protein, 333 aa, Zea mays
  Coding DNA Sequence Number=SeqID_6317
MAGSKDHTKISTTNIIKPAMEALLADDQRPFKDLVMRDEKEVMRQWNEQRDKEEAELLYKLSERRKEAAEKYLSHFTVDRHQKIIRQGEIDIWNLSYLHFRVPLPSDPMQARTQNTQVAPYMVEPSGYNPEQFGPITDRPVHHAGPSGYVADRPPSYVGPSGYGMNRPTYYTGPSDSTRVHVQTAQVAPYMTDLSRYSPRPFRPIADRPVLYDRRSGYETTHVAPYTAGHSGYTFGLFGQVADHPASYAGPSGYAYAEPRAAQYAQFPHSSQQHYGASPATHYNHAIPPHGHRAEYYSATREPERNRAGADMAERIRDEVAGMFRDKLGVSVS

SEQ ID NO: 49693 - protein, 244 aa, Zea mays
  Coding DNA Sequence Number=SeqID_6318
  Gene Ontology: Mol. function=metal ion binding; Cellular component =integral to membrane; Biological process=ubiquitin cycle
  Homolog annotation: Hit_ID=Q109A4; Match level="QueryCoverage=87%, HitCoverage=94%, E-value=1e-53, Identity=56%"; Hit description=Zinc finger, C3HC4 type family protein, expressed
  Pfam annotation: Domain name=zf-C3HC4; Domain location=138-179; Score= 38.1; E_value=3.2e-08; Accession=PF00097.16; Description=Zinc finger, C3HC4 type (RING finger)
  Subcellular localization annotation: CTP_CleavageSite=25; ConfidenceScore=5.71e-01
MTQAKLSLPSPRRPPTQSSRSRLCMATARPSRRLATGDAHATPAVGPVSGGGGRAQFNLSSGAATAVVFVSILLCFVLLCTYCRCARQRAIAGARRRVMRDLVVPGVSLFLRPSAAALPPVLPYAAAAARKKGLPEDCPICLDAFGEDDGVRVVPACGHLYHAPCIDRWLDVRNSCPVCRCAVASLYAADRDRGADALTAFDDDNDDQEAVLQRVVAMIEAIRDEQQREDAVARRAPAGGGGGS

SEQ ID NO: 49694 - protein, 187 aa, Zea mays
  Coding DNA Sequence Number=SeqID_6319
  Subcellular localization annotation: CTP_CleavageSite=34; ConfidenceScore=5.33e-01
MAAAPPPRLAAGLRVRGPRLGRPRQGRARTEATRAGATRPRWSRQGRGRLPGRDRRAPMPPGLAGAAPASRTAAGLRPPPGPMPVARARSPRGRGRRVDCSPSRGRVLAPGGRAQAARAGPPGPPRPSPCRGCGCALATTRWRAAPGRSDAAAGGRGEGGAGEGEGEGERRRGIERDVRGIREGEKE

SEQ ID NO: 49695 - protein, 175 aa, Zea mays
  Coding DNA Sequence Number=SeqID_6320
MAARCSEEGPVGLTSWGDGDGMLLGASVRNSGERNTDSLHDGELSVGRLLCSCKNAAFYEIEGGESRGENATKVKIGKTSFSNRNGKDDISKGRHRQGVKEGGAVNDETDEALSLNRDGKEEASKGRFNKASISQGSKAIIDKYIREKTKAQKSQWYKYNKEWRYVKAYAVKKRI

SEQ ID NO: 49696 - protein, 34 aa, Zea mays
  Coding DNA Sequence Number=SeqID_6321
MGLGVCGSLCQGKEREEGVEVDRQEFQDVDEFGD

SEQ ID NO: 49697 - protein, 825 aa, Zea mays
  Coding DNA Sequence Number=SeqID_6322
  Gene Ontology: Mol. function=solute:hydrogen antiporter activity; Cellular component=integral to membrane; Biological process =regulation of pH
  Homolog annotation: Hit_ID=A2YXV8; Match level="QueryCoverage=99%, HitCoverage=99%, E-value=0.0, Identity=64%"; Hit description =Putative uncharacterized protein
  Pfam annotation: Domain name=Na_H_Exchanger; Domain location=31-437; Score=53.3; E_value=8.3e-13; Accession=PF00999.12; Description =Sodiumhydrogen exchanger family
MARSFNICPQIDPLVVTRVPGVALDMLFLVIIQALAVILLAKFIHLFLQRYNQPSAVSQILAGVAVGGMGLRNAILHVDVDDVEDMYGGYITLARVVYMFLVGLDLDLAALRNSTRRCVALAYATVAASLLVAAIVSSGMYGSMMHSPVKTPELLAATLMLALTNTSSITISRIAGELNLTVTENGRLLVAAAIITNLICVVGDSVLSSTALAKEKSQDLYHTSPQIKKGFLALAVAGVAVWQVRPVVTRINQRNVGQHHVRSRDLVIILLGIWFISNIQQLLGFDGMPTSLALGMAFPREGPAARSVADALMPPVNGLVLPFYFATIGMRLDYNSMSGAIIVPGLLLTLLGLVAKAIGATAASTYLNIPISDALRYSVLLNVKGHVDTMNMKFAKSEGVGSYSAQVWAEQALYAMIIGNLISTIIAGPAAAAVLSREKEEYKTRHQAMESLSAEKELRMLVCAHSAHAAPGVLSLVELLVITPHEQPAVPVLHFFEAPRDRSARTPYHQRTRGDEGAEDKGGPDPVTQMNMVVDVFSKTTGISFRQIDVVSLGASRDAAVACRGAEEAHASLLLLPCYKEQRFDGKMACRLEERWKLNHDVLERAPCTVGLLVDRPYRGGGTSFQTPIDIAPETGRTLVHPCSDRTVTHVIAAVFLGGPDDREAVSFACRLAEHPAIGLTVFRFVKRSTYDTVTSSTSRAAAAVAAGGDELDVPFKEGHVDERFLWRFYENYASRELAMYVEKVVESPADVVETLEGMSGMFSLVVLGRGGRQPVELMAGLERWSEAGSEIGPVGEILASHESLEMGSVLVMQQHTVALSPPCQ

SEQ ID NO: 49698 - protein, 220 aa, Zea mays
  Coding DNA Sequence Number=SeqID_6323
  Gene Ontology: Mol. function=kinase activity; Cellular component =ornithine carbamoyltransferase complex; Biological process=amino acid metabolic process
  Homolog annotation: Hit_ID=Q6QP54; Match level="QueryCoverage=21%, HitCoverage=16%, E-value=3e-13, Identity=85%"; Hit description =Putative kinase
  Subcellular localization annotation: CTP_CleavageSite=65; ConfidenceScore=5.27e-01
MGTPVLFPAGPSQLGGRVMMAPPVDVAGLRPRLGDVEAPPKLRSSPSSVAEVGSEPLGRARRRPSAERSSPSSGAEPESEPSVGRSEVRRLPGLSPSPSPGSGGAEFAVFRDFSPSPSPGSGGAEFAVFRDFSPSPSPGSGGVRRLPGLSSSPSPGSGEAELPMVPSTGPHCLSASLCRAAPQPERRRRCCLSVRPLYADGGYQLRIRSLEGTPNYGHLQ

SEQ ID NO: 49699 - protein, 216 aa, Zea mays
  Coding DNA Sequence Number=SeqID_6324
  Homolog annotation: Hit_ID=A2XFR6; Match level="QueryCoverage=51%, HitCoverage=32%, E-value=7e-15, Identity=39%"; Hit description =Putative uncharacterized protein
MDLGTHMLCIRFCPQNRHGVILEDSSEELLSTPTPLAKSLAFAARSSTSAPPAPAVQAPAPGGDDPDDSGDDDEDDDDDEDDEENINEEANDAQQDYFMGFGRHTYQQQLHDMRFCHLPLCLSGGSHISIVPGGAGEDRLNTLAGVVAGLNTDLDSVTLNLSRVHLELEDAHARIAALEALLQGRDPPEAQVPSMALSPPHKRIHYGEPGSITRLL

SEQ ID NO: 49700 - protein, 162 aa, Zea mays
  Coding DNA Sequence Number=SeqID_6325
MASGRMPLQPYPRPRRRSRGEDKYKGPEAQSADGGGDPVGDGDFSSRLRLGTDDRGRQPADRSPLGSSRTSRAPTFARRHRTGVKAGPPQNTNTALAARGILGGPPVHTERVTHEPAREVELWLSPASTPARMMNILEAEGGTKIAARLASPHPGAGGHRLG

SEQ ID NO: 49701 - protein, 144 aa, Zea mays
  Coding DNA Sequence Number=SeqID_6326
MVNPKDHNNVVLDINTRLTNSPTDEDEKLEDHMKRLDEEFQRQQAQISKVAKKWYLSHFKVDHQKKVVKKRKVKYDSLSALLHQLPIAFVKASSPAKGVPARFASGGPAAAAKASSEGWRLCLRSNICPPRDQFDKVTWCRRRR

SEQ ID NO: 49702 - protein, 175 aa, Zea mays
  Coding DNA Sequence Number=SeqID_6327
MAWLRTVGGGGRFASLEPERRRAKGAAEETEQQDGGRLGFYGARKAEFKQRRPPPPFIGRARLLGKPTTRQAATLRETRNPTVRRPSTVTSKTPAEPLRARAASPPSSDVFGTRRLRAHASLTQDAGHSDTYKYPRTVPVRGEINRAIAPVHVTLLSPLFTPVGPLAAESKFQQT

SEQ ID NO: 49703 - protein, 419 aa, Zea mays
  Coding DNA Sequence Number=SeqID_6328
VADFTSRTASGALTATLSAEVERLRTQHADAVREKSASDSKCRKLAEKVAALEKEKADLRRQLMEERREANEAIAKEQSAQAEARLARAEGNVAKELAGELQRRLAAFESRAEGAEAAARAEAERTRTQLMTSYRELGVRTSDFEVPEREAGLRCLEWVQEELQELPTVLAGLMAFTSLVTCEAAMNALSREGCRHFEALDQVDEDFGRDIFEVEDPVVKESGGALYDRMRSAASGWTIFGALNSAPPEPETTRAEAATGVAPVQDFGPAHATATTGFLAASTAEGGNECGGSVSEFFDFTDSGSSAEWTEESSEEDLDYFAALDEAAAEAALHAADAPGVPGPSTGHRRRRAVAKRRISAEEGARLRVSRVGRQELLSLPAVSGVGEGELRSLFAGEELRIMLFNYREMGIIPKVEPM

SEQ ID NO: 49704 - protein, 297 aa, Zea mays
  Coding DNA Sequence Number=SeqID_6329
  Gene Ontology: Mol. function=kinase activity; Cellular component =ornithine carbamoyltransferase complex; Biological process=amino acid metabolic process
  Homolog annotation: Hit_ID=Q6QP54; Match level="QueryCoverage=39%, HitCoverage=48%, E-value=9e-24, Identity=50%"; Hit description =Putative kinase
MELGRRHHCLSGGAGQMGHRSCSLRPKSARGRVVMALPVDVAGPRPRPGDVGAPPKLGSNLSSIAEAESEPLGRARRKSFGTGQGGVRALGSGEAEFVVFRGRARVRALGSGGAEFAVFRVLAQVRALGSGGAEFAVFRVRARVRALGSGGAEFAVFRVLARVRALGSGGAEFAVFRVLARVRALGSGGAEFVVLWVRARVRALGSSGAEFPMAPLARPDCLSDSLCRVAPQSEWRRRRCPSVRPQLARWLRDAWAWASKLACQKSEKRVHLARLHAACMAARPFRPLVWAKVGGRL

SEQ ID NO: 49705 - protein, 216 aa, Zea mays
  Coding DNA Sequence Number=SeqID_6330
  Gene Ontology: Mol. function=hydrolase activity, acting on acid anhydrides, catalyzing transmembrane movement of substances; Cellular component=integral to membrane; Biological process=metal ion transport
  Homolog annotation: Hit_ID=Q10QZ3; Match level="QueryCoverage=22%, HitCoverage=6%, E-value=3e-16, Identity=73%"; Hit description=Copper- translocating P-type ATPase family protein, expressed
  Subcellular localization annotation: CTP_CleavageSite=57; ConfidenceScore=5.34e-01
MKTPPSTRHPTSHALRAHPLPTPYQPLASFVSTVYKVAPTCPMPSLAIPFDLADPCVAEARTFTAPARRARALGPFTPRGHTRSPTALSLTPIQTLAFASLPLPSVSPPAAHPRTGPVLDAATGEGAAGATTVLLDVNGMMCGGCAAWVRSILAWTLVALCCGSLGIHIGHGTFLDLLHNPYVKCGIATTALFGPGRGSNRLILKGIEQTGSSVCK

SEQ ID NO: 49706 - protein, 213 aa, Zea mays
  Coding DNA Sequence Number=SeqID_6331
  Gene Ontology: Mol. function=transferase activity, transferring nitrogenous groups; Cellular component=endoplasmic reticulum; Biological process=biosynthetic process
  Homolog annotation: Hit_ID=Q10P02; Match level="QueryCoverage=27%, HitCoverage=11%, E-value=2e-24, Identity=93%"; Hit description =Aminotransferase, classes I and II family protein, expressed
MEFPFMIYVTYVSEFLDSKSETDVDVDYNSLYSKHYFLQGEKTGRDENEVLKAIDYVHELSMRCPGQSECSTLPKNFRNPSYEKASYCQGCYNGLSKIVKEGPECPKLATIFHRQVDLGSTRTKPLPEQKALEMIFEKLQSDEGVHWAVQNGLHLSRSTVVYFKHNDVASLASTLEKLTRGNKRAEKIRRYIVVESIYKIIPVFWFDLEYTYV

SEQ ID NO: 49707 - protein, 56 aa, Zea mays
  Coding DNA Sequence Number=SeqID_6332
MEAKSHHQPNQGGTCKNYATSKAEYANTQLDLPAAWIKQSHSCEKQTIRIEFLTFA

SEQ ID NO: 49708 - protein, 26 aa, Zea mays
  Coding DNA Sequence Number=SeqID_6333
MAMEGRAPPPILTANAVVPLENKMEI

SEQ ID NO: 49709 - protein, 131 aa, Zea mays
  Coding DNA Sequence Number=SeqID_6334
MNTGVPDDLARFSSIEWVEEHQENLRTLKREIREHEQTWNKLATARTLSRWWKTDLGELSNSWALVSNWRHERVDWMLEYPTEPRVCSIYRALEWWPVNLNLRGGGRRGVALAHTIGGHYRGNLTGDHWMG

SEQ ID NO: 49710 - protein, 253 aa, Zea mays
  Coding DNA Sequence Number=SeqID_6335
  Gene Ontology: Mol. function=serine carboxypeptidase activity; Cellular component=extracellular region; Biological process =proteolysis
  Homolog annotation: Hit_ID=A2Y7Y4; Match level="QueryCoverage=91%, HitCoverage=61%, E-value=2e-65, Identity=52%"; Hit description =Putative uncharacterized protein
  Pfam annotation: Domain name=Peptidase_S10; Domain location=1-236; Score=-170.3; E_value=3.5e-05; Accession=PF00450.13; Description =Serine carboxypeptidase
MVVMGSTSEKMYLCQPFFLTGEICMCKYIPTVGAHILHTNRELLEALCVNLRGMAISNGLTHPVAKVATHADLAYFLSNLNARQKQELEALQSELVSLTHAQRWVASSDMRGQVLSRLQNMTGQATLYDYAKRAKAALDVRGDVAWEECIDTVGAAMQADVMRNVVPQMESLLWSTTCVLLYQGVRDLWDDVVSTKAWLGGQSGALAHLVVYGMGHLVPVDNGRVAQEMIEGWDLGTGMFSHGGGGDVWSAVV

SEQ ID NO: 49711 - protein, 71 aa, Zea mays
  Coding DNA Sequence Number=SeqID_6336
MALPRAALGKVRLSVTRLVTECRTLGTGPHSAKQALGKGPSAPVLKLTAVSLCREPRTGTQQRGFFAECLL

SEQ ID NO: 49712 - protein, 192 aa, Zea mays
  Coding DNA Sequence Number=SeqID_6337
  Gene Ontology: Mol. function=nucleotide binding; Biological process =defense response
  Homolog annotation: Hit_ID=Q9XEQ9; Match level="QueryCoverage=23%, HitCoverage=3%, E-value=2e-14, Identity=86%"; Hit description =Disease resistance protein RPM1 homolog
MEARMMAERRADHQRMAEMFQYMQSLGAAQGIAPPPPLFPPVDPLSSTLLANLGRHPTTLRKGSAQRSPGTLGKAAVSVTRRRNGCFSLSTFFAECDTRQRLCRVFLRLCRVLRALGKACESAWTVHRGEGREHDGVGARWGDGVGDELSSMNALLERLASSDALDPQTKEWRDQVREMSYDIEGCVDDYMP

SEQ ID NO: 49713 - protein, 86 aa, Zea mays
  Coding DNA Sequence Number=SeqID_6338
  Subcellular localization annotation: CTP_CleavageSite=59; ConfidenceScore=5.42e-01
MAPRTLYDDDSSQPPYGSKRTSARTQQPRQLSFRQAPALLQRPRHHTNRGPPGLETPTVGAPGRGLLRVDEQLPVKLQMGSLQQPF

SEQ ID NO: 49714 - protein, 84 aa, Zea mays
  Coding DNA Sequence Number=SeqID_6339
MVEWITRSTYSGGVESSGDPWTDLSGEAFVKAPSPAKGVPARFASGGPAAAAKASSEGWRLCLRSNICPPRDQFDKVTWCRRRH

SEQ ID NO: 49715 - protein, 143 aa, Zea mays
  Coding DNA Sequence Number=SeqID_6340
  Subcellular localization annotation: CTP_CleavageSite=43; ConfidenceScore=5.09e-01
MQSSKGKEATMVFGVFDELYLKKQKAGPSKVMAKATTSTGPAEAATKMTTEAVVLALSSSMIDKVEEPSVGGARLAVDPFVTDFKVADIELTLEMNALAPSYYNWIVFILKGIILIISFLDDPAVVPLGYSSLGRPMSKAGIG

SEQ ID NO: 49716 - protein, 270 aa, Zea mays
  Coding DNA Sequence Number=SeqID_6341
  Homolog annotation: Hit_ID=A2XFR6; Match level="QueryCoverage=46%, HitCoverage=36%, E-value=1e-19, Identity=41%"; Hit description =Putative uncharacterized protein
MEILMNTESNDVPVIFLWEITHMIRTLQTTRVNTNYAPPPRQAPVYPVVVEEVLVDLPRIRVEHGVILEDSLEELPPTPTPLAELLAFAARSSTSAPPAPAVQAPAPGGDDPDDSRDDDEDDDDEEDDDENVNEEANDAQQDYFMGDAAKRTMWSLSHTYWQQLHDTRFRHLPLRPSGGSQTNIVPGKAGEDRLNTLGGVVVGLNTDLDSATLDLSRVHLELEDAHARIAALEALLQGRDSLEAQFPAMALSPTRKRIRYGEPGSITRLL

SEQ ID NO: 49717 - protein, 207 aa, Zea mays
  Coding DNA Sequence Number=SeqID_6342
MEGGESKSRRRREAEVEEGEDIADEDRDGGAAREGMGGGDAREAKEVARTARRRRRTPESARALPPSAWPRSILRASSTVRLAADSAASGSRLAGASAGAGGTRPSRLIRRNAMPTPRSRIRSARGMKQSGGTAGRNAGCSRRNRRSPNVVGAQPHGGKEEARRWQDLDDHAEAEARGPAPREEHDRGSPAAGGGEGGGQSSRRLAR

SEQ ID NO: 49718 - protein, 354 aa, Zea mays
  Coding DNA Sequence Number=SeqID_6343
MGTAQQHASREGVELAPVEQGRRSAAGLLAVDSRGRRHGWSRGRGSRLPWGRREADHGREMTLAVLPACFVGKKRVAWGRWPMAARAGDRVCEELLPRASSGGAPNSGVAAKGGPDDGGGDDSSSHDTDFSANQEPEGWVARPITCDAARGCHFHDALDTLLRRALDRRTWSIEYRCVVYQHSRGVYPDRWEATCLVRRPENSLQGAEACSEHYSISERDSAEAAMQDAARRALSHYCSVLGGVADGLNLKYYPRRPSGSTGGVIVSPVGDDNPRLSSTVNLAAVLNTELDHALDELSRARAEIALLRGERAERRHLDDGSPAPVGTQRPYRSPRHGHQPYGNPDCKTKIDLEP

SEQ ID NO: 49719 - protein, 304 aa, Zea mays
  Coding DNA Sequence Number=SeqID_6344
MNKNTGIQSAITNGTPVPPPQVRTTPLHGGGPAEQQKTDERRAVTCSSSGDDDDFCSGGPNSGSTDLRADAAARRPPHMPKLVRQGWAEGRRVEGRSVAGLGYPAGRRTSSSYRGGRQRRERLRSHSRPRARHGAAASATDDDRPSLRSLSEGAGRRPRGGRPQLSTLPSPALEMKILEAEGGAEAAARLAFPHHQAEEQKKPKRRAWCTQPPSGYKRPPTFAQTNGRKERAAMQAACNCAKWTRFSDSQRASMEAQAHASRNRRARCCTQATAPPLAPPSRLFGCGTNTVTRGGPAHDLAAPA

SEQ ID NO: 49720 - protein, 98 aa, Zea mays
  Coding DNA Sequence Number=SeqID_6345
MSLSRRTTPLQEGEDDEDITSIHTIKWTDNTIVCTTANSPELTLRAMDVLMIRNLGEDQKGLGKGLVVEEEEQGCPQQEGDQVRLGCDSISGSRTSLH

SEQ ID NO: 49721 - protein, 394 aa, Zea mays
  Coding DNA Sequence Number=SeqID_6346
  Gene Ontology: Mol. function=metal ion binding; Cellular component =cytoplasm; Biological process=regulation of transcription, DNA -dependent
  Homolog annotation: Hit_ID=Q7XC99; Match level="QueryCoverage=41%, HitCoverage=7%, E-value=2e-78, Identity=83%"; Hit description =Transcriptional regulator, putative, expressed
  Pfam annotation: Domain name=KOW; Domain location=353-387; Score =32.7; E_value=1.4e-06; Accession=PF00467.20; Description=KOW motif
  Pfam annotation: Domain name=zf-MYND; Domain location=196-234; Score =56.4; E_value=9.8e-14; Accession=PF01753.9; Description=MYND finger
  Pfam module annotation: Pfam domain module=KOW::zf-MYND; Domain location=353-387::196-234
MEAKAKEFNEVIQEQYYPWFAQYMVMKRASIEPNFHDLYLKFFDKVNSKSLNKEILKATYENCKFRGALLAKNLGSWLGKFTIGRNQALRAKEIDPKSLIVEAYEKGLMIVVIPFTSKILEPCQSSIAYRPPNPWTMGILSLLAEIYNLPNLKMNLKFDIEVLNIPFFDSFFIDFVSALATHGHAKCSFGISAHVCHWCGTWKGDKICSSCKKARYCSEKHQALHWRTGHKNDCLQIISSSAASNSVLPTIGKVPANTSWPEFEIKIDYEGIFDSNSGDENNSKLLVMQRHGKPDAMMQSWMDQFEADSDNKCGTSFQERVSRAPNQVLRYCREPNAKRNMCIMQARIIKFDVGNVVMVTGGRNTGRVGVIKNREKHKGSFETIHVLLGAFCYV

SEQ ID NO: 49722 - protein, 287 aa, Zea mays
  Coding DNA Sequence Number=SeqID_6347
MRLYVMILVRTRPIAADHLEYYSVTLYADLRGTCQFVIGTANQLMKYCCVQLMKYWALQRLVTPSAQSCKGLMGAIKSRIGPLKGHDLASPEPSLGQGQLTPEDLRLARGPPPSNGHTFGSPDAQSSPRSNLGQVATTTDRIAGAFNAKGSDSGSAPEDDELRIARPQGSDSGSAPEDDELRIARPQGSDSGSAPEDDELRIARPQGSDSGSAPEDDELCPRPTPGLGLGLSPGRRRTPPRPTPGLGLSPSLSRRSPPRPTQGLGLDLDLGLGRQTRPRPRRSHRLA

SEQ ID NO: 49723 - protein, 29 aa, Zea mays
  Coding DNA Sequence Number=SeqID_6348
MATELRDARNRLASQELLLAQEIEARKES

SEQ ID NO: 49724 - protein, 268 aa, Zea mays
  Coding DNA Sequence Number=SeqID_6349
MEDLSVPDDLTYAEYPIKILDTLTRVTRNKEYIYLPLIYELINFYQRCLRALHVRWGRATSASLNLAPKSSHAISTDSVEPTWGPNPSLAQATILRITASSGTHRSSLSPSPFRSFLGLVRCCDQNLVHHHKNRALILAVANGTESTRAQQPCRSLRMPINLRFRHYRSITTAATPHTKIERENKGGRCHGQSLRRSPVLPLSVVRELCLDTWGAVNSSSVLDFAMVPPCCMGKATAAPIHDEQAIDDPEVQLVETAEQELVESKLCP

SEQ ID NO: 49725 - protein, 48 aa, Zea mays
  Coding DNA Sequence Number=SeqID_6350
MAKSNTDDEFTAPRLPNPAGIYRHAQAAAGLLSPCGFCAIGDRKDEGT

SEQ ID NO: 49726 - protein, 84 aa, Zea mays
  Coding DNA Sequence Number=SeqID_6351
MSGRKTKHTVKGFLNVASRIVPGARSLFQGSSSSQSRQEEEKDEEEEVQHHEEEEVQAHEEEEKEVAGIDAEADDDTTEAPVVR

SEQ ID NO: 49727 - protein, 542 aa, Zea mays
  Coding DNA Sequence Number=SeqID_6352
  Gene Ontology: Mol. function=structural molecule activity; Cellular component=protein complex; Biological process=microtubule-based movement
  Homolog annotation: Hit_ID=Q9YI87; Match level="QueryCoverage=23%, HitCoverage=68%, E-value=1e-48, Identity=71%"; Hit description=Beta -tubulin
  Pfam annotation: Domain name=Tubulin; Domain location=297-442; Score =24.6; E_value=2.2e-08; Accession=PF00091.16; Description=TubulinFtsZ family, GTPase domain
MEEMETNTATDAERGATVFAVGEQINQIVVGRRRGIGDGKTVKRDVWSPKYAILLERAPQTAAGYCSPMCSAFGTYAARDRRCWNAPVGGVRRPREIEVKVREGQAARLFSGSEGEIGTDRQKPRWGGRRRLRISSWPMDYGWDWGKDPCRFCAVGPTTGEALALASLIDDEKKLGDCQFDLWKQYYVAAYVAVFGKLRRSRCLDAVQSGCTALSIFKQGTSWSSLTPATLGLFWAPHPTTAPSRRPAHHPPEAQPATVYGGACLMTDNVRGNFYRQLEHGIDHTGKYVGDSDLQLKRINIYYNEASGGRFVPRTVLMDLEPGTMDSVRSGPFGQIFRLDNFVFGQSGTSNNWAKGHYTEGAELIDSVLDVVCKEAESCDCLQGLSLAGRRYRFSGTPSPQDHTEKVVALKDPLDVLDVSIVGGGMVGLPVACALCRNAAEGDDGMGAAAEAERRRQQGEVARDGRRHRRCFVPGPGRRAGPASAKAEGVHARRAAGPTCGFKPKMVLGEGGFGRVYKGWVNERTLNPAKSNAGVVESRLEG

SEQ ID NO: 49728 - protein, 113 aa, Zea mays
  Coding DNA Sequence Number=SeqID_6353
MNELPRADYCDVGDSTNVGDDRGKQVKARANEGTSKGKAPVVATRKRKLGMGDDETGPRASGIFVEELMGTRNIGAIVSVVMEKYRQDAQWKKRKAPFGWWTHTKKLSWHEPA

SEQ ID NO: 49729 - protein, 392 aa, Zea mays
  Coding DNA Sequence Number=SeqID_6354
MRASDSARASAYSTHSTSHSYACRYVEPAVMTPLGARHLELEVGVVGDGHELSVAWSPQHCVVGSSEPDHLEREGFLSEVGGSPEADGQIELPKGLDAFPGDDPVKGRRASPDRGQIDLQEPEGLGVDDVEAAASVHEDLGKPDVADDEIDNERVLPRARHAVGVVALVEGDGLVGPVKVGASGRLPRVPVLGGGDKVRVGGVAFRLRLLLALLPRAALSGRLGDVFRLAPLRLLVLPEDGLDRLLPRGELGGDVHQLARPGGGLATQLAHQVTASGTGEERANDIRVGDVGQLGALLRESPDVVSEGFSRLLAAASEIPGVPRAHARALEVAGEGFDQVVPVGDLRRRQMLQLGSGGVGEEQGKVADDEVVIVRPTQLAGQPVVRVPQFRF

SEQ ID NO: 49730 - protein, 101 aa, Zea mays
  Coding DNA Sequence Number=SeqID_6355
  Subcellular localization annotation: CTP_CleavageSite=38; ConfidenceScore=5.24e-01
MAPPVTWSVRARTSGEVEAPPRSRLSPSPWGRARRSPSSEVEAESEPWGRARRSPSSEVEAESEPWGRARRRPSSEVEVESEPWDRARQSPSFEVEAESEP

SEQ ID NO: 49731 - protein, 183 aa, Zea mays
  Coding DNA Sequence Number=SeqID_6356
  Homolog annotation: Hit_ID=A2Y5I3; Match level="QueryCoverage=22%, HitCoverage=3%, E-value=6e-12, Identity=85%"; Hit description =Putative uncharacterized protein
MEKQSSSDAFVGLVNNALEELSRRVLSGLSCSCLPEELADNVWGHQYSFKAPPYPGEDSLQHVIILGDMDKVPKVHNKPIKRPRKGSNKESKRQPKGTLVWRTGLSGVPPDSVRCTRALEAELATFGKFQGCSAIIHRTVRCTPDCLVCQRSNGYFARNGRLQPHSMRYSALQSQSTRSWRTG

SEQ ID NO: 49732 - protein, 328 aa, Zea mays
  Coding DNA Sequence Number=SeqID_6357
MGSARVAFVLSSLEERNFVEVASRIFIILDGAESEASQSSTTRTGRRATSSGGGNHPPALRRRRPPAMPGKAICCCPARVQHSVLCPRFHGEDRSEDLSVRFGAAGARWCGVGGQVDAAVGAEVVAAGESFSAIGTRLPASHQEFVVPQALRCGGCSYPREWNWSFICNGTLSAGVCSSWLSGPEHESLGSVGLAVRGFSCLVKETLGRSAMSQSRRQRRQHGQRQSWLEKKLRRPEPGRAVHWRDRRRSRVAEATSQADVLGGQLAEAMEWPVKPPARAGFPEETLAAMAQKVVSEVSVSRRRRSPSARSALPAYVYSVVFRIPLSK

SEQ ID NO: 49733 - protein, 92 aa, Zea mays
  Coding DNA Sequence Number=SeqID_6358
MGIGCLRDKNLNKNYGVVPGHIPSCDLRRGLPFRLWWVQVRSLHDGSRGQWGIVRQGGSLEEMVAGVTWPSILPPGWTVEWDPASTEEEHEE

SEQ ID NO: 49734 - protein, 151 aa, Zea mays
  Coding DNA Sequence Number=SeqID_6359
MGKSKGGGRSSHHSGDKRKREPTPPSEDFGESEYSEEEFSSEFEGSPAPASPPLLSDDSDDSQGIAVEVWTYIRAVERAGLEGSDESEYSSDEENSSDSSEEGSGGGGGDGDDDGGDGDSDGGSGKGGDDSGKGGSGDGAGGSKGSNKASG

SEQ ID NO: 49735 - protein, 117 aa, Zea mays
  Coding DNA Sequence Number=SeqID_6360
  Gene Ontology: Mol. function=carboxyl- or carbamoyltransferase activity; Cellular component=ornithine carbamoyltransferase complex; Biological process=amino acid metabolic process
  Homolog annotation: Hit_ID=Q8SA97; Match level="QueryCoverage=90%, HitCoverage=21%, E-value=7e-17, Identity=49%"; Hit description =Ornithine carbamoyltransferase
MAPPVDVAGLRPRLGDVEAPPKPRSSLSSVVEVESEPLGRARRSSSSSGAEPKSEPWVGRSGPESEPWVGRSGVRRLPGLSPSLSPGSGGAEFAVFWDLARVRALGRAERSSPPSGT

SEQ ID NO: 49736 - protein, 69 aa, Zea mays
  Coding DNA Sequence Number=SeqID_6361
MSKLRLSLAENLGNLYLEQIQDCNLADGEYVLIPEQGAVHEEDQEQAPETAIEDLPVAPAIEGKPRFYA

SEQ ID NO: 49737 - protein, 73 aa, Zea mays
  Coding DNA Sequence Number=SeqID_6362
MASGGELAGAKGGVSGQRGLAGFADWIKRYGGVKLGLSHCRTLREDPEFDMSRAPVPMSSSDFPIKPSLEWLA

SEQ ID NO: 49738 - protein, 180 aa, Zea mays
  Coding DNA Sequence Number=SeqID_6363
MEMNELKTSNGSKRLVQPPELQRRQGEEDDWRVASEVGCFFPLFAAPELLMLHVGASADRPWALQTSTAGGVTGLEEEDRLCAVEETDGTRGPGDLPMVMQWYMYPSPIPPYTMVEARKPGRGARQRGFKEMGELQQGGDGTALGRRPSWPETWRRVAGELATATKERRRWKTGWGGVTA

SEQ ID NO: 49739 - protein, 172 aa, Zea mays
  Coding DNA Sequence Number=SeqID_6364
  Subcellular localization annotation: CTP_CleavageSite=68; ConfidenceScore=5.47e-01
MPGKANCCCPARMQHSALFLAFAARTAARTCRIWTFFVGNWDVCASESCFSRKVMSEVSVSRRRRSPSAQSALPLTRTLTRPWGSATDSVEKARRIASAEELLNVKTCSVRGITYPNVSYLSQKVMSEVSVSVGVPRLGSTFRNSQKARKTFWQKRSFFEENFNAEGFPPPL

SEQ ID NO: 49740 - protein, 92 aa, Zea mays
  Coding DNA Sequence Number=SeqID_6365
MGIGCLRDKNLNKNYGVVPGHIPSRDLRRGLPFRLWWVQVRSLHDGSRGQWGIVRQGGSLEEMVTGVTWPSILPPGWTVEWDPASAEEEHEE

SEQ ID NO: 49741 - protein, 391 aa, Zea mays
  Coding DNA Sequence Number=SeqID_6366
MTSHKSLEGGNAHSHTYGLAREGFPRIWWEVLQGAGYTTPPQHAVQLFEEHPVPRCRVRMTLEPQPLQLGWRPLDSESFGYRAKDTIEAITLHGLTTFCGFHPLELSTHPIGLFPAEKEDNPMWKDRVEHAKDVWALYPGQTAHLTVRCMNALYRLQAMRGEAMSQLMGLVEATKITLDNREDLVVDLSTELVEKDLQVEQMATQIQELEELVGARENTIDVLEDQLMNTQQQLEEANQHLDMHHQEIQDMEADEDVNIEGGVEPDPASSLDTAGSGRPPSPKSSVASELKAGQHKSYPDGGEDDELNNPRVVDVGDNHEAPLLNDGQCGAAALDRVQAAASRELVVHSGACDHVRLLLEVELTVAKLLLVIDERRQHECLLLMEFVRGLK

SEQ ID NO: 49742 - protein, 149 aa, Zea mays
  Coding DNA Sequence Number=SeqID_6367
  Subcellular localization annotation: CTP_CleavageSite=41; ConfidenceScore=5.08e-01
MAGHGDHASYRSKPDNSSPTRCPVKSESTRGSLTKNGGAAEANHGAARIRGDPNRRQAIAEAKCRHKTRPPPEHVPCGHTKLWDPALATILQCHQVPRAELPNLSLGWVKFSAVDSERFGATHAREEEQGRVADAEGPPVIGARERAAG

SEQ ID NO: 49743 - protein, 334 aa, Zea mays
  Coding DNA Sequence Number=SeqID_6368
  Gene Ontology: Mol. function=amino acid transmembrane transporter activity; Cellular component=integral to membrane; Biological process=amino acid transport
  Homolog annotation: Hit_ID=Q10KQ0; Match level="QueryCoverage=83%, HitCoverage=56%, E-value=1e-102, Identity=63%"; Hit description =Expressed protein
MCTNLSCAPNIFSIQKTKLPSQRQQQQELPPEDGVIVQALTSQDEQQQAAQGRHGTVQGDQHHRSSSKLTVLPLIFLIYFEVAGGPYGSEQAVRAAGPLFTLLGFLVFPFAWGVPESLVTAELSAAIPGNGGFVRWADLAFGPLAGSLLGTWKYLSCVINIAAYPALVADYLGRVIPAVAGTGRTRTCTVVGMTVFLSFVNYTGLSIVGWGAVALGLVSLAPFVLMTGIAVPKMRPRRWTVPVEGRKDWRLFFNTLFWNLNYWDSASTMAGEVERPEPTGATDAPPDTWANGYLVDAAGVIGGPWLKFWIEAGVVLSSIGMFEAQLSSGAFQLL

SEQ ID NO: 49744 - protein, 171 aa, Zea mays
  Coding DNA Sequence Number=SeqID_6369
MALGARRSQLAGHRTAGGEADWSGRSRAAGGTLAAGWPCRQHDGDGFRGASSTRRHIRAPSRRRTRRRGEDVAMGAEGDAEDVVGVARERLGEAGSSADGEIPDVDGAVIRCGGKPARRRPSGEKERCLRPINAILEDLLDLWVRTHTRYRCATLILLVDVDRIIFIGVSG

SEQ ID NO: 49745 - protein, 135 aa, Zea mays
  Coding DNA Sequence Number=SeqID_6370
MEGRGMSIIKDGAKAMIVTDKGENATKVRIDKTPFSNRDGKDDISKGMPKISIMERSRYYKGKGEEKGTNKSGMGKTTLLNWNGRGSFKMQVQDKHHGKVQGMTRVKVITDKHNQGGILDKTCEVSKNGKQSMVK

SEQ ID NO: 49746 - protein, 53 aa, Zea mays
  Coding DNA Sequence Number=SeqID_6371
MDTLFTDDDDDDDDAGFYCDYDYGFLVFFPFGKGKEGVEADLQEFQDFDESED

SEQ ID NO: 49747 - protein, 404 aa, Zea mays
  Coding DNA Sequence Number=SeqID_6372
  Homolog annotation: Hit_ID=Q6J9V9; Match level="QueryCoverage=34%, HitCoverage=40%, E-value=1e-10, Identity=40%"; Hit description =Putative uncharacterized protein
MHKGARRHGRLPRESPPFKGGSPYLRPQPSWAESPPTHSKVLPYGTGAGSHTSCKPTQSGRSQTAVRGAYNRPAVTSDSPLLPRPTGERGGQPCRRHATAPSGCASPTPNTPSMEAQAHASCNRRAECFVHTTAPPLAPLPRLLDRGTNIATRGDPACDPAAPAWHDGQCSQKWASSNGGGRRAGAAATSRSGRRFAFAIMTASKKGPGKGDTPKRILPREGTRLRASLLIRGSKAGPLEGFDSRLRSRGPTPTTGQRFEGRPLGRVQRPPQATRAPRPLLIRGSKAGPRRVHSRLRRRARDDHGYVRYIAEARAALLSRPPTNGARKSTRITRLQLTGDTMFGAHRGGSGAALANPAPAEPLTASTYQPENLGLDRTPGLRPARMRDDHTSRSITRGIKTSEE

SEQ ID NO: 49748 - protein, 206 aa, Zea mays
  Coding DNA Sequence Number=SeqID_6373
MPPCDVVGPSPGSGEAEAPPRSRSSLSSEVEVESEPWVGRGRRPSSEAQAESEPWGRARRSSSSFRSRGRVRALGSGEAEFVVFQSRGRVRALGSGEAEFVVFRSRGRVRALGSGEAEFVVFRSRDGGRALGSGEAEFVVFRSRDGGQALGSGEAELPMALEAGLGCCQPHSVEWHNSRSDAGGVVFLSGRSVERRSDCGHFGSVD

SEQ ID NO: 49749 - protein, 53 aa, Zea mays
  Coding DNA Sequence Number=SeqID_6374
MAHRTVSGAPGRTTDEPATLRKLQGALRYNSPDCPSRPLAQIAVAPLAHQTVR

SEQ ID NO: 49750 - protein, 270 aa, Zea mays
  Coding DNA Sequence Number=SeqID_6375
MVTTSPWMGRGKPGCDLGPALSFKDVHHPCWGGERGEPGLYLPRGPAGHLFFQLLVVATILQLCGGGILQPCRGRRTVAAQLGCNIPPSSSLSWRGRERGPAGALWSGPLFGFDGWFASLEREHEREPSSGRVRPGTMAAAAEVAGESPGTRRPAGSPVWRLFIPAGTEPEFVGPTPELIFRGLGPVSSGDSWPRPRGDQPSRLLGPDSRRRPWRRWPGRGDDVVLQSGDPRTASPSEARSDLAEGVVDAEGAAAPFNCPDPSLQDRIIL

SEQ ID NO: 49751 - protein, 908 aa, Zea mays
  Coding DNA Sequence Number=SeqID_6376
MCSHFYSAYPPFEVAEDDVDEGALRCAAGLSSGRDLVEEFVAYGVWPLAHGWALGEVCPRQMPFHGGRVVRSPAFALNLQSRDPAAFVREAEDGAVRLVGRYVSRTEGQRSFDIRGSNDRLNRVFELNQLPYDGYPGQDDVDRRGKKPVVETGDDPAPAAAPSSKKRKLGTAMGGLGVSDSFARELMRTCAAPGGRMSSPELRESSARMLRVTGGCWPRNVPIPRAAGEYFFTSRMVREWRVFFYGRNIATVVSAVMDKDRQGAAQKCQAVVRLVEARPKRQRGYAKAAAPGGGKPPLAAKSGAPTSSKAPEATAGAGGSKSTKAVPPAGRVPEVAKAARALPSAGKRIADFATDISVEDYLGGSDEGQLAIVAPAAATTTVAVALKAKGGALSAGGEVAALAAVRDEAGVASRRLKEVVESLRQHADAVREKSAADSKCRKLADKVAALEGEKADLRRQLAGERRETNEALAKAQAAQAETNLARAEGNLARERAEQLQERLIALESRVERAEAAARAEAERTRTQLMDTYRELGARTGDFEVPDREPRLRCLEWVQEELQALPTVMEGFMSYASLVTCEGAMNALSREGCRHFEVFNQADEDFERDIYKVEDPVVKESAGAIYDRMWGPHGRQVVRERAETARAQAARGERVDDFGALNSALPDPEPTPAEAVSGVALEPTPETAEDAPDAPASAAASEDLLLEVAEGAPDAPAAAAPSVEDPAAVAAETTAEATAEPTAEAPATSGPSQVQDFGPAHATATTKFLAASTAEGGNECGGSASEFFDFADSGSSVEWTEESSEEDLDYFAALDVATAEASPHAADAQDVPGPSTGRRRRRAVAKRRVSGEEGARLRVSRAGRQELLSLPTAGSTGEGELRSLFAGEELRIMLFNYREMGIIPKVEPM

SEQ ID NO: 49752 - protein, 311 aa, Zea mays
  Coding DNA Sequence Number=SeqID_6377
MTSHGSSDEGNALTHTDGLAWEGFPRILWEVLQGSSYTTPPQYAVQQFEKHRVPRCRVRMTLEPHPLQPGWLSLDFESFGYRAEDTIEAIALHGLTTFCGFHPLELSTHPIGLFPAEKEDDPMWKDRVEHAKDIWAIYPGQTAHLTVRCMNALYRLQVMRGEAMSHLMALLEATKITLNNREELVVDLSTEMVEKDLQVEQLSNEIQELEELVGTRENTIEVLEDQLINTQQQLAEANEHLDMHHQEIQDMEANEDVDIEGGEEPASSLDTAGSGRPPSPESSVASWPGEHVMVKMSAFLHRRHRLPLYRS

SEQ ID NO: 49753 - protein, 138 aa, Zea mays
  Coding DNA Sequence Number=SeqID_6378
MACIPDSGKSGHGRFASCCEVEADNPGPPVVARNARRPRRARYNGPDRTWASELDEAALWDDIIAGLRLVPIKRRVSLPVLSLSDQRLQRRLRAKGGVFAFAPTFAIRGTSSTKSPGAEDVARWRRRCPRSKWFRGGF

SEQ ID NO: 49754 - protein, 352 aa, Zea mays
  Coding DNA Sequence Number=SeqID_6379
  Homolog annotation: Hit_ID=Q6J9V9; Match level="QueryCoverage=21%, HitCoverage=27%, E-value=4e-14, Identity=60%"; Hit description =Putative uncharacterized protein
  Subcellular localization annotation: CTP_CleavageSite=82; ConfidenceScore=5.16e-01
MATTRGVDPFLKVTLPTRVLRRRGLSLHQRTPGSSPYDTGAGSHTTCKLAWDRRSQTAACGACNRPAVTSTPPSSPKPAGERADHHAGGMQLHHGDTPFDFNASSVEAQAHTSCNRHAGYYVQKTPPPLAPVPRLLDCGTGAATRGNSAHSPTVPTKRIGHGSVSRGRRRDGRYGQKWAGSNDSGRRAKAAVKSSAGSRPLPEQQGSPLSRREDDTPVFRPSNGSHNAKRATLHLHHNDRVKKGIGKGDTTKGILLCEGSGPRALLLIRGSKASPSEGFDSHPRALGLRAHYWSEAGPPEGFDSRLRTCRVRDDSGYVRYMAEARATLLRSKLRPLQGHDLASPEPSLGQEH

SEQ ID NO: 49755 - protein, 343 aa, Zea mays
  Coding DNA Sequence Number=SeqID_6380
MGSARVAFVSLWEERNLMEVGSPAASPHQWSPKTVTTSSMVGRSKPGCGLCPALSFKDLHHPCWGGGRAEPELYLPYGPAGHLLLQHLGERALTVLAEGVDFDNAGPIGRKRRQLQHAWFASSAGSGTASGATSHRWVECGYLPTVRAAVASRAPGDRPRRRTPLGRRSCPWVVLPLLRHDASARRSVPARPGGLEWGSAGGQVAAVVGAEVVAAEEGFSADEIVGTICVSGLRLFGFDCLSSPLEWGHGRGPCRSNVCPESALPLKASLPQLRNPRLLCDEPEAAVSAWIEAELAREETSSAQEQVTSQAEELAEATERPVKPSAWTGFLEETLAAMARARC

SEQ ID NO: 49756 - protein, 149 aa, Zea mays
  Coding DNA Sequence Number=SeqID_6381
MSRSFLQSDNGGHHSRTGGPASVPNGRVLIVVEASWMFNIAVQGKKLMLMWYFKPYLYMDVVLASTVTALRICTDVAHVLEQFCLVWCGKLVRDARAVALSRASASTSSSLGVETELSMHAGGARCDRYYPYLINDDNGDGHDIWSILY

SEQ ID NO: 49757 - protein, 253 aa, Zea mays
  Coding DNA Sequence Number=SeqID_6382
MTSHGSSEGGNGQSHMDGLAREGFPRILWEVLQGAGYTTPPQYKAEDTIEAIALHGLMTFYGFHPLELSTHPIGLFPAEKEDDPMWKDRVEDAKDIWALYPGQTAHLTVRCMNALYRLQAVRGEAMSQLMALVEATKITLDNREELVVDLSTEMVEKDLQVEHMANQIQELEELVGARENTIEVLEDQLINTQQQLEEANQHLDMHHQEIQDMEANEDVDIEGGVEPEPASSLDTAGSGRPPSPESSVASFVH

SEQ ID NO: 49758 - protein, 98 aa, Zea mays
  Coding DNA Sequence Number=SeqID_6383
MDRLIPARRAVPRRDRKDLPKPTPPFTGPPTSPSNQFCQILNKLKVKETRKDCNLADGEYILMLEQGVAQDVAQDPAPESAVEDLPAPTLEGKPRFYA

SEQ ID NO: 49759 - protein, 49 aa, Zea mays
  Coding DNA Sequence Number=SeqID_6384
MAIGVSEALYAKAIGSLEDMVAGVTWSSILPPGWPVEWDPTSVEEEHEE

SEQ ID NO: 49760 - protein, 106 aa, Zea mays
  Coding DNA Sequence Number=SeqID_6385
MDRPEQPTSSPACARGLADSGHHRRRAVPRRDRKDLPKPTLPFARPPSSPHISYSLHSIDCNLTDGEYILVPEQGVVQEVAQDPAPESVVEDLPAPALEGKPRFYA

SEQ ID NO: 49761 - protein, 138 aa, Zea mays
  Coding DNA Sequence Number=SeqID_6386
MAVRKGPTTVKWRSSNGGEVAGEALGYDWGGYAMFRARDKVAIGEWRESLLEWRRGGGADLIELGERVGSLDDNIHTDKGPSCYIKMGEQSSPNRAVRMSHEDRHGTVTIKISGAVSSTSMICRYNLRPPGRFVPQEE

SEQ ID NO: 49762 - protein, 157 aa, Zea mays
  Coding DNA Sequence Number=SeqID_6387
  Homolog annotation: Hit_ID=Q5NKP3; Match level="QueryCoverage=58%, HitCoverage=36%, E-value=2e-18, Identity=56%"; Hit description =Putative uncharacterized protein 9C20.7
MNHVSTGKPQTNTTGRKRSRGIDHRRREEAWRLPVRPLEAVLRGHMRRCVRQALSQPLLGRGPKCCTALSIFKQGDLMVIANAGDSRVVPGHRIRQRALSRRPAHHPPEAQPATQESSVLAMSCASDDYYIKDYGVILAPEVTQRRTDSNDHSPSSG

SEQ ID NO: 49763 - protein, 107 aa, Zea mays
  Coding DNA Sequence Number=SeqID_6388
ALRYNSLDCPVHHRTVSGASGESDSELAIFGFPLRYNSPDCPVSQRSNGYFAHNGRLQRIKCAPARAEDRARAGGTPDSLQDLSGAPTGQPGGPTSSKLQWSEPNGQ

SEQ ID NO: 49764 - protein, 137 aa, Zea mays
  Coding DNA Sequence Number=SeqID_6389
  Subcellular localization annotation: CTP_CleavageSite=40; ConfidenceScore=5.29e-01
MGKPVPSLLMLLLSRAINNFCQVITFPLVTQCSSMDQAVSLAARSRRFESSFYPCKIRAHRLGVQGLTDPDCRRAVTALVPTITGMGDHVSGRVRSKVCGQVHSGNNMLLCQKIPEGYLVVIRYAFLKFNAKKTLYN

SEQ ID NO: 49765 - protein, 129 aa, Zea mays
  Coding DNA Sequence Number=SeqID_6390
MDQEKGSTKRARDNRRLPWSGAPDYPVCHRIVSGAPPDSVRCTRGLQAKLFTFGNSQRRSAIITGLSGAPPDSVWCLRESDSELAIFGFPLRYNSPDCPVSQRSNGYFAHNGRLHALNARCARRDGTPA

SEQ ID NO: 49766 - protein, 225 aa, Zea mays
  Coding DNA Sequence Number=SeqID_6391
MAREDKILQGINSGSGPPWESAGPLHIWTGSPSKVQDLHGYKPDPWDGSRTPLCGVRATHGRVPGLWDKECLDLNQDQAGVRSRHVFGPCRVRFGSPLRWRPDAATWPTARDVSQRVEPDVLGWGHKGPSTCVDWVGSQRTFGAREQGAPDLGVARHSPPPLSCSFAAMLPRWEFQMGRQTMWEMCRTIAERRSACWRGNFSPSRSDAMNPLGRVDSFTQPPSHR

SEQ ID NO: 49767 - protein, 401 aa, Zea mays
  Coding DNA Sequence Number=SeqID_6392
MHVVGDFLKHRITLLQQKARLCCWFTGSNDIDQIQRGPGTNLSWEELEVLVKGITGESFGPKSLILPEGIPALCDDAGLRTVILATLSTLDERDVAVRQTGGRDPHRRIWISDAPAEGPPDCRRGPQCSRQSFPRLRRGPPPLGHHQQEQQQQQQKQLSPRFQGRWKVQGPKASSPSAPKVVPPPRPGCCRQDSATGPPGPCWGSGSSGANAKRCHSNGGGPHCPGGYHSLNDGDAIDSVPPPTPEETEAIFGRRLRSGAKPEEAPIPLPWVLSRAHQALHETVAAILWEWEALEAEHQRLGDWRVGGDPEGEEAGQEGGSLGLEGGGHHRAPGEAERPQQNPGGAAGPADRGCGEVEMFERRQKLLADHELEAEEKERMLEEKEQTLGERVCQFQAAQAA

SEQ ID NO: 49768 - protein, 107 aa, Zea mays
  Coding DNA Sequence Number=SeqID_6393
  Subcellular localization annotation: CTP_CleavageSite=38; ConfidenceScore=5.13e-01
MEASEIRGIVPRTLVKREMKAQRVSSGSCLTAWRQRPRRSPRRPGRLRGSVMPLRVHSSGTQRKEVGGPWCGRGSRLFHHEILGHEIMVLDDVDHGVEQENKQKPKA

SEQ ID NO: 49769 - protein, 153 aa, Zea mays
  Coding DNA Sequence Number=SeqID_6394
MGKNNKRKREPTPPSEEFGDSEYSEEEFSSEPEGSPAPVSPPASSDDSDDSQGIAAEVWTYIRAVERAGLEGSDESECSSDEEDSDGGDEGEDDDDDDDDDRGGGDGSRDSTKGSSRGSTKGGGGGSRDSTKGSSRGSTKGGGGGRGRGRASG

SEQ ID NO: 49770 - protein, 204 aa, Zea mays
  Coding DNA Sequence Number=SeqID_6395
MKTRCPRGYLKSRGEQHPTPPRERLRGRHVAREDKILQGINSGSGPPWESVGPLHIRTRPPGKVQDLHGYKPDPWDGSRTPLCGVRATHGRVSGFWDKEYPDLNQDQAGVRIRHVFRPCRVRFCSPLRQRPDAATWPTARDVSQRVEPDVRPLGRVTSAFIVDKLRRLSIPLAGDVSPQHLMSPDHSTGRRCAASAFNEPCPLR

SEQ ID NO: 49771 - protein, 125 aa, Zea mays
  Coding DNA Sequence Number=SeqID_6396
MTTEEANNRGHNIPPRLQGNNRAILGPQLQGAEAPGASEEGEEAPKGGLQRKINVDTAEVKGEEAPKGGLQRKINADTAEVKGEEAPKGGLQRKINADTAEVKGEEAPKGGLQRKVNADTPKNKR

SEQ ID NO: 49772 - protein, 124 aa, Zea mays
  Coding DNA Sequence Number=SeqID_6397
MKHKTAALKLTQRFLSKDLKWERQEMCVREREVFLGLEMEFKSCSLLWGERLLVRGQRGQRPAELPLRTSSTGLDQRVLGEKTPAQLPGGQVQLLKKLNSAEVKFSWKAQLQLKKFSCFSARTL

SEQ ID NO: 49773 - protein, 33 aa, Zea mays
  Coding DNA Sequence Number=SeqID_6398
MSCASDDYYIKDYGVILAPEDYKWIMKHFLITI

SEQ ID NO: 49774 - protein, 252 aa, Zea mays
  Coding DNA Sequence Number=SeqID_6399
  Gene Ontology: Mol. function=protein binding; Cellular component =microtubule cytoskeleton
  Homolog annotation: Hit_ID=A2YBT1; Match level="QueryCoverage=89%, HitCoverage=72%, E-value=3e-75, Identity=66%"; Hit description =Putative uncharacterized protein
MHDRSHKPQPAEAGNGGPAGEGGGGNVDRVLFKNLVEMVPLVESLMDRRVNPAYSRRASLVYTPAPPKKASDLKSVKLPQSVSAKKRRDPGDIAKKSTPDSNGDNGSVVPLSLSGAENMPKDEVAVLSEQINDLQKKLLEKEEALRSAESSVTEMNAAYATIDELRRLVADKEALIRSTNSQLHDAKIMLADKQASLEKLEWEVKMSNKKVEDLQGDMSNMGFEIRHMMIFFDPYSESNSGDYCDDVIPSTD

SEQ ID NO: 49775 - protein, 95 aa, Zea mays
  Coding DNA Sequence Number=SeqID_6400
MAKSASQTGKQVARGVRGGSTALGGGSTGLVNPDQSAENEEEIEVTEEKTPPPSDSQAGNCFYFDICGSEPDSPTNEGKPRCICHLLDAFKIFLT

SEQ ID NO: 49776 - protein, 260 aa, Zea mays
  Coding DNA Sequence Number=SeqID_6401
MNALSREGCRHFEVFDQADEDFERDIFKVEDPVVKESAGAIYDRMWGAHGREVVRERAETARAQVARGERVDDFRALNSAPPEPEPTPAEAVSGAALEPTPETAEDAPDASASAAAGEDLPPEVAEGAPDAPAAAAPSAEDPVVVAETTAEATAEPATEAPATSGPSQVQDFGPVHATTTTKFLAASTAEDGNECGGSASESFDFADSGSSVEWTEESSEEDLDYFAALDVAAAEASPNAADAGDGWPAGTAVFAGCQEY

SEQ ID NO: 49777 - protein, 152 aa, Zea mays
  Coding DNA Sequence Number=SeqID_6402
MGQTRMLLFRHVGKTSSIPPPAGGLTATIVVVARRRKEYHVVAAVEGHELQTPETKHRPGLKRLLETTHLELDGKMFVNTQQAPTWRANCRRFDPGGSLDQRVNCRRVSQPRWVSARRSTRGEKQQGEPAAFVLPCAQVGRKERAQVYNGRV

SEQ ID NO: 49778 - protein, 137 aa, Zea mays
  Coding DNA Sequence Number=SeqID_6403
MGPIAAVEKSHRRRPIRATIGAGVEMFGQRASSPEDLFPLDRTAAVEGTNSGCHTVIPPSGRVRSPAPLSSVRPRHHGFDGLPAMVERGKLWGNAVFGAIADRQLRLAIVITVTAIVTLRSYKFTPTSPSLLKSTKP

SEQ ID NO: 49779 - protein, 439 aa, Zea mays
  Coding DNA Sequence Number=SeqID_6404
  Subcellular localization annotation: CTP_CleavageSite=35; ConfidenceScore=5.49e-01
MAVRPFTRWSGRKWRSACSPAASPRRWSPKTVTTSSMVGRSEPGCGLRPSLSFKDLHHPGWGGGRAEPELYLPHGFMGHLLPQHSGERALTGLAGGVDSDNAGPVGSERRQLQRVGLAGSAGSGSAPGAPSHLTSGCRAARTGGPPKTLRAARAAFVFLGCPAFAPMASVVGAEVVAVEEVLVADGITATIRAPGLRLFGFDSLSSPLEWGRGRGAHCSSVRPEAITAAVWPPGAEVVIAAAGAGVGEPPGVSSPRKPSNVGGCSYLRGWNRSSVCNGTCSAGVCSLWLSGPEHESLGSVGLVARGCSCLVKGTFGRSAMSWSRRQRCQHGQRQRWLEKKACRLEPGRAVHWRDRRQSRVAEATSRADVLGGQLAEATERPVEPSARAEFPEETPVTMAQAWCLQVPSRWRSSDRVAVRGRVGFRRRWSRRRGCRCSPH

SEQ ID NO: 49780 - protein, 231 aa, Zea mays
  Coding DNA Sequence Number=SeqID_6405
  Subcellular localization annotation: CTP_CleavageSite=49; ConfidenceScore=5.40e-01
MGSSASPDPGLGLSLDPGRRTPPRPTPGLGLSLGLGRRSPPHPTQGSDSASTPEDGLCLARPQGSDSASASEDGLRLARPRACNTPELNLCCHRSLRENEAPKRSVRLSDGVGHGTVLQGKQIWVRSPRWKNLTADDLSAPRLVPESRCSGGEHLPPKIFFLRIGPPRWKALTPAATRSFLLPAVSDHRRRSPLFGHAIMDLTVFRPWLNVASSGGMPCSVPSLIASSGWQ

SEQ ID NO: 49781 - protein, 195 aa, Zea mays
  Coding DNA Sequence Number=SeqID_6406
  Subcellular localization annotation: CTP_CleavageSite=49; ConfidenceScore=5.40e-01
MGSSASPDPGLGLSLDPRRRTPPRPTPGLGLSLGLGRRSPPHPTQGSDSASTLEDGLRLARPQGSDSASASEDGLRLARPRAHTRASAPEDGLRLTRPQGSDSASTSEDELRLARPQGPDSTSTSEEPPPRPTSGSDPPRHRKAIITLPLASSGCGGQDRRPIWLAPGPPGVETPTVGAPGRGLLRVDEHLPVKL

SEQ ID NO: 49782 - protein, 82 aa, Zea mays
  Coding DNA Sequence Number=SeqID_6407
MYDKLRCSRRLDTVRCGCSALSIVKQGDLMVVANVDDSRRSSASGGATARGTTLLMSVGCTSFYSATKSHQYSVSKVHLQLY

SEQ ID NO: 49783 - protein, 451 aa, Zea mays
  Coding DNA Sequence Number=SeqID_6408
  Homolog annotation: Hit_ID=Q2QME9; Match level="QueryCoverage=35%, HitCoverage=19%, E-value=4e-08, Identity=32%"; Hit description=Ulp1 protease family, C-terminal catalytic domain containing protein, expressed
MGQRIDINWTEVFGKSSSPDREADVCFASPSSASAAPRTRARALGAAKVLPGDERRRGSPDRHQRKRLGKLRIDDDWSVGGQRHTAVHGDDGARRPRTRGAAKVQKMSRRNVWATDSVRAFKTLIDFNNELVFVTQFNRSWFKPEEASGLRRRIRELLLEEFESAKLDDALPGADASERDDSINDGELKPDASSDSSEMVVEVVGGLGGTDKSNEGIKVVASEEASGESGDAGKSTEGTVAASEEKSIEGINVAEPEDACESIGGIYVAESDEASGEFGEIGKTNKGTKVAVSEGASVSGYTDKNMEDISDSEVAVLDKAPTSSYRRGEKTTACVLSEAASLSDSVKDEQGMVKPDSGSSKAEREGDLIVIASPERSEGNDEIIGSMPITDVVCDSCDSDTETKQLTQGAMHRANLLVAFSRRCEIVTDFGNDILRFLWPYTKHIDDQARR

SEQ ID NO: 49784 - protein, 347 aa, Zea mays
  Coding DNA Sequence Number=SeqID_6409
  Gene Ontology: Mol. function=rRNA (adenine-N6,N6-)-dimethyltransferase activity; Cellular component=nucleus; Biological process=rRNA modification
  Homolog annotation: Hit_ID=A7PY07; Match level="QueryCoverage=87%, HitCoverage=87%, E-value=3e-94, Identity=58%"; Hit description =Chromosome chr15 scaffold_37, whole genome shotgun sequence
  Pfam annotation: Domain name=Methyltransf_11; Domain location=99-187; Score=15.7; E_value=0.0028; Accession=PF08241.3; Description =Methyltransferase domain
  Pfam annotation: Domain name=Methyltransf_12; Domain location=99-185; Score=6.3; E_value=0.1; Accession=PF08242.3; Description =Methyltransferase domain
  Pfam annotation: Domain name=RrnaAD; Domain location=65-347; Score =103.0; E_value=9.2e-28; Accession=PF00398.11; Description=Ribosomal RNA adenine dimethylase
  Pfam module annotation: Pfam domain module=Methyltransf _11::Methyltransf_12::RrnaAD; Domain location=99-187::99-185::65-347
  Subcellular localization annotation: CTP_CleavageSite=42; ConfidenceScore=5.33e-01
MVELTSLSPGPPRPSRLTPRRRPPPPTPHVHTSSRRRGRILGAATATPGADDYHSTIRSLNSRGRHVPRKSLGQNYTLNSKVNEELVAAAGVEEGDVVLEIGPGTGSLTSALLQAGATVFAVEKDKHMATLVKDRFGSTEQLKVASSSSFDIVVIEEDITKFHIRSHFLPFMKEKYGATKKLAKVASNLPFNVSTEVVKLLLPMGDVFSVVVLMLQDETAVRLADASIQSPEYRSINVFVDFYSEPEYKFRVDRENFFPRPKVDGAVISFKLKNAEEYPPVSSPKSFFSMVNSAFMGKRKMLRKSLQHICSSSEIEAALDNIGLPVTARPSDLILDDFVRLHNHLAK

SEQ ID NO: 49785 - protein, 136 aa, Zea mays
  Coding DNA Sequence Number=SeqID_6410
MGKSNKRKREPTPPSEDFGDSEYSEEEFSSESEGSPAPVSPPASSDDSDDSQGIAAEVWTYIRAVERSGLEGSDESEYSSDEEDSDGGEDEDDDDSDDDDGGDGDGDGSGGGSGGDDESKGSTRGGGGGSSSKASG

SEQ ID NO: 49786 - protein, 318 aa, Zea mays
  Coding DNA Sequence Number=SeqID_6411
  Gene Ontology: Mol. function=oxidoreductase activity; Cellular component=cytoplasm; Biological process=L-ascorbic acid biosynthetic process
  Homolog annotation: Hit_ID=Q9FVN7; Match level="QueryCoverage=98%, HitCoverage=99%, E-value=1e-133, Identity=72%"; Hit description =NADPH-dependent mannose 6-phosphate reductase
  Pfam annotation: Domain name=Aldo_ket_red; Domain location=7-301; Score=416.2; E_value=4.8e-122; Accession=PF00248.12; Description =Aldoketo reductase family
MAASVALSSGHRMPAVGLGVWRMEKADIRGLIHTALRVGYRHLDCAADYQNEAEVGDALAEAFQTGLVKREDLFITTKLWNSDHGHVLEACKDSLKKLQLDYLDLYLIHFPVATRHTGVGTTSSALGDDGVLDIDTTISLETTWHAMEELVSMGLQIVILGQLSSDWCSNYDIFLTRDCLAYAKIKPAVNQIETHPYFQRDSLVKFCQKHGICVTAHTPLGGSTANAEWFGTVSCLDDPVIKSLADKYGKTPAQLVLRWGLQRDTVVIPKTSKVERLQENFDVFGFDISGEDMERMKAIDRKYRTNQPAKFWGIDLYA

SEQ ID NO: 49787 - protein, 289 aa, Zea mays
  Coding DNA Sequence Number=SeqID_6412
  Gene Ontology: Cellular component=chloroplast inner membrane
  Homolog annotation: Hit_ID=A3A2L2; Match level="QueryCoverage=71%, HitCoverage=73%, E-value=8e-59, Identity=58%"; Hit description =Putative uncharacterized protein
  Subcellular localization annotation: CTP_CleavageSite=61; ConfidenceScore=5.61e-01
MAAPLTAVRARLLLLPVTCTAAGTTGRPAPPSKSSRPRLLPPGTTRCRCSRPPMEAVAPVSAAAVAALLLLPADAALAVGGELGILEGRSFALLHPLIMGGLFAYTLWAGYLGWQWRRVRTVQDEINALKKQLKPAAAATPAAVGAGADSSSTTTPPPAAASKSPSPAEARIEELTDERKALLKGSFRDRHFNAGSLLLGLGVLESVGGALNTWFRTGKLFPGPHLFAGAAITVLWAAAAALVPAMQKGDETARSLHIALNAVNVLLFVWQIPTGLEIVGKVFEFTTWP

SEQ ID NO: 49788 - protein, 1276 aa, Zea mays
  Coding DNA Sequence Number=SeqID_6413
  Gene Ontology: Mol. function=nuclease activity; Cellular component =nucleus; Biological process=DNA metabolic process
  Homolog annotation: Hit_ID=Q10T59; Match level="QueryCoverage=72%, HitCoverage=97%, E-value=0.0, Identity=70%"; Hit description=ERCC4 domain containing protein, expressed
  Pfam annotation: Domain name=ERCC4; Domain location=729-809; Score =128.9; E_value=1.5e-35; Accession=PF02732.6; Description=ERCC4 domain
MLAFEQQVLADLVEDPNGGLVVLSSGLPLASLAATLLLHLHQTPGNAAGGGCLLVLSATDTLKARIRRRLQDKLQVHDVPPDLAAQQRATLYASGAALFLSPRALAADLLTSRLLPSRVQALLLLSAHRSTDTSSDAFICRLLRQRNLLPVYAFSDCPHAMVAGFSKAERTMKSLYVRRLHLWPRFHVLAAADLERAPPDVVDVRVPMTPPMRGIQAAVLATMDACLKELRRTNKVDVEDLTVDKGLFKSFDEIVRRQLDPIWHTLGKKTKQLVADLRTLRKLLDYLVRYDAVTYLKYLDTLRVSEGVRSVWILADSSHRIFELAKRRVYQAVRTDGVNVSIDNKGTPTKKRKVAHNSTKKGKVTGSCSWPLHLQELLQEIAEQRMKSSAGNVHDEDKNDESGIVLVSCKDERTCLQLQECILKGPCQVMREEWEKYLIGKAELHGLNKDKRKSEQPKGVGVLDGEVQMGSSESVCPVSISKLETNALLAAASELRNISNEADVKSSSNSSCSKAGGAKGKPKKTTSKRQGSNRKNKSKEGNDNSQGTGLDSEGQSGKADVQAEIVASKMSAYDASMSASTSNVKFNHSSAFGNLANAKPLPPVQFHALDSDHQVLDVWKPSVIIVYHPDITFVREIEVYKAENSSRKLKVYFLFYEDSTEVQKYESSIRRENEAFESLIRQKSLMMIPVDQDGRCIGPTVANEPEPPLCQNSITRKAGGKKAPEKEMQVIVDMREFMSSLPNVLHQKGIRIVPVTLEVGDYVLSPLICVERKSIADLFQSFASGRLYNQVETMARYYKIPVLLIEFSQDKSFSFQSANEIGDDVSPTNIISKLSLLVLHFPRLRIIWSRSLHATAEIFMSLKTNQDEPDEKKATRVGVPSEDGIVEDDVRSENYNTSAIEFLRRLPGVTDSNYRAIMDGCNSLAELALLPNRVLVGQSKHAENEQQIMGWAGSNPAQELPLSPTFFFVVVGQVVRLFESTLQNDYLNHTSCGAFHAQMESWERILYWMAVLWERGFSHENPQVRCLVMQSFLDIAWERYKDCTQIIPRGFVLGPLIRGLNDVVHHKDFVMNRQLVNLKSSAVCEQVIKVATSLINATEIPLNPLLHFIATIPREFSDYIGPLRVVVQKWFVQKEECSPGDTLLSKLIDFSATFVSQKRNEGSNVFDDEDVDAWEAEARWARTLLVTSEEEHLKRIFRFLEAYGYKLSEQCPSGDFIPIKNFIIVLSFIEELEYYRVYVPSFLEWWKRAAETVQGMVKKAGFSRHFGSLEDLEPLQ

SEQ ID NO: 49789 - protein, 72 aa, Zea mays
  Coding DNA Sequence Number=SeqID_6414
MAHSAAEGTLRRGGTSEDAGQGEEDGAVPNFPVRQDGRGEDGGDGRRKTLVENLELEDEGRGKRWIRVSNLD

SEQ ID NO: 49790 - protein, 198 aa, Zea mays
  Coding DNA Sequence Number=SeqID_6415
MSKPDKTFPLLILPVLPSLLNPGVGPHEFGLSDCPHSLEWLYDKGVQKVYVNAGHLSLTMQYSPMIPGLGSGRENRGVGRGLPTGRGRSSAAGITAGGLWVGNGGWKVALRVRGYARELLGSLNSLPDQQRRRGRRRKRLTGEEDDAGALRIELGEGEEGDGRSWCEEEGARGGAFYRRAGEVGRWSSLTPASFPVLP

SEQ ID NO: 49791 - protein, 109 aa, Zea mays
  Coding DNA Sequence Number=SeqID_6416
MAGDFSAPCTGKERAVRVGERRKKAVAAGKKWRVGVKNCQFARERGAIYRRGTRVRVLNGPNGLAQARNRAALNYFRNKNALAEFVATEKQSEKSSDERKVERLTQPGV

SEQ ID NO: 49792 - protein, 62 aa, Zea mays
  Coding DNA Sequence Number=SeqID_6417
MAKLTEALARLEGDWSGLATVVEALAAMAGRKELAGAKEGCLAGDGEHGGEDLWFDVSKARV

SEQ ID NO: 49793 - protein, 91 aa, Zea mays
  Coding DNA Sequence Number=SeqID_6418
MGDHVSGRVRDKVCGQVHSGQADPRWQALVLAPGLPPEQLLAPERGRTIRQRDYNISNAMNKRVDIDLCGLFYKFEVGINSDTPCAKITKV

SEQ ID NO: 49794 - protein, 434 aa, Zea mays
  Coding DNA Sequence Number=SeqID_6419
MDEGTPFGGLESEDNAKPSHELHVVFSSLWGRGYLAHRLRIRFPEDEGVQTSVRGAAAPSASTPPSVESDPVSDSNTVRGSPPRRKMSTLHLSHHRQDLLQEPGPSRRLDRPLHSLSQLSPEDASPAHGLGSPTLGLVPPVDDPARLRPTKLLLQPTPPLSTLTPLPPAPAHRRAAEGLDSRNEHTPALKVPLQTELRFRSRGYEQPPHRRACGTTSSGDLCSSSDGLRADATAGRLSFASPLEGREPDIKAKEPEVGSRVALTVSSAEKLSPAATTSAPAAASTYPPTLHQQAPTAPKRTGRSSLPSSPRKREWDPPRTRVPPSRRTTCCETPRCGWPPSPGQRMECCTLDWAAAVRLPWHGWRAPPPQSWRMVSTPRSRRKKRDTNPCEGRPRLASPSSPIRMMKILEAEGGAEAATRLASPHHRTGGHRLG

SEQ ID NO: 49795 - protein, 333 aa, Zea mays
  Coding DNA Sequence Number=SeqID_6420
MQATCNRTTGMHPFDFDASSMESQAYTSCNRRAGYCVRKTAPPLTPILRLLDCGTGAAIQGNPAHGPTVPTRRIGHRSVSRGRRRDSRYGQKWADSNGGSRRAEAAVKSSAGSRPLLEQQESPLPRREDDAPVFRSSNGSRNSCPANHSSRRINSAAGQATPLAGPSKGFDSRLRALGLRAHYWSEVRRLAPRKGSTAASGHSGSAPTTDQGFEGWPPKGSTAASEHAERGMTLGTSDTWPRLELRSRGTLGHFRDQQERFCNGIPSEGGIEPSDPIKRDRVRQITCRGSGAALANPAPAKPLTASTYQPENSEPDYAPGLRPVRMREQIRPA

SEQ ID NO: 49796 - protein, 119 aa, Zea mays
  Coding DNA Sequence Number=SeqID_6421
MRVVWEGSALTWMVFAGPPSAPDGCTFGDLEGALGWPPDNGVKREVDLHDVELDVFCTEVLFRPKCNRERYAPDGIYGLRAHPGGWARGPQPRPRDLQLSECCMADNIEAGPSIDQHVM

SEQ ID NO: 49797 - protein, 361 aa, Zea mays
  Coding DNA Sequence Number=SeqID_6422
  Homolog annotation: Hit_ID=A2XFR6; Match level="QueryCoverage=51%, HitCoverage=53%, E-value=1e-31, Identity=41%"; Hit description =Putative uncharacterized protein
MDPGTHMVCARFYPLEPGVTEVVSEMVRTLQTTRINTRYAPQPRQIPVYPVVVEEVPADLPPVRVENVINLEDSSEEQLSTPTPLAESLAFAAGSSTSASSAPAFQAPAPGGDDPDDSGDDDDEDDDDDEGGEDGHVHEEADYAQQDNFMGFGPVVEHYTSMFETGHFPNLLQEVLHALGTYVRPLYETRRVSEPPRACYYITRIHVRVMDTGDRGFRNLSAHESLTPLSTYAASVSDAARRTLWSLSHTYRQQLQNTRFRHLPQRLRGGSQTNIVPGEAGEDRLNTLAGVVAGLNTDLDSATLDLYRVHLELENAHARIAALEAQLQGLDPPEAQDPAMALSPPRKRLRYGEPGSVTRLL

SEQ ID NO: 49798 - protein, 155 aa, Zea mays
  Coding DNA Sequence Number=SeqID_6423
MRCPACPERPIVSQKLLVTTGEPSGQGSALQLPSAVENGHDGDPPSTHTASMPMAIRVLSVTVPGRTSRQKGPTRQQEPWGLRRSEWMTGRCGIVVREDLARRTNHAAPPAQSSAEDVSRAVEDERGKGLTVMAHSQSHVQDDGGWRMWKKKVLV

SEQ ID NO: 49799 - protein, 161 aa, Zea mays
  Coding DNA Sequence Number=SeqID_6424
MAPVKWSRTEVSGITTVCGSPSEMAGVGRSTRAGGDARRRRGVRPGHGEIEQLDGSERFMGCQRRYGCKELVADSLDSSVHARRWKTEVRLGTGSCSVTKVPVSECLVPRSNCAKTVSNEFGLSSNFSRMCSREFGTTLIFGSPGFEFRKTENADDLWEEV

SEQ ID NO: 49800 - protein, 467 aa, Zea mays
  Coding DNA Sequence Number=SeqID_6425
MRRGLSVLLVSWKSGKNTRTHKDLEWFGPPERETSCRRDDEYRTPLGMGALFPNRLVRLAVFWESGVPLWRFGPIDTPRDHLHTVEEGTPDSGYRQWPPGPPQGRMRACRLLAWRFAFLTAGYGKDEGALNRGAVACPLCGSLPFLTAGCLENGGTHNHEVVACSFFGWGAPVFSGGIRVRAVSSGDLIAEELALVVVPPIIPVATSDRWSSTRMTTSLVVERSEPACGLPPALSFKDVHHPRWGGGRAESGLRLSRGLAARFFLQHSGEKGVRQPCEGGKLRLRGVGHIHGFSRAAGHTGGGSYKTSYAAGAAAAFLDGLVFTPAARTGARTSSHVLGQLPPIGAEVVNAAGGAQVVAPAGEAAHCRGGCLCWRYHQCHLIPDLRLFGFNGLVVAPVGRRGRGPFHSGVHAEVIAAAEVATTVGADVVASVGEPLGASYPAVLTGVEVLGEGDDVLAIGFSSNGGD

SEQ ID NO: 49801 - protein, 139 aa, Zea mays
  Coding DNA Sequence Number=SeqID_6426
MLIDYTTVLDGPSVTIEAPTQQGVESVVEMTTASSVMSDGSGDPSFWLLLLRKLHDVARTATVVVVSVKVSSSIWGALWWCWEHLWLRRMGGLPPKLHLLLRRGGRVLLLLLLASVLLLLMQAAMQPLQVARLSYHHAA

SEQ ID NO: 49802 - protein, 101 aa, Zea mays
  Coding DNA Sequence Number=SeqID_6427
  Subcellular localization annotation: CTP_CleavageSite=34; ConfidenceScore=5.47e-01
MTPAHAPSSLLRAPLVPRAHPSPHFAQLHPLSCSAHAVSRRRRPAPAFLAIQLVGDRSKPPRAPPRDNEQFEAPECVVGDLPEQQPGEGKCPLTYYVLHTL

SEQ ID NO: 49803 - protein, 62 aa, Zea mays
  Coding DNA Sequence Number=SeqID_6428
MGLGVCGSLCQGGNETDGSSYDYGADAKPTQAADWGFATKKELELVIFLELLKVIHVASITS

SEQ ID NO: 49804 - protein, 122 aa, Zea mays
  Coding DNA Sequence Number=SeqID_6429
MRNMGFPKLELGQSAMPKDDLADSLAYISLKGGREMADEAIKKNLKESHDTREEAKQAEEAAERAMIIAGLSPPPEPYNPEVDPATKEALDIMKVANEVVDEVVDRLLHEAAEKVLKEDYIF

SEQ ID NO: 49805 - protein, 140 aa, Zea mays
  Coding DNA Sequence Number=SeqID_6430
  Homolog annotation: Hit_ID=A2XFR6; Match level="QueryCoverage=72%, HitCoverage=29%, E-value=2e-12, Identity=37%"; Hit description =Putative uncharacterized protein
MELFLDADRRPTLHRNTLEPGDRGFRTMSAHESLTSLSTYAASVSDAARRTLWSLSNTYRQQLHNTKYMHLPPRLCGESQINIVPGGAEEDRLNTLVGVVAGLNTDLDSATLDLSRVLRARGCTCKDCSPGSSARRKGSP

SEQ ID NO: 49806 - protein, 166 aa, Zea mays
  Coding DNA Sequence Number=SeqID_6431
MPTAPPQGIPAAGGDPDGDGDNDDTGGSSSHDTELSEEQEPEGWIARPITRDATRGGVSDGLDLKYYPCHSTGSAGGVIVSPFGEGNPSMVNLAAVLNTKLDHTLDELGKVRAEVAELRAKCATRHYLDGGSPSPIGIQHLYPFTRPVVASSMVPLTTGRRKDLDP

SEQ ID NO: 49807 - protein, 160 aa, Zea mays
  Coding DNA Sequence Number=SeqID_6432
  Pfam annotation: Domain name=zf-CCHC; Domain location=101-118; Score =28.5; E_value=2.5e-05; Accession=PF00098.14; Description=Zinc knuckle
MNPNGNEVNDVNDNTPVLTTMNEKNESQRHSMNGMKNNKRNRKMFGYMISPPQPQAKATKHMDTQTKESSQAQLYEIQTPNQPSPPVGQAKLTRKELKARGACYYCKNEGHLIRECPKKRLDRIKKKAAKHDLSNTSEDPPFYKYDDEGRLFSIHCGAKK

SEQ ID NO: 49808 - protein, 120 aa, Zea mays
  Coding DNA Sequence Number=SeqID_6433
MGSLMLGASRGRQEWGHLASSYSSGSGRLDTGIVPKALPCSLDYKLVMKFADEVMMLSSMDASLVIPPVIFLWMDVHVRCTLMNKDNEQSVVPECVAEELPEQQPAEGKCPLTYCVLLTP

SEQ ID NO: 49809 - protein, 31 aa, Zea mays
  Coding DNA Sequence Number=SeqID_6434
MAPRARQPVNAPSGYVRFLVCGGTRVSLVYE

SEQ ID NO: 49810 - protein, 116 aa, Zea mays
  Coding DNA Sequence Number=SeqID_6435
MNRLYFLADTVGSLFIMALGENTVGSDDKYISDDSTSEVSLSDDDLTIEVDELMAASASQDKSLRLASCERKEFKSKYESMLRELESSRATVVVSNKTKCDGCALHMSNITTLQTK

SEQ ID NO: 49811 - protein, 187 aa, Zea mays
  Coding DNA Sequence Number=SeqID_6436
  Subcellular localization annotation: CTP_CleavageSite=69; ConfidenceScore=5.09e-01
MKRKNSGRLTRPRVRRALATPEHAPAISPAPTPMPAAVKPTPVSTVRPRSLPTLPEHEFTGVCLENSVPAAERAPATVAGHASPPPPRLTLWLASPELSEAPRATDWTPPHRKRRIDVTGLQPAAVARRPSHTARAHAADEPDRLRIEYVLIPEQGIAQEVVPEPAPEPATEDLPAQAFDGKPRFYA

SEQ ID NO: 49812 - protein, 122 aa, Zea mays
  Coding DNA Sequence Number=SeqID_6437
MGKPVPSLLMLLLSRDRIPLDCPTRWQDGRPSHSSNHVLQRTCKNYATSKAEYTNTQLDLRGQHGSSSLISCKKQTIRIEFLSLQVTALIPTITGMGDHVSGRVRGYVCGQVHSGFGKHYAK

SEQ ID NO: 49813 - protein, 324 aa, Zea mays
  Coding DNA Sequence Number=SeqID_6438
MRLMVLVMIMVLMARLRHTARKSVIPFLPSRLAERPLRRPVAGQSSHLERLHHRLHEEQERRRQEQQSSSFSLHQEIESLLEETPDDGDGDDSSSHDTDFSANLEPEGWVARPITRDAARGCHFHDALDTLLRRAFDRHTWSVEYRCVVYQHSRGVYPDRWEATCLVRCPENSLQGAEACSEHYSISERDSAEAAMQDAARRALSHYCSVFGGAADGLDLKYYPRRSSGSTGGVIVSPVGEGNPRLSSTVNLAAVLNTELDHALDELSRARAEIALLRAERAERRHLDGGSPAPVGTQHPYRSPQRGHQSYGNPDCKTKINLEP

SEQ ID NO: 49814 - protein, 80 aa, Zea mays
  Coding DNA Sequence Number=SeqID_6439
MREKGRTVPSGYRNSGDLISKPVGTTGRESHHVAAPHTGAPQLHQEGILGKKHGATKSVVVRMFRVVVQCVEDLKLSGWL

SEQ ID NO: 49815 - protein, 156 aa, Zea mays
  Coding DNA Sequence Number=SeqID_6440
AAAKDVAGSMSQRLREASQQLKQAAYFADRVASGVLTVDMAAEVERLWAQHVDVVREKSAAESKNRRLAEKVAAMEAEKTDLRCQLAEERREANQAIAEAQAARAEAKVARAESSLASQRAEELEARFNALRSRVDKAESSTRSEVERTHAYGGTL

SEQ ID NO: 49816 - protein, 160 aa, Zea mays
  Coding DNA Sequence Number=SeqID_6441
MTLETHPLQPSWRSLDSESFGYRAEDTIDEIALHGLTTFCGFHPLELSTHPIELFPAEKEDDPMWKDRVEHAKDIWALYPGQTAHLTVRRGEAMSHLMALLEVTKITLDNREELVVDLSTEMVEKDLQVEQMSNEIQELEELVGTRENTIEVLEDQLINT

SEQ ID NO: 49817 - protein, 116 aa, Zea mays
  Coding DNA Sequence Number=SeqID_6442
MVQRLTRSTCSSGVPNSGEHDCAIPVAGVLGSSSGKLHCLLGELSKGLDQAEEGGKGFGPRWLPSGGSGWSRGGRRSYRRARVALPWVSGHTSVAEIRGTHYELPTYGVATSIDML

SEQ ID NO: 49818 - protein, 77 aa, Zea mays
  Coding DNA Sequence Number=SeqID_6443
MDQAVSLAARSGLTALAYNASSIPRQQISAHRLGVQCLTDPDCRRAVTALVPTITGMGDHVSGRVRGKVCCQVQSGS

SEQ ID NO: 49819 - protein, 42 aa, Zea mays
  Coding DNA Sequence Number=SeqID_6444
MASGIELAGAKEKWLAGEEIWGQEIWSVSLPKPEAIPRFCRV

SEQ ID NO: 49820 - protein, 225 aa, Zea mays
  Coding DNA Sequence Number=SeqID_6445
  Subcellular localization annotation: CTP_CleavageSite=52; ConfidenceScore=5.28e-01
MAGVVAGEGWATTDAVEGTTVQKRTAAATARVPGRRSHQARRRSLCAPAGRRASKAPTTAMCALSVAWSPSSSVPIAVAWRPALVAATRPPAPIGERRPPASVPAVVAWRPGLAMVGRSFAPVGEGRSPAPRRTVAPVLETRSAVGASQEDAIGRRTGPPMGRARVAASAAATRPRDEVGRVALPQRWHDEEIGACPGGGTTKQGGWAAREGGMTMAGEGRERPS

SEQ ID NO: 49821 - protein, 191 aa, Zea mays
  Coding DNA Sequence Number=SeqID_6446
METGVMQELKMASHVPSSLHLKGACRARPKLALRSGLRRAYQVVEKVEPHPITNLELELAMLVVILPLGILLSLKKAEFDAEHLEEAAPHVTGEDRLSRSLTMEVGKLCRQTMSSEKAQATERCPESQGKRCRGGNTSTLGDARVDAPTSGSPRADARGTLRIGARVGFCVKSHGNTNFLEETKRGGRQGE

SEQ ID NO: 49822 - protein, 324 aa, Zea mays
  Coding DNA Sequence Number=SeqID_6447
  Homolog annotation: Hit_ID=Q7XBD4; Match level="QueryCoverage=77%, HitCoverage=25%, E-value=3e-08, Identity=24%"; Hit description =Cinful1 polyprotein
MTSYGGQSSVEVFAKHYCLHWQKRKIGREIAQFGSCTFTPRTGKTSMEVMELVPCARNKWGNWWDFWFYVSEGAVEDHLGLPMAVMCSHYYVAYPQFEVAEDDEDEGALRCAAHMSSGHDLVEEFIGYGVWPLAHGWALSEVCPHEMPSRSGQRVRSPAFVLYLHGRDPAAFVREAEDGAARIVGRYVPKTEGLRSSDIRGANDRLNRVFELNRLPYGGYPGEDAADRRGKKPVGVTEEEPSQVAAPAAKKRKLGTAVGGLGVFDSFAMELMGTCTTLGGWMSSPKLQESSARMLEVTGVDGLRMFQSPARLAKTSLRLSWLVT

SEQ ID NO: 49823 - protein, 199 aa, Zea mays
  Coding DNA Sequence Number=SeqID_6448
  Subcellular localization annotation: CTP_CleavageSite=77; ConfidenceScore=5.32e-01
MTTKQITPKVVGGIYSPEPPNNRWGRLLSMGAPDSPMRQPRHPTVRVRAQSTVGALSSSGTRQSGAAPDSFCSRPLREGAVAPLVHRKVRWHTGQSGSELLMTVSTASIPVLDSAEVAHLYPQVMLPICQGIATSHTPLPRRRGKVTLRGLYKVPLASENPLQFMGSSNAGFLPDRHRNKINQGPPYTDHSPTALAPFG

SEQ ID NO: 49824 - protein, 128 aa, Zea mays
  Coding DNA Sequence Number=SeqID_6449
MTRVKPWFAGYVIRKATSLTCNTPGAAGDLRRLRSWPGQLQTTSDVDPQIDVTAVTSPTSLTTPPELYCLRIHISYSLHSIDCNLADGEYILMPEQGLAQEVAQDPAPESAIEDLPAPALKGKPRFYA

SEQ ID NO: 49825 - protein, 50 aa, Zea mays
  Coding DNA Sequence Number=SeqID_6450
MGTVDVWGDGVPRPRRSLEDMVAGVTWPSILPLGWTVEWDPTSAEEEREE

SEQ ID NO: 49826 - protein, 228 aa, Zea mays
  Coding DNA Sequence Number=SeqID_6451
MAPPSGALSSVGRCSSVIAPHLFTGACAPGVRLVSHPGTELAKKAWRKTKSGEGFGDHSLPGTQDIWMGLGSRRARLATRPATPAAISSSPKATQRSAPHRHCRTARPRENAGHSGTGSPLGAPRYREGSCLKLGAQWCHQAGVNSSPSLWIRRAAWPDLLGTRIGCLCFDMKAIFIVSFIYLFDVILIYAILCMYCVMRVDEQATVDSEVQQVEVAEQELIEGKLCP

SEQ ID NO: 49827 - protein, 159 aa, Zea mays
  Coding DNA Sequence Number=SeqID_6452
  Subcellular localization annotation: CTP_CleavageSite=67; ConfidenceScore=5.27e-01
MRWRSPAKRVHQALTVALSARNSPLSPECSVIRHPTWTAFSALHSAHSPTVLSFCASWSWDQALRTSVSALNQATWTIVHNSPIGVGHGSVTPIEAAGKKCQLALRDYLNVWRPLCKTYRAVGDLRTWDEDIHNTKSTVLEKDEPAPKLPEEKLRLSDG

SEQ ID NO: 49828 - protein, 178 aa, Zea mays
  Coding DNA Sequence Number=SeqID_6453
MVQRVTRSTCSGGFTNSGERDYTIPVGLVLGSSSGKPHGLLGKLSEGSDRAEVDGKRFGHGGCPRAVLAGRGEVTGGAGELGKVGRGAEEATGNMFVHEGWNHLGWLDILFIFPTISSPSQSESGCILGVHFSADWSWNPRWSRSRVGLDRLPVVGTLAAPPQHLGLSQVLAGPVQGS

SEQ ID NO: 49829 - protein, 98 aa, Zea mays
  Coding DNA Sequence Number=SeqID_6454
MAPSAGRRTVHRGSVNLAGDKNAPAAETLLGLAAASLVTGVLRDPPPNEDRLLFPSFCPFPYRSKLLRVVVLGPSPANLGVRPKPSNVDCSPQQSDWG

SEQ ID NO: 49830 - protein, 133 aa, Zea mays
  Coding DNA Sequence Number=SeqID_6455
  Subcellular localization annotation: CTP_CleavageSite=63; ConfidenceScore=5.10e-01
MVLGWTRPPEGSRSRSRSRDANQLLKPKSGPLPSAPAGTGKGDTPKRILPREGTRLRASLQIRVSKAGPPEGFDSRLRLRGPYTHYWSEVRRPAPRKGSTAASGYSGSAPITDQGFEGWPPKGSQPPQTPSEG

SEQ ID NO: 49831 - protein, 47 aa, Zea mays
  Coding DNA Sequence Number=SeqID_6456
MSRGRGVDSSHPGSLEDMVAGVTWPSILPPGWTVEWDPTSAEEEHEE

SEQ ID NO: 49832 - protein, 154 aa, Zea mays
  Coding DNA Sequence Number=SeqID_6457
MEQWSRRKKGAEGLTGGGVAPVKGRVRSKSLWRSRQGADHRRWWSKEMGQGASPEIKEDVRARNRRMAHRIARSTRGHGRPKSGEDDLGSMVRFCWVRALGKLHGSLAKLTERPAQLGRDWSGLAVGAEVWAVVAGGGAACSRRSPMNFVLGKA

SEQ ID NO: 49833 - protein, 101 aa, Zea mays
  Coding DNA Sequence Number=SeqID_6458
MTKEDSFRGHNIAHSLQDSSKAPSGHQLQGAEAAGASEEDMGISPGKSIAYSVCHLGFFSALAQVPLFHVSEFSAFEPKPSTFTLILSSNPDAPIDKNVPN

SEQ ID NO: 49834 - protein, 199 aa, Zea mays
  Coding DNA Sequence Number=SeqID_6459
MAPPSGAISSVGRCSSVIAPHLFTGAWAPGVRLVSHPGTEHAKKARQKTKSGGGFGDRSLPGTQDIWMGLGSRRARLATRPATPAAISYSPKATQRSAPHRHCRTARPREYAGHSGTGSPLGAPRYREGSCLKLGAQWCHQAGVNSSPLLRIRRAAWPDLLGTRIGVSSTSSHSPSFPLRVVPIGIANAVLDHQGAVHR

SEQ ID NO: 49835 - protein, 33 aa, Zea mays
  Coding DNA Sequence Number=SeqID_6460
MSFVLFDYFVSGILKTTEYMPSRLYRWQNHTDE

SEQ ID NO: 49836 - protein, 145 aa, Zea mays
  Coding DNA Sequence Number=SeqID_6461
MRSGCLMKILEAERWLKGTNFREVAFPQRQGGRTAESSPTRSKVLPLRQGGWVPRVMQAGPRQKKPNRRARDRERGYPERDPSPRRKRAPSPPTDQRFEGWPLRGVQQPPQSARAPRPLLVRGSKAGPSEGFNGRLRPLGLCAHY

SEQ ID NO: 49837 - protein, 85 aa, Zea mays
  Coding DNA Sequence Number=SeqID_6462
MSLSFCHDVIVPGWREEYHVWATLQTAMTKDFAMTAVLPPAAPSPEEVFFGGMTKVTTFQRWSIEFTGGGCQCCNVGDLFSNAMS

SEQ ID NO: 49838 - protein, 80 aa, Zea mays
  Coding DNA Sequence Number=SeqID_6463
METRALLFCLGTREKTEGENDLNMLDSDYIRTTEEHQLVTVTTDECPSGRGVALHKIVTVIGGGVSVAKAQRLWKAVVGS

SEQ ID NO: 49839 - protein, 263 aa, Zea mays
  Coding DNA Sequence Number=SeqID_6464
  Gene Ontology: Mol. function=nucleic acid binding; Cellular component= cytoplasm; Biological process=multicellular organismal development
  Homolog annotation: Hit_ID=A2XWI3; Match level="QueryCoverage=93%, HitCoverage=21%, E-value=1e-117, Identity=82%"; Hit description =Putative uncharacterized protein
  Pfam annotation: Domain name=PAZ; Domain location=83-220; Score =165.2; E_value=1.7e-46; Accession=PF02170.13; Description=PAZ domain
MARRERVFKVVIKFAARADLHHLAMFLAGRQADAPQEALQVLDIVLRELPTARYSPVGRSFYSPNLGRRQKLDMSSTAFIEPLPMIDFVAQLLNRDILVRPLSDSDRVKIKKTLRGVKVEVTHRGNMRRKYRISGLTSQATRELSFPVDDRGTVKTVVQYFMETYGFSIQHTTLPCLQVGNQQRPNYLPMEVCKIVEGQRYSKRLNEKQITSLLKVTCQRPQERELDILQDSGSHQVTPPHHDDFADKCLNSSGGATNNNLMS

SEQ ID NO: 49840 - protein, 122 aa, Zea mays
  Coding DNA Sequence Number=SeqID_6465
  Homolog annotation: Hit_ID=Q5NKP3; Match level="QueryCoverage=45%, HitCoverage=22%, E-value=7e-20, Identity=87%"; Hit description =Putative uncharacterized protein 9C20.7
  Pfam annotation: Domain name=LRR_1; Domain location=30-52; Score=6.3; E_value=21; Accession=PF00560.24; Description=Leucine Rich Repeat
  Pfam annotation: Domain name=LRR_1; Domain location=6-28; Score=16.6; E_value=0.095; Accession=PF00560.24; Description=Leucine Rich Repeat
  Pfam module annotation: Pfam domain module=LRR_1::LRR_1; Domain location=30-52::6-28
MQRLTSLRTLDLSYCDALTQLPEWLGELSALQKLSLLQCLGLTSLPRSIQCLTPLEESLLLIKSEALALASLIDDEKKLGDYQFDLWKQYYVATCVAVFGKLRCSHRLDAVQSDCTALSIFK

SEQ ID NO: 49841 - protein, 205 aa, Zea mays
  Coding DNA Sequence Number=SeqID_6466
MGRGNPGCDPDPALSIEGVRHPRWGGERGEPGLYLLRGSAGHLFFQLLVVAIAIQPCGGDVLQPCRGRRTVATQLGCNIPPSPSHSRRGRQRGPAGALGSGPLFGFNSWFASLERDREREPSGGRVHPGPWLLLQRSLADSPVDYLNRFTKHESPRVKVTSESGDPWTASPSEARSDLAEGVVDAEGATAPFQHQDPSLQDQSVL

SEQ ID NO: 49842 - protein, 413 aa, Zea mays
  Coding DNA Sequence Number=SeqID_6467
MEQQKTDERLAAARSDYDDNDPRSGWPNCSSAGLRVGAAAILPSPTLTLEGRGQGPSALRQIPTQILPDEWGTSLRVKMARRSRPPAGGAAGSQADEPDTLEVTTPAVDQPRVVEVRAARRASERPLPRTPRERVTHEPAREVERRLSPAPTPARMMNILEAEGGTKIAARLASPHPGTGGHRLGPTGERGGQPCRRHATAPSGRASPTPNAPSLEAQAHASCNRRAGRFMRATAPPFAPPPRLLDCGTNTTTRGDPAHDPAAQPGAAVNAAESGPAVMTVAGGREQRSRRQPSSCPIRGQQENLLSRREDNASVIRSSNGSRTRDDRPANHSPRRINFAAGQAALLAEEAGDASPSPLAPRGVQQPPQIAWALHPLLVRGSKAGPLKGSTAASGYSGSAPITDQGFEGWPPK

SEQ ID NO: 49843 - protein, 190 aa, Zea mays
  Coding DNA Sequence Number=SeqID_6468
  Subcellular localization annotation: CTP_CleavageSite=25; ConfidenceScore=5.04e-01
MSSHSLMHRVFPPSKPPDGDTRRLFASSLEERNSVGVGTFQPSFGFKDFHLPARLYPPTGGHPRRFKDVHHPRWGGGRVEPALYLPRGFVGHPLPRRSRERALTGPAGGPDFDNAGLVDGGRRHLQRVGLVGLAPGGPSCRRAAAAPCAREDHPRCRALLGRRSCSGVVLPLHRRGIFTRRPVPHSSGRI

SEQ ID NO: 49844 - protein, 535 aa, Zea mays
  Coding DNA Sequence Number=SeqID_6469
  Gene Ontology: Mol. function=transferase activity; Cellular component= mitochondrial outer membrane; Biological process=glycolysis
  Homolog annotation: Hit_ID=Q2KNB4; Match level="QueryCoverage=72%, HitCoverage=78%, E-value=0.0, Identity=83%"; Hit description =Hexokinase-3
  Pfam annotation: Domain name=Hexokinase_1; Domain location=1-155; Score=68.6; E_value=2.1e-17; Accession=PF00349.12; Description =Hexokinase
  Pfam annotation: Domain name=Hexokinase_2; Domain location=157-410; Score=214.5; E_value=2.5e-61; Accession=PF03727.7; Description =Hexokinase
  Pfam module annotation: Pfam domain module=Hexokinase_1::Hexokinase _2; Domain location=1-155::157-410
MELALCWLGGVVWLAVRALTNEMRTNFRVLRVEVGAGSVVTRRKVELPIPEELTKGTIEELFNFVAMTLKEFVETEDGNDEQRALGFTFSFPVRQTSVSSGSLIRWNKGFLIEDAVGKDVAQCLNEALARNGLNVRVTALVNDTVGTLALGHYHDEDTVAAVIIGAGTNACYIERTDAIIKCQGLLTNSGGMVVNMEWGSFWSSHLPRTPYDISLDDETQNRNDQGFEKMVSGIYLGEIARLVLHRMALESDFFGDAADNLCTPFTLSTPLLAAIRKDDSPDLSEVRKILQEHLKIPDTPLKTRRLVVKVCDIVTRRAARLAAAGIVGILKKLGRDGSGVASSGRTGGQMRRTVVAIEGGLYEGYPVFREYLDEALVEILGEEVARTVALRVTVDGSGAGAALLAAVHSSNRQQVHREYQAVMGWADRGQGSFSNKKPDMRTAHTITEVRSWATSHKGRKRAPFEKRDGFFQKAPRLQPHVGSSDSARVSRRSAGTVHDFRLYSYDKDYTDCATNDAREEDSTFGMASWFILEEG

SEQ ID NO: 49845 - protein, 137 aa, Zea mays
  Coding DNA Sequence Number=SeqID_6470
MGKNNKRKREPTPPSEEFGDSEYSEEEFSSESEGSPAPVSPPAQGIAAEVWTYIRAVERAGLEGSDESECSSDEEDSDGGDEGEDDDDDDDGGGSGSGRGGGDGSRDSTQGDSRGSTKGSSRGSTKGGGGGRGRASG

SEQ ID NO: 49846 - protein, 338 aa, Zea mays
  Coding DNA Sequence Number=SeqID_6471
  Gene Ontology: Mol. function=nucleic acid binding; Cellular component= ribonucleoprotein complex; Biological process=multicellular organismal development
  Homolog annotation: Hit_ID=A5BFC4; Match level="QueryCoverage=93%, HitCoverage=98%, E-value=3e-94, Identity=56%"; Hit description =Putative uncharacterized protein
  Pfam annotation: Domain name=RRM_1; Domain location=207-276; Score =73.2; E_value=8.8e-19; Accession=PF00076.13; Description=RNA recognition motif. (a.k.a. RRM, RBD,
  Pfam annotation: Domain name=RRM_1; Domain location=5-52; Score=3.3; E_value=0.074; Accession=PF00076.13; Description=RNA recognition motif. (a.k.a. RRM, RBD,
  Pfam annotation: Domain name=RRM_1; Domain location=72-141; Score =54.5; E_value=3.6e-13; Accession=PF00076.13; Description=RNA recognition motif. (a.k.a. RRM, RBD,
  Pfam module annotation: Pfam domain module=RRM_1::RRM_1::RRM_1; Domain location=207-276::5-52::72-141
MATKLVVLGIPWDVDTEGLREYMAKFGPLDDCVVMKNVLDCEHVLGSRTLEVKVATPKEEMKSQGSKKATRIFVARIPQSVDESMFRRHFEAFGEILDLYMPKEHGSKGHRGIGFITFQSAESVDNIMQESHELDGTTVVVDRATPKDEDVRYPPSRPSQGGYGAYNAYISAATRYATLGAPTLYDHPGSAYGRGYYGPSQAVGKKIFVGRLPQEANTDDLRQYFGRFGRIVDAYIPKDPKRSGHRGFGFVTFADDGVAERVARRSHEILGHEVAIDTAAPLENDSAAGGYIDPMDLYGAYGSMRSFGRFCGGLDYNYGYGPSSGSSRSRSDWRYRPY

SEQ ID NO: 49847 - protein, 531 aa, Zea mays
  Coding DNA Sequence Number=SeqID_6472
  Homolog annotation: Hit_ID=Q5W756; Match level="QueryCoverage=31%, HitCoverage=31%, E-value=2e-12, Identity=32%"; Hit description =Putative uncharacterized protein OJ1675_H07.4
AAIFAHLCKMFMGVAPSTSLFRHLFVLVKSGKAKDHLGAYYFKTRSDSVVAYIPSLGGARWENWRDDWQRAHLCCWFTGSNDIGLVQRGPGTDLSWDELEVLVKGITGESFIPESLILPQGIFALCDDPELRTAILATLPTLDESGVAVRRTGGRDPHRGIQISDAPAGGPQSAGVAPSAPARASRASATAPCPLDKGKGAASSSSAPGGTRVSEEERRRRLRRADGLFVSEPPPPVGAEEAGSKKRQRTAGGAEETGSQAQGAQRRQQQQQQQKQRSPRFQGRWKVQGPKASSPSAPKVVPPPPLAATTETAPPVLQAPAGGPAAAAPTSSGATAVEGVPTAPTATTASTKAMPSSTPSVAKEAPTAPALAIEVDVGGASSSILPPTPEETEVIFGRCLRSGVEPEAVTIPLPQVLSRAHQALHETKAAILREWEALEAEHQRLSDWRTQLEARTKAVSRQFAFERSELERDRKDYKKDLQKVYARELERELDDKANSIALAEENLKEKDASLDKRATDLAWREKDLAFR

SEQ ID NO: 49848 - protein, 100 aa, Zea mays
  Coding DNA Sequence Number=SeqID_6473
MTVLHVARATLVSGNPNSGEDDFAAPSLKRLGAGMKSFLVPKLTPKVLQPTPLKESCPQDWNRLQSLSHVQRSLFPRLVTNSEGIYISYHTRLQKAQFSS

SEQ ID NO: 49849 - protein, 171 aa, Zea mays
  Coding DNA Sequence Number=SeqID_6474
MVQWVTRSTCSGGFTNSGECDCTIPVGRVLGSSSGNLHGLLGKLSEGSNRAEVGGKGFGHGGCPRAALVGRGEVAGATGELGKGRHGAEEATGKMVVHEGGLYSRSWARYRRGHGGGQGRARAEGIEGVSSVASGIFGSGLSAFLFFEAAAFGSGDLRRRSIPPTVAPSRC

SEQ ID NO: 49850 - protein, 232 aa, Zea mays
  Coding DNA Sequence Number=SeqID_6475
  Subcellular localization annotation: CTP_CleavageSite=37; ConfidenceScore=5.45e-01
MCQVSPVNWRDCIVACTRSRSADARSRSRSSRTLPPRLSRRWSLRGRLPLHLSQRCPLHHHRASRLLEETPTETGEDDDASGSSSHGTELSEEPEPEGWIARPITRDAAHGCHFHDALDTLLRRAFDRHTWVADGLDLKYYPRCSTGSARGVIVSPVGEGNPRLNSMLDHALDELGKVQAEVAELCAECAARHYLDGGPPAPVGIQHPYRSQPHGRFDYGTPDCRAWIDLDP

SEQ ID NO: 49851 - protein, 88 aa, Zea mays
  Coding DNA Sequence Number=SeqID_6476
MTSLGHPDRFQSEEALNLVRDLLGWSAPGLARRIRTGAIPLGDLAAGEFVLFTSYISCGLALPISSFFLLLLEEFGLQLQHLTPHSIL

SEQ ID NO: 49852 - protein, 244 aa, Zea mays
  Coding DNA Sequence Number=SeqID_6477
MAVRQTGGWNPLRGIRIFDAQAKAAAKTAPAASHAPVGGPAAAAPASGGVTVTEEVPAGGSVPTSDIAPTPDTGGDTGGASSSNPPPTPEEMEVVFGRWLRSGAEEEPAPIPLPRMLSRAHQFISERSQLERDRKEYKKDLQKVYARELVAHQREKKVKAVERLQKWQQELEGKASDAALAEENLKTKGQSLDRQETDLARRETDLAFREEMLTRRGELLAEHELEAEKKEKELEEQIRQFNAA

SEQ ID NO: 49853 - protein, 55 aa, Zea mays
  Coding DNA Sequence Number=SeqID_6478
MAGIARSTRAGGCSRRRRVYRPNHDNLVQSKGTVMKHTTTFIFGPSHDHKVYMTF

SEQ ID NO: 49854 - protein, 219 aa, Zea mays
  Coding DNA Sequence Number=SeqID_6479
MTSPGPTPGGRRIHASPEAALLWETQLRLGRHNHDLPEANVYRRHSHASPKATLRRETQSRLGKWSRLARGHPLAGDTVTAWETVMARSRPTLSGIRSHGSPQATLGGGGETQSRLALGHPRAGDIVMARMRLPFCGRHSLISGDAVTARRGHHRVGDVVTPRARPHLGRRRSHDSPEAIPEPETQSRLAQGQPRAGDTVMTHPTTSRAMLRKVSNSAD

SEQ ID NO: 49855 - protein, 96 aa, Zea mays
  Coding DNA Sequence Number=SeqID_6480
MEVVVHAEVQKVFSIDQRGEVGEEGVLDSKMMDDVCEEDQSLLALEDGEGLVLDPVGEFVDGVQQVSEAPVRLCKGPTRSRPHTANVQVMGIVYRA

SEQ ID NO: 49856 - protein, 138 aa, Zea mays
  Coding DNA Sequence Number=SeqID_6481
MDTVVAPRRSAQVFPTADGGGWQMRDHGNREGRPRRPGREHPESSYGGERGKQGEAEEKKSSSFNGSHAGSSASPADRNGSAPAERRSRGVRRRLITTGETYGQNPWTSVGAGYPSRLSTRIEGRGENLAICLALAEP

SEQ ID NO: 49857 - protein, 22 aa, Zea mays
  Coding DNA Sequence Number=SeqID_6482
MAGPYDAFSTGENPIHLVTLAA

SEQ ID NO: 49858 - protein, 67 aa, Zea mays
  Coding DNA Sequence Number=SeqID_6483
  Subcellular localization annotation: CTP_CleavageSite=36; ConfidenceScore=5.25e-01
MQEACNRTTVMHPFGFIASGGASDTFGRRSGHRFASAMMTASNKGPEKGILRKGFFSAKEAGPEPSY

SEQ ID NO: 49859 - protein, 38 aa, Zea mays; identical to SEQ ID NO: 48415
  Coding DNA Sequence Number=SeqID_6484

SEQ ID NO: 49860 - protein, 253 aa, Zea mays
  Coding DNA Sequence Number=SeqID_6485
MQPVAPEDSFGGMTKVTALPKVVDFCRSSHLNLSTIFTVIYIALLVLNCDWLPGSLDPSPADALTMIGSVIGLVHGLSSVCMRRTGCRSPYISEGVRQGRTHRGSGWALAHPKPGPPGTPPVRPPSTSFQLPRSDPSASSSHGCSPVSGGWRVETWRLATAGVWRCGECAPARLPAGVATDECALCLRAAVRVSASIQPSSQSSDRLTPVPVRLFLAIARRELLFPTAPDWYELLVCCGAACSWEILSLFLSY

SEQ ID NO: 49861 - protein, 32 aa, Zea mays
  Coding DNA Sequence Number=SeqID_6486
MAAMVFYVRMWVPVDEIRGRVPTARDLYPSDK

SEQ ID NO: 49862 - protein, 118 aa, Zea mays
  Coding DNA Sequence Number=SeqID_6487
  Gene Ontology: Mol. function=protein binding; Cellular component =viral envelope
  Homolog annotation: Hit_ID=A2Z8U8; Match level="QueryCoverage=69%, HitCoverage=9%, E-value=2e-25, Identity=68%"; Hit description =Putative uncharacterized protein
MRDSLTQAVEEVNIVIKFNSLLTTLSKHPEADNFARGLGPISLAGEDDHDRRADDLKILYKAYATEVLSDGIVDDKKTAILSKLYLDCRRYYICFGKVIKFFNQYLWATVQKGDSKSV

SEQ ID NO: 49863 - protein, 147 aa, Zea mays
  Coding DNA Sequence Number=SeqID_6488
MQIIERKCEAQKGAGIRSNLYFYVVLWTVGKKTLDKLTDQPGNLIPIDEAEVPDLSASRDNSDLSEDDPCDPTTTSKPEAPMQSLNQLPVEWRLTSRGGLGGLGGQGMGATEVAGDGESEREDERVSWGEKQRPTIKTPLKAIKGAP

SEQ ID NO: 49864 - protein, 523 aa, Zea mays
  Coding DNA Sequence Number=SeqID_6489
  Pfam annotation: Domain name=Transposase_28; Domain location=26-182; Score=-44.5; E_value=0.0023; Accession=PF04195.3; Description =Putative gypsy type transposon
MSSSSSSAANAPLGESSSEDTMSDLAAVELHPGHRVEFGVSRIFSVRMQDMQQLGYFGNGVGRVLGAEEIPEPEGEIVVFEAFFIAGLRLPAHRFVAEAVTSYGGQPSVEVFAKNYCLHWQKRKIGSKIAQFGSCTFTPRTGKTSAKVVELVPCACNKWGNWYDYWFYVSGAEVKDIPGIPAAVMCSHCYVAFPPFKVAGDDRDEGALRCAARMSSGRDLVEEFIGYGVWPLVHGWALGKVCPHQMPSLGGQQVRSPAFALDLRGRDPAAFVREVEDGAVRIVGRYVPRTEALRSWDICGANVRLNRVFELNRLPYDGYPGDDAVVAVDHRGKKPVAVAGEGLSREAAPAMKKRKLGTTAEGLGVSDRFAVGLMGTCVALGGRMSLPELRESSARMLRVTGGQWPRNVPIPRAASEDMFTSRMARELKIFPYGWNIAAVVSVVMERDRQDAARKGWAVTRVGDLFCEAKKAWGGVKSAAPGSSKPPPVVKPTAPGCEGCCFRRGQAALGRGREGAKASVAGAH

SEQ ID NO: 49865 - protein, 207 aa, Zea mays
  Coding DNA Sequence Number=SeqID_6490
MELHNGEKKGKQGEKGRRFLAPGFRTGVARLGVSGQGAGGARVLNSASYPTPPLYTVQLSDDTTEEAAMKTLTIFCGYHPLEMVMHPLGLFPAEKRDDPMWCNRVSHVKDVWAMYPDQVGRITVQCMSALYHHQALQSDAMAHLANLAQTTKLTLDSREDFVVDLSSELVEKDLQVEQLSQRIATLEQQVEIRDNTIDVLENQLHNV

SEQ ID NO: 49866 - protein, 208 aa, Zea mays
  Coding DNA Sequence Number=SeqID_6491
MKGVVVAPTTLLENWKLRWSNYDQSYAIEAGHGSRTMPSQTRAHDGAGTSHGREATPNPPPVPPTLAKAIAALVNATADNTRFLREMAGNQFQQHEGRAPPQGPHETTYLEFSETHPPLFIKAEEPLEADEWYGIDQVNTDLKKKNCFMRGLNARLQRKMATCLDLTYSRAVSTALAVEAKNTGHGKTKGFGGDRSNQGPKKRTGLVI

SEQ ID NO: 49867 - protein, 55 aa, Zea mays
  Coding DNA Sequence Number=SeqID_6492
MGKPVPSLLMLLLGRVTTLVPTITGMGDHVSGRVRRAICGQVHSGFNNIMLKKKN

SEQ ID NO: 49868 - protein, 46 aa, Zea mays
  Coding DNA Sequence Number=SeqID_6493
MAMMGSTSKKMYLCQVKKQQTSVVFVLRWYERKNIRSEAAGGKDPP

SEQ ID NO: 49869 - protein, 242 aa, Zea mays
  Coding DNA Sequence Number=SeqID_6494
MPPRTRGTARKHTGPIGVPRHQLAPRHKDSSSRSNDPIGDLEAKVNQLQTELQRRIDIWVADGDRINELRSDVRRLRDQLADRDLALDRVVQSRSLAWAKEAKARARVEELSAAIDNLQAYCNTLHEEVHMPSRTRAQDGASTSRGREATPNPPPVPPTLAEAIAALVNATADNTRFLREMAGQQLQQQGGRGYPEGSRETSYLDFSETRPPLFIKAEDPLEADEWIRVIEQKFGLLRCSET

SEQ ID NO: 49870 - protein, 103 aa, Zea mays
  Coding DNA Sequence Number=SeqID_6495
MEASEMRGIVPRTLVKQEMKARSLPGFLPHCMEMSLHTMLLISTGEVYCEQRTELFLGVDRSQGEVHEPGPGQPGQGYMEVACHYGSVSTSCRNGGDIDLHEF

SEQ ID NO: 49871 - protein, 213 aa, Zea mays
  Coding DNA Sequence Number=SeqID_6496
  Homolog annotation: Hit_ID=O48967; Match level="QueryCoverage=77%, HitCoverage=34%, E-value=4e-33, Identity=51%"; Hit description =Putative uncharacterized protein
MVQIVENHDLAPEDFLMEQGAASSVPRGSYCPVPGAAAMHAAQQHTPALTSRAPSRAAPSGALSAARELLRNPPSSTASPGAMRQWREDVDRLLDMAHPSSARSRPRSFRRQHEASTSVRSSSVRGALTDDLWAELNRRHAGEDARVSLEDDLRADRRRTGEDARISLERRVSAGKTSRVATLTKASLQLHRKPQGAPKSKRVSHWSAWAVPH

SEQ ID NO: 49872 - protein, 58 aa, Zea mays
  Coding DNA Sequence Number=SeqID_6497
MAWRYPPMGPTQMPCGYAPWPTLPPPSPEVGLGSRPTPDDAMNFIDQIFNTTDDPPQA

SEQ ID NO: 49873 - protein, 116 aa, Zea mays
  Coding DNA Sequence Number=SeqID_6498
  Subcellular localization annotation: CTP_CleavageSite=29; ConfidenceScore=5.12e-01
MGLGAGLLGPACSPLALLGGSETSDPSVRRSLRRLSSSDPPELPGAEALLAPFALVQGARGHGRISAGSHTDELGTPSRCIRDPDLTKGVLAAGLVNRHTAVIEGRQRGQDCRPQA

SEQ ID NO: 49874 - protein, 212 aa, Zea mays
  Coding DNA Sequence Number=SeqID_6499
  Subcellular localization annotation: CTP_CleavageSite=72; ConfidenceScore=5.85e-01
MRRGASVLRFHRRRHHPGVITPRSTSNSNSNSSSNSNSNSSSNSSRSGDHLASRDIANVFPCPSQGSGGVAVAEEVPARGFVPTTDTGGDTGDASSSTPPPTCSEEMEVREALTTEYQAKLSALDQTLEAQWAQQVKAAERVQKWQQELEGKASDVALTEENLKEKELSLDRWEMDLTRRETDLAFREEMLTRRGELLAEHELEAEEKERKL

SEQ ID NO: 49875 - protein, 66 aa, Zea mays
  Coding DNA Sequence Number=SeqID_6500
MNSSKIHVTSGEARENLNRVPSDLCQRGRTSKDTKVGSAEAVKQESFGMFAEKGTDLKMKRPFRPR

SEQ ID NO: 49876 - protein, 237 aa, Zea mays
  Coding DNA Sequence Number=SeqID_6501
  Gene Ontology: Mol. function=transcription factor activity; Cellular component=nucleus; Biological process=regulation of transcription, DNA-dependent
  Homolog annotation: Hit_ID=Q6DKU6; Match level="QueryCoverage=100%, HitCoverage=100%, E-value=3e-51, Identity=50%"; Hit description =Ethylene-responsive factor-like protein 1
  Pfam annotation: Domain name=AP2; Domain location=66-117; Score=77.2; E_value=5.4e-20; Accession=PF00847.11; Description=AP2 domain
MCGGAIIFDYIPARRRVSAADFWPDSEADAEDSDSHAPDPERAPLPTVPSRAVPRPRGKAKRGRKNQYRGIRQRPWGKWAAEIRDPVKGVRVWLGTYPTAEAAARAYDRAARRIRGAKAKVNFPNDASSSSVTAPTAASGVAAQAPAVFLPAPKVEARAQVSDEVKELSEELMAYENYMNFLGVPYMEGGNAAVSATTAAAAAAAVPEEAQVPAPAPAGLWSFEDYYYPPSLSLFTE

SEQ ID NO: 49877 - protein, 88 aa, Zea mays
  Coding DNA Sequence Number=SeqID_6502
MAAGEILAPGSCDVVAVGGALEPGGGTAVGAVESLLTSSCFSCALGWGDVEAPPRSGSSPSSVVEVEPEPIRRARRRPLAEARAEFES

SEQ ID NO: 49878 - protein, 281 aa, Zea mays
  Coding DNA Sequence Number=SeqID_6503
  Gene Ontology: Mol. function=catalytic activity
  Homolog annotation: Hit_ID=Q6Z8B8; Match level="QueryCoverage=52%, HitCoverage=43%, E-value=3e-22, Identity=41%"; Hit description =Putative uncharacterized protein P0470A03.13-2
MEDDVFCGVFDGHDRCGQLVSKLARDHLPFMILSQRNVLLLGSDDDDDGDGDDTAFSDASPAASSSTDGSRSGRPSPSLAPAPAQMLEVWREAYANAFETTDRELGVQSRVDWDFSGTMVVAMLATVSEMGYLKAVQLTTDQKPNVPRSYVHGGNGGGGGSEACWGWSGSEACRGHEDGWQMRHVGADSALSASEDGIAIGWKPLSVKRESFGPSSLPHVFKTIGAPESGQEASLGYVERVQGFICAGLRGCMENRASGHRMGWLRRACHRTDAGAVALGD

SEQ ID NO: 49879 - protein, 154 aa, Zea mays
  Coding DNA Sequence Number=SeqID_6504
MDESCTQLLSSDPMINLNATVFFFLYYFPFARNLHNLESLALTIRIKPTVEDLEPLAHRTLSGAHRTVRCPHQTVGSATRHARIARPTIGTVDRWLTGQSGVPPDSPVHHSTVRCTTGQSGAFLAVRRRRNPESGQFDQSQPGALDTVRCTQTE

SEQ ID NO: 49880 - protein, 164 aa, Zea mays
  Coding DNA Sequence Number=SeqID_6505
MEHTPPTSPTACARGPTDSGHHRRRAVPRRDRKDFPELTPPFVGPPSRRAEDTIDAIALHGLTTFCGFHPLELSTHPIGLFLTEKEDDPMWKDRVEHAKDVWALYPGQTADLTVRCMNALYRLQAVRGEAMSQLMGLLEDTKITLDNREELVVDLSTEMVEKDL

SEQ ID NO: 49881 - protein, 122 aa, Zea mays
  Coding DNA Sequence Number=SeqID_6506
MEPDEDVDIEGGVEPEPASSLDTAGSGRPPSPESSVASVSRHLSTMVVVITIIVPYQRPLIRNSSALKCRCSLGQRIHLMLMYGSGANIYNELVNMAISQEDCITAHQAEKKRKTLMAGPSA

SEQ ID NO: 49882 - protein, 87 aa, Zea mays
  Coding DNA Sequence Number=SeqID_6507
MTSHVSSDEGNAQSHTDELAREGFPRILWEVLQGAGYTTPPQAEYTIEAIALHGLTTFCGFHPLELSTHPIGLFPAEKEDDPMWKDE

SEQ ID NO: 49883 - protein, 70 aa, Zea mays
  Coding DNA Sequence Number=SeqID_6508
MGQADPLGRLWCCIRGYLLSNSLLRHEDVFSVREALKGFCCKVRFDGGGGRNRPVHVRKRVNSSVASAPA

SEQ ID NO: 49884 - protein, 214 aa, Zea mays
  Coding DNA Sequence Number=SeqID_6509
  Subcellular localization annotation: CTP_CleavageSite=56; ConfidenceScore=5.49e-01
MAIDGRLFLLDALSSPLSLYKSFELSHSPSSSSLSLSRSPHSRARRRPCPAPPFIVAGAPPAPRRPSSPSAPVPGHSTEPPAAPLPGRAPTPSISIPTHDNPIKGLTSVLSVEQTLNAKLTGFNTKTTDQAKDGGKKSFEVPSAREKVKETRNPKLGVKKKTCKVKVDRVKKSYESNIDLKHAKLGKTMKKVKNFYSVATYSKGLSFHCDPAFE

SEQ ID NO: 49885 - protein, 262 aa, Zea mays
  Coding DNA Sequence Number=SeqID_6510
MGQMVRDNLKPFLVGRDGNRYPRPNIRWVFTLLGLDNLLNKYEVVKNLAKDLPYTKSTRMDNMNQPTNLKRLTRTHKNTQYNPRFGNHHKGVLLLVEEPTKGRVFSNPNPPQADHKGDAIAGVKGEMNALVGSLVSQDFVGEAEVNERECVRGYIKDPPKAGSRWEKRGKNRLNRFSDRLNRFLPGRSRFTDLLSRRLDRIQNRLSRRKIRLNRFSQKICSDFSDSSDCQTGQSRDGRGAVPKPVEPVSGPVEPVSRAETKF

SEQ ID NO: 49886 - protein, 83 aa, Zea mays
  Coding DNA Sequence Number=SeqID_6511
MDGASSVLRRCLGTAEHDGGDAANPINRSVDMHLMKMLPTPILTDLEELEVAKWTGARGKTTDRKGETILRPSKGRGVIRHEE

SEQ ID NO: 49887 - protein, 175 aa, Zea mays
  Coding DNA Sequence Number=SeqID_6512
  Gene Ontology: Mol. function=nucleic acid binding; Cellular component= commitment complex; Biological process=positive regulation of nuclear mRNA splicing via U2-type spliceosome
  Homolog annotation: Hit_ID=A7P0R8; Match level="QueryCoverage=64%, HitCoverage=34%, E-value=1e-32, Identity=53%"; Hit description =Chromosome chr19 scaffold_4, whole genome shotgun sequence
  Pfam annotation: Domain name=RRM_1; Domain location=37-102; Score =75.7; E_value=1.6e-19; Accession=PF00076.13; Description=RNA recognition motif. (a.k.a. RRM, RBD,
MGRGPAPAVCLNAPRTHGAYQSSQGNCSENDPNNTIVFVGGLDSNVDEEYLRQIFTPYGEISYVKIPVGKDCGFVQFTSRSCAEEAIQMLNGSQIGGQKTRLSWGRSTQNRQLGNEGYSYGAPNAQDPSIQNYYGYPGYGNYEQQSTQEQQQQPPPAQEQPPPAQQVEHRESPFA

SEQ ID NO: 49888 - protein, 370 aa, Zea mays
  Coding DNA Sequence Number=SeqID_6513
MEAEKTDLRRQLAEERREANQAIAEVQAARAEAKVAQVESSLASQRAEELEARFNALRSCVDKAEASTRSEVERTHAQFVDAYRELGAWTADFEVPDREAGLRFLEWLQEELLMLPTIVEGFMSFASLVTCEGTMNALSREGCRHYDMARAEDVEDLGGLADALPTAVEVNPVPPLDAGEGSSAVPLPTVAGEDPLSAPAPTSEDALRVAAEPAAKDPTAAVGPSQGFGPAHATATNNANFVAASTVVAEDDSDDSVSKCFESDDSGSSIVWTEESSEEDLDYFAALDVVAAETSPHVMVAEDLPGASAERRRRRAVAKRRVGELSRSDRRHRGEMEGGRLHVDGTGKRELLSSLAGASVGEGELRSLFA

SEQ ID NO: 49889 - protein, 538 aa, Zea mays
  Coding DNA Sequence Number=SeqID_6514
MQAACNCTTEMHPFDFDASSVEAQAHTSCNWRVGCYVRKTAPPLTPMSRLLDYGTGAATRGNLAHGLAVPTKRIGQRGALSHGVKTTRPCSVPRKAHATAAPRTTRPVALTPWQGRRHLWQAKRATLHLRRDDRVKKGTGKGDTPKGILLREGSGPRALLLIRGSKAGPSEGFDSRLRALGLHAHYWSEVRRLAPRKGSTAASGHSGSAPTTNQGFEGWPPKGSIAASEHAERGMTLGTSDTWPRLGLRSRGTLGHFQDQQERFCNGIPSEGGIEPLDPIKRDRENSVVCPAPTAVPPARARLTAAKSSLRRHRKLRLARPQGSAPASTSDDGLRFARPQGSDSTLTSDDSLRLARPQGSDSTLTSEDGLRLARPQGSDSTSTSKDGPNCRIWTLKPEPWKPARLSSLRRCHLSSPRRRRHPPDRRRHCWRGIKTAAVIATTTFPFEEPSSARVFTFFPRSSPTSVEPPSGYGPYRRPFNSKTQFNLTFEPRISQLLVSSVFTEYLLTIFTASASTSLTNAAAFRPRSSMAKAGLCTI

SEQ ID NO: 49890 - protein, 72 aa, Zea mays
  Coding DNA Sequence Number=SeqID_6515
  Gene Ontology: Mol. function=binding
  Homolog annotation: Hit_ID=Q9AU61; Match level="QueryCoverage=65%, HitCoverage=10%, E-value=1e-13, Identity=78%"; Hit description =Violaxanthin de-epoxidase
MTGLMEVKHDFMDFLQGLSKEEMELLDQLNTEATEVEKVFSRSLPLRKLSPEELVQASRALSDVLDHDLPQH

SEQ ID NO: 49891 - protein, 124 aa, Zea mays
  Coding DNA Sequence Number=SeqID_6516
MEKEKIQLEIRGVTNLSPLKESRPRDSGLASKELRVFSHQIIFTLPGCFFLRVMIPSDFAHSDGLPLSDSVRGLKDLRWLLNVGQVLLDIKIFHWQLLFWHTQALSSTETRERHHALLIDSLAD

SEQ ID NO: 49892 - protein, 236 aa, Zea mays
  Coding DNA Sequence Number=SeqID_6517
MRQKDDGHPPIRGLGRRKDAVHKGARRHGCLTKGVALRLKATLPACAPTITGWVFSNTLKSPPLRRGGWVPHVMQTGSEQKKPNRRAWCTQPPNGYKPTRRATGAPDAACKQLHRLRHHRASSIAEPIPRLEATQRATQQRQPDAAANAAKGGPAVMTVAGAREQRSRRQPSSRPIRGQQESPLSRREDNAPVIRSSNGSRTRNGCPANYSPRRINSAAGQAAPLAGEAGDASPSP

SEQ ID NO: 49893 - protein, 63 aa, Zea mays
  Coding DNA Sequence Number=SeqID_6518
MRLHTLRDGVVLYSKRYEDEIISPSLFLYSDVGERLQVVEIPRKREKVKKKEHRGIQVDHWIT

SEQ ID NO: 49894 - protein, 53 aa, Zea mays
  Coding DNA Sequence Number=SeqID_6519
MGLGVCGSLCQGGNETDGFGYDYGAGCQYCNHCSGEDEAVEGDFQEFQDYDEF

SEQ ID NO: 49895 - protein, 147 aa, Zea mays
  Coding DNA Sequence Number=SeqID_6520
MRVPLGVRSDTKHRQLAHSKGEVGKKKVNEQEQVGRAAKATGLFKEARRRLFTSYPLTERSQEFNSDSNRLEMSLASGAATRNTAPDGIKVNRSGKVLHLSIISSYYFRTTRWTSFTEQTSIGHTHWVYRPDSSIFSEAMRPATYTQ

SEQ ID NO: 49896 - protein, 182 aa, Zea mays
  Coding DNA Sequence Number=SeqID_6521
MDASTAWNPDHLITSCPKKGKQEAGPHDHHFGRCKGKREYTSDKYKSKGGFDKEALKKNDLNHDFDNMDSSSSDEEIERALGDDAVGGDNQDISNGSGSEVSDSANDLAAKVEELNAALANQDKLLRLAAHERKEFKSKYESTLRELESARASVMVFDDTEMMGVPLTCRTSPLCRPSTLLC

SEQ ID NO: 49897 - protein, 70 aa, Zea mays
  Coding DNA Sequence Number=SeqID_6522
  Subcellular localization annotation: CTP_CleavageSite=36; ConfidenceScore=5.02e-01
MARAYKAPRDLDRTPPHAFDLTRAQTHRCLPVHGVSAAARSPCHRRSANRTLSNPVQPSEKTEHTSVKLP

SEQ ID NO: 49898 - protein, 202 aa, Zea mays
  Coding DNA Sequence Number=SeqID_6523
MGREEEVEDGCSQRHCANPVKSAKPAPAPMEDHIANDTVLKGFPQTERQDTVGGSLQRIDDFHSFSGQGYKVLMEPVVLNRERAATDQRKRMPMLFDNYRDEDFYGLPQKYSIVARVEVKFSIEPRFRDRQHFVLSDINSASNLRIIPQYTSICSITTPIILDQFKKLWWRGTTVSLLLHFLKNKGVDRFYKFAKSNNWDYV

SEQ ID NO: 49899 - protein, 279 aa, Zea mays
  Coding DNA Sequence Number=SeqID_6524
  Homolog annotation: Hit_ID=Q1EPC6; Match level="QueryCoverage=40%, HitCoverage=7%, E-value=7e-07, Identity=31%"; Hit description=DNA helicase homolog, putative
MTVEQKNEKSRKCREVSQRNKGPPIQPEASKVSLSDGCSTNDFTNFATQVPNVNQDDDSDWLHRNETFKSDDVFTTRDLLTPGSVHETVGNTPNHNLGRAAYFRERYKNLTPAERELRRECLRLYNNTPKRKGSKIEYIRKRRALLADTLSQESIAMESPTYTPEVVHPTAIEPDGSTVTPCDWVIPDIASNPFLPASTQTEDADSLRMSTRPLRRKHVPRGERQAILARRNWQFEASILRNMATATEDTISDAEEGDDWTEQGSGVDHTQSKPRVISN

SEQ ID NO: 49900 - protein, 280 aa, Zea mays
  Coding DNA Sequence Number=SeqID_6525
  Gene Ontology: Mol. function=transferase activity, transferring nitrogenous groups; Cellular component=endoplasmic reticulum; Biological process=biosynthetic process
  Homolog annotation: Hit_ID=Q10P02; Match level="QueryCoverage=16%, HitCoverage=9%, E-value=2e-17, Identity=91%"; Hit description =Aminotransferase, classes I and II family protein, expressed
MKPLLEQKALEMIFEKLQSDEGVHWAVQNGLHLSRSTVVYFKHNDMASLASTLEKLTRGNKRCRKEAAGELRRQWRFTPRATSALRRGCATLRARGSHARALDRAGLGRCTAPRPRLGYGHAPEARVGPHEHGETEPGTGKKGGEATMAARRAAPRRAPRPRRAVHAWGEGRGHTEPQVDRPPLRAARRAWRGHDRSEVSVPRLGHAAPHATTERALGREGGRTPRLEPRPPLRAGRAPWPRAKAREREGAAHRAERGRRRLFFEQQSSWAGVTSRGGGR

SEQ ID NO: 49901 - protein, 839 aa, Zea mays
  Coding DNA Sequence Number=SeqID_6526
  Gene Ontology: Mol. function=helicase activity; Biological process =viral genome replication
  Homolog annotation: Hit_ID=Q9AYF0; Match level="QueryCoverage=89%, HitCoverage=57%, E-value=0.0, Identity=52%"; Hit description =Helicase-like protein
  Pfam annotation: Domain name=DUF889; Domain location=550-740; Score =233.9; E_value=3.7e-67; Accession=PF05970.5; Description=Eukaryotic protein of unknown function (DUF889)
MTWNPNWDEIRRELLPGQTPQDRPDLVVRVFHAKLQELKHRLTKHDILGKVRAYVYVVEFQKRGLSHAHFLLIMQRKYKLTCPEQCDLLISAEIPSNKYPELRKMVIKHMMHGPCGLLNPNCPCTKGRKSCKNHYPRPFSDTTLQGKDSYPVYKRRDDDHKEKARGCEPDNRWVVPYNPYLLRLFNCHINVKACGSIKAVKYLFKYIYKGHDRASVVMRDASKADDDVDEIKQYRDARWVTPPEALWRIYGFELSQISPPMMQLQLHLPNMHMVAFHERQMVERVVNRPGVDRSMLTSYFEANRLHDEGERYYLRVLLNRVTGATSYVDLRTVDGVTLPTFREAAERRGLLESDNTLDECLTERAIFQMPSSLRWLFATILVYCEPSDVAVLWHKHKDSMFEDYQHKSQNKTHVEQMVLIDIRNMLQSMGKDIKTFPIPPIIDAYDDAIGTAREVYEEESIEPTTGDVALKYSLNKEQRAAYDKIMSAIDTDQGGFFTKQTGTTELLRKASLIIWDEASMTKRQAVEALDNSMRDIMGRPALPFGGKTIVFGGDFRQVLLVVCKGSRAQVVASSLRMSYLCESMSHLKLVSNMRAKNDPWFAEFLLRVGGGTEDTNSDGDIRLPDDVCVPYSGSDSDLDNLIDFAFPNLNENMSDSTYITSRAILSTRNDWVDMINVKMIDRFQGEHMNIDPANGLCNGTRLVVRGFQRNSIDAEIVLGQHIGKQIFLPRIPPCPSDEEMFPFQFKRKQFPVRLSFVMTVNKAQGQTIPNVGVYLPEPVFSHGQLYVALSRATTRSNINILVIPAVDGRKKSWKGVKKNPTVDCGTYTKNIVYKEVLTN

SEQ ID NO: 49902 - protein, 303 aa, Zea mays
  Coding DNA Sequence Number=SeqID_6527
  Gene Ontology: Mol. function=DNA binding; Cellular component=nucleus; Biological process=regulation of transcription, DNA-dependent
  Homolog annotation: Hit_ID=Q10FB9; Match level="QueryCoverage=48%, HitCoverage=84%, E-value=1e-32, Identity=50%"; Hit description =Homeobox protein OSH1, putative
  Pfam annotation: Domain name=KNOX1; Domain location=197-241; Score =64.7; E_value=3.1e-16; Accession=PF03790.4; Description=KNOX1 domain
  Pfam annotation: Domain name=KNOX2; Domain location=247-298; Score =82.7; E_value=1.2e-21; Accession=PF03791.4; Description=KNOX2 domain
  Pfam annotation: Domain name=Lipid_DES; Domain location=1-38; Score =69.5; E_value=1.2e-17; Accession=PF08557.1; Description=Sphingolipid Delta4-desaturase (DES)
  Pfam module annotation: Pfam domain module=KNOX1::KNOX2::Lipid_DES; Domain location=197-241::247-298::1-38
MATDFFWSYTDELHTSRRREILAKYSQIKELFRPDPWGFLKGLSRTTGHARGCKGSPSAVVAPFPTSNSGSPSPDAISARRQRFGNRADLDHQRLGWRGFLHAAQIQAIPRLVHGQTPNSVASKFVKWRDVVVLCTHRPPKPAPDAPDADLTGGSKQAATTTPFYLALDHTASATSSPPPAEAPPLPCAANSERGSEIIKAKIMSHPLYPAIFRAFIDCRKVRAPLEIIGRLSALVDDVEMNSDDRQEQRRAADPELDQFMEIYCHMLVRYRQELTRPIEEADEFFRSMEAQIDAFSLLGDYV

SEQ ID NO: 49903 - protein, 294 aa, Zea mays
  Coding DNA Sequence Number=SeqID_6528
MAAAAEAAGQLPSAHEADERVRALPTGGWAAVGVLRAGPQTLPGGPRAGKCLAAQKPVAGAGPLTQKRIKAGARDASTLGRRGQVGKGMGGLAAALGMRKAVALPAPRTRRSQAQGHGRTTANRLRCAGTRSRRERAHEGRDGGAAPAGGLAYPRRGLGAVPRRRTQGSRRWDEGTAAMAPRHACREWSGTTNRLPPTRKKAKSKGRTVSSLWGDLERASWKGVRDGSKHHVGALRLWAHQSGVAWRRGRCASPHMVAAAEAVGQLPSAREEDERVRALRTGGWAAVGALRAGP

SEQ ID NO: 49904 - protein, 51 aa, Zea mays
  Coding DNA Sequence Number=SeqID_6529
  Gene Ontology: Mol. function=aspartic-type endopeptidase activity; Biological process=DNA integration
  Homolog annotation: Hit_ID=Q2QRR6; Match level="QueryCoverage=70%, HitCoverage=7%, E-value=8e-08, Identity=77%"; Hit description =Retrotransposon protein, putative, Ty1-copia subclass
MALDADEDGEPMDQKEYRSMFSFLLYLTAMRPDIHFAIGYETDYEVLVFRS

SEQ ID NO: 49905 - protein, 448 aa, Zea mays
  Coding DNA Sequence Number=SeqID_6530
  Homolog annotation: Hit_ID=A2ZLS4; Match level="QueryCoverage=15%, HitCoverage=17%, E-value=4e-14, Identity=73%"; Hit description =Putative diaminopimelate epimerase, chloroplast precursor
MDDDREDGKRETARGKHGAWARPRQHDTRLTRRGEASNTAWRTFCRARIRIPQPPQPRIPHTPAAAINARGPLTLLPTAVIRQTTPPHPPQISPWRRARTPGRSPVTFLPHPELRPRRRSRHRQHTSRSHLARAVGFSRASGRRVRRRGLVKAIGSRPVSSDDKEDDVGGSGSGSAKASRPAADFCLSSVAASTACIESFTNLISTAPASLLGSSLMVESFPPGRPDLSQFAITSSYCAGVSTATEFVAAVGNDSAGPPGATAASRPLSALRSSPWRLATNSWGWTNNVGSDGGGSIADEFSMIAVVGMGLEMPNVSSRYLCRSTGCMLHDSFSVTEVEALFELFKSISGSVIDDGMIDKVYSIVRLSTEIMLLVAISIAVPNPTAPSRGRVCLPLRGVLAAPHRAVASMAVSAPRSGAATLFLERRESERALHFVKYQGLGNDFIMP

SEQ ID NO: 49906 - protein, 154 aa, Zea mays
  Coding DNA Sequence Number=SeqID_6531
MANWLRSGRPGGKDSTIKEEPKRLAGAVEMRFVKLSMQAVEAATDERQKSAAGLEAFAEPEPEPPTSSSLSSEDTGLLPMAFTRPLRRTRRPLARENPTARARCERENYNSFLLFYCIYQSLLDLGRIQLDCSNVYEVGDLTEARREGGVILSA

SEQ ID NO: 49907 - protein, 154 aa, Zea mays
  Coding DNA Sequence Number=SeqID_6532
MDGSKDSFDISPSNIIEPTMETLSNEDQQEFKKHKKQLIKEAQAKFLANFKVDQNQKITRQWAADLASLRPTTTTPKSKTMENTCDPSLQFGMTNPNHFMGCRRTHILNNRSLLHRLGVNPPICARPDRPRLSADRLDQQWSTPFFEPNYRNLH

SEQ ID NO: 49908 - protein, 42 aa, Zea mays
  Coding DNA Sequence Number=SeqID_6533
MVTDDDDDDGSINDDSDYGFWYFLYEEDSAKFFKDLKFKESL

SEQ ID NO: 49909 - protein, 135 aa, Zea mays
  Coding DNA Sequence Number=SeqID_6534
  Homolog annotation: Hit_ID=Q8W1D1; Match level="QueryCoverage=34%, HitCoverage=3%, E-value=3e-08, Identity=53%"; Hit description=Gag-pol
MGRGGALRGLWLGAREEGLGGPGRGTGAGHKAERGKMAGPWLGQGRRRKSECEQQLRSTSLWTTRSEKQPIPEPAQKQHSDWSKKKTPQNHSRGRVNHVTAESVPEDADVVYGYYRRFIEGFSKIVKPLTSLLEK

SEQ ID NO: 49910 - protein, 248 aa, Zea mays
  Coding DNA Sequence Number=SeqID_6535
  Subcellular localization annotation: CTP_CleavageSite=44; ConfidenceScore=5.36e-01
MGGGLLAAASALRSSLLLFGPPEQKSSSSPLLERATACRSSVFCCSAGPPIEWGCSYLRRWNQSSVCNGTLNASVFVHCGCRGLNINVCASESCISRKVVSEVSVSRRRRSPSARSALPLTRTLTRPWGSVTDAVEKARRITSAEELPNVKTCSVRGITYPNVSYLSQKVMSEVSVSRRRRSPSARSALTAYVYSVVFRIHFRSSQKARKTFWQKRSFFEENFDAEGVPPLLAPEGGSGFAEARPTLP

SEQ ID NO: 49911 - protein, 60 aa, Zea mays
  Coding DNA Sequence Number=SeqID_6536
  Subcellular localization annotation: CTP_CleavageSite=37; ConfidenceScore=5.11e-01
MSGAPEDSNANSPPSGISRGDSAIIHRTVRCTPDSVRAFNARSARADVRRVHSGTPDKEQ

SEQ ID NO: 49912 - protein, 91 aa, Zea mays
  Coding DNA Sequence Number=SeqID_6537
HLKGWDVVSTVSPHGRLPVPNAEDYNLDPDTYDGELFQEDGLEGRFEIDLTEAIGMDVDIEMVVVEEDDEVLPSSSSNPEGKMSPFALPVR

SEQ ID NO: 49913 - protein, 69 aa, Zea mays
  Coding DNA Sequence Number=SeqID_6538
MTQRCADFEEKVHGRSGCFEVQLGVKLSEVFYVPRVPDFCTIHLGTGKLRISELARLHHSSPLANRIPT

SEQ ID NO: 49914 - protein, 106 aa, Zea mays
  Coding DNA Sequence Number=SeqID_6539
MTSAVLNSLRKHRNISTTPGRNANCVSTGLKYFSAGHRIDAFHGGHQNGQRHYAAQQGSRAPPPHGQPPRSKKVGEEENRSVHWGGANEGGPEGGAPEGGKGEDVS

SEQ ID NO: 49915 - protein, 135 aa, Zea mays
  Coding DNA Sequence Number=SeqID_6540
MKKRGEDARIPERADRRTHKDETIREDALKDRRSGGRINEDPEENNTIHPVPTTVPTTRIKLTTISHDLPRVQPRAQQGALPRPTSGLGLSLGLGRRSPPRPTPGLSLGLRRRLRLARPRPRTDYATGDTSLPYP

SEQ ID NO: 49916 - protein, 165 aa, Zea mays
  Coding DNA Sequence Number=SeqID_6541
  Subcellular localization annotation: CTP_CleavageSite=22; ConfidenceScore=5.17e-01
MCSSRPAAACTTELTISWLPPSSSHAPRPRLVQARGQRDQTPEQTDVSTHTASPPGRRRPLPNAQMPNRRPLAQGCGATIIGDLAAAPTTPLKDPQNRKGRRYWNSRREEREQSREYASRKILFVLSRCRISKATGSRDLLSRSRMHVSAWDEEDYDGGAAASRD

SEQ ID NO: 49917 - protein, 246 aa, Zea mays
  Coding DNA Sequence Number=SeqID_6542
MDDRGLAKNAAELLGHGGEFSKLKGKCAGARASVRGSRRCSWEMASHNSSGNMASDGEVMPSTMEKSFFFHLWSSGGPNWWWEFASFLCEESTFWRSVPGKVFDRSFVDAIKNHILTHPSRLVPRLGVTVCLAISLLLLAGWILQFSELSLHHARKNATLRILSTRRSIRKRCTAVLAVGRCNGIALGRPPVHPAPFLPRGFLHQSVLFHKSMTQAISRKMSPKYEDFAVVSIHPLPMEPLAFPQR

SEQ ID NO: 49918 - protein, 140 aa, Zea mays
  Coding DNA Sequence Number=SeqID_6543
LGTGLGSLPSVMSLALGKEVVFAECQLGHSAKNLTWGPSLAGSLPMLPDTRQRSSPSAREKGFAECFRHSAKLLIPVVPACPVTTAALSSLTEAGGRQQGLDRTDSCPSAKLRCSSDIHDITPAGYQDLSGCHISMYLGR

SEQ ID NO: 49919 - protein, 319 aa, Zea mays
  Coding DNA Sequence Number=SeqID_6544
  Gene Ontology: Mol. function=RNA binding; Cellular component=exosome (RNase complex); Biological process=rRNA processing
  Homolog annotation: Hit_ID=A7PU41; Match level="QueryCoverage=98%, HitCoverage=99%, E-value=1e-119, Identity=67%"; Hit description =Chromosome chr7 scaffold_31, whole genome shotgun sequence
MKDRHLSLNQTQRVRLEAALQELQSVAPAAVSAAAVTVADTIPVNQEDNILKGHGTSDQDGEVVATLCGVVERVNKLVYVRTLRARYKPEVGDIIVGRVIEIAPKRWRLEINFSQDAVLMLSSMNLPDGIQRRRTAVDELNMRSIFEENDVICAEVRGFQHDGSLHLQARSEKYGKLERGQLLMVAPYLVKRKKQHFHHLEKYNVDLILGCNGFIWAGEHVVVGEKPKTTGGQQGFSTEAENFTPLETRKHICRLANSVRVLSALGFTLTVELIIETMEASASSNVEINDMLGAEFYVQTAEREAKRRADLLRKKNDAR

SEQ ID NO: 49920 - protein, 115 aa, Zea mays
  Coding DNA Sequence Number=SeqID_6545
MAHEEKGKLTEISNLKLGYQGGGAHGSRAARHRAPARQARTSARNAAKRQIRRGKDRNGLYEAIHVAKNSSHRWIVNQWLLFIAVSVACFTFCRFDRPLHFSTVTSFIVAFIVCS

SEQ ID NO: 49921 - protein, 624 aa, Zea mays
  Coding DNA Sequence Number=SeqID_6546
  Gene Ontology: Mol. function=kinase activity; Cellular component =mitochondrion; Biological process=protein amino acid phosphorylation
  Homolog annotation: Hit_ID=Q2HTV1; Match level="QueryCoverage=100%, HitCoverage=100%, E-value=0.0, Identity=64%"; Hit description =Protein kinase-like
  Pfam annotation: Domain name=ABC1; Domain location=268-394; Score =132.0; E_value=1.7e-36; Accession=PF03109.7; Description=ABC1 family
  Pfam annotation: Domain name=APH; Domain location=282-519; Score= -13.9; E_value=0.062; Accession=PF01636.14; Description =Phosphotransferase enzyme family
  Pfam module annotation: Pfam domain module=ABC1::APH; Domain location= 268-394::282-519
MSRFAHLGKSRKLAETLLVASKPNTAGGQNIASSFAFGLGYSSRAFLHGKVHNGPNTSYMLGRANDSLHWSTGVRKFSILSSCSQNAFQSQLAWKRLVALGSRAPKASPIFSKVACAIGLAVSRSNIAPYLVAFIAGEVMLAQKTSADGEYYPIRERAQDGRIYVTSLIYSAVELVIIIFRSIYLALLFTPSILMAPFAETLGSKYRKTWLRLVHRTLELAGPAFIKWGQWAATRPDLFPSDLCTELSKLHTKAPAHSFTYTKKTVEKAFGRKLSDIFENFEEDPVASGSVAQVHRAVLRFRYPNRQTKRVTVAVKVRHPGVGDSIRRDFNIINAVAKISRYIPTLNWLRLDESVQQFAVFMMSQVDLAREAAHLSRFIYNFRRWKDVSFPRPLYPLVHPAVLVETYEHGESVSHYVDDLEGHDRIKSALAHIGTHALLKMLLVDNFVHADMHPGNILVRVAQPKNSNNTLKKSRPHVVFLDVGMTAELSSNDRVNLLEFFKAVARRDGRTAAESTLKLSKQQNCPNPKAFIEEVERSFSFWGTAEGDAIHPAECMHQLLEQVRCHKVNIDGNVCTVMVTTLVLEGWQRKLDPDYNVMKTLQTLLFKEDWAKSLQYTIQGLMAP

SEQ ID NO: 49922 - protein, 141 aa, Zea mays
  Coding DNA Sequence Number=SeqID_6547
MGKNNKRKREPTPPSEEFGDSEYSEEEFSSESEGSPAPIPLRELSDDSDDSQGLAAEVWTYIRAVERSGLEGSDESEYSSDEEDSDGGDEGEDDDDDDDDGDGDGSGSGRGGGDGSRDSTKGDSSRGSTKGSSGGRGRASG

SEQ ID NO: 49923 - protein, 76 aa, Zea mays
  Coding DNA Sequence Number=SeqID_6548
MNVSHTQFLLVHTAAIWVIDVIGCMKVSRRVTPEAGGSGSDPAAGTGFVDSLFAFPPPGGEGGSGHSSNHPSGGYL

SEQ ID NO: 49924 - protein, 82 aa, Zea mays
  Coding DNA Sequence Number=SeqID_6549
MRKWARPSPLLLMLLSCRSNIPLDRPTRWQGGRPSHTINQILHGTCKNGATSKAEYTNTQLDLTGLTALAYNAPLTPAAAVQ

SEQ ID NO: 49925 - protein, 106 aa, Zea mays
  Coding DNA Sequence Number=SeqID_6550
MTGDGLDLKYYPRCLTGIVGGVIVSPVREGNPKLNGMVNLVAMLKTELDHALDELGMVRAEVVELRAERAARHYQDGGSPAPFGILHPYRSPPCGRFDYVTLDCRT

SEQ ID NO: 49926 - protein, 45 aa, Zea mays
  Coding DNA Sequence Number=SeqID_6551
MEAKKGLRIYKPVRPPVPEDTADRAVRRLAAEKEKEKEKKDAKKA

SEQ ID NO: 49927 - protein, 126 aa, Zea mays
  Coding DNA Sequence Number=SeqID_6552
  Subcellular localization annotation: CTP_CleavageSite=7; ConfidenceScore=5.16e-01
MPSIARRAGTRRGHCVPRQAVSGALRVRRDSARRAVPRQVAHAQAIAPCSLAATGCRAVTPGHAALPGGLATNPLNRSVDMCLVKMLPTLILTDLEELEVAKRTGARGKNREKRGNYSKAIERQGE

SEQ ID NO: 49928 - protein, 489 aa, Zea mays
  Coding DNA Sequence Number=SeqID_6553
MEKDHQDASRKRRAFVRVRDPRCEVKMARGIAKSAAPGTSKPPPDAKSTAPGPSKAAPCRSEAGQLAVVPTPVATRAKGSSQDPWSKFCASGEIASAAAAKDMAGLVVQQLKHVVAFAEWIASGALTSEFAAERRRLKGRVERLRTKLTEAVWDKLAAENKSRNLMDKLSAAEAEKEELGHRLAAEKEDADKACVEAQAARADAKLARAEASLFLQRAAEAEANHRSLRSYPDKAEASTRTGVGRARALLVDAYRQLGARTTSFDASGKEVGLRFLGWLQEELEVLPSIVTGLMSFASLITCEGAANALSREGCRHFEVFDQFDEDFDHEVFQVEDAVLKRSAGALYDRMWGPHGRDTVRERSDRAMEQMANDEKVEDLGGLESTMPLGFIFVILKLVAAQVPTSGPTQATPTDGTNFVVAANVVPANDSLSGSEFGSFSSNGEFESPFSWTEESSDEDLDYFAALDVTAAESSPRLEVGEASDPPAGV

SEQ ID NO: 49929 - protein, 307 aa, Zea mays
  Coding DNA Sequence Number=SeqID_6554
MEGFMSFASLVTCEGALNALSREGCSHYEVFDRSDEDFGREIYKVEDPVVKDSAGALFDRMWGPYGREVVRERSDRARDQMARAEDVEDFRPLNSAQPEAEANPVVAEAEVDPAPPPETGEGSLAAPAAALSGGGSSPVTAPMVENPLKAATELAAEDPSKAATEPAAEDPMAAAGSSQVQDFGPAHATTTANFVAASTVVARNESDESAFKFSDFDDSGSSVEWTEESSDEDLDYFVALDVAAVEASPHVTDAEVLPGPSAGRRRRRAVAKRRVSEVDGGRLRVGRAGKRELLSSPVGASVGEGEL

SEQ ID NO: 49930 - protein, 87 aa, Zea mays
  Coding DNA Sequence Number=SeqID_6555
MDVLEARPPPQAPAPAAGEVVLSPTEEDKDNDSDVDASLRQHLTCNRQGMGGSPIAEEEHLNTMTTIGTSQGVILFGRTDVHTFLHQ

SEQ ID NO: 49931 - protein, 106 aa, Zea mays
  Coding DNA Sequence Number=SeqID_6556
MTGYRFEDQKTRFVPKNTVYPKVDQNVSRSRRGPKKIVVKGIMEAAKNPLGGGEMGLPQGVHVKAHLLDRVGDIGPCKSEILETSRKAPVGRHVANQGASSSETFA

SEQ ID NO: 49932 - protein, 225 aa, Zea mays
  Coding DNA Sequence Number=SeqID_6557
MDKNQTIAYAPYIMALIKAKTRFEGHYEIVHTPFRLFKNEIGFLTRPLTPFPDDEEEVGYDAGDAPEADVEQMPPPPPPPQPQQYWQPGPGYFDPYFQNMQQGLQTHMDGRFQGMMTHMDQRMDAMHSRLDDHLDAINCELSEFRSHIQDHVTDHIMTRLNNMQQSFQDNMGALSSQFDNLSTNDSMQEISQRQQQLQQDFGQFSSLFDTFSTHYYSMYPPPGGQ

SEQ ID NO: 49933 - protein, 222 aa, Zea mays
  Coding DNA Sequence Number=SeqID_6558
MGRRETEHEGGKRRQAKGETRDLRVVLRPGRGNDGPPCDVVGPSPGSGEAEAPPRSRSSLSSEVEVESEPRVGRGGDRRPRPRLSLSPRLGRGRVRRLPEPRLSPSPEVGRGRVRRLPEPRLSPSPGVGRGGVSYGARGRTWLLSASLCRVARQSERRRQRCLLAILALNAPAIRSVGVAIWPRLLLGKDWASGEPKLCADGGYQLRLGVLGVPLIMVPDNW

SEQ ID NO: 49934 - protein, 91 aa, Zea mays
  Coding DNA Sequence Number=SeqID_6559
MASPGPRGSGTSKAREQAAPLDVVRQTFDTREEAYLFYLDYAKLAGFSVRTKRCNCNCWCAFLSGACGRDEDEASVRTEWGSWLGPGAPGA

SEQ ID NO: 49935 - protein, 47 aa, Zea mays
  Coding DNA Sequence Number=SeqID_6560
MFGLQVAMRLMVIGFDSGNGCQHCNHCSGEDEAIEGDFQEFQDYDEF

SEQ ID NO: 49936 - protein, 316 aa, Zea mays
  Coding DNA Sequence Number=SeqID_6561
  Homolog annotation: Hit_ID=A2YGC2; Match level="QueryCoverage=37%, HitCoverage=52%, E-value=9e-08, Identity=31%"; Hit description =Putative uncharacterized protein
MLEETQTTEVATAARATTPTFLLTWSRKDGLLDPSLATLLAGVTSTMRSTPCYVGHLTGRTWSIEYRCVVFQHSRGVYPDRWEATCLVRRPENSLWDAEICSEHYSISERDSAEAAMQDVTRRALSHYCSVFGGVADGLNLKYYPRRPSGSTGGVIVSPVGEDNPRLSSIVNLVAVINTELDHALDELSRARAEIAQLLAERVERCHLDDGSPAPVGTQHPYRSPRRGHQSYGNPDYVRKQAQRRKACSAGASRSTGGGTSATAAAAPAPDVHRADVPDADLGSSSHWSDSSRHSAAAAIATTSASDASDAQRQAC

SEQ ID NO: 49937 - protein, 68 aa, Zea mays
  Coding DNA Sequence Number=SeqID_6562
MFASFFRVIRVHSFVGEVDSGVLQESFFSGGSTTRCRVPSSSAMDEMVPKAEHSPEAKGDLALGGDGH

SEQ ID NO: 49938 - protein, 180 aa, Zea mays
  Coding DNA Sequence Number=SeqID_6563
  Pfam annotation: Domain name=IQ; Domain location=10-30; Score=28.5; E_ value=2.4e-05; Accession=PF00612.18; Description=IQ calmodulin -binding motif
  Subcellular localization annotation: CTP_CleavageSite=30; ConfidenceScore=5.40e-01
QLALSARLQTSAAVGIQAAARGFLARRRVRGMRRQMLKAALVTVDLGTRGRDLALSDSHQQRHRAAISKCEHGTCLADDKVQLYDSGGRDDTSLVIGKGTLFSATTFRYRPPRGRLRWLLLRPTPEMLGSDEDDKQPKKVLPLPPDPIAKTSAFDEGDKQPKVLSPSSPDSIAKALDNLT

SEQ ID NO: 49939 - protein, 88 aa, Zea mays
  Coding DNA Sequence Number=SeqID_6564
MALLLWWVAVGLVVGGGGACSKNGLGVGDRRGAGITDRGDTRQSWNRNNKTQQCHQLQQHGFENPEYGVYLRKSYSTKRKDSQGYAGL

SEQ ID NO: 49940 - protein, 201 aa, Zea mays
  Coding DNA Sequence Number=SeqID_6565
VTVGAAGSGCHLELAVGLQFPGASDSLNKIRLRTYLVPLLGSPELCRPPGGSPFHTKHVAVHDCLLLARVHSVLLGHWELTVAELLSLDNVTPSGLVLRSGNFLGLLLVMGRFDCFDWLLGQEGKVPSCSASGIGFLPVGCSGGTATDAEGTAYGIDVDADADSGASIPEASALAVEAEAVAALAAWLLGSTQLLELLQSA

SEQ ID NO: 49941 - protein, 135 aa, Zea mays
  Coding DNA Sequence Number=SeqID_6566
MRKLELEPWGREGSSLGHLLRHGRKQDAMAGGAWSREPAARLQQGRRVGLEAAEEGARPRREGELGGMGAWRKELAAGKVGAMGAARQRASLRHEQERRALCVWERRKKRVAAGNFLRGGTGKFPSEHPYFIEDG

SEQ ID NO: 49942 - protein, 73 aa, Zea mays
  Coding DNA Sequence Number=SeqID_6567
  Subcellular localization annotation: CTP_CleavageSite=40; ConfidenceScore=5.73e-01
MAGAPRSASARLSLPKQRAPFLAARRGARRLFGKMRSKPRAAAALPFDLHSPRRVSSLSCSLRSPIRDAVRVG

SEQ ID NO: 49943 - protein, 114 aa, Zea mays
  Coding DNA Sequence Number=SeqID_6568
MAHGGMTATTSANRGTLVRCRKLENLDAIECGVVGVIIAPTTKSGRWEAVCRMAHRTAGRWVLTVGALTGGASGLSGGAPDRSCRLSGAPSARALTLARTVAHSMWLQSTVGAK

SEQ ID NO: 49944 - protein, 99 aa, Zea mays
  Coding DNA Sequence Number=SeqID_6569
MRLSQNTLNTKQPAKVSKDDGGGPLGESYRDNRLCVTRAPVYRMERGPRPFGRKLDSEDGGERPRGAGSGAPLARGEGTWLSTELLDRGAWTSRGLPFA

SEQ ID NO: 49945 - protein, 269 aa, Zea mays
  Coding DNA Sequence Number=SeqID_6570
MPSSSSSSDTTPPAAASSEETLSSVMVEELRTGDSVDFGVSRMTSARVEDMQRLGYFGGGVARAPGTEEVPEPEVAEEDADEGALRCAAGQSSGRDLVEEFVAYGVWPLAHGWVLGEVCPRQMPFHGGRVVRSPAFALNLRNRDPAAFVRDAEDGAVRLVGRYVPRTEGQRSFDIRGSNDRLNRVFELNQLPYDGYPSQDEADRRGKIPAVETGDDPAPAAPLPSKKRKLGTAMGGIGVSDTFARDIMRTCAAPGERMSSPELRESRLG

SEQ ID NO: 49946 - protein, 430 aa, Zea mays
  Coding DNA Sequence Number=SeqID_6571
MTASKKGPGKGILRKGSFSAKEAGLEPPTDQKKGSTAASGHSGSTPTTDQGFVGWPPDGFDNRPRARRVRDDSGNDSVMESPSEGGLKPSDPIEQDRVRQITCRGSGAALANPAPAKPLTASTYQPENPKPDHAPGRRPVRMREQPDRPSHHEKALRPRRSQTTPSEALGGLPPGGLVTPISTKLQRPDGRNPGFTEKQPWPDRLARRLDHRSIQCKDRLTPDPDARFPVDKAEQPRLASGTIGISASPDPRARTRPQLGRRSLPRPTPGLGLDLASDDDLRLARPQGSDSTSPRTTIFASPDPRARTRPRLGRRSPPRPTPGLGLSLNSGRRSPPRPTPGLGLNLDSGRRSPPRPTPGLGLDLDLGGVTTSLGPTTPQGEAIITLPLASPGYGEQDRRPIWLAPGTEVTMPYYYFVKRLNFAFNMFKGA

SEQ ID NO: 49947 - protein, 186 aa, Zea mays
  Coding DNA Sequence Number=SeqID_6572
MALAMTMVLMARLRHTARKSVIPFLPSRLAERPLRRPVDGQSSHLERLHHRLHEEQERRRQEQQGSSFSLHQEIESVRSCSPVLPLEAPPAPPLGAPASGVAAGGDPDDGGGDDSSSHDTDLSANHEPEGLKGKCALGPFLSILVIECQHKCLNVNLCPWMNKVQIKSKGMFLSLSTLVLCTNILV

SEQ ID NO: 49948 - protein, 617 aa, Zea mays
  Coding DNA Sequence Number=SeqID_6573
  Homolog annotation: Hit_ID=Q6JAD6; Match level="QueryCoverage=100%, HitCoverage=89%, E-value=1e-168, Identity=64%"; Hit description =Putative uncharacterized protein
MPRTKNASAPGGGDDEDPRRPFSQVKGKTVYLEQQEGRKKRLMDRAAQAAAATAEQAVLGDQPQTPSDQIVYRVRRLASRPRSSTTTTASASTPPPTLHPPVTPVAPSTTSTTPASTAPPPASVSAPPIPPARFRERDETEVRPLAADPRLFDLQRATASRRDPAAVDLFSTRIQKSFFRAQMSAQIALRVHRLLDLPAFLLAAGADSEVHLSYLPGLLTLLTTSGRYVEEWVRVFYATVWIDPDHHWMRFRFEREDVTIHVSQIHQLFGFHESSTRLHNLCYGTSDPPRRPHGGVAPGTAHVTALFRPPFSDGSRRSPTDFTTSAKFLFQLMRQTLLQRMGYREATTHIQLWLLGALVSHSEFDVVDFLICDIEDTVLDGMCARRQLPYAHYLCHIFAQLIRPPQFQGTLEASRLVFGSYRPAPEDPVPASALVFDTQAEDAALHQFEAQDAAVDDDDDDDDFGIPPPPPPPMPPRSHDHEAGSSSATPAAPPAIDPAIASILQSLTQQQAHLAAEQTRLSERMLSMFQTIQDMQDSLQQQLLQDRAESRAFMALMLQHSGVSIPPVQSAPPPPLQDPVVPAIQLGPPLPSVGPSSSPLRPVTMAFTSPVLSSVYP

SEQ ID NO: 49949 - protein, 319 aa, Zea mays
  Coding DNA Sequence Number=SeqID_6574
  Gene Ontology: Mol. function=catalytic activity; Cellular component =cytoplasm; Biological process=glutamine metabolic process
  Homolog annotation: Hit_ID=A2X1L3; Match level="QueryCoverage=75%, HitCoverage=77%, E-value=1e-80, Identity=62%"; Hit description =Putative uncharacterized protein
  Pfam annotation: Domain name=GATase; Domain location=22-235; Score= -28.1; E_value=0.00091; Accession=PF00117.19; Description=Glutamine amidotransferase class-I
  Pfam annotation: Domain name=Peptidase_C26; Domain location=49-218; Score=-110.2; E_value=0.051; Accession=PF07722.4; Description =Peptidase C26
  Pfam module annotation: Pfam domain module=GATase::Peptidase_C26; Domain location=22-235::49-218
MATATTKPAAGRGGRRYALLLALWDSEYAKEVYGGYYNVFVAAFGADDVVGGGGEGPAGDRWHCFRVIAGEFPAPEDLASYDGFVVSGSPQDAHGDEPWIRRLCALIQTVHAMRKRVLGVCFGHQVLCRALGGRVGRARNGWDVGVRKVTFARDRLEGLEFLGDLVEELPRSASLIEVHQDEVWEIPPAATVLAYSEKTRVEVFAVGEHALGIQGHPEYTVDILHNLIDRLTRQNDIRRSVGEEARRTVAETGGPDRAFWTALCKGFLGGGGAGGDRPQPSAALPAVRETAPPEVTTSCAVAGCFASAAGAMVQMARSN

SEQ ID NO: 49950 - protein, 655 aa, Zea mays
  Coding DNA Sequence Number=SeqID_6575
  Gene Ontology: Cellular component=cytoplasm; Biological process =ubiquitin cycle
  Homolog annotation: Hit_ID=Q6ETM2; Match level="QueryCoverage=95%, HitCoverage=95%, E-value=0.0, Identity=85%"; Hit description =Putative dem protein
  Pfam annotation: Domain name=VID27; Domain location=30-635; Score= -450.1; E_value=1.1e-07; Accession=PF08553.1; Description=VID27 cytoplasmic protein
MGGSHSREDLDLSDSDSEDAESPRASDNSSDYGTPPPASVSSKLASGAGAATPASIDAIDRHLRQLHLKYNEPISPNPSSGPTPSANPAALNAVKLYLHIGGSSPSAKWIVSDRLAAASFVRAGAGAGDGDDEDDDAPAAGGPWCLVVGSKIRARVGPELQLKAFPAQRRVDFVADGVWALKFLHSDGFGDFCAKHHSCMFENSYGVAATDEGRAKVFGKDFAAWARPEDGDESIWEDATDGFSPGPKGSPMPPRTPLLKAVLEDLREFEEPVEEGSGIKSLALGALDNSFLVGDKGIEVVRNFEHGIHGKGMSVKFSGGSTNFSTPKKALLMRAETNMLLMSPATDGKPHAKGVHQLDIETGKVVSEWKFEKDGADINMRDITNDSKGAQLDSSESTFLGLDDNQLCRWDMRDRRGIVQKLASATESPVLQWTQGHQFSRGTNFQCFASTGDGSIVVGSLDGKIRLYSKSSMRMAKTAFPGLGSPITHVDVTYDGKWILGTTDAYLILVCTIFIDKDGKEKTGFSGRMGNRIAAPRLLKLNPLDSHLAGANNRFREGRFSWVTENGKQERHLVATVGKYSVVWNFLQVKNSHHECYQYQEGLKSCYCYKVIPKDESIVASRFMHDKYSVSDSPEAPLVVATPMKVTSFSISSRH

SEQ ID NO: 49951 - protein, 477 aa, Zea mays
  Coding DNA Sequence Number=SeqID_6576
  Pfam annotation: Domain name=SlyX; Domain location=303-370; Score= -8.1; E_value=0.056; Accession=PF04102.3; Description=SlyX
  Subcellular localization annotation: CTP_CleavageSite=63; ConfidenceScore=5.48e-01
MDRGNGHTCLTVADTSGSRPFTHRASQPDFTGGPRSTSPDFGLSPPRVDRANRPDSSSPTSIPACARGPTDSGHPRRRPAHRCDPRDLPYVLDHFTGAISPPMNSPTPASGGDSRFSSDFLSRDGFPSILWEVLNSAGYPTPPLYTVQLYEEHRVPRCRVWLTLEAHPLQLGWRSLDSETIGLRTDDTVEAAAMKTLTTFCGYHPLEMVMHPLGLFPAEKKDDPMWCNRVSHVKDVWAMYPDLVGRVTVQCMSVLYRLQALQSDAMALLANTAQTAKLTLDSREDFVVDLSTELVEKDLQVERLSQRITTLEQQVEIRDNTIDVLENQLHDVQRELEEANDHLDMHHLEMEANEAGSEGEEAPEELGPAPGANGTTSAMPPSPELMAQQNEILRQLFAAPAPLFSSMVGRPASADPRAMGNITREFSEHAGHPWSTKVEGPVGTPTYGFPSVEPKFPPSLPGILPCNEGQGSVYAHT

SEQ ID NO: 49952 - protein, 121 aa, Zea mays
  Coding DNA Sequence Number=SeqID_6577
MGKSNKRKREPTPPSEDFGDSKYSEEEFSSESEGSLAPTYIWAIERSGLEGSDESEYSSDEEDSSDSFEEGGGGDGGDDDDDGGDDGGRRGGNDGSKGGNGGSSRGSNGGGNSKGSNKASG

SEQ ID NO: 49953 - protein, 132 aa, Zea mays
  Coding DNA Sequence Number=SeqID_6578
MAPKRASSKAAPSIDEAAKAALLVEKKGKALVDNTPQEASEDEVVSKRQRQEHPTPKGTLRTCSSGGLQQEPPPGFAPPEAEDAIEDGEVIGISAEEHLQLRALHLKNHNLQKQKDILEAKRQRVTVQAKVR

SEQ ID NO: 49954 - protein, 125 aa, Zea mays
  Coding DNA Sequence Number=SeqID_6579
  Subcellular localization annotation: CTP_CleavageSite=44; ConfidenceScore=5.38e-01
MAAAGGRKQQSNRLQAHVPFWSSTGALSHGVKTTRPHSVPRTTRAGNFYKILVIKCPTHIKGMSICQRVDKVQINTKGERLQVVEIPRKRDIVKGKEIPWYSSESLDHLRGVDCNPRPLGRHNVE

SEQ ID NO: 49955 - protein, 219 aa, Zea mays
  Coding DNA Sequence Number=SeqID_6580
MGQRQSRLENGFRRPRSRWLPRPEEVQQRRPEPDRVIRERDHLRSYAPETVSRADVLGGQLAEATERSAEPSARAGFLEETLAAMVLFVGSRITYPSESYLSRKVMSEVSVSRRRRSPSARSASPLMCTLTRPQDSVIDIVEKARKIVLAEKFSSVKTCSVSRIAYPSVSYLSQKVMSEVSVSRRRRSPSARSALPLTCTPSFSGSRYRSSRKARKMFW

SEQ ID NO: 49956 - protein, 36 aa, Zea mays
  Coding DNA Sequence Number=SeqID_6581
MKWVGCPYDKRRRQQLRKSMKEYCPERLLLISKIPH

SEQ ID NO: 49957 - protein, 60 aa, Zea mays
  Coding DNA Sequence Number=SeqID_6582
MGQRWRALAARKIAPVHQRGRTKHIKGESARRAISESDQRNRTVQKKQSYLLISKSYEGP

SEQ ID NO: 49958 - protein, 45 aa, Zea mays
  Coding DNA Sequence Number=SeqID_6583
MTTDRSLELHHMDLFGLIAYISISGRKITNPRNLKGILELKMSSD

SEQ ID NO: 49959 - protein, 173 aa, Zea mays
  Coding DNA Sequence Number=SeqID_6584
  Subcellular localization annotation: CTP_CleavageSite=52; ConfidenceScore=5.04e-01
MDAATGGLSFAVPLKGREPAIKAKERAAPKRTGRSSPSSSPPSSPAWLEDVSVAAREDDCHHQKLEEEVVRQPAQENRRRFWQEKRATLRLRRNNRAKKGPGKGDTPKRILPREGTGLRAPPTDQRFEGWPPEGFNSRLRSRGPYTHYWSEVRRPAPRRLHGRLRLLGLRAHY

SEQ ID NO: 49960 - protein, 125 aa, Zea mays
  Coding DNA Sequence Number=SeqID_6585
MAGKKCQRFIYKHTKSTVRNTVDYFGQEKLFGKTGQARTVRALAADRSHHQDDLRTEPIQKSEFALWTIRRKRADRLRLRADRPASGADRPPLLLTVAFSAVDLQVRTVRTRRADRPRSAEWSNG

SEQ ID NO: 49961 - protein, 416 aa, Zea mays
  Coding DNA Sequence Number=SeqID_6586
  Homolog annotation: Hit_ID=Q6QP51; Match level="QueryCoverage=35%, HitCoverage=82%, E-value=2e-23, Identity=45%"; Hit description =Putative growth-regulating factor 1
MMTASEKAPSPPTDQGFEGWPLGRVSTAAPEHSGFKPITDQGFEGWPLGRAGPSEGFDSRPRARRVRDDSGYVRYMAEARATLPSAARPAPTAVPTTQAKTDNKSRSTTEFGLGRNRKLSLARPQAPASGEGLRLARPPDSASTSVSGGIVSSPDPTLGLKRSYKEQDRRPIWLTPTTGNDGLRRFSDGHAITCIGLKLSPDSHVGIVFTKYFVQKKKGQKGKWDLKSKKKRGKPSPLPVGPNLGPTPATPPSHAPALPRIRPNFGLLLRARQLLHTPPSPSLTRRPHPSATRSLASSLPLTKRPHGSVASSSVRRPLAEVTSGRRLRPPLCHPAAQGSLAPLRPPPLDQRPRRYRPAVASPRQLCVPFMAAPGSSLESGSSTAPLPLRANKKLPPSSFFLAPASAIPLLPFPELN

SEQ ID NO: 49962 - protein, 195 aa, Zea mays
  Coding DNA Sequence Number=SeqID_6587
MGGVRVLGLSCPHSGTTPPRGGRGLPVREDLSGDLPVQARASAICRRGAGAQVATVVGAEVVTAREGFSADETVGAIFGRTPGSLALMACPRPSSGDMAGAGGSGVGVDRGGVGSKRDFVGPGAGGFLGQGRCGSSSWSLAKTSAGAVLASSLGWRSLRPGHRPRPGQVPPRVETAPMVLLLPLPMPEPAGTVCV

SEQ ID NO: 49963 - protein, 159 aa, Zea mays
  Coding DNA Sequence Number=SeqID_6588
MSKPDKTFPLLILPVLPSLLNPGVGPHEFGLSDCPHSLEWLYDKGVQGVGRGLPTGRGRSSAAGIAAGGLWVGNRGWKVALWVRGYARELLGSLNSLPDQQRRRGRRRKRLTGEEDDAGALLIELGEGEEGDGRSWCEEEGARGELFIGAQGKGGGGAP

SEQ ID NO: 49964 - protein, 369 aa, Zea mays
  Coding DNA Sequence Number=SeqID_6589
  Pfam annotation: Domain name=zf-CCHC; Domain location=64-81; Score =19.8; E_value=0.0015; Accession=PF00098.14; Description=Zinc knuckle
MAISQEDCITARQAEKKRKAPMAGPSAQPQRFRIQQQQAPNHSRPPVQRNNNQPQQQYRQENDNRCFTGGSTGHYAKNCPKNQQRQGQSSNQNQGKRQKVQCWNLLSAASGPTGVNNGDNRAERGERVDDFGALNSAPPEPETTPAEAATGVAPVTAEDAPGALVPVAVGEGLLPRVAEGVSDAPAAAVPGAEDPAETTAEAAAEAPAAAGPSQVQDFGPAHATATTGFLAASTAEGGNECGGSVSEFFDFTDSGSSAEWTESSEEDLDYFAALDEAAAEAALHAADAPGVPGPSTGHRRRRAVAKRRISAEEGARLRVSRVGRRELLSLPAVSGVGEGELRSLFAGEELRIMLFNYREMGIIPKVEPM

SEQ ID NO: 49965 - protein, 232 aa, Zea mays
  Coding DNA Sequence Number=SeqID_6590
MTLEPRPLQPGWRSLDSESFGYRAEDTIEAIALHGLTTFYGFHPLEMSTHPIGLFPTDKEDDPMWKDRVEYAKDIWALYPGQTAHLTVRCMNAMYRLQVMRGEAMSHLMALLEASKITLDNREELVVDLSTKMVEKDLQVEQMSNEIQELEELVGTRENTIEVLEDQLINTQKQLAEANQHLDMHHQEIQDMEANEDVDIEGGEEPEPASSLDTAGSGRPPSPESSIASFAH

SEQ ID NO: 49966 - protein, 63 aa, Zea mays
  Coding DNA Sequence Number=SeqID_6591
MAVGVSEALYAKAVSPDLLPGNRWGRLMCSLEDMVAGVTWPSTLPPGWTVEWDPTSAEEEHEE

SEQ ID NO: 49967 - protein, 561 aa, Zea mays
  Coding DNA Sequence Number=SeqID_6592
  Gene Ontology: Mol. function=Rab GTPase activator activity; Cellular component=intracellular; Biological process=regulation of Rab GTPase activity
  Homolog annotation: Hit_ID=A2YCV5; Match level="QueryCoverage=25%, HitCoverage=19%, E-value=4e-32, Identity=58%"; Hit description =Putative uncharacterized protein
  Pfam annotation: Domain name=TIM-br_sig_trns; Domain location=291 -551; Score=35.3; E_value=1.3e-11; Accession=PF09370.1; Description =TIM-barrel signal transduction protei
MGPVRGEEDGAKRRAVRIARLDAASPGAPRACSPEPASRCTGVSWLQSLSKSSSDKFFGGNQRSHNMPNKPQEKFDVGVPETSHSYSAAVPAGTSSKRHAARKWKRSLSDPFCSRPHSAPELVSGCKGSPPVTVAPEDRDACITIQQRSLSMFEDGLQNFLQLLQVFKSKVEEQCSKIEYLRNNMFQGEIFDKYFMSFLPLFVMQTYMKGIVSQSSDNQYWDIWNRQKLSPEFEVKRQNSLRANQENNMSFVIQDLTNQLVELERHFNNLEMNRSGNLVKIVIPRSNPNDAHVAGVGKEQISDGTPVIGAGAGTSISAKFKEAGGVDLIVLYNSGRFRMAGRGSLAGLLPFGDANDIVLQMASEVLPVVKGVPVLAGFLMFPRELQLSGESVKLMKLGEGVAMFKVPDWFLDRNDYKDNMFSQTTLRVWDILFNEGDNVLFCVALTIFKMREDDLLRTQHISDVIDIFCKQPHIIYMTLMNCRRTVTGASQCPTLARGSQRARGHSSLAVEEREFTVALSGLGMRLMEAQATWITREQVAQYNFLSIFTVLIYFVQKMRNK

SEQ ID NO: 49968 - protein, 68 aa, Zea mays
  Coding DNA Sequence Number=SeqID_6593
MKLWKETSRSSKITTSSRRGLAATPSRLPVKAAVIYVSFPHFDLFKLVALPCLGLLEEIVANLLYFFL

SEQ ID NO: 49969 - protein, 147 aa, Zea mays
  Coding DNA Sequence Number=SeqID_6594
MPLGFDRWSSDFWARLDVRCTPNMYCSMSAEQPRRFPEAGEFRRPLFLGAPDTVRCTLDSPVNYSGVPLEIPEGGKFELESSGAPDTVRCPRPESKLVSPIICVGQFNHQNFLGTRCKPNSLSEGATMILIIASPGTDTFFVRGILT

SEQ ID NO: 49970 - protein, 546 aa, Zea mays
  Coding DNA Sequence Number=SeqID_6595
MGGGPAEQQKTDERRAVARSGSGDDDDFCSGGPNSGSNDLRADAAARWPPPMPKLVRQGRAEGRRVGGRSVGGPGYLVGGRTSSSCRGRSWRRERLRSHSRPRARHAAAASATDNNRPSPRSLREGAGRRPCRGRPQLGTLPSLALPSWAESSPTRSKALLLRREGWVPHVMQAGPEQKKPNRHARCVQPPSSYNRLSTFAQTSGRKGGQPCRRHATAPSGRTSPTPNTPGMEAQAHASCNRRAECFVHATAPSLAPPPRLLDCGTNTATRGDPEHDPAASAWTGGASGRRSGRRFAFAIMTASEKGSGKGDTPKRILPREGTRLRASLLIRGSKVGPSEGFDSRLRSRGPYTHYWSERLGGCSRKPGSGQTVDSVNIPARELGTRPYTRATASSHEGTTRPAEALREALRPRRSQTTPPRPRGLHPAGALARTHRNKTQPRKAGPLAKKCDESLQASANTPFEARGLLSGTIIKGTLKAPNSQLGSNLGSAPEDDELRSARPQGSDSALASADDQPRQQETPSSPYPELTRATGNKTGVSSGSLR

SEQ ID NO: 49971 - protein, 146 aa, Zea mays
  Coding DNA Sequence Number=SeqID_6596
  Gene Ontology: Mol. function=protein dimerization activity; Cellular component=nucleus; Biological process=regulation of transcription, DNA-dependent
  Homolog annotation: Hit_ID=Q94EX6; Match level="QueryCoverage=56%, HitCoverage=22%, E-value=4e-20, Identity=62%"; Hit description =Leucine-zipper transcription factor
MEVDEQKRHTAELTSALQGQETSELELRLLVETGLSNYKRLFRIKAAAANADVFYDMSGLWKTPAERFFLLIGGFRPSDVLKLITSFSLALCYDSLQRCKQSHAPVIARKVHPSQVQDQRLESLGYQFNYVFDWTILKYPQIGSNL

SEQ ID NO: 49972 - protein, 27 aa, Zea mays
  Coding DNA Sequence Number=SeqID_6597
MEPWMAMEHTEVGGRRSSSASGDNFGS

SEQ ID NO: 49973 - protein, 241 aa, Zea mays
  Coding DNA Sequence Number=SeqID_6598
MGDSVSGPVRGKVRGQVQSGVKHGGAAYRRREKSGGGSGEVRGLLVVTPRGGSPAVMAGVGLAACAGGRAHRRRVLRPAHSGRVQSNLTGSFTGGQGCCRRKESTSGLLCSPVYVRRRPIEVRRRQSGTSGEVVFGLRARGASRSSMEASRGVRWGGGGLEWPVHGGRGSGGRWHAVRRANAGELVLGRGWERGCIVKAKVGFIVAGTVRRAWGRVSRRALALPGRVEHVAVLFCPSSCIC

SEQ ID NO: 49974 - protein, 251 aa, Zea mays
  Coding DNA Sequence Number=SeqID_6599
  Homolog annotation: Hit_ID=Q339Y4; Match level="QueryCoverage=77%, HitCoverage=19%, E-value=1e-07, Identity=24%"; Hit description =Retrotransposon protein, putative, Ty3-gypsy subclass
MSQLMGLVESTKITLDNREDLVVDLSTKLVEKDLQVEQMANHIQELEDQVEARENTIEVLEDQLQNTQQQLKEANQHLDLHHQEIEDMEAEGADEDVDIGGGEEPEPASSLDTAGSGRPPSSESSVASFAQDPLDANVWLRVVESKFPLLNGDCSDAAKYTQAFNDLCQYAGYHHDNDEKKRDRFRRGLSTKLRDHLNTVRAHSYNELVNLAISQEDCITARQAENKRKTPMAGPSAQPQRFRIVFDTQSR

SEQ ID NO: 49975 - protein, 442 aa, Zea mays
  Coding DNA Sequence Number=SeqID_6600
MEKDRQDVQRKKRQAPVRLVDSRREVKLAWPMVGSGGVSTELSVDDYLVGGVAMFDAQTGLPPFESGQLAVVPSASSASPMVAATEHAAKGDTGASEDPWTRFYAGGEIASAVAAVIAFAERVSSGALTSGFASERREEVGLRFLGWLQEELESHPSIVTFLMSYASLVTCEGAVNALSREGCRHFEVFDWVNEDFDLGILQVEDGVLKWSTGVLYDRMWGPHGRGIVRERADRALAHMMNEEEVDDLVGLESSMTRMDGTVEAGVEGLSAPLGGFDKDPATALAQANPDDVDINDVSMDANAAFLSGNVSEGSEFGSWSSDEGEFGSPFSWVVKSSEDDLDYFATSESPLRSVPCKALATSTDARVEDSRRQRMGVSKQSIGESSLSGRRRRRMGMERSRLRGGSRLDQGTQRELLSSTSGTCIGEGDLRDVFEGERVEVD

SEQ ID NO: 49976 - protein, 198 aa, Zea mays
  Coding DNA Sequence Number=SeqID_6601
  Subcellular localization annotation: CTP_CleavageSite=84; ConfidenceScore=5.08e-01
MARVGLAACAGGRARRWRVLRPAHGGRVQSNLMGRFTGGQGCYRRKESTSGLPCSPVYVRWRPVEVRRRQPGASSEVVFGLRARGASRSSGEASRGVRRDGGELEWPVHGGRGSGGRWHAMRRANAGELVLEWGWERAGVYGQGRGWLYSRGRGHGHGAFGAERRGVLWRCQGTSNTWPCYSAQVLAPAEQPNVRILP

SEQ ID NO: 49977 - protein, 322 aa, Zea mays
  Coding DNA Sequence Number=SeqID_6602
  Homolog annotation: Hit_ID=Q6J9V9; Match level="QueryCoverage=24%, HitCoverage=31%, E-value=1e-07, Identity=42%"; Hit description =Putative uncharacterized protein
  Subcellular localization annotation: CTP_CleavageSite=44; ConfidenceScore=5.60e-01
MAAAGERKQQSNRLQAHVPSWSSKRALSHYVKTTRPCSVPRMARATAAPRTTRPVALTSRQGKRHLWQAKRATFHLRHNDRVKKGTEKGDTPKGILLRKGSGPRALLLIRATSEHSGSAPTTDHGFEGWPLEGFDSRPRARRARDDSGYVRYMAEARAMLPRSRLRLLKDAISPRPSPVSGGNCGPRHIQCKDRLAPYPDTRASVGKVEPQAPKEAPPRPTPGLGLNLDLGRRSPPRPTPGLGLDLDLRRWSLPRLTSGLGLNLDLGRWSPPHPTPGLSLNLDLGRNPVLARPQPRPQEGSPPRPTLGSDRPRRRGTSLPYP

SEQ ID NO: 49978 - protein, 129 aa, Zea mays
  Coding DNA Sequence Number=SeqID_6603
MGFETGVRGRASLGERAATRRQKEKGEEKAYLRRWSSRPIDNILEDPLDLWVRTHARFRCTTSILLVDVDRIVFIGRLEGGNRTGARGKAIDRKGRGEEQDVWDRDTSTIKDGVKASIMSDLEKVTTKT

SEQ ID NO: 49979 - protein, 332 aa, Zea mays
  Coding DNA Sequence Number=SeqID_6604
MGSARVAFVLSLEERNLTEVGTLQPSLGFKDFHHAARLHSLTNGERALTGLAEGADFDSTGPVDRRRRQLQHAWLAGSAGSGAASGATSHRWSGEDLSGDLLVGGWLPVVDAEVVAAGEGFSADETVGATRGLTSGSLALIACPRSSSGDAGEGLVAAASALRSSLLLFSRLKRRSLSLLMERSAASHLEFVVPQEWNRSSICNGTLSAAVPAWTEAESAREEASLAWELVASLAEEVQQRRLEPSQDSYGYLGYDGPSLVLASSFEVEILPPVSPSEAGPDSAKGGDDTEGAAAPSVDDLFVGNRIVYPSKSYFSRKVTSEDSGIDIVEKA

SEQ ID NO: 49980 - protein, 86 aa, Zea mays
  Coding DNA Sequence Number=SeqID_6605
  Subcellular localization annotation: CTP_CleavageSite=57; ConfidenceScore=5.23e-01
MPDRSNCSYHLRHRKSKLHQNNYHNRKGMVARSSLALTGRSMSSLGAMGPKRKEAIEANRPTGPGGDPQYSDAILMVGALHYVQAS

SEQ ID NO: 49981 - protein, 200 aa, Zea mays
  Coding DNA Sequence Number=SeqID_6606
MNLKGRTATDPHHAHRGYHASALWQEDVCTKQKAQLKTLKNKLISSQNDCAAGDLRRPCARVDRPAPGRGPFGTSGRELKPCARSRTVRPLAADRLPLGREHRRRFLLVFGARKRRQHTFGDSAGTRCLDLLKIGPYMAGSKDHTKVSTTNIIKPAMEALPADDQRPLEDLVMRDEKEVMRQWNEQCDKEEAELLHKLSE

SEQ ID NO: 49982 - protein, 225 aa, Zea mays
  Coding DNA Sequence Number=SeqID_6607
  Subcellular localization annotation: CTP_CleavageSite=43; ConfidenceScore=5.33e-01
MDTPDCAAGDHTGGSGAGSGGGAGSGSGGGGHRRTRRRHRRRRASSAAGTDGRGDPSDGLPQPPPEDVSANSVPPSLPRRFIKRTRWIAQAEDDLRRALLISVVGLRCSGRAAEVSDALTLRFDLEDDALDLRMVAPNTFIALLPNVELADRMLSEGQSFYAPPLRMHFRRWSRQFMASGGREMPILLDIELRDLPVHLRDIHSAGQLLVGHCLVQELILVACLV

SEQ ID NO: 49983 - protein, 151 aa, Zea mays
  Coding DNA Sequence Number=SeqID_6608
  Homolog annotation: Hit_ID=Q6QP51; Match level="QueryCoverage=29%, HitCoverage=20%, E-value=1e-12, Identity=80%"; Hit description =Putative growth-regulating factor 1
MQVACNRTTEAHPFGFVASSMEAQAHTSCNRRAGYYVQETAPPLAPMSRLLDCGTTAATRGNPVHGPTVPIEHIDHGDQEKGYFERDPSPRRKRALSPPTDQGFEGRPLGRVRRSPQSTRASSSLLIRGSKAGPSKGFDSRPRALGLCAHY

SEQ ID NO: 49984 - protein, 176 aa, Zea mays
  Coding DNA Sequence Number=SeqID_6609
MGKNNKRKREPTPPSEEFGDSEYSEEEFSSDPEGSPAPVSPPASSDDSDDFQGIAAEVWTYIRAVERAGLEGSDESEYSSDEEDSDGGDEGEDDDDDDDGDGSGRGGGDGSRDSTKGGSSRGSTKGGGDGSRDSTKGGSSRGSTKGGGDGSRDSTKGGSSRGSTKGGGGGRGRASG

SEQ ID NO: 49985 - protein, 145 aa, Zea mays
  Coding DNA Sequence Number=SeqID_6610
MGKSNKRKREPTPPSEDFGDSEYSEEEFSSESEGSPAPVSPPASSDDSDDSQGIAAEVWTYIRAVERSGLEGSDESEYSSDEEDSDGGEDEDDDDDDGDDDDGGDGDGDGSGSGGGDGSKGSTRGGSSKGSTRGGGGGSSSKASG

SEQ ID NO: 49986 - protein, 83 aa, Zea mays
  Coding DNA Sequence Number=SeqID_6611
MDGSNHPRDGKPSFSQLLQGLQKGPEILLTVARGSIALVDAGGGHHALGKRWEPPIVVPEGSRKGILRKGSFSAKEAGLEPPY

SEQ ID NO: 49987 - protein, 216 aa, Zea mays
  Coding DNA Sequence Number=SeqID_6612
MAMLDEDDRPCKFLVDPSIHQSISAIFFIKKLAYCFLRVLPESGPLPSVRRFAECFLSAFGKDAFAERRTRQSPALGNELVYRAQDTRHRNTLGKDILNKLKYKIILNGACLLDILNDGVKHQGRLRRRISKAAGYGDLLSQSHMHIGTWDEEDYIDDVLGRCSVQLYRMSPLLGPCFVAPKVLREEAASAEIVPRKWPKVPFYRASALQTDIKIE

SEQ ID NO: 49988 - protein, 155 aa, Zea mays
  Coding DNA Sequence Number=SeqID_6613
  Subcellular localization annotation: CTP_CleavageSite=32; ConfidenceScore=5.22e-01
MAIRLQDGASFKSDKQASVMVKNFGSKTVQIAVNAVVTSHLLVCLYSAAVDRKDQTVTLQGGTDTISGNESFLGNELREGVFWTFGFPKLERIFSRFKLVTKNDLAPRKGLLLGPCFVAPKVLREEAASAEIVPRKWPKVPFYRASALQTDIKIE

SEQ ID NO: 49989 - protein, 218 aa, Zea mays
  Coding DNA Sequence Number=SeqID_6614
  Gene Ontology: Mol. function=FMN binding; Biological process =pyridoxine biosynthetic process
  Homolog annotation: Hit_ID=Q10SP1; Match level="QueryCoverage=63%, HitCoverage=77%, E-value=2e-49, Identity=60%"; Hit description =Pyridoxine 5'-phosphate oxidase, putative, expressed
MAGGGPAASALSSPWRALLQRALDANAHLRHSTYFQLVRFDRLFAFLRIGGNEIGEIKSCPFGEICWYFTDSWEQFRISGSIDVIDASTTDPAKLQHKEKAWFSSSVKSRSQYLGPQPGIPVLDDEHVKDVHLDPLAGPVDAFCLLVLDPEKKRWKTQFHLEIVISRYSARNKYLVITNYQWSISFMNSRICAFITTSIVTASKMHKQLEIKSLPAVI

SEQ ID NO: 49990 - protein, 720 aa, Zea mays
  Coding DNA Sequence Number=SeqID_6615
  Gene Ontology: Mol. function=protein phosphatase type 2A regulator activity; Cellular component=protein phosphatase type 2A complex; Biological process=signal transduction
  Homolog annotation: Hit_ID=Q10SP2; Match level="QueryCoverage=99%, HitCoverage=98%, E-value=0.0, Identity=67%"; Hit description =Expressed protein
  Pfam annotation: Domain name=WD40; Domain location=265-303; Score =37.0; E_value=6.9e-08; Accession=PF00400.23; Description=WD domain, G-beta repeat
  Pfam annotation: Domain name=WD40; Domain location=370-407; Score =39.2; E_value=1.5e-08; Accession=PF00400.23; Description=WD domain, G-beta repeat
  Pfam annotation: Domain name=WD40; Domain location=411-449; Score =15.3; E_value=0.23; Accession=PF00400.23; Description=WD domain, G -beta repeat
  Pfam annotation: Domain name=WD40; Domain location=503-551; Score =11.2; E_value=1.3; Accession=PF00400.23; Description=WD domain, G -beta repeat
  Pfam annotation: Domain name=WD40; Domain location=603-712; Score =10.3; E_value=1.7; Accession=PF00400.23; Description=WD domain, G -beta repeat
  Pfam module annotation: Pfam domain module=WD40::WD40::WD40::WD40::WD4 0; Domain location=265-303::370-407::411-449::503-551::603-712
MAAGEEQEEFFDSREVLSPASVSSSPSSSGRHDDGGWLFAQQLLEVWVRDPGSVHERRQRFVKSLGLMDPSPHGARPGEETCSRPEAREEILPASPSTELFSAVPTFASMGGEPTASGGDGAGTEEEPECVFKNLDDGTVFVVDEMGKDGSFRSLRERLSNRTVTAAEFEQAFGSSPFIRELMRRVDDSDEPSTPEKTVLRRRRRRRIGWLRRLGIGVCVVDADAEEEDDEVNSTSSTSSRGCSRKVDRVKVRPYKKRSKELSAVYKGQVIKAHEGAIVTMKFSSDGQLLATGGEDGVVRVWRVVEGKRPDDRHFVDDDPSCVFFTVNENSELAPINSCEGGKGKHNNSSKVATDPACVVIPHQTFALSEDPVHEFRGHHDAILDLSWSKNRELLSASKDKTVRLWKVGCDSCLKVFSHNNYVTCVQFKPTNDNYFISGCIDGMGAVVGTITGNCHCYEASENHLALESQVPLYGRKKSPLKRIVGFQYCPSDPKKLMVTSGDSQVRILDGAHVVSSYKGLRSPSQVPAAFTPDGDHIIAASDDSSIYMWNYANQLAPVTSRVKTVWSYEHFFCNDVSVAIPWNALPARSSISLACNIPLSRQEVSEELHNSQESVSCCSAEGSPKADSSCRLPSGNFTLSNAFSAELAPRGKATWPEEQLPSSDSVTPSSSSALRKSQYKFLKTSCQSAATHAWGQVIVTAGWDGNIRSFQNYGLPMQV

SEQ ID NO: 49991 - protein, 502 aa, Zea mays
  Coding DNA Sequence Number=SeqID_6616
  Homolog annotation: Hit_ID=A2YV67; Match level="QueryCoverage=67%, HitCoverage=69%, E-value=6e-94, Identity=59%"; Hit description =Putative uncharacterized protein
MAPWPRRPVLTLVLLLLLALLCSHVALCSSAEPGKPKPKPKVSGSRKALLADNDGDEVPAAKPGKSAAAGKTKKKLLAGDATSKNQTKVAKAKKPESAAAAKGAAKKPAGKAAAAAGGDAAIAKVSKAPKTPKADKAKVPKPDKAATAAAAGAKTKGADSAKPAKVSKTGAKAVKPPKTAKSEAATAVGKAKKPPPANSTVDAGAKTAKSGKKAPVVVDAEVKANATVVSKEKSAATETVEMEDEEEVVLAKEAGEGTDDLISEFRDLPSRLQETLMPDLARLSHHSKAYLSAANAGIADGVRPILGGRWAAVAASAASVAVLLLPLFMLTALVRRMGPYLPLLHRALLLAQAYLAIYFATLALAAAATGLEPLRFFHAASPAAYAWTQAAQSLGFMGYLVLQMVDLVAVFSDAASPEDEGNGDAAKALGLAQMVVGLAVGLHYYAAVFHRAAAGEAPRANWRVYAVYAACFAIVCACARAERRKKAYLAGTDGAAEEWKKS

SEQ ID NO: 49992 - protein, 210 aa, Zea mays
  Coding DNA Sequence Number=SeqID_6617
  Homolog annotation: Hit_ID=Q10SP2; Match level="QueryCoverage=29%, HitCoverage=8%, E-value=3e-19, Identity=73%"; Hit description =Expressed protein
MKSAPMAQLLATGGEDGVVRVWRVVEGKRPDDRHFVDDDPSCVFFTVNDNSELAPINSCEGGAFNSLQKRAEVKHARDGAPDNLQYLSGVHRTARRAQKSEAPTVESQRPGDVAGAPDMSGDRWREVAVALLVHRTVRCTPDSPVNYSGAISRGWRVPEPLFPGAPDTVRCTPDSPVNYSGAPLDFPEGEEFSVKSPGAPDIVRWHTGQS

SEQ ID NO: 49993 - protein, 369 aa, Zea mays
  Coding DNA Sequence Number=SeqID_6618
  Gene Ontology: Mol. function=actin binding; Cellular component =cytoskeleton; Biological process=sensory perception of sound
  Homolog annotation: Hit_ID=A2WK63; Match level="QueryCoverage=73%, HitCoverage=45%, E-value=1e-139, Identity=87%"; Hit description =Putative uncharacterized protein
  Pfam annotation: Domain name=WD40; Domain location=160-200; Score =20.1; E_value=0.0085; Accession=PF00400.23; Description=WD domain, G- beta repeat
  Pfam annotation: Domain name=WD40; Domain location=285-322; Score =16.2; E_value=0.12; Accession=PF00400.23; Description=WD domain, G -beta repeat
  Pfam annotation: Domain name=WD40; Domain location=328-366; Score =19.6; E_value=0.012; Accession=PF00400.23; Description=WD domain, G -beta repeat
  Pfam annotation: Domain name=WD40; Domain location=57-107; Score =18.6; E_value=0.024; Accession=PF00400.23; Description=WD domain, G -beta repeat
  Pfam module annotation: Pfam domain module=WD40::WD40::WD40::WD40; Domain location=160-200::285-322::328-366::57-107
MELGGRRTWALPGQGLGRAGGRPMLREELAGEPPAGGERRALRAGAAARRKAADAERERPPVGEAAGHGVGSCRPWREEPPGGGGGSGGGGCWVLTVSADKSAKVWDIMEDASGKLNRTLSCPGIGGVDDMLVGCLWQNDHLVTVSLGGTFNVFSASNPDQEPVTFAGHLKTVSSLVFFPQSSPRTILSTSYDGVIMRWIQGVGFGGRLVRRNNTQIKCFAAVEEELVTSGYDNKVFRIPLNGNQCGDAESVDIGGQPNALNLAIQKPEFALITTDSGIVLLHNSKVISTTKVNYAITSSSVSPDGTYAVVGAQDGKLRIYSISGDTLTEEALLEKHRGAITSLHYSPDVSMFASADTNREAVVWDPSK

SEQ ID NO: 49994 - protein, 175 aa, Zea mays
  Coding DNA Sequence Number=SeqID_6619
  Gene Ontology: Mol. function=actin binding; Cellular component =cytoskeleton; Biological process=sensory perception of sound
  Homolog annotation: Hit_ID=A2WK63; Match level="QueryCoverage=66%, HitCoverage=18%, E-value=5e-63, Identity=95%"; Hit description =Putative uncharacterized protein
  Pfam annotation: Domain name=WD40; Domain location=104-142; Score =32.2; E_value=1.9e-06; Accession=PF00400.23; Description=WD domain, G-beta repeat
  Pfam annotation: Domain name=WD40; Domain location=61-100; Score =22.0; E_value=0.0023; Accession=PF00400.23; Description=WD domain, G- beta repeat
  Pfam module annotation: Pfam domain module=WD40::WD40; Domain location=104-142::61-100
MAVIGIRERAQEMLRFGGSNWGQPPAPGPRHASRTQACISALALEIQRIGELPGPGRWDSGSTVGEFDGHSKRVLSCDFKPTRPFRIVTCGEDFLANFYEGPPFKFKHSIRDHSNFVNCIRYAPDGSKFITVSSDKKGLIYDGKTGEKIGELSTEGNHTGSIYAVSWSPDSKQFS

SEQ ID NO: 49995 - protein, 38 aa, Zea mays
  Coding DNA Sequence Number=SeqID_6620
MVVGAEAKKLVTGLSKQHKLQNSDLARSCSVALVLTTE

SEQ ID NO: 49996 - protein, 432 aa, Zea mays
  Coding DNA Sequence Number=SeqID_6621
MQSACNHAKWAHPFDSNAPSMEAQAHTSCNRHAGCYVRATAPPLAPLPRLLDCGTSTATRGNPAYDPTVQPGAAVTGQSAAGKGATVDAAKNGPGSNGGGRRAEAAVTSSAKLTTGGTFGRRSGRRFAFAIMTASKKEGFNSRLRALGLRAHYWLEVRRPAPRKGSTAASGHSGSAPTTDQGFIGWPSKADPGGFTSRARTPSSGGHTFGSPEAQSSPRSNLGHVATPTDRIAGAFNAKPSPASGAIGNSASPDPGLGLELGPGRRRTPPHPTQGSDSGSAPKDDELRFARPQGLDSGSVPEDDELCIARPQGSDSGSALEDDELCFTRPQGSDSALASADGLRLARPRGSDSTSASEDRLDLDLGGASTSPNPGLGPTTSQEAPSLPYPKLTQATGNKTDVPSGSPRLQRSSDGHDTTRTGCQNLSGCHDG

SEQ ID NO: 49997 - protein, 171 aa, Zea mays
  Coding DNA Sequence Number=SeqID_6622
  Subcellular localization annotation: CTP_CleavageSite=28; ConfidenceScore=5.70e-01
MALASTPLAVSRVVYSRQPPLAHSACVSGSRVVSVRKSALGVEPPAATRPLRSALAVSGSRAVSVSRNAKSLTLFSFPLPPLARSRSVRPSVRPCLPPLRGPRSPAGCSPAPPSAGPSPARLLRCGAACSLLGPSAAPARIVGFLQRPSAPAAAVQPADLVGNSASTTNQA

SEQ ID NO: 49998 - protein, 75 aa, Zea mays
  Coding DNA Sequence Number=SeqID_6623
  Homolog annotation: Hit_ID=A3BP01; Match level="QueryCoverage=48%, HitCoverage=19%, E-value=2e-07, Identity=69%"; Hit description =Putative uncharacterized protein
MSVPHGRHQDLKLAIDDFDEELIEPELRYSFQRNSKLYYSGIVWCHFSLPAILVNVFLKLSKVEITYKWEAIIVV

SEQ ID NO: 49999 - protein, 179 aa, Zea mays
  Coding DNA Sequence Number=SeqID_6624
  Gene Ontology: Mol. function=helicase activity
  Homolog annotation: Hit_ID=A2Z8X5; Match level="QueryCoverage=81%, HitCoverage=17%, E-value=3e-21, Identity=37%"; Hit description =Putative uncharacterized protein
MTPFVLPSTQTEDVGTFDMSTEAVRRKHHVTRGERQAILARRNQQFEASIAKNVATLIGDTISHAGINNNGDDDDEAVIFGEDDDDDEGYIFDGQYEEIDEDNEINGTQDESIATDVPDPYDKVYSNLPEETHMLKHVPDCGYCTAKKFEYEPPGFCCRGGKVELAPLETPPPAHEVVG

SEQ ID NO: 50000 - protein, 145 aa, Zea mays
  Coding DNA Sequence Number=SeqID_6625
  Gene Ontology: Mol. function=protein dimerization activity
  Homolog annotation: Hit_ID=A2YEW8; Match level="QueryCoverage=55%, HitCoverage=8%, E-value=4e-17, Identity=55%"; Hit description =Putative uncharacterized protein
MALKIEVPKLAFIEQNLHGYSGKHRFIGQLQREVTVKNHENTVWRVIENNESHNVHITVNEPVKSKQLQSKDMVIDIAIERVQELISFFTKYREIGFSQALEAAREVAAEMDIDPKFRTKRKVKRKRHFDETPEDTSIASQSAQE

SEQ ID NO: 50001 - protein, 146 aa, Zea mays
  Coding DNA Sequence Number=SeqID_6626
MGKNNKRKREPTPPSEDFGDSEYSEEEFSSESEGSPAPVSPPASSDDSDDSQGIAAEVWTYIRAVERAGLEGSDESEYSSDEEDSDGGDEGEDDDDDDDDDDDDDGGGDGSGSGRGGGDGSRDSTKGSSRGSTKGGDGGSRGRASG

SEQ ID NO: 50002 - protein, 115 aa, Zea mays
  Coding DNA Sequence Number=SeqID_6627
MASTSLRTRFEELSMFKGDVGHNISTHLLKQLVLELKVGVCRSKILQEFPRCIFVPKSVPLDKDLLDIASFACAKSSFGHRQYMPVLDQWQSTHRLRGITTVGLQQAHMEDVVKA

SEQ ID NO: 50003 - protein, 116 aa, Zea mays
  Coding DNA Sequence Number=SeqID_6628
MEVAQDPLESGEMGLPLDVHMHAHLLDGVGDVGPREGCHVSDREPVVLRELRLSVDRRGAGLAVVHASPLQDVDGVLALVEKETLRLALGGDAKKVVKGPWVLHHELLLKDDDRAL

SEQ ID NO: 50004 - protein, 354 aa, Zea mays
  Coding DNA Sequence Number=SeqID_6629
  Homolog annotation: Hit_ID=Q93FQ9; Match level="QueryCoverage=36%, HitCoverage=55%, E-value=3e-09, Identity=33%"; Hit description=Cell surface mucin-like protein
MTPSVDVVGPRPRLGDVEAPPRSRSSLSSVAVVESEPLGRARRRPSAEARAESEPWGRVKQSSSSSGVEPKSEPWVGQSGVRRLRGPSPSPSPGSGRAEFAVFLGLARVRALGRLERRSGVRRLPGLSPSPSPGSGGAVLPMATFALNAPAIWSVGAAIWSGLLLGEDRASGKPEENSAACAAPTAVPLDRVRLTAAKSSLGRHRKLRLARPQSSGSTSTPDDGLRLARPQGSGSTSTPDDDLRLARPQGSNSASTPEGGLRLAQPQGSDSASTPDDSLCLARPQGSDSASTLEGGLRLARPQGSDSTSTSDDGLRLARPPGLGLSLDLGGASALPDLELGPTMPQGGPSLPYS

SEQ ID NO: 50005 - protein, 119 aa, Zea mays
  Coding DNA Sequence Number=SeqID_6630
  Subcellular localization annotation: CTP_CleavageSite=23; ConfidenceScore=5.18e-01
MQGVFAAVAQQPGCAPGMQFLCSRRLVGSGARLCTCKLSLSAWLHRNELKEKETPVILQPPESVGWGPPSYGSAGTAASLLGQQRIDREIGTISNYKCTFGLEGNDSTSVTQKVNAQSA

SEQ ID NO: 50006 - protein, 521 aa, Zea mays
  Coding DNA Sequence Number=SeqID_6631
  Subcellular localization annotation: CTP_CleavageSite=22; ConfidenceScore=5.21e-01
MQAACNRARWTRFSDSQHASMEAQAHASRNRRARCCMQATAPPLAPPPRLFGCGTNTATRGGPAHDPAAPAWRDGQCSRKWGGSNDGGRRAGAADRRRFWQEKRATLRLRRNNRAKKGWPFEGFNSRLRSHGPYTHYWSEVRRSAPRRTPQPPQATRAPRPLLIRGSKAGSRRVHSRLRRRARDDQGYVRYITKARAALPSSPETPCSVPIEGNMALSPLLLAERRRRGICKKAESVPDCPLALCGGSGAALANPAPAEPLTASTYQPESLGPRPCTRATASSHVGTTRPAKALRKALRPRGSETTPPRPRGLHPAGALARTHRNKMQPRKAGPLAKKCDESLQVSANTPFEARGLLSGTIIRGTLKTPNSQLVTPISIKLQRPDGARTRARPRKTANSAPPDPGLGLGLGLGRRRTPLRPTQGSDSGSAPEDDELRFARPQGSDSALASAEQPPPRPTQGLGLGLGHGRQTRPRHRRGLHVARPRAQARHVSRKRHHHPAPSRLGPQRTRPVSHLASSAR

SEQ ID NO: 50007 - protein, 159 aa, Zea mays
  Coding DNA Sequence Number=SeqID_6632
MSKHRHSRCHYKRNSGSTSAGTNNPPVGGPAEQQNADGWLADARSGSSDNDFRSGQPNNSSDDLRADTAATRPSPTSPLEGRGQAIKAKEPEARSADGGGDPVGDEDFFSRHHLSADDGSHLPTGRSPLGSSRTGEHRPPRRGAVPGQRQDTPRTRTLP

SEQ ID NO: 50008 - protein, 63 aa, Zea mays
  Coding DNA Sequence Number=SeqID_6633
MSFLGWVTRATCFTVGRGRSFVNQLHRGRGPEKVQFTIKCFSRYMRRSGFHPDKIRRDVRVQL

SEQ ID NO: 50009 - protein, 66 aa, Zea mays
  Coding DNA Sequence Number=SeqID_6634
  Subcellular localization annotation: CTP_CleavageSite=55; ConfidenceScore=5.19e-01
MEPGGGTAVGAVESLLTSSCFRKGAESRRRHRVGRCGSSSKAEVESVFRGRGRVRAPGSGEAEAVG

SEQ ID NO: 50010 - protein, 98 aa, Zea mays
  Coding DNA Sequence Number=SeqID_6635
MEQQDGTITRAQLRRAGFMGADPTELSYMYASFSYKKVKQARPLSLALWIELTEMFGTGVSPDPWGVRKSLRRKACLSFVDRGTRGPSEVRLVVFTGV

SEQ ID NO: 50011 - protein, 123 aa, Zea mays
  Coding DNA Sequence Number=SeqID_6636
  Subcellular localization annotation: CTP_CleavageSite=51; ConfidenceScore=5.18e-01
MVTGQSAVGIGAAVGMAIGGPTVIAATGVQEQRSNRQSDSGPTCRLASSPKAGPGATVGTLNQGRRQGHSAGSAPDGSTGKTVRPCRAAHYTHPPFYKKLPLHAKDTQISGARAQEDCLDNRH

SEQ ID NO: 50012 - protein, 58 aa, Zea mays
  Coding DNA Sequence Number=SeqID_6637
MGKPVPSLLMLLLSRVTALVPTITGMGDHVSGRVRRAICFQVHSSTRLTDLPYFSAYV

SEQ ID NO: 50013 - protein, 781 aa, Zea mays
  Coding DNA Sequence Number=SeqID_6638
  Gene Ontology: Mol. function=helicase activity; Cellular component =nucleus; Biological process=viral genome replication
  Homolog annotation: Hit_ID=Q1EPC6; Match level="QueryCoverage=78%, HitCoverage=37%, E-value=0.0, Identity=70%"; Hit description=DNA helicase homolog, putative
  Pfam annotation: Domain name=DUF889; Domain location=283-519; Score =455.4; E_value=7.4e-134; Accession=PF05970.5; Description=Eukaryotic protein of unknown function (DUF889)
MDGVTLPTFREAAERRGLLESDNTLDDCLTERALFQMPSALRRLFATILVYCEPSDVAVLWQKHLDAMSEDYQHRSQSKTHVEQMVLIDIRNMLQSMGKDIKTFLLPPIIDTYDDAIGTAREVYEEESIVAVVGDVALKDSLNEEQRAAYDKILSAVDTDQHGLFFVDGPGGTGKTYLYRVLLTTLRSQGKIAVATTTSSVAASIMPGGRTAHSRFKIPLTIDDGGVCSFTKQSGTAELLRKASLIIWDEASMTKRQAVEALDNSMRDIMGRPELPFGGKTIVFGGDFRQVLPVVRKGSRAQVVASSLRMSYLWESMSHLKLVSNMRAKNDPWFAEYLLRVGGGTEVTNSDGDIRLPDEVCVPYSGSDNDLDNLIDFVFPNLNENMSDSTYITSRAILSTRNDWVDMINAKMIDRFQGEHMVYHSFDSAMDDPHNYYPPEFLNTLTPNGLPPHVLKLKIGCPVILLRNIDPANGLCNGTRLVVRGFQRNSIDAEIVLGQYAGKRIFLPRIPLCPSDDEMFPFQFKRKQFPIRLSFAMIVNKAQGQTIPNVGVYLPEPVFSHGQLYVALSRATARSNIKILAIPAVDGKKRSRKGVRKNPTVDCGTYTKNIVYKEHELHMGAFKVGNITNENLFEIINGLRSANTVGCSSSTDAPNIPHDGTSVIELLSDSMNQLSIKNENQLGVHICFTAPACPREAAMPVHATIASQTAFPQSLARALSLPVSILTLIANTTTHGRYTAILDAGKEEVITGYDKTDLYKTWQKQPWPIVLKQKGENMPKS

SEQ ID NO: 50014 - protein, 184 aa, Zea mays
  Coding DNA Sequence Number=SeqID_6639
  Gene Ontology: Mol. function=helicase activity
  Homolog annotation: Hit_ID=A2ZVZ4; Match level="QueryCoverage=54%, HitCoverage=9%, E-value=1e-20, Identity=44%"; Hit description =Putative uncharacterized protein
MTSFLPTSTQTKDVGSLDMSIEPLRRRHHVLSETRPATLGRRNQQFEAGIARNVATVTEDTICDAMEEDDWTHPHLNAELHNNGDDDEGVIFEEDDDENDGYLFAGQYDEIDEDIEIDGTQDESTATDLPDPYDKVYSNVPEETHMLKSVPNCGYCTAKKFEYEPPGFCCRGGKVELAPLETPP

SEQ ID NO: 50015 - protein, 149 aa, Zea mays
  Coding DNA Sequence Number=SeqID_6640
MASYVAEAVAVFLDVLTPLAKMGVRTYKCAEATVAHRCRGRRGRGPTRNGVHAEMIAAAGESSVQRRPSPSVLMRLSPLASCSGLVIPRPLLVWRLTVRDQAERLHGFRTLQETSARSSEPDLQGGGACRPTVRDQAEQLHGLQTTLGD

SEQ ID NO: 50016 - protein, 109 aa, Zea mays
  Coding DNA Sequence Number=SeqID_6641
  Subcellular localization annotation: CTP_CleavageSite=20; ConfidenceScore=5.11e-01
MDRAISAILAVKPHLAVTARASPSQPCPSPDLSRRRFYPLFYNMLKVKKNRKYCNLADGEYVLVPEQGAAQEVAPDPAPESAPEDLPATALEGKPRFMHNLLFMLFYFT

SEQ ID NO: 50017 - protein, 41 aa, Zea mays
  Coding DNA Sequence Number=SeqID_6642
MNDGQGTIARSSRGVAWVASMNSDEFHGRSDHGGAGEGSIG

SEQ ID NO: 50018 - protein, 654 aa, Zea mays
  Coding DNA Sequence Number=SeqID_6643
MDKDRQGVAQKRQAVVRLHEARPKRQRGAAKAAAPGRGKPPLAAKSAVPASSKAPEAAAGAGGTKSVKAVPASSRVSEVAKAARGLPSPGKRVADFATDISVDDYLGGSDEGQLVIVAPAVVTTVAAVVPKAKGGALSAGGEMPALAVVRDEAGAVSRRLKEMKEALSQAADFADRAASGALTAVVSAEVERLRMQHADTVQEKSVADSKCCKLAGKVAALEGEKTDLRRQLAEERREANEALAKAQAALAEANLARVEGSLARERAEQLEERLSALQSRVERAEAATRKEAERTRKQLMDSYHELGARTADFEVPDREPGLRCLEWVQEELQALPTIVEGFMSYASLVTCEGAMNALSREGCRHYEVFDQANEDFERDIYKVEDPIVKESAGAIYDRMWGPHGREVVRERAETARAQAARGERVDDFGALNIALPDPESNPAEAVSEAALEPPPETAEGAPDAPAAAATGGGPPPETAEGAPDAPAAAAPRAEDPATVQDFGPAHATATTNFLAASTVDDGNKSDGSVSEFSDFADSGSSIEWTEESLEEDLDYFAALDVAAAEASPHAADTEDVPGPSTGRMRRRAVAKRRVSGAEGGRLRVSRAGRQELLSLPAAVSTCEGELRSLFAGEELRIMLFNYREMGIIPKVEPM

SEQ ID NO: 50019 - protein, 307 aa, Zea mays
  Coding DNA Sequence Number=SeqID_6644
GNDVSPVVRSVRAQGWARRRLFLRPRPGSGEDAIPPEVEVEAEPWGRARRSPPSEAEVEAEPWGRARRSPPSEDEVEAEPWGRARRRPPPEAEAQGRARWSFLLRLRLILAVVSLTLAGGTAVGEGRVALSSCQAILALNAPAIRSVGEAIWPRLLHYEACPSWALGESRPPRPRRSGWFSSPVRGHERGPSSGSVWPGAIAAVVLPSKTEVVAALLVQRSLASHPEFVVPQALRCGGCSYPREWNQSSVCNGTLSAGVCSLWLSRPEHLGIRNLRPLCDELEPEAAVSAWTEAESAREEASSTQEQ

SEQ ID NO: 50020 - protein, 844 aa, Zea mays
  Coding DNA Sequence Number=SeqID_6645
MPFHGGRVVRSPAFALSLQNRDPAAFVREAEDGAVRLVGRYVPRTEGQRSWDIRGSNDRLNRVFELNQLPYDGYPGQDDVDRRGKKPAMETGDDPAPAAAPSSKKRKLGTAMGGLGVSDGFARELMRTCAAPGGRMSSPELQESSARMLRVTGGCWPRNVSIPRAAGQDFFTSRMVREWRVFPYGQNIGVVVSAVMDKDRQGAAQKRQAAVRLVEARPKRQRGAAKAAAPGGSRPPLAAKSGVPASSKAPEATAGAGGSKSAKAVPPSSGVAEVAKAARALPLSGKRVADFATDISVDDYLGGSGEGQLAIVAPAAATTTAAAVPKTKGGALSAGGEVSALAVVRDEVGAASRRLKEVTEALSQVADFASRTASGALTAAVAAEVERLRTQHADAVREKSAADSKCRKLADKAALAEANLARAEGNLARERAEQLQERLTALESRVERAEAASRAEAERTRQLLIDTYRGLGAGTGDFEVPDREPGLRCLEWVQEELQALPTVVEGFMAYASLVTCEGAMNALSREGCWHFEVFDQVDEDFEQDIFKVEDPVVKESAGAIFDRMWGPHGCEVVRERAETARAQAARGERVDDFGSLNSMLSDPGPTPAEAVSGVALEPTPETAEDAPGAPASAAAGEDLPPEVAEGAPDAPAAAAPSAEDPAAVALETTAEATVEPTAEAPSTSGPSQVQDFGPAHATATTMFLAASTAEGDDECGGSASEFFGFADSRSSVEWTEESSSEDLDYFAALDVAAAEASPHAADAEEVPGPSTGRWRRRAVAKRRVSGAEGARLRVSRAGRQELLSLPAAASTGEGELRSLFAGEELRIMLFNYREMGIIPKVEPK

SEQ ID NO: 50021 - protein, 245 aa, Zea mays
  Coding DNA Sequence Number=SeqID_6646
  Homolog annotation: Hit_ID=Q53LY3; Match level="QueryCoverage=25%, HitCoverage=16%, E-value=5e-08, Identity=43%"; Hit description =Transposon protein, putative, ping/pong/SNOOPY sub-class
MKALLKVLVDCAEDATKSLGGLVDHDIDHIHDEEIIARTLFAIKERLDLLQQDALEAKVQAFPEIAKYQGDDISVEPTTPSTPPTVTERSFDEDDLYCPEVSDEWYFSDSDRWDKIRADVSKFSGYYARVLREKQSGLTDDDKAATLFAHEENKPFHFMHCWHKLKGEPKWESICQVSSFRGIHGKSIGSSGTPSAGGHDSDSGSAGLTGKRPLGRDSTAAAKASSEGWRLCLRPNICPPRDQFD

SEQ ID NO: 50022 - protein, 63 aa, Zea mays
  Coding DNA Sequence Number=SeqID_6647
MGPCQGRPRGAARHRHTGPARRGRAGQGRGTPRRAGYWGRAMAGLGDHAREGAAPGGARSSRH

SEQ ID NO: 50023 - protein, 380 aa, Zea mays
  Coding DNA Sequence Number=SeqID_6648
  Homolog annotation: Hit_ID=A2Y574; Match level="QueryCoverage=59%, HitCoverage=29%, E-value=1e-62, Identity=60%"; Hit description =Putative uncharacterized protein
MDALAPDNNEAEVDNKVRCDGNKDYENVQDKSLFDWDSVVLGGLWEERKLEFFHYQTKNSLECHYENTLRYYAILKHWLTATLLYSLDILTAQLRFLFCLSLVFFSVSSSLLLLSASLSGRPTAHSARLPTASSTGVGRLPTTRSTGVGRLPTVAEVLAILDSQGFGRLSDAADDSGSEYEADTGDPNAGERDGGGGNAAEDALSRSELGAPAAAAAAASAAQAGGLSWRGRAASPECERRRPQHQQHKGRQLRQRHGHDHRRGYFYCRVADSSPKYHPGQSCRKIKRKELRSQTEEEEGNDNAVESTEDGHERSDCTVCTDQTANVDGEVNQDGHGSSSNGRVEGRDDLAMVYQKDGEMERVLEKQAELIGQFEAQENA

SEQ ID NO: 50024 - protein, 303 aa, Zea mays
  Coding DNA Sequence Number=SeqID_6649
  Gene Ontology: Mol. function=ATP-dependent helicase activity; Cellular component=intracellular
  Homolog annotation: Hit_ID=A2ZNM7; Match level="QueryCoverage=18%, HitCoverage=3%, E-value=1e-12, Identity=69%"; Hit description =Fructose-bisphosphate aldolase
MALTMVTFVLRFTHPCACAGPRCSCRCVRRDTTPQTPLVSDLPSHYQGLLTPFLTAIRHPILSFETRVAAARRHSPDHAAQSPSRFYAGVSVFSRSADPQSLTLQRRTLRRAGFPRRAQSSGTGGGLHETCEPAVAATALVVMLLTSVLRGRVRLLHRHRSLTMPSPLFLSRNPNTSLGTTNPHLSSPPVSAAMSTTGVYVPPMRRLRSVIASTNGSLAPPPSAAAQAQQTRTPEWLVDGRSLSPQSPPQLRRRDIPPLPRPPLPEHYRQQSAGFARYAYDDFSEDDSDKDIDRTSVSSKVKV

SEQ ID NO: 50025 - protein, 186 aa, Zea mays
  Coding DNA Sequence Number=SeqID_6650
MFGAHRGQHGALPLLLAERRRRGICKKVESDPDRPLALCRGSGAALANPAPATPLKASTYQPENLGPDQDGELRSARPRARTRAKSRKTTNSAPPDPRGSDSAPALAVGHLLARPRGSDSTSVTEDRLDLGFGGAYTSPNLGRRPATSTGGAIITLPRADSGHGNKTDVPSGSLRQIDNDGALHTL

SEQ ID NO: 50026 - protein, 194 aa, Zea mays
  Coding DNA Sequence Number=SeqID_6651
MPPRTRRTARKHTGPIGVPCHQLAPRHEDSSSGSNDPIGDLEAQVNRLQTELRRRTDIWVTDGERINELRSDVHRLRDQLADRDLALDWVVQSRSLAWAKEAKAQTRVEELISAIDDLQAYCNTLHEEVHVLYSQLHPSEPADPVGTEVGPSHVARVAFGGELDLFRPPPSMRLVDEWSPTPNDEAARSNRKQE

SEQ ID NO: 50027 - protein, 270 aa, Zea mays
  Coding DNA Sequence Number=SeqID_6652
  Subcellular localization annotation: CTP_CleavageSite=43; ConfidenceScore=5.12e-01
MVAFQGGHPPFKGDSPYLRRQLSWAESSPTRSKAGRSSGHVISQAHVTSWDSERTLSHGVKTAHPCFVPRTARARATAASRTTRPVALTPRRDRRRLRQEKQATLRLRHNDRVKKGSKAGPSEGFNSRLRALGFRAHYWSEVRRPARRKGSTAASGHSGFAPTTDQGGNDLVTESHQREASSPRTPSKGDQVRQITRSVACAASTAVSLDRVRLTAAKSGLRRHRKLRFARPQGSDSGSAPEDDELRFARPQGSDLGSAPEDDELRFARP

SEQ ID NO: 50028 - protein, 295 aa, Zea mays
  Coding DNA Sequence Number=SeqID_6653
MGDTHNPSALSLEERNFVEVDTFQPSFGFKDFHQAAWLHPLVGVLGRGVCRVGVGLCAGGDLLLPSVIEGKGVRRSWHWQLPRAWLSDPSGFGVAPGAAFRHDSWNSIRPEVIAAAVRTPGAEVVVVVAAGAGDGEPFIGLLLLRRPPNHSPVGYLNRFTKRESPRAKVTSELEQRQSWLRKEDLVGRSLAGSSVGGTDTGVELPRPQVGLMSSGDSRPRPRGGRPSRVLEPDSWRRPWRRWPGRGADVVLQSGDPPTVSPSEARSELAEGAVDAEGAAAPFNCQDQSLQDRIIL

SEQ ID NO: 50029 - protein, 79 aa, Zea mays
  Coding DNA Sequence Number=SeqID_6654
MEHRPGSERLLETAHLELDGKRFVNTQQAPTWRANCRRFETGGSFGPTIGGYKRPRGRGKRAAPRERLSRPRPRAANPL

SEQ ID NO: 50030 - protein, 151 aa, Zea mays
  Coding DNA Sequence Number=SeqID_6655
MTQDSSQKQHIRRTLDAFTRCLFFVSNSDLMGDLYSREYRVPKVHLQLYEIDCPEYRRLFRTGEAFWKNRPSADRPGPCGGPSATPGYPSDRTNAKIQVSTTDCPEEKPRPSEPSRGPSGLRRGPSAVDLQGRTVRTWHADRPRSAEWSNG

SEQ ID NO: 50031 - protein, 203 aa, Zea mays
  Coding DNA Sequence Number=SeqID_6656
  Homolog annotation: Hit_ID=O48967; Match level="QueryCoverage=99%, HitCoverage=38%, E-value=8e-33, Identity=46%"; Hit description =Putative uncharacterized protein
MVHIVERQDFVPEDFMLEEEAASSTPWATNLPAPGAAAAVHFARQHTLTQTSRASRATPGALSVARELPCHPPSSIASLGAMKQWRDDVDRLLGMAHSGSTRPRPRSSRRQHEVSASVRSPSVRAAPTEDLRAELNRWRAAEDAPVSLEKSNDLRAELNRRRAGEDAHVSLERAREHRQNVEGRNLDYDFATVAPQTPTGARI

SEQ ID NO: 50032 - protein, 88 aa, Zea mays
  Coding DNA Sequence Number=SeqID_6657
MALQVHPERVQIEWMLDMVLVWEAKLCVRTPWTAVPNTRTPITEWWNVQAYGQQAELMRADLTVLAYTYAQPSYKREKNSTPQTCSYG

SEQ ID NO: 50033 - protein, 99 aa, Zea mays
  Coding DNA Sequence Number=SeqID_6658
MNKNTRDTRFIPRFGHTTKGRLNLPPGRLNLPWQAWQPVCQSDWQTDAQTDRRLERKPQLNCPEASSAGLKKLNSAEVKFSWKAQLQLKKFSCFSARTL

SEQ ID NO: 50034 - protein, 455 aa, Zea mays
  Coding DNA Sequence Number=SeqID_6659
  Pfam annotation: Domain name=Transposase_28; Domain location=160-336; Score=-54.8; E_value=0.014; Accession=PF04195.3; Description=Putative gypsy type transposon
MARWRPERKKATGASELVATVVATTPVIGGKLKRSAAMRWRYSDTWRKAVRRWFPGELICSAAKQKGDGDGFSRVPIRVSGIPGGPAPKEDDSWARAPVSETGLLVSAGMKRRGGSLLAWWFAPRVAVRPLRTRRLTPKENDSWARTPVSEVGPLLSAGMKRRGAAMALLDPPERLQPKVALFLVRNLPGWGVPAFARRIRVGAFPHGDLAAGEYVLFLPSGLALSISSFFVLLLEELGLQPRHFTPCFILQAATIAYLCKISVGATLLPPAFGFKGVHQPCGGGERVELRLHLSHATQEVVQDVAEMAAARFQRDPTDVELTVRDQAKRLHGFVPPQETSIHSPKPDPRGVINCKLGHSIQMPSCQQGWETEYSIFWGLGRGTPSVVARRALPGRHTSVTLKGPSQLGESHRLPSAFVDEVHVLTPQLFLHGLVKYWTREEPIKVFGGKQASAP

SEQ ID NO: 50035 - protein, 132 aa, Zea mays
  Coding DNA Sequence Number=SeqID_6660
MDKHAACRMAWSLPVSGVDKAHLMLRRHIACQWSGQACLICIKCRGRAAQRPYVWLRPLAYVTGSRPCGSIGSPPERGVGAHAVWSGHVSAPDPRLALIKAWIFFALESRDPTVSGPDRDSSQGFGLFLWRS

SEQ ID NO: 50036 - protein, 298 aa, Zea mays
  Coding DNA Sequence Number=SeqID_6661
  Gene Ontology: Mol. function=transcription factor activity; Cellular component=nucleus; Biological process=regulation of transcription, DNA-dependent
  Homolog annotation: Hit_ID=Q6YYH8; Match level="QueryCoverage=41%, HitCoverage=66%, E-value=2e-21, Identity=46%"; Hit description=AP2 domain-containing protein AP29-like
  Pfam annotation: Domain name=AP2; Domain location=127-178; Score =81.3; E_value=3e-21; Accession=PF00847.11; Description=AP2 domain
MARSRPCRVLLLRLIAGLIQVRFHVTILLPLPFSERIRSMQQQTAMPTPTPTPMGWSEQSLAAETAAIVSALTHVVASGRGPPRQAPALVMPWHRADGNAVQHRQVAGVAAQGTTPAPAPAAAGPARKYRGVRRRPWGKWAAEIRDPQKAARVWLGTFPTAEDAARAYDAAALRFRGGRAKLNFPEDAAARRARDAEAASAAARAGPPAALLDSQAVGDDMADYLDYSRILEATEPSGIVDGLFSGHGNGRFLGSWSIGTSPPSSGSGASPACAASTPLFQQTDGGKQSSSNSAAFGD

SEQ ID NO: 50037 - protein, 216 aa, Zea mays
  Coding DNA Sequence Number=SeqID_6662
  Homolog annotation: Hit_ID=Q7XBC6; Match level="QueryCoverage=12%, HitCoverage=1%, E-value=2e-07, Identity=96%"; Hit description =Putative copia-type pol polyprotein
MYNRLKTLVNQVRNLGSTKWDDHEMVKPRARAADPGGFTSRPRAPSSDGHTFGSPEAQSSPRSNLDQIATPTDRIAGAFNAKGSDSGSAPEDDELRLARPRARTRARPQKTTNSASPDLGLGLGLGPGRRRTPPRPTQGSDSGSALEDDELRLAQPQGSDSALASADGLRLARPKGSDSTSTLEDRLDLDLGGASASPYPGLRPTTSQEGPSLPYP

SEQ ID NO: 50038 - protein, 274 aa, Zea mays
  Coding DNA Sequence Number=SeqID_6663
  Gene Ontology: Mol. function=nucleic acid binding; Cellular component= ribonucleoprotein complex; Biological process=translation
  Homolog annotation: Hit_ID=A2YQN2; Match level="QueryCoverage=57%, HitCoverage=43%, E-value=6e-39, Identity=59%"; Hit description =Putative uncharacterized protein
  Pfam annotation: Domain name=KOW; Domain location=233-267; Score =29.2; E_value=1.5e-05; Accession=PF00467.20; Description=KOW motif
  Pfam annotation: Domain name=RRM_1; Domain location=54-116; Score =20.5; E_value=0.0019; Accession=PF00076.13; Description=RNA recognition motif. (a.k.a. RRM, RBD,
  Pfam module annotation: Pfam domain module=KOW::RRM_1; Domain location=233-267::54-116
MPARERPLPSLLLSIDTQADAELPAPPDGMVNHLELKSPCLSKEVIKEVRSCDARQVTEENLAALFINCRQVVDCRMCGDPNSVLRFAFIEFTDEEGARAALNLSRTVLGYYPVNVLPSKTAIAPVNKTFLPRVCKPFGTNMLVLSSWLNVHALYDMVSKKVGRFSVLYSLTMNMKCVQGLSTAQINIDKKVTQADLKLFFESICGELKVCRNGTIKIDLETNKIMDFIKFDVGNVVMMTGGRNTGHVGVIKNREKHKGSFETIHVLLGAFCYV

SEQ ID NO: 50039 - protein, 155 aa, Zea mays
  Coding DNA Sequence Number=SeqID_6664
MAERYQLPRSCVPPTMRRKDGGFPPSEGLEGGASGRSSGRRFAFAETTAPKKGPRKGDTPKRILPREGTRLRASLLIRGSKAGPPKGSTAASDRVGPTPTTGQRGSGAALANPAPTKPLTASTYQPENLGPDRTPGLRPARMREQPDQPKHYARH

SEQ ID NO: 50040 - protein, 974 aa, Zea mays
  Coding DNA Sequence Number=SeqID_6665
MPVVELVPCARNKWGNWNEFWFYVAEATVEGHKGLPVSEMCSHYYSAYPPYEVAEDDADEGALRCAAGQSSGRDLVEEFVAYGVWPLAHGWALGEVCPRQMPFHGGRVVRSPAFALNLRNRDPAAFVRDAEDLAVRLVGRYVPRTEGQRSFDIRGSNERLNRVFELNQLSYDGYPGQDEADRRGKKPAVETGGDPALVAAASSKKRKLGTAMGRLGVSDSLARELMRTCAAPGERMSSPELRESSARMLRVTGGCWPKDIPIPCAAEEDCFTSRMVHRWRVFPYGRNIGHVVWAVMDKDRQGAARKCQATVRVHEARPKRQRGAAKAEASGGGKPPLPAKVGASAPGKAPEVTVGAGGPKLTKVVPSVSGVAEVAKAARTLPPPGERVADFGTEINVEDYLGGSDEGPLALVMPGAAIATAAPAPKAGGEALGAGVEVSALALVRDEAGVATRRLKGATEALSRAMEALSQVADFTSRTALGALTAALSAEVERLRTQHADAVREKSASDSKCRKLAEKVAALEKEKADFRRQLAGERREANEAIAKEQAAQAEARLARAEGNIAKELTGELQRRLTALESRAEGAEAAMRAEAERTRTQLMTAYRELGVRTGDFEEELQELPTVLAGLMSFTSLVTCEAAMNALSREGCRHFEALDQADEDFGQDIFEIEDPVVKESGGALYDRMWGSYGCEVVRARAEAARAQVTLSFARRFSGCGGARRVGGRLRALNSALPDPETTPAEAATGAAPGPTPETAEDAPGAPAPAAAGEDLPPKVAEGAPDAPAAAVPSAEDPAEVGAEAAAEASAEAPAAAGPSQVQDFGPAHATATTEFLAASTAEDGNEYGGSVSEFFDFTDSGSSVEWTEESSEGDLDYFAALDVAAAEAASHAADAPDVPGPSTGHRRRRAVAKRRISAEEGARLRVSRAGRQELLSLPAAAGAGEGKLRSLFAGEELRIMLFNYREMGIIPKVEPM

SEQ ID NO: 50041 - protein, 89 aa, Zea mays
  Coding DNA Sequence Number=SeqID_6666
  Subcellular localization annotation: CTP_CleavageSite=61; ConfidenceScore=5.76e-01
MARPWRAARPRPPPSAARPPLRSAASPARAAPVPGVATVGVLGPTAHPGLPLKVFSRSRTVSTTVAKWFVSIARETVDKIYRFGPLRDA

SEQ ID NO: 50042 - protein, 141 aa, Zea mays
  Coding DNA Sequence Number=SeqID_6667
MGKGTKRKREPTPPSDEFGDSEYSEEEFSSESEGSPAPVSPPASSDDSDDSQGIAAEVWTYIRAVERSGLEGSDESEYSSDEEDSDGGDEGEGDDDDDDDGDGDGSGSGRGGGDGSRDSTKGGSSKGSTKGGGGGRGRASG

SEQ ID NO: 50043 - protein, 539 aa, Zea mays
  Coding DNA Sequence Number=SeqID_6668
  Homolog annotation: Hit_ID=Q6QP51; Match level="QueryCoverage=25%, HitCoverage=73%, E-value=3e-15, Identity=38%"; Hit description =Putative growth-regulating factor 1
MDGGDHPRGGKPSVSQLLQGLQKRLEILLSVARGPIALVAAGGGYHSLRKRREPPIVVPKVKPPALPPLVRRHKDGRDVLLRTRLPQLEDAAAGPHCHANSPFPRRQGKGLRGEEMGPQIPVGVNPQKPFANRREDGYLRDGVGAEIVQLHPVEMQNRPHEATCWHSEPPLMERDETQHIPRRRGRGGSARRGHPIWLRVTGEGTKQTIGNKGLQIDRRDGGERPRVARRNDGYPVGHHQAKEVTAERTRAGGAFGRRSRRRFTSAMMTASKTKGTRKGDTPKGILLREGSGPGAPLLIRGSKAGPSEGFDSRLRALGLHAHYWLAPEGFDSRLKARRARDDSGYVRYMAEARATVPRSIQCKDRLTPYSDTRSSVGRAKQPSPASGAIGSSASPDPRARTQPRLWKTVSASPDPRARTQPRLRKTVSASPDLGLRLNLDSRRWSPPRPTPGLGLHLNLGRRSPPRPTPGLRLNLDSGRRPPPRPTLGLGLNLDFGRRSPPRPTPGLGLSLDLREVTASPDLGLGPTTSQGGHHYPTPS

SEQ ID NO: 50044 - protein, 30 aa, Zea mays
  Coding DNA Sequence Number=SeqID_6669
MGECKRLRKDFLKRFAKTKTSGANVVQNVK

SEQ ID NO: 50045 - protein, 189 aa, Zea mays
  Coding DNA Sequence Number=SeqID_6670
MTSHESSDEGNAQYHTDEPAREGFPRILWEVLQGAGYTTPPQYAVRLFEKHRVPRCRLSTHPIGLFLAEKEDDPMWKDQVEHAKDIWAIYLGQTAHLTVRCMNALYRLQVMRGEAMSHLMALLEATKITLDNREEVVVDLSTEMVEKDLQVEQMSNEIQELEELVGTRENTIEVLEDQLINTQQQLAGG

SEQ ID NO: 50046 - protein, 164 aa, Zea mays
  Coding DNA Sequence Number=SeqID_6671
  Subcellular localization annotation: CTP_CleavageSite=72; ConfidenceScore=5.30e-01
AGELVGGECSGLSTAIPVNPRARGASRVVKESTRARNRRTTHRGARSTLAGGRVKSGDRDLASPARQSSIPRSGSFTEAHKVYSEGRTGLAKALLAGLWWWGIGRPLARRAQGNAGNGTGSAWRDVGHAGAGVGRALASSVRVEHVEGVLEVFRRHFVNWAKWF

SEQ ID NO: 50047 - protein, 23 aa, Zea mays
  Coding DNA Sequence Number=SeqID_6672
QDTKDLPKNWQVPDVRIQADSSE

SEQ ID NO: 50048 - protein, 126 aa, Zea mays
  Coding DNA Sequence Number=SeqID_6673
MASLGHPDRFQSEEALNLVRDLLGWSAPGLAGRIRAGTAPLGDLAAGEFVLFTSYISCGLALRSRLLSAAAGGVRASALAPHAPLRFPGGHLRPPLRDVHRFGPLYFPLPLLLRAGQVRSCKVFEG

SEQ ID NO: 50049 - protein, 334 aa, Zea mays
  Coding DNA Sequence Number=SeqID_6674
IYSVEHYHEGRSATRTETERTRKQLMDSYHELGARTADFEVPDREPGLRCLEWVQEELQALHTIEEGFMSYASLVTCEGAMNALSREGCRHYEVFDQADEDFERDIYKVEDPIVKESTGALYDRDAARGERVDDFGALNSVLPDPEPNPMEAVPEAALQPPPETAEGAPDAPAATAAGGGPSPTAALRVEDPVKVAAESTAEEPATAGSSQVQDFGPAHATATTNFLAASTVDDGNKSDGSASKLSDFGDSGSLVEWTEESSDEDLDYFAALDVAAAEASPHAADAEVVPGPSTGRRRRRAVAKRRVSGADSDRLRVSRAGRQELLSLPAAVSA

SEQ ID NO: 50050 - protein, 23 aa, Zea mays
  Coding DNA Sequence Number=SeqID_6675
MEPPITVTNSPHHPPLTSLNLKS

SEQ ID NO: 50051 - protein, 448 aa, Zea mays
  Coding DNA Sequence Number=SeqID_6676
  Gene Ontology: Mol. function=metal ion transmembrane transporter activity; Cellular component=integral to membrane; Biological process=metal ion transport
  Homolog annotation: Hit_ID=Q257D6; Match level="QueryCoverage=84%, HitCoverage=98%, E-value=1e-109, Identity=59%"; Hit description=Zinc transporter protein ZIP7
  Pfam annotation: Domain name=Zip; Domain location=118-445; Score =295.2; E_value=1.3e-85; Accession=PF02535.13; Description=ZIP Zinc transporter
MAPITTRASSSLDKARKVALKYKKGKAALTDNTYPLVAENNGVETINNKHPHTEDSPTPEGRSDSPSLAMVLAGLRRHVGQFLTSSNELMAASLSAVSCADEVQKAEGAGCRDDAAALRLKKVAMAAILVAGVLGVVLPLAGRKRRALRTDSAAFLAAKAFAAGVILATGFVHMLHDAEHALSSPCLPAAPWRRFPVPGFVAMAAALATLVLDFLATRFYEAKHRDEAARVKAAAAAALVATSSGSDEDITVVTVDEDERKAPLLQTHCHGHGHSHSHSHVHEPVQVEGSEAEVSAHILEMGIVSHSVIIGLSLGVSRSPCTIRPLVAALAFHQFFEGFALGGCIAQAQFKNLSAVLMASFFAITTPAGIAAGAGMTTFYNPNSPRALVVEGILDSVSAGILIYMSLVDLIAVDFLGGKMTGTLRQQVMAYIALFLGALSMSSLAIWA

SEQ ID NO: 50052 - protein, 240 aa, Zea mays
  Coding DNA Sequence Number=SeqID_6677
MARLRHTARKSVIPFLPSRLAERPLSRPVTGQSSHLERLHHRLHEEQERRRQEQQGSSFSLQREIESHSRGLYPDRWEATCLVHRLENSLRGAEICSEHYSISERDSAEAAMQGAARRALLHYFSVFGGVADGLNLNYYPRRPSGSTGGVIVSPVGEDNPRLSSTVNLAAVLNTELDHALDELSSARAEIALLRAERAERRHLDDGSPAPVGTQHPYRSPRRGQQSYGNPDCKTKIDLEP

SEQ ID NO: 50053 - protein, 91 aa, Zea mays
  Coding DNA Sequence Number=SeqID_6678
MQGIPTLCRGCHKTGVHAEVSGTGAESRRKRESHPPGFGGGDRQSWIPEVAMRLMVLGFDSGNGCQHCNHCSGEDEAIEGDFQEFQDYDEF

SEQ ID NO: 50054 - protein, 116 aa, Zea mays
  Coding DNA Sequence Number=SeqID_6679
  Subcellular localization annotation: CTP_CleavageSite=52; ConfidenceScore=5.37e-01
MACDLELGRRARGASAPGVAPLPARGAQRGACAAQPRRARGSFVARQRGPTRARARVVHVVLWHGSSCPLRSSTPRRARLPLATRLPLTVYFMRINHVVLMKWERNSKMDYVSYFM

SEQ ID NO: 50055 - protein, 147 aa, Zea mays
  Coding DNA Sequence Number=SeqID_6680
MSKPDKTFPLLILPVLPSLLNPGVGPHEFGLSDCPHSLEWLYDKGVQEIREGLARGEAAKFRGGVAVASLGREIGVGKWCTAFAAVWRSRRLRQSLDGSTEAQGEERDGSPGRKTKAAALPRIELRRGRGGMAVAGAGKEELGAALL

SEQ ID NO: 50056 - protein, 88 aa, Zea mays
  Coding DNA Sequence Number=SeqID_6681
  Subcellular localization annotation: CTP_CleavageSite=26; ConfidenceScore=5.08e-01
MNKNTRDTRFIPRFGHTTKVPYFLVEAPTKSRVSFNPNPPFADHKDRLNLSGPRLNLPWTPVEPLWTPVELEVQLELRKLNSAEVQLS

SEQ ID NO: 50057 - protein, 186 aa, Zea mays
  Coding DNA Sequence Number=SeqID_6682
MTISLVVGRSKSGCGLCPALIFKDLHHPGWGGGRGELGPTSAWVGDPLLPSVIGGEGRSPFVALAAAACLAPWPERLWRCFRCHLPPVGWSVAARPPHRCRSRRARAGHVQNLRPLCDELKPEAVVSARTEAVSARKEALSVREQVASQAEEVQQRRLELGQVIRERDQSRSHADEAVSRAEVLEE

SEQ ID NO: 50058 - protein, 67 aa, Zea mays
  Coding DNA Sequence Number=SeqID_6683
  Gene Ontology: Mol. function=metal ion binding
MDHVLVGPMGDHLALIVGRLLTESMLDAAIGGGKQMVDLRQETVDVEYCHRGLGGGSATKVVECRIC

SEQ ID NO: 50059 - protein, 945 aa, Zea mays
  Coding DNA Sequence Number=SeqID_6684
  Gene Ontology: Mol. function=DNA binding; Cellular component =cytoplasm; Biological process=regulation of transcription, DNA -dependent
  Homolog annotation: Hit_ID=A2YYS5; Match level="QueryCoverage=95%, HitCoverage=90%, E-value=0.0, Identity=70%"; Hit description =Putative uncharacterized protein
  Pfam annotation: Domain name=WD40; Domain location=101-139; Score =13.3; E_value=0.73; Accession=PF00400.23; Description=WD domain, G -beta repeat
  Pfam annotation: Domain name=WD40; Domain location=143-181; Score =27.7; E_value=4.2e-05; Accession=PF00400.23; Description=WD domain, G-beta repeat
  Pfam annotation: Domain name=WD40; Domain location=192-230; Score =2.1; E_value=18; Accession=PF00400.23; Description=WD domain, G-beta repeat
  Pfam annotation: Domain name=WD40; Domain location=234-273; Score =46.6; E_value=8.7e-11; Accession=PF00400.23; Description=WD domain, G-beta repeat
  Pfam annotation: Domain name=WD40; Domain location=58-97; Score=24.9; E_value=0.00029; Accession=PF00400.23; Description=WD domain, G-beta repeat
  Pfam annotation: Domain name=WD40; Domain location=6-44; Score=3.4; E_ value=12; Accession=PF00400.23; Description=WD domain, G-beta repeat
  Pfam module annotation: Pfam domain module=WD40::WD40::WD40::WD40::WD4 0::WD40; Domain location=101-139::143-181::192-230::234-273::58-97::6- 44
MKGRVVKLREAHKAGSPALCSASWGPSGQHVVTASAADTAVLIHDAATVLAGGRGSGSSALATIRLHKDGVTALAVAPGPSGSLASGSIDHSVKFYTFPEGQFQSNVARFTLPIRSLAFNKKGTLLAAAGEDDGIKLISTIDNTISKVLKGHKGSVTGLDFDPRNDYLASVDSFGTVIYWDLCIGAEARTLTRIAPTFRSDNSVRNVLCWSPDGQTLAVPGLRNNVVLYDRDTGEEVCTLYGDHEQPVSSLCWSPNGRYLASAGLDRQVLIWDVKSRQDIERQKFDERICSLAWKPNGNALLLIDVMGRVGIWESVVPSTMKSPNEGIPDLNSNMVPLFDDNDDEPDTSVGLEDDVDDTFSDSITFNHKRPRRKSTFDGDSENEDLIHQLEYTKRMKDKQNKNEDAGKARGDSATPVTLVTSTMQAAFQPGSTPPQPGMRNFLAYNMLGSITTIQNEGYSHVEVDFHDTGRGPRVPSMTDYFGFTMAAMNGSGSVFANPCKGDKNMSTLMYRPFGSWAGNSEWSMRFEGEEVKALALGAGWVAAVTSLNFLRIFTEGGLQMHILSVSGPVVTAAGYEDQLAIVSHASDCLPSGDQVLDVKVFNISEGTQSMSGRLVLTPLSRLSWFGFSENGQLSSYDSKHRKSLFNFSSVKARKSEDESHWVVGLDANNIFCILCKTPQSYPQVMPKPVLSILELSFPLASSDLGANSLENEFLMRKLQLSQIQNKMEEMAALGLDTTSYDDESFNMEAGLDRCILRLISSCCSGDKLVRASELARLLKLEKSMKGALSLVTRLKLPMLQEKFSSIIEERVLNDKIIAGAGGFCSNATIMTNTPVLTTQATLPSMFMQDGNRSLESSLPKLNIVNQQCNSTEPKKPAGERGIEIKDRTQKDSSASVPFAKFSVDLDECNMVIEKINISKYDITRLIEDLTRSCIMFVPCIHRQS

SEQ ID NO: 50060 - protein, 215 aa, Zea mays
  Coding DNA Sequence Number=SeqID_6685
MESTRDVWSSQRLEGGTGLSDVHRTVSGAPMALNRQRSASPKKERNPHRTVSGGAPDCPVQDFGPAHATATANFVAASTVVAGNESDESVSKFSEFDDSRSSVVWTEESSDEDLDYFAALDVAAAEASPRVTDAEVVPGPSAGRRRRRAVAKRTVSEVDGGRLRVDRTGKREMLSSQVGASVGEGELRSLFEGEELRIMLFNYREMGIIPKVEPM

SEQ ID NO: 50061 - protein, 78 aa, Zea mays
  Coding DNA Sequence Number=SeqID_6686
MGKPVPSLLMLLLGRVTALVPTITGMGDHVSGRVRGKVHCQWQADPLVQALVLDPGLPPEQLLAPDLNNIMLREEKLS

SEQ ID NO: 50062 - protein, 104 aa, Zea mays
  Coding DNA Sequence Number=SeqID_6687
MCPQAPRACYNGPDHTWASVLDETVGWDDLVIGLRPATHGAKGGVCQSSCLRWCSETGEGIERRVASSPSPQHKVIADEGYFAQSMLLSKALRMQQDLEDKKNE

SEQ ID NO: 50063 - protein, 263 aa, Zea mays
  Coding DNA Sequence Number=SeqID_6688
  Subcellular localization annotation: CTP_CleavageSite=60; ConfidenceScore=5.27e-01
MTTVPIDSPFASRPHRLGIQCSTDPGCRRAVTALVPTIASMGDPVSGRMRDKVRARLHSVATAKKRAEGLTGGETVPVKWSRAKGRSRGSQRCAERQRRWPELVGPRAQAGMLVGGEETGLGHGEIVHQMVQEGPGCQRRQERKELGETHWIARSTRGGGRPKSGEVDLGLPVKSGRVRGLGELHGLLAELAEAQVGLEGGWSGLATAAVALAAMAGGNTLAGAKERWLADEGECGAKREIWSQEIWSVSLPKPEANPKFCRV

SEQ ID NO: 50064 - protein, 116 aa, Zea mays
  Coding DNA Sequence Number=SeqID_6689
MKKLQSKKSEGLALETWVDQQGLGHKGVVLGRRRQLGEQYDDVLNTSFGYEGCMTDEASSFFLLMQLFKGVRRIPWKIMSSWSWLEPFDDGFDDDVILDCRSLSPKPEEPSDKILK

SEQ ID NO: 50065 - protein, 193 aa, Zea mays
  Coding DNA Sequence Number=SeqID_6690
  Subcellular localization annotation: CTP_CleavageSite=29; ConfidenceScore=5.48e-01
GVGEGAYSPYSSDTSPDTDSRSGYCTSTRTFHVMHTPSFLPSSDVPFVFPAFALFFLPNLLPPPTVAAVSRPTLVDAGTSDILPMSPLDAQVFVVSFSGNEQGLILSKSLGNKRNVKGEAARKEIVKLRSEIMREDKNKLEVSNAEKDKRIASLEAKLERGLYLKRNFLDGDLEGLMRLVLSETRAFKDVLSA

SEQ ID NO: 50066 - protein, 133 aa, Zea mays
  Coding DNA Sequence Number=SeqID_6691
MPPAPPQGIPTAGGDPDGDGDDDDAGGSSSHSTDGVADGLDLKYYPHRSTGSAGGVIASPVGEGNPRQNNMVNLADVLNTELDHALDELGKVRAEVAELHAECAARHYLDGSSPASIGIQHPYRSPPMVASTM

SEQ ID NO: 50067 - protein, 33 aa, Zea mays
  Coding DNA Sequence Number=SeqID_6692
MAPDLKKSCGRPKRGVMSYDGHWAVTTAHDDTF

SEQ ID NO: 50068 - protein, 146 aa, Zea mays
  Coding DNA Sequence Number=SeqID_6693
MEAEVIIASVAMCIHGRGREGRTAVRKTRTGRRNSGEPFQAQGGDLRRAKALANFNRGRGDTGTYSGELDRAKSASHRASTVDRHGQAPAKMKLAEHRAQSRKLGTGMGVSPRGGAREGFGVVSGELVGQERGCGSSVASGGEDRA

SEQ ID NO: 50069 - protein, 57 aa, Zea mays
  Coding DNA Sequence Number=SeqID_6694
MASARVARAGGVELAGAKDGVGAAGVSVEWSVARSGVVFKGVEGVNLEHFVNRGLRI

SEQ ID NO: 50070 - protein, 80 aa, Zea mays
  Coding DNA Sequence Number=SeqID_6695
MDPPFAARAHRLGIQCSTDPGCHRVVTALVPTITSMGDPVSGQVRRKFHARLHSGMRGDPLWQAQELAPDLPRGELLARE

SEQ ID NO: 50071 - protein, 173 aa, Zea mays
  Coding DNA Sequence Number=SeqID_6696
MEHVINLCGKGYHGPGSERHLNGTPKAFHDALEVSTHNDDPLRSWHFEYHIQWVLPFSRHDAEERSILLSEVVDGDLEDLNHSGKVSRQVPEPLQCVLPQNDGQVRCHDILRCPSSLGDGCIDDQPAPQVLLRLIFVDVGDLEIRRPLDGSEAKGVSPAVDGVMLVVWWMGKR

SEQ ID NO: 50072 - protein, 104 aa, Zea mays
  Coding DNA Sequence Number=SeqID_6697
MGHNRMDLTQQDSKVGWGDWSHHPSLMMNPPCWGRNLPSAMLVDGETDAETCDDITKPENETHHIPSLWMKPQRWGKPPTKEHIENGTTPTTAIAVRLKNESGN

SEQ ID NO: 50073 - protein, 190 aa, Zea mays
  Coding DNA Sequence Number=SeqID_6698
MSHRGSTTSRMELRKNRKHPASVDGAATTHLPRRHYVEHPAHSGKEQGKGLFGEGDRGAVLGRGARPPWGRRFPALVVWGEREEARLVFHGGVGARWRGAGAKALRRAAAGRGAGGGRARGGVCASRFPGRKVEGTEQLEEGARGHERSFSVPRKKGQRARREVEAPWEGDEQSCWLTVRRPWRKVPAPW

SEQ ID NO: 50074 - protein, 147 aa, Zea mays
  Coding DNA Sequence Number=SeqID_6699
MVRVRLADGKKNLVREDSIQGGLLFLKVTLGTRFQSVKSTFVFREKRFRPTVNIPLIPLLSHPDFAAPRPGREHNHQFIGSSNAGIPCRTAIAAKSSRGPPYTDHSPTALAPFGLNKLWTGRTISRELKGLGVRIQRHREQALWMAG

SEQ ID NO: 50075 - protein, 237 aa, Zea mays
  Coding DNA Sequence Number=SeqID_6700
MTLEPHPLQPGWRSLDFESFGFRADDTTEATAMHVLTTFCGFHPLEMSTHPIGLFPAEEDDPMWKDRVDHAKDMWSLYPGHTARLTVWCMSALYHLQAFRGEAMSQLMGLVESTKITLDNREVLVVDLSSKLVEKDLQFEQMANHIRELEEQVEAQDNTIEVLEDQLQTTQQQLEEANQHLDMHHQEIEAMEVDGADEDVDIEGEEEAEPSSSLDTTGSTHSGGPPSLESSVASFAH

SEQ ID NO: 50076 - protein, 218 aa, Zea mays
  Coding DNA Sequence Number=SeqID_6701
MVEVRRRVGQGPGVSGGHVEVWVVGGGDRRWAGHVLRPAHGGRVKSKCSKSFTGSQWCGMARTKTTQRKATEPRGLPRHQLAPRHEGSSSRSNDPIGDLEAREIVERDTAIDWAVNSRSFAWDCEANALARVAELSAALENLQAYCNTMHEEVHVLYDRLHPNVPPEVAAMGAGTSRAASGGPDGELDLFGAPPSMNLADERAPEAGRGAGAAKDKDN

SEQ ID NO: 50077 - protein, 137 aa, Zea mays
  Coding DNA Sequence Number=SeqID_6702
MWAVRQARFGARLSLDLGRILHWNSHMRDSPRCQEERVRGRSILCHRRPANRAIPNPVQPSEKTVHTSVKLPERGIGVCFAGEASPRSPELSTPPEYVDRVIHSIILRFLVHTVTTLPREAHRAFGLNQFAVVWPKL

SEQ ID NO: 50078 - protein, 105 aa, Zea mays
  Coding DNA Sequence Number=SeqID_6703
MTEMHCPTLTDLHERAFPAFCGRVRMTLEPHPLQPGWRSLDSESFGYRAEDTIEAIALHGLTTFCGFHPLELSTHPIGLFPAEKEDDPMWKDRVEHAKDIWAIYP

SEQ ID NO: 50079 - protein, 58 aa, Zea mays
  Coding DNA Sequence Number=SeqID_6704
MDNNPWGLVVHGIKIGIRIKVWYRSLEDMVAGVTWPSILPPGWTVEWDPTSAEEEHEE

SEQ ID NO: 50080 - protein, 115 aa, Zea mays
  Coding DNA Sequence Number=SeqID_6705
MSGAPGGLRLKLATFGNSQRRDSAIIHRTVRCTPDSVRCAKGSRPQELACFGKLQRLVHYNSPDCPESESPMLAHRTANSTCPVCTGHPGGPTSQKLQRSESNGSDDVAGGTGLS

SEQ ID NO: 50081 - protein, 252 aa, Zea mays
  Coding DNA Sequence Number=SeqID_6706
  Gene Ontology: Mol. function=protein serine/threonine kinase activity; Cellular component=chloroplast; Biological process=protein amino acid phosphorylation
  Homolog annotation: Hit_ID=A2Y2Y4; Match level="QueryCoverage=20%, HitCoverage=8%, E-value=8e-14, Identity=78%"; Hit description =Putative uncharacterized protein
MDPNMQARSVQVEWVGARESLIFSAFCRSAPVSNLMLNRKMNKVDEESKQVSYPVIRDDNGNDKLDFPALGKQFAAEEISAQLNLYLVLLPLDGQSVPKLEKPYHSCLPTLSIRHLCQAHAILLDPCALVLEYLQRDIICFLHILEYVRYVHSHFCSYGPADEVIPSQLCPSQRKDSCDTTITEESSPISTLKLAHTENAPAEWDYLNIEANTLESLELRAKLLEQERLDELTSALRPFGEGAVSSREMDRR

SEQ ID NO: 50082 - protein, 38 aa, Zea mays
  Coding DNA Sequence Number=SeqID_6707
MDASPALLLLAVDRLDALSALDASGKILVVVEQHVVDS

SEQ ID NO: 50083 - protein, 169 aa, Zea mays
  Coding DNA Sequence Number=SeqID_6708
MQEACNCTTGTHPFDFDASSMEAQAHTSCNRHAGYYVRKTLPPLTPMSCLLDCETSAATRGNPTHGPIVPTKHIGHRAGDTFGRRSRRRFTSAMMTASKKVCHIVQFRILFLFPFLSLATGTGKGDTPKGILLCEGSGPRALLLNQGFEGWPSEGFDSHPRALRLRAHY

SEQ ID NO: 50084 - protein, 265 aa, Zea mays
  Coding DNA Sequence Number=SeqID_6709
  Homolog annotation: Hit_ID=Q6JAD6; Match level="QueryCoverage=93%, HitCoverage=47%, E-value=2e-15, Identity=59%"; Hit description =Putative uncharacterized protein
MGYREATTHIQLWLLGALVSHSEFDIVDFLICEIEDTILDVFDTQAKDTALHQFEAQDAAVDDDDDDDDDFGIPPPPPPPPPMPPRSHDHEVESSSATPAAPPTIDPSLASILQTLTQQQAYLAAEQTRQHSGVSIPPVQSAPPPPIQATVVPAIQPGSPLPTVGPSSSLLRPVTLAFTSPVLNSVCPQPPVPPASVVPTTAVAVSVTTSVPSASIAQPQSESVPAPASTADPGSETDSDPQLAFALLPRPRPDAPPSPPPASDV

SEQ ID NO: 50085 - protein, 151 aa, Zea mays
  Coding DNA Sequence Number=SeqID_6710
  Subcellular localization annotation: CTP_CleavageSite=41; ConfidenceScore=5.23e-01
MNKHRHSRCHYKRNSGSTPAGTNNPHSGGPAGQQNADRWLTAARSGSSDNDLRSGRPNSSSDDLRVDAAATRPSPTTPLEGRRQATKVVESEPARTESSPTRSKVLPLRHGGWVPRVMQAGPGQKEPNRHAWSAQQPSGYKLSSTIARTSG

SEQ ID NO: 50086 - protein, 53 aa, Zea mays
  Coding DNA Sequence Number=SeqID_6711
MGWCVGFGEWAEMGAASPTGVYVDAIVDITPQLITLNQRSKSDKYHKNKHSSS

SEQ ID NO: 50087 - protein, 69 aa, Zea mays
  Coding DNA Sequence Number=SeqID_6712
MAGSRREVEWSGAVLLAFFLLFSPLFWFMGKEEQQREIFSETVKKVFIVVVFVHHDNGGASVQALNEKS

SEQ ID NO: 50088 - protein, 881 aa, Zea mays
  Coding DNA Sequence Number=SeqID_6713
  Gene Ontology: Mol. function=protein dimerization activity; Cellular component=nucleus; Biological process=regulation of transcription, DNA-dependent
  Homolog annotation: Hit_ID=Q2QM84; Match level="QueryCoverage=99%, HitCoverage=98%, E-value=0.0, Identity=75%"; Hit description=Auxin response factor 25
  Pfam annotation: Domain name=AUX_IAA; Domain location=622-840; Score=- 78.9; E_value=0.00084; Accession=PF02309.7; Description=AUXIAA family
  Pfam annotation: Domain name=Auxin_resp; Domain location=248-331; Score=187.4; E_value=3.6e-53; Accession=PF06507.4; Description=Auxin response factor
  Pfam annotation: Domain name=B3; Domain location=121-226; Score =115.1; E_value=2.1e-31; Accession=PF02362.12; Description=B3 DNA binding domain
  Pfam module annotation: Pfam domain module=AUX_IAA::Auxin_resp::B3; Domain location=622-840::248-331::121-226
MSEPSLESDGEQRCLNSELWHACAGPLVSLPVVGSRVVYFPQGHSEQVAASTNKEVDAQIPNYPNLPPQLICQLHNVTMHADAETGEVYAQMTLQPLSPEEQKEPFLPIELGAGSNQPTNYFCKTLTASDTSTHGGFSVPRRAAEKVFPPLDFSQHPPVQELVARDLHDNEWKFRHIFRGQPKRHLLTTGWSVFVSAKRLVAGDSIIFIWNDNNQLLLGIRRANRPQTVMPSSVLSSDSMHIGLLAAAAHAAATNSRFTIFYNPRASPSEFVIPLAKYVKAVYHTRVSVGMRFRMLFETEESSVRRYMGTITCISDLDSERWPNSHWRSVKVGWDESTAGDKQPRVSLWEIEPLMAFPMYPTAFPLRLKRPWASGLPMFNGGRSDEFARYSSLMWLRDGNRGAQSLNFQGLGASPWLQPRIDYPLLGLKLDTYQQMAAAALEEIRAGDHLKQISSLLPVQQPQNLSGGLDPLYGNPVLQQMQFQSQQSSLQVVQQGYGPNASDSGFLQNQLQLQKQQEPLPQQQQQALQQQSHQEMQHHLSASCHDIANVASGVSESGSASQTESSLLSGSSYQQIYDGNSGPGLHLHNGFHNCSSQESSNLLNLSRSGQFMASEGWPLKRLAVESLSGHELQPVQHKFEKVNHQSNVSHISSTLPPLSARDSYSAQASGTNDQSHLLSSSFAIHDGLTAVRSGGVGSGTDAITIASLRYNDMNLLPENPIATSSCLGESGTFNSLDDVCGVNPSQGGTFVKVYKSGSPGRSLDITRFSSYYELRSELERLFGLEGQLEDPVRSGWQLVFVDRENDILLVGDDPWQEFVNSVWCIKILSPQDVQQMVRGGGDLLSTTGVRTLQGSVCDDYSAGHDMQNLTGSIAPVVPLDY

SEQ ID NO: 50089 - protein, 88 aa, Zea mays
  Coding DNA Sequence Number=SeqID_6714
MEALPADDQRPFEDLIMRDEKEVMRQWNKQCDKEEAELLHKLSERRKEVAEKYLSHFMVDRHQKIIRQGEIDMKALLPPLQGPAFSIA

SEQ ID NO: 50090 - protein, 277 aa, Zea mays
  Coding DNA Sequence Number=SeqID_6715
  Homolog annotation: Hit_ID=Q6QP51; Match level="QueryCoverage=22%, HitCoverage=30%, E-value=9e-09, Identity=52%"; Hit description =Putative growth-regulating factor 1
MTTLKKAPSLPTDQRFEGWPLGGVQQPPQSAWAPHPLLVGPRRVHSRLRHRARDDPGYVPYITEARATLPRTPLALSPSLICAPTDPSLSSPAPCTRQSASAIKPPPPEPVSPSPLELRRVLCHAAEVRHRRPRPSSRHCRHRGVPGARLEVAPGTRRAPAPLVSGESSATGTSAAVSASRRKGQGRPPDPPPFIPDRAALIQLARAQSWPSAGDPTAKGRFPHTPRSLCSLARLSARPRPRCSPGSRLSARRPALPAWPRLSAAQAAARSRACPRI

SEQ ID NO: 50091 - protein, 151 aa, Zea mays
  Coding DNA Sequence Number=SeqID_6716
  Homolog annotation: Hit_ID=Q69QA5; Match level="QueryCoverage=23%, HitCoverage=20%, E-value=2e-08, Identity=73%"; Hit description =Putative uncharacterized protein P0644A02.33
  Subcellular localization annotation: CTP_CleavageSite=79; ConfidenceScore=5.37e-01
MAAGAGRSNPARCMTHPKHRHAAGVCPFCLRDRLSRLSAGAAHESASASSSFSPSSPSEETAAHSSSAQAPRPPPRKPRAAAAAPGGDGERGGTGAGPRAAQAEQQERKARRGNFWARLQQQLYHGGWHRKDDGCSVAAERQNAAAAAAVV

SEQ ID NO: 50092 - protein, 266 aa, Zea mays
  Coding DNA Sequence Number=SeqID_6717
  Gene Ontology: Mol. function=protein dimerization activity; Cellular component=small subunit processome; Biological process=rRNA processing
  Homolog annotation: Hit_ID=Q5N7Y0; Match level="QueryCoverage=22%, HitCoverage=17%, E-value=2e-15, Identity=68%"; Hit description =Leucine zipper factor-like
  Pfam annotation: Domain name=AUX_IAA; Domain location=2-105; Score= -95.4; E_value=0.012; Accession=PF02309.7; Description=AUXIAA family
  Subcellular localization annotation: CTP_CleavageSite=38; ConfidenceScore=5.22e-01
MAPFLLMRPLGARPLLTPILQRGGRGGRAAGGGESRSRATMVSSTGGALSSLGKNESYLCANKVSMDDAPYLKMVDIKMYSNYEDLSMALEKMFNCFIIGEYCSVLCFCLMHFPLVSTASSNAISAKELSSYRCFQIMFPSTLQGTGENWTMMKTICVTEYLNYKGGEAGQNKKRQRIGDTLDFEIKRWSTGKQGNLRALLSTLQYIRPSDKKVDYQIQKLTNAANNATAREKSGNAEANGKDGHSDEEDLLKYRPNPDMMDTDWS

SEQ ID NO: 50093 - protein, 92 aa, Zea mays
  Coding DNA Sequence Number=SeqID_6718
MCQSLLNVQKLPLLPQNQTKDARKTVVASVANAPAEAGPSEAPAEAGPSETALIAPEKESVPEKSKSPAPEAPPKELEFIVRHASRKQLSEE

SEQ ID NO: 50094 - protein, 119 aa, Zea mays
  Coding DNA Sequence Number=SeqID_6719
MGLEIKLFEFYEAEDPKHLFGEGKDLGTGIVLRLFPEGRGIGFGTSDGHFQHSHSENPWEKPHSETLPVHLGSDQWGVAILGQKGNHISWVKCATSAECYETDISAVLTVMSGLGILFD

SEQ ID NO: 50095 - protein, 70 aa, Zea mays
  Coding DNA Sequence Number=SeqID_6720
MERGFDQARDAAQWLSEAGRHAGWPSGRRTHRGEPPGARAQGHAEGENVEGREGRLACAMTNNRRCVIWI

SEQ ID NO: 50096 - protein, 29 aa, Zea mays
  Coding DNA Sequence Number=SeqID_6721
MAMMGSTSGKKYLCQVVPKDVVPKDEPQR

SEQ ID NO: 50097 - protein, 91 aa, Zea mays
  Coding DNA Sequence Number=SeqID_6722
  Subcellular localization annotation: CTP_CleavageSite=84; ConfidenceScore=5.13e-01
MDDEAIAEELHLDVMTKTKVAPLVSCFVVLPPSLHRSHLRPSPPSSPPSSRRTGKFGTAPSSPPLDQRPRRYRPAVVSPRRRCAAFMGGTV

SEQ ID NO: 50098 - protein, 248 aa, Zea mays
  Coding DNA Sequence Number=SeqID_6723
  Homolog annotation: Hit_ID=A2YGC2; Match level="QueryCoverage=69%, HitCoverage=73%, E-value=4e-11, Identity=30%"; Hit description =Putative uncharacterized protein
MPPAPPQGIPTAGGDHDGDGDDDDTGGSSSHGMELSEEPEPEGWIARPITCDAARGCHFHGALDTLLRRAFDRHTWSIEYRCVVYQHRRGLYPDQWEATCLVHRPDDDLRGAEAFLEHYSITERDTAEAAMQDVARRALSQYCSLFSGVADGLDLKYYPRHSTGSAGGVIASPIYEGNPRLNSMVNLAAMLNTELDHALDELSKVRAEVAELHAECAARHYLDGGSPAPVGIQHPYRSPPRGRFDYGT

SEQ ID NO: 50099 - protein, 542 aa, Zea mays
  Coding DNA Sequence Number=SeqID_6724
  Gene Ontology: Mol. function=hydrolase activity, hydrolyzing O -glycosyl compounds; Cellular component=extracellular region; Biological process=cell wall organization and biogenesis
  Homolog annotation: Hit_ID=Q69NF5; Match level="QueryCoverage=96%, HitCoverage=96%, E-value=0.0, Identity=74%"; Hit description =Endoglucanase 23 precursor
  Pfam annotation: Domain name=Glyco_hydro_9; Domain location=54-528; Score=815.9; E_value=2.3e-242; Accession=PF00759.10; Description =Glycosyl hydrolase family 9
MGEMAHACSAPRPSPAHHLCVRILLAYLLAARWLVPSCSAASFFRFPWPAERHDYRDALAKSILFFEGQRSGRLPPGQRASWRGDSGVSDGAAAGVDLEGGYYDAGDNVKFGFPMAFTTTMLAWSVIEFGDSMPRDERRHAAAAVRWATDYLLKTLAHPGVIFLQASARHCCARTATFVHVGDPWKDHDCWERPEDMDTDRTVYNVSAGRPGSDIAGETAAALAAASMVFRDDDPEYAETLLTSARKAFEFADTYKGAYSDDPDLRAGGCPFYCDFNGYQDELLWGAAWLRRASKDDTFLQYIQNNGKTLGAEDSSNEFGWDNKHAGLNVLVSKEFIEGAALPLQSYKEFADSFVCTLIPESSSSPHITYTPGGMIYKPGGSNMQHVTSISFLLLTYAKYLSKSSHTVDCGDVSVGPETLQLQAKRQVDYLLGDNPMKMSYMIGYGDRYPQRIHHRASSLPSIRDHPQPMACKEGTPYFNSSGANPNPLVGAVVGGPGEDDAYEDDRADFRKSEPTTYINAPLVGVLAYFVGNPNPGHNTRH

SEQ ID NO: 50100 - protein, 65 aa, Zea mays
  Coding DNA Sequence Number=SeqID_6725
  Subcellular localization annotation: CTP_CleavageSite=53; ConfidenceScore=5.01e-01
MAEAWDRLLSEMVAAHKEGTGRPATQGRRMRTSWTCCCGLGKMARMGSSSQTTASKASSRCGYKS

SEQ ID NO: 50101 - protein, 143 aa, Zea mays
  Coding DNA Sequence Number=SeqID_6726
  Subcellular localization annotation: CTP_CleavageSite=66; ConfidenceScore=5.41e-01
MAHRTLSNAHRTVWCPCRPLARATRRPRIARPTVALATVGSPDSPVHHRTVRWIIAVRRLFFPRVACSPKASLAQRIVRGLKKSLTKMAAHMKVAASTRRRADDAYYDPAVDSKSQSLVGGNVSLDTEVAPYKHPNFVVDITG

SEQ ID NO: 50102 - protein, 202 aa, Zea mays
  Coding DNA Sequence Number=SeqID_6727
MVTTSSMVGRSKPGCGLCPALSFKDLHHPCCGGGRTEPEFYLPHGPAGHLFLQHSGERALTGLAEGEDFNNAGPVGLKRRQLRHAWLAGSAGSSAASGATSHRWGGAWLPGWPPEEVFSADETVGAARGQTSGSLALTACPRPSCGDVGEGLPTAAFALRSSSARSALPLKVSLAQFQNLRPLCDELEPEAAVSAWTEAESA

SEQ ID NO: 50103 - protein, 166 aa, Zea mays
  Coding DNA Sequence Number=SeqID_6728
  Homolog annotation: Hit_ID=Q6J9V9; Match level="QueryCoverage=53%, HitCoverage=23%, E-value=1e-17, Identity=60%"; Hit description =Putative uncharacterized protein
MEAQAHTSCNRRAGYYVQETAPPLVPVPRLLDCRTSAATRGNPARGPIVPIEHIDHGKRAPSPPTDQGFEGWLLGRVRQPPQSTRASGSLLIRGSKAGPSEGFDSRLRALGLRIRGSKAGPSEGFDSRPRARRARDDSGYVRYMAEARATLPRYPRTFSRPAGAIL

SEQ ID NO: 50104 - protein, 50 aa, Zea mays
  Coding DNA Sequence Number=SeqID_6729
MGIGCLRDKNLNKDYGSLEDMVAGMTWPSILPPGWTVEWDPALAEEEHEE

SEQ ID NO: 50105 - protein, 317 aa, Zea mays
  Coding DNA Sequence Number=SeqID_6730
MSLRYDRIYTPSALKIERPRLSVNVAILAKGRYLWTQVGTTVDQNNTKVDTAPKFYSHSCAYDVFCKWLILDARHGNPAAGGDLDEDDDDADGSSRDGTELLEEPEGWIARPITRDAARGCHFHDALDTLLRRSFDRHTWSIEYRCVVYQHRRGLYPDQWEATCLVRRPDDDLLGAEAFSEHYSITERDTAQAAMQDAARHALSQYCSLFIRVADGLDLKYYPCRSTGSAGCVIVSPVGEGNPRLNSMVNLVVVLNTELDHALDELGKVRAEVAEFRGECASRHYLDGGSPAHVGIQHPYRSPPRGRFEYGTPECRT

SEQ ID NO: 50106 - protein, 38 aa, Zea mays
  Coding DNA Sequence Number=SeqID_6731
MVCLQIMRRRMVMIMLMVMVAFGATYAQEFQDFDEFED

SEQ ID NO: 50107 - protein, 64 aa, Zea mays
  Coding DNA Sequence Number=SeqID_6732
MGLGVCGSLCQAKGAPLIRDTCIRDGLFTDDEEEDGYDYAYGNGKEEGIEEDLQEFQDFDEFED

SEQ ID NO: 50108 - protein, 179 aa, Zea mays
  Coding DNA Sequence Number=SeqID_6733
MTSHGSSEDGNALSHTDGLAREGFPRILWEVLQGAGYTTPPQYVVQQFEKHRVPRCRVRMTLEPHPLQLGWRSLDSESFGYRAEDTIEAIALHGLTTFCGFHPLELATHPIGLFPAEREDDPMEELVVDLSTEMVEKDLQVEQLSTDIQELEELVGTRENTIEVLEDQLINTQQQLAEA

SEQ ID NO: 50109 - protein, 546 aa, Zea mays
  Coding DNA Sequence Number=SeqID_6734
MGGLGVSDGFARELMRTCAAPGERMSSPELRESSARMLKVTGGRWPRNVPIPRAASGGVFTSRMVRKWRVFPYGRNIAVVVSAVMDKDRQGAAQKRQAAIRIVEARPKRQKRGSAKDAAPGGGKPPLAAKSGVPASSKAPEAAAGAGGSRPAKAVPPLKQGGGRAAKGGPSVAVGRASVSPTSPPTFFLIRWDEADAATRRLKEVTEALSQVADFASRTASGALTAAVSAEVERLRTQHADAVCEKSASDSKCRKLTDKVAALEREKADLRRQLAAERREANEAIAKEQAAQAEAKLARAEGNLAKELAEHLQERLTALESRAKGAEAAMRAEAERTRTQLMDTYRELGGAAGTPRCRGGGGFMSYASLVTCEGAMNALSREGCRHFEVFDQADEDFDRDVYKVEDLVVKDSAGALYDRMWGPHGREVVRERAETAMAQALRGERVDDLGALNSALPDPEPAPAEAVSGVALEPTPETAAIATAAPTSAAAGEDLPPKVAEGEPDAPAAAAPSAEDPAAVAAETTAEAAAEPMAEAFAVPGPSQVA

SEQ ID NO: 50110 - protein, 205 aa, Zea mays
  Coding DNA Sequence Number=SeqID_6735
  Homolog annotation: Hit_ID=O48967; Match level="QueryCoverage=23%, HitCoverage=10%, E-value=9e-16, Identity=83%"; Hit description =Putative uncharacterized protein
MTHFFNSLIDLLLKIGETKHLLPFPLDMLRNSFEVPDLLVQLFLLWGTPYYSIKYMVPAPLPLVARGSKAQTPLGEVRTPLSGVQATHGEAMCRLSIYCDLSTQLAGGVQAILQAACLSSPLPNRRKKIAPAANISSSKYYICYVPGPTCRGSVPFMMVQIVEHRVETSTDFLVKEEVVSSTPQVPNRPVPGTVAMHAARQHTTA

SEQ ID NO: 50111 - protein, 133 aa, Zea mays
  Coding DNA Sequence Number=SeqID_6736
MAPKKASSKAAPSVDKAAKAALLADKKGKALADNTPKKHAKTKLSARDNATNTPLPKAPYAPAAPENYHKHNPWASLHQRAKTQQRTAKSSVSQPKNSYSYGPCASRTATSKNRKASSRPSANVSPRKPRCDR

SEQ ID NO: 50112 - protein, 60 aa, Zea mays
  Coding DNA Sequence Number=SeqID_6737
  Subcellular localization annotation: CTP_CleavageSite=34; ConfidenceScore=5.01e-01
MAPLLPSGLSTRTAHLSMDTMLMMSDNRRRGGRRAQQEQTAPQDEAPRQQLPPPPPMTIE

SEQ ID NO: 50113 - protein, 390 aa, Zea mays
  Coding DNA Sequence Number=SeqID_6738
  Subcellular localization annotation: CTP_CleavageSite=61; ConfidenceScore=5.09e-01
MDKDRQDAARKRRAFTRVGDPTREVKRARGGAKSTAPGSSKPPPAPKPAVPGPSKSSAGARAAASGTGKPPSAEPTKERRSPSPVHADDAAAGGADFDTDICVEDYRVGGVMMFDAHTGRGLVGEFFLQRRPGLEQDYGAGSDAGQLAVVPGPVAATSPTAAVGAKGTSQDPWSKFCASGEFSSPAAAKDVAGSVSQQLRHVSQQLKHAAAFADHIASDDVRDKSAAENKSHRLTERLAAVEAEREDLRRQLALERKDANRACAEAQAAQVEAKLAWAEASLACQHTKEMETRLCGLRDRLDKIEASTRAEVERTHAHLVDAYRELGAWTAPFEAPGQEVGLCFLGWLQEELEVLPTIVMGLMYFASLITCEGAVNAMSREGCGHFEVFD

SEQ ID NO: 50114 - protein, 163 aa, Zea mays
  Coding DNA Sequence Number=SeqID_6739
MAHDKEVEELGDLGSTLPEASKVKLKPPFDAGEGPLATPAPTGAGEDPVPANVPTGEDVSKVVGEPAAEDPAASAQAFAGGGIGARAFGESSDEGLDYFAALGVAAAESLSRVEVGEAADLPSASTEYRRRRVVSKHSVGEGSRSGRRRRMGMECGRLRVDRT

SEQ ID NO: 50115 - protein, 50 aa, Zea mays
  Coding DNA Sequence Number=SeqID_6740
MTQLFEFYEAEDPEHLFDDDEDGYDHAYGNGKEGVEADLQEFQDVDEFED

SEQ ID NO: 50116 - protein, 196 aa, Zea mays
  Coding DNA Sequence Number=SeqID_6741
  Gene Ontology: Mol. function=structural constituent of ribosome; Cellular component=ribonucleoprotein complex; Biological process =translation
  Homolog annotation: Hit_ID=O22424; Match level="QueryCoverage=95%, HitCoverage=79%, E-value=6e-73, Identity=70%"; Hit description=40S ribosomal protein S4
  Pfam annotation: Domain name=KOW; Domain location=155-189; Score =30.4; E_value=6.4e-06; Accession=PF00467.20; Description=KOW motif
  Pfam annotation: Domain name=RS4NT; Domain location=3-37; Score=63.1; E_value=9.1e-16; Accession=PF08071.3; Description=RS4NT (NUC023) domain
  Pfam annotation: Domain name=Ribosomal_S4e; Domain location=83-148; Score=77.2; E_value=5.5e-20; Accession=PF00900.11; Description =Ribosomal family S4e
  Pfam module annotation: Pfam domain module=KOW::RS4NT::Ribosomal_S4e; Domain location=155-189::3-37::83-148
MARGLKKHLKRLNAPKHWLLDKLGGAFPSSGPHKSRECLPLILIIRNRLKYALTYLEVISILMQHYVLVDGKMSFPSLRQMRTTGFFRLHPIRDEDAKFKLCKVRSIQFGQKGIPYLNTYNDCTIRYPDLLIKANDTIKIELETNKIMDFIKFDVGNVVMVTGGRNTGRVGVIKNKEKHKGSFETIHVLLGAFCYV

SEQ ID NO: 50117 - protein, 34 aa, Zea mays
  Coding DNA Sequence Number=SeqID_6742
MVGLQMMMRMVMIMLMVMVAFGAIYAQMPPDHSL

SEQ ID NO: 50118 - protein, 55 aa, Zea mays
  Coding DNA Sequence Number=SeqID_6743
MTVMGSTSEKMYLCQTNTRKANTQWDWRGCESRVYPPWQEADGGVSVLSVGVNPV

SEQ ID NO: 50119 - protein, 122 aa, Zea mays
  Coding DNA Sequence Number=SeqID_6744
  Subcellular localization annotation: CTP_CleavageSite=67; ConfidenceScore=5.83e-01
MGAPASAARASAPDSGRPRGSAARPAFRRSSRRPRPDPGLGRPAPVAPGPRRVSLRRARPSPRPGCPGSAAPARAPLGRPMPRLGRPRRARLGPVPSRPRPCPSPRPCTVLARSPRCALLAS

SEQ ID NO: 50120 - protein, 284 aa, Zea mays
  Coding DNA Sequence Number=SeqID_6745
  Subcellular localization annotation: CTP_CleavageSite=24; ConfidenceScore=5.15e-01
MWHDHTSTHDYDTNQRKKDLKTSRKMVLNGSGFQSSNTQTSTSKHGENPSMSRSDDKHARDNEPVFDAWPIFYEDPNSLINDSGHGNFSVFLWDDSVHAKNNLGTSCISRSGECQFSPYGDMPPRTRKTARKSTGPIGVPRHQLAPRHEGSSSGSNDPIGDLEAQVEQLRMELRHRNRVWVEDGQRMNELRADVRHLQDELAERDLEIDRAVNSRSIAWDREAKARACVAELSAAIDNLRMYCNTLHEEVCWGLVLKCSESRTRQHKMLNVNALRPTKHYSLKD

SEQ ID NO: 50121 - protein, 469 aa, Zea mays
  Coding DNA Sequence Number=SeqID_6746
PGGGIPALILDEASLCLPLRRRPDFVDRVASGALTAVVSAEVERLRAQHADAVREKSAADSKCRKLAEKVAALEGERTELRRQLAEERREANQALAKAQSAQAEANLARVEGSLARQRTEEWEERFNALQARMERAEASTRSEVERTRKQLMDSYHELGARTADFEVPDRESGLRCLEWLQEELQELPTIVEGFMSFASLVTCEGAMNALSREGCRHYEVFNRSDEDFEREIYQVEDPCFEQARDPKPRRTRWWAEAEVVPAPPPETGEGSLAAPVATASGGGSSPTAVPRAEDPPKTSTELAAEDPTAAGPSQVQDFGPAHAATTASFVAASTVDGGNELDESTTEFSDFGDSGSSVQWTEESSDEDLDYFAALDVAAAEASPRAADAEVVLGPSAGRRRRRAVAKRRVSEADGGRLRVGRAGKQELLSSPAIASVGEGELRSLFEGEELRIMLFNYREMGIIPKVEP

SEQ ID NO: 50122 - protein, 210 aa, Zea mays
  Coding DNA Sequence Number=SeqID_6747
  Homolog annotation: Hit_ID=A2Z8I8; Match level="QueryCoverage=22%, HitCoverage=9%, E-value=2e-08, Identity=63%"; Hit description =Putative uncharacterized protein
MTVGGGCLSYGAPDSPLKYNKTGRENDCLPRVGHWNMMNKGPTRRDATALDPEQVQLVELALGALRENSIADVLYLQWLVLPETTKLLGSIAIGLKTKDGVVLAIEKRVTSPLLEMCGFDEEAKSYKDPSAIELVLMPWRYSTGYVLFVINHANKFVSVFNFTPTPEWCKDIPLKRFWEVILLISKKYKVAYGVKRIGWSHDIYMWRHSI

SEQ ID NO: 50123 - protein, 55 aa, Zea mays
  Coding DNA Sequence Number=SeqID_6748
MPYAFNDYYIKDYGVILAPEQPIDDFIDDGISDTHYIQRLLHDGIGLGVVWLGQR

SEQ ID NO: 50124 - protein, 65 aa, Zea mays
  Coding DNA Sequence Number=SeqID_6749
MSANVYKCKDDFCLHTSKDMKPHCTPPRATYDAKNVPRDSKRYFNFIQDGNQPHISLPNYDHPQY

SEQ ID NO: 50125 - protein, 63 aa, Zea mays
  Coding DNA Sequence Number=SeqID_6750
MSGGAPDTIRWHTGQSDCNLADREYFLVPEQGAAQEVAPDPAPESAPEDLPATALEGKPRFYA

SEQ ID NO: 50126 - protein, 36 aa, Zea mays
  Coding DNA Sequence Number=SeqID_6751
  Gene Ontology: Mol. function=GTPase activity; Biological process =immune response
  Homolog annotation: Hit_ID=Q6K2Y3; Match level="QueryCoverage=91%, HitCoverage=3%, E-value=5e-09, Identity=90%"; Hit description =Putative guanylate binding protein
MVLEAVAALQLVKGPVGVISVCGRARQGKSLILNQV

SEQ ID NO: 50127 - protein, 140 aa, Zea mays
  Coding DNA Sequence Number=SeqID_6752
  Subcellular localization annotation: CTP_CleavageSite=59; ConfidenceScore=5.32e-01
MGLNSPLNHGRSELPRVRRGLTSGSALRARPSRRRPPPPVFVARVALTTSDADPHTDVTVMTSRTSLTTPPELYCRRQYKSTMFILNKNLSLKDCNLADGEYVLVPELGAAQEVAPDPAPESAPEDLPATALEDKPRFYA

SEQ ID NO: 50128 - protein, 156 aa, Zea mays
  Coding DNA Sequence Number=SeqID_6753
MGKSNKRKREPTPPSEDFGDSEYSEEEFSSESEGSPAPVSPPASSDDSDDSQGIAAEVWTYIRAIERSGLEGSDGSEYSSDEEDSDGGEDEDDDDDDGDDDDGGDGDGSGSGGGSGGGDGSKGSTRGGSSTGSTRGSSSKGSTKGGGGGSSSKASG

SEQ ID NO: 50129 - protein, 121 aa, Zea mays
  Coding DNA Sequence Number=SeqID_6754
  Gene Ontology: Cellular component=exocyst; Biological process =exocytosis
  Homolog annotation: Hit_ID=Q69P90; Match level="QueryCoverage=70%, HitCoverage=13%, E-value=8e-13, Identity=52%"; Hit description =Putative leucine zipper-containing protein
MTRLEDEFRHMLLARVLDLEIEALAGLSSLSMANDRSNSDATEAAAGEEDDGSVSSSVDGRSSYRSLQSIREIDLFPVDAISDLHTKVRSAHACHPSPIMRSDIILFLKEGSRLKVDYDVT

SEQ ID NO: 50130 - protein, 932 aa, Zea mays
  Coding DNA Sequence Number=SeqID_6755
  Gene Ontology: Mol. function=catalytic activity; Cellular component =cytoplasm; Biological process=metabolic process
  Homolog annotation: Hit_ID=A2WSL4; Match level="QueryCoverage=63%, HitCoverage=98%, E-value=1e-108, Identity=53%"; Hit description =Putative uncharacterized protein
  Pfam annotation: Domain name=Abhydrolase_3; Domain location=800-931; Score=-43.0; E_value=8.3e-05; Accession=PF07859.4; Description =alphabeta hydrolase fold
  Pfam annotation: Domain name=ThiF; Domain location=454-576; Score =41.5; E_value=3.4e-10; Accession=PF00899.12; Description=ThiF family
  Pfam module annotation: Pfam domain module=Abhydrolase_3::ThiF; Domain location=800-931::454-576
MGFPRELMVQRIQSLVEEGFWDALRRHKLDVLGTDDSPIPITGPLAHNPLSSLFVGRIRDLWQGMKADPIHFRAPLTNNCPVPGTLINTNNMRGFENLDREQLLKAEAKKILHDIVSGKVEEDPSVLLRFLVTSFADLKNWKVYYNVAFPSLVFNSRITLLSLQPASKVLTKEEAASMYTSLQKWRTSSETTDSSASIRQLKEWKACQGNYQKLLFGFYDHGCRSDCPGWVLRNYVAFLSIRWKIEKAQIFCYREYKGNPDLEQSLIGEASFPSPYDRLSHVRVLLLGAGTLGCEVARLLMTWGVRKLTVVDSGSVVMSDLAKQSLYIDKDCGVPRPISYETLPGLTSVASGKAVELFARMLHHPDEIRAPGDTAGTETEHQLGLLPHQLRGSLPKCDLFVELNNSSVNCTACSVAAINYPAYLKDFTGISDSKRPDTCPKIPPNISVNSDKISDVRCLLLGAGTLGCDVARILMDCGVRKITVVDSGHVVVSNLARQSLYTSDDRGAPKATAILRHLVERCPSVDAQGIKMEIPMPGHPVSPGEAAALGYDSYLVMRHGAGPGISCEASSVVTAIDKMSTEDALGRQRLGYRSSQQSSHFIEDNINIKRGIQLQDEDFLHRNSQLISLGAPVHLPAPYAIVPLLTAIATIPSCRPRLKPPYPTWAAKAMLTHPRLDLPSRRCLLHAQVAEATIESLVQGQPEPPMCASLAYPRTSSQSRASHALGMSQQQTRGASARAVVVGNAKSGYGLHKSGDKLAKSSSGDLNAEAMTCPKNTSAGRKGYKGEEKREPHRRGPCRLVYFHGRGVCLGTIHACCLCVATELPAVVLSADYRLAPKHRLPEAIDDKSAPPDCARVFVSGANVAHHVAMRCGSDRYQPALAPTLHVAGRVLLTPFFGGAERTTTESEPPAGVLPTSSGVRRCRWARATTRR

SEQ ID NO: 50131 - protein, 342 aa, Zea mays
  Coding DNA Sequence Number=SeqID_6756
  Gene Ontology: Cellular component=exocyst; Biological process =exocytosis
  Homolog annotation: Hit_ID=Q69P90; Match level="QueryCoverage=33%, HitCoverage=20%, E-value=2e-14, Identity=47%"; Hit description =Putative leucine zipper-containing protein
MATSVRGARGCGDHDLAVVTTFRGASGDGSGTVCGGIRKEQSPPMRRIRGRPPSMTTFDSLASEASFDLAALGLSSAWASTTASPRLRLDKRPLPPWQSPSAKTPPANTLFPRVVDDLRRLAPASSPSVGSLRRTLSAGGVCTAVEVSMTRLEDEFRHVLSALAGLSSLSMASDRSNSNATEATAVEEDDGSVSSSVDGRSSYRSLQSIREIDLFPADAISDLHTKVYKRRRRQSSTKKRTDRLRQMDGGKGSGIGGNDGKSGDGKTGGSAVKGGGSYSGGGAGSGNSGVGVAGHGDGAEKSGSGRDGMMKAPGGGGYILRSDFEANPKEFFQGLHQGGGKK

SEQ ID NO: 50132 - protein, 251 aa, Zea mays
  Coding DNA Sequence Number=SeqID_6757
MWDLGVGVAANSKSFTTTVGLVGALACLGSTVDAGAAREVVGEGEDDEVSGGEKHAGEEEVGDVPGYLTGLSSACEGWEGGATFGVRMASAAPVDVGRAGIRARLGASEWWRGRQERAVGAGNLDGLVARRLKGGTYKDTETRHVGPGEKWKEARRLRNGLVAACQRNGQGSINVEAAHRVPVEWTWLIKCGGGTSPANGMDRRRALSAINAEAAQSRGPTSGSARWLTSRVVGHAVASGLRLSGEQKLIW

SEQ ID NO: 50133 - protein, 85 aa, Zea mays
  Coding DNA Sequence Number=SeqID_6758
  Gene Ontology: Cellular component=nucleus; Biological process =ribosome biogenesis and assembly
  Homolog annotation: Hit_ID=A3AYT6; Match level="QueryCoverage=49%, HitCoverage=11%, E-value=2e-12, Identity=83%"; Hit description =Putative uncharacterized protein
MGEEFDKTYLFEQMNNSGITELGESEKTSSIQKILKLPEKLMEELRKECLQKGTELGQAVADALFALQPTEDRDGPIVYLPPPTV

SEQ ID NO: 50134 - protein, 118 aa, Zea mays
  Coding DNA Sequence Number=SeqID_6759
  Gene Ontology: Mol. function=kinase activity; Cellular component =ornithine carbamoyltransferase complex; Biological process=amino acid metabolic process
  Homolog annotation: Hit_ID=Q6QP54; Match level="QueryCoverage=70%, HitCoverage=29%, E-value=1e-19, Identity=63%"; Hit description =Putative kinase
MGRRETEREGGKEPEGDGRERWNPAAFVFVPRPGRPESAWGRVMMAPPVDVVGPCPGLGDVEAPPRLRSSLSSKVKVESEPLGRARQRPSAEARAESEPWGRAKRSSSSSGVELESEP

SEQ ID NO: 50135 - protein, 89 aa, Zea mays
  Coding DNA Sequence Number=SeqID_6760
MTQLETWKPGWNNSAQNYATGIGHMPSRTRAHDGAGTSRNGEDTPNPPQVPPTLAKAIAALVNATMDNMHFLREMTGNQFQPHGGRVPP

SEQ ID NO: 50136 - protein, 122 aa, Zea mays
  Coding DNA Sequence Number=SeqID_6761
MLDETAGWDDLVIGLSPATCGTKGKVCQSSCLRWCSEFGEGIERRVASSPSPQQIPLPKASTMPPYKITSKVPPLNRNSKTLLFPHLQQHGFENLEYGVYFRKAYPTKEKDSQGYAGLRESR

SEQ ID NO: 50137 - protein, 218 aa, Zea mays
  Coding DNA Sequence Number=SeqID_6762
  Gene Ontology: Mol. function=nucleic acid binding
  Homolog annotation: Hit_ID=Q60EK4; Match level="QueryCoverage=53%, HitCoverage=24%, E-value=1e-10, Identity=36%"; Hit description =Putative uncharacterized protein OSJNBa0032D15.11
MARRKSQKNKKTPPKENNEVTLEILLFDCSNYASWCTSVINAFRTMDPQLEQILDKSIIPSSYDKKNASKEDRRCLRLNYLAYDILGNSPNKEDYYAFIIRYDEHIHDAHDIWTRIKNRFDESKHVSSYDASTSFSPCETNPLKEQENERWRPNDESTSPKDNRDDMVKKLEMGITVACTRSLEEKVKDLRNVKRREQKRKINTVGTCSPGQVDPTWE

SEQ ID NO: 50138 - protein, 27 aa, Zea mays
  Coding DNA Sequence Number=SeqID_6763
MEFNSNETNGPLAFFSTISDRGFVGSY

SEQ ID NO: 50139 - protein, 99 aa, Zea mays
  Coding DNA Sequence Number=SeqID_6764
MASMWGALRRSTFRESKVNGTWDHFVCTTGPVTATWLMLRLLALGLGGDGCFAIAGVEVGVGEVRFVPPGGVGMRGAVDAERGRGCMAEGVADMCARQL

SEQ ID NO: 50140 - protein, 811 aa, Zea mays
  Coding DNA Sequence Number=SeqID_6765
MPSLGGRKVRSPLFALDVRGRDPATVVREAEDGAVRIVGRYVPKTEAQRSWDIRGSNDLLNRVFELNCLLYGGYPGEDVVDRRGKKPAAMTEDNPAPEAAPATKKRKLGTAVGGPGVSDSFAMELMGTCAAPGGRMSSPELRESSGRMLEVTGGQWPKNVPIPRAAGLDFFTSRMARDLRVFPYGRNIAAVVSAVMNKDCQDAAQKRRAVIRLPDARREAKRARGSAKAAVPGGSQPMLAVKPAAPRSSKVPESTKAVGAGGTKSALDGAAKVRELPSPGKRVTDFGTNISVDDYLVGSGEGQLVVVLPTVATTASTAVLGVKGGAFSAGGEISVATAIKDEAGTMSRRLREASQQLSQQLSQAADFADRVASVALTTDVSAEVERLWAQHADAGREKSATDSKSCRLGEKVATLEGERTDLRRQLVEERREANQAIAKAQAEAKLARAEGVSPANAPRNGRCGSTLCTPAWRGSRPLRARKLSGRANSSWTHTASWGFMSFASLVNCEGAMNALSREGCNHYEGFDRSDEDFGREIFKVEDPVVKNSTGALFDRMWGPHGREAVRERSDRAREQMAHAEDVEDLGGLNSAPPEAAEGRPVLPSDAGEGPSDVPVPAAAGEDPVSAPVPTVEGAQEVVAEPAVEGPTAADAPTQVQGFGPAHATATESANFVVASTVVAENDSGDSVSKFFESDDSGSSVVWTEESSDEDLDYFATLDVAAVEASPCVMGAEVPGPSAGRRRRRAVAKRRVSEVEGGRLRVDRAGRRELLSSPAGASVGEGELRSLFEGEELRIMLFNYREMGIIPKVEPL

SEQ ID NO: 50141 - protein, 201 aa, Zea mays
  Coding DNA Sequence Number=SeqID_6766
  Gene Ontology: Mol. function=protein serine/threonine kinase activity; Cellular component=cytoplasm; Biological process=protein amino acid phosphorylation
  Homolog annotation: Hit_ID=A2WXV3; Match level="QueryCoverage=31%, HitCoverage=5%, E-value=7e-24, Identity=81%"; Hit description =Putative uncharacterized protein
  Pfam annotation: Domain name=Ank; Domain location=102-134; Score =43.8; E_value=6e-10; Accession=PF00023.21; Description=Ankyrin repeat
MASIGQVLERIRPSPFGSSSNSTNPPPGVREEAAWKDLMLPCAAGHRLLRGGAPPGGKKLAATEREESASSWSALFFACQGDTLGIEGLLRSGVDVNSINLDGDTALHIAACEGHRDVVRVLLSWKANIDTRDRWGSTVASSASRNLRAAAPCREGGNQPRGGRNPRAVEATGSRGPAHALEPLLTLKFLTAATVSSRQGA

SEQ ID NO: 50142 - protein, 64 aa, Zea mays
  Coding DNA Sequence Number=SeqID_6767
MKEESAAAGREKSAADLRAVGPRLVPLGICEQLPHASRNPRAAGPCLESADPIASTALCLQMIA

SEQ ID NO: 50143 - protein, 270 aa, Zea mays
  Coding DNA Sequence Number=SeqID_6768
  Gene Ontology: Mol. function=kinase activity; Cellular component =ornithine carbamoyltransferase complex; Biological process=amino acid metabolic process
  Homolog annotation: Hit_ID=Q6QP54; Match level="QueryCoverage=41%, HitCoverage=32%, E-value=1e-09, Identity=39%"; Hit description =Putative kinase
MAPPVDVVGPCPGLGDVEAPPRSMSSLSSEAEVESEPLGRARRRPSAEARAESEPWDRAKRSSSSSGAEPESEPWVRTKRSSSSSGAEPESEPWGWTKRSSSSSGAEPDSEPWVRAKRSSSSSGAEPKSEPWGRVKRSSSSSGAEPESEPWGRAKRSSSSSGAEPESEPWGRAKRSPSSSGAEPESEPWGRAKRSPSSSGAEPEFEPWGRAKRSFLWRLRPGLAAVSLTLSSGSVVGAAQAALSSCQTGQWSGEVTAVTLALSTGGRTSG

SEQ ID NO: 50144 - protein, 57 aa, Zea mays
  Coding DNA Sequence Number=SeqID_6769
  Homolog annotation: Hit_ID=Q7XBD2; Match level="QueryCoverage=54%, HitCoverage=2%, E-value=4e-07, Identity=80%"; Hit description =Retrotransposon Opie-2
MRIQLKMVKMKIKRPYRVEDALRDLDWVLAMQEELNNFTRNEVPNGYSATSKTSMVW

SEQ ID NO: 50145 - protein, 57 aa, Zea mays
  Coding DNA Sequence Number=SeqID_6770
MGSSSLRAEWESRLVGGYEIDDSGYDYGAGCQHCNHCSGEDEAVEGDFQEFQDYDEF

SEQ ID NO: 50146 - protein, 160 aa, Zea mays
  Coding DNA Sequence Number=SeqID_6771
MWQDAKKSFAHMNINGNLQNGIGIQMGQIKTIEIKEAAEKGRNGKTETAEMKRNINYGFVGILCQDSDPMANPPRTKLPRGKDPDGYEVEKWMNSRPFAWAPSQLYWRTEREPNCREDLEAGKQELGHGKQRRLKAQYIWDIPESDTVSKSAQSAPGSYF

SEQ ID NO: 50147 - protein, 94 aa, Zea mays
  Coding DNA Sequence Number=SeqID_6772
MEIKGREIKDMDKDGEYILVPEQGAAQEVAPDPAPEPAPEDLPATALEGKPRNPIELNTSSLEEMVAGITWPTTLPPGWTVEWDPASAEEEHEE

SEQ ID NO: 50148 - protein, 218 aa, Zea mays
  Coding DNA Sequence Number=SeqID_6773
MAPKPLGFYTKNVQYHLGHPLEKVELETRTKTFAGDFAKIRTYATAGRHFEHWEENKPPRVRRPSAAPEHARARAPRRAQAKPVPWVRVRGYKTPRSPWPYPSARAQASPELSSPPSARTRRARGHPSPCHRRPANPATPNPVQPSEKTVHVSVKLPERGTGLCFTGEAGPRSPDFNRPPGNRGPRYTVNLSSIPCTVRLLGPPRSSLCPWIELCHRG

SEQ ID NO: 50149 - protein, 139 aa, Zea mays
  Coding DNA Sequence Number=SeqID_6774
MGKNNKRKPEPTPPLEDFGDSEYSEEEFSSESEGSPAPVSPPASSDDSDDSQGIVVEVWTYIRAVERSGLEGSDESEYSLDEEDSPEEGGEGDDDDDGGDGSDNGDGGSRGSNGGSRGGDGGGSRGSGGSSKGNNKASG

SEQ ID NO: 50150 - protein, 812 aa, Zea mays
  Coding DNA Sequence Number=SeqID_6775
  Gene Ontology: Mol. function=protein dimerization activity; Cellular component=nucleus; Biological process=regulation of transcription, DNA-dependent
  Homolog annotation: Hit_ID=Q5JK20; Match level="QueryCoverage=98%, HitCoverage=97%, E-value=0.0, Identity=73%"; Hit description=Auxin response factor 4
  Pfam annotation: Domain name=AUX_IAA; Domain location=635-789; Score=- 75.9; E_value=0.00051; Accession=PF02309.7; Description=AUXIAA family
  Pfam annotation: Domain name=Auxin_resp; Domain location=261-342; Score=187.9; E_value=2.6e-53; Accession=PF06507.4; Description=Auxin response factor
  Pfam annotation: Domain name=B3; Domain location=134-239; Score =114.6; E_value=3e-31; Accession=PF02362.12; Description=B3 DNA binding domain
  Pfam module annotation: Pfam domain module=AUX_IAA::Auxin_resp::B3; Domain location=635-789::261-342::134-239
MAPPSQPPSNSGDPLYPELWRACAGPLVTVPRVGDLVFYFPQGHIEQVEASMNQVAGNQMRLYDLPPKLLCRVLNVELKAETDTDEVYAQIMLMPEPEVASLPARTIYARHQTDVPAEKPSSAPAASPRPAVRSFCKTLTASDTSTHGGFSVLRRHADECLPPLDMTQSPPTQELVAKDLHGMEWRFRHIFRGQPRRHLLQSGWSVFVSSKRLVAGDAFIFLRGENGELRVGVRRAMRQLSNVPSSVISSQSMHLGVLATAWHAINTKSMFTVYYKPRTSPSEFIIPYDQYMESVKNNYSIGMRFRMRFEGEEAPEQRFTGTIVGCENLDPLWPDSSWRYLKVRWDEPSTIPRPDRVSPWKIEPASSPPVNPLVHSSRAKRPRQNVPPPSLESSVLTKEGATKVEIDSAQTQHQNSVLQGQEQMTLRNNLTESADSDSTVQKPMMWSPSLNGKAHTHFQQRPAMDNWMPLGRRENDFKDTRSAFKDARTASQSFGDTQGFFVQAYDDNHHRLSFKNQGSTHRFADPYFYMPQQSSVTVESSTRTQTANNDLCFWGDQNAMYGNPSDQQQGFNFGQNPSSWLNQPFPQVEQPRVVRPHATVAPFDLEKTREGSGFKIFGFQVDTTSPSPVQLSSPLPAIQEHVLQTRPSAPVNELQPVQIECLPEGSVSTAGTATENIQQAPQSSKDIQSKSQGASTRSCTKVHKQGVALGRSVDLSKFTDYGELQAELDKMFDFEGELVSGSQNWQIVYTDDEGDMMLVGDDPWEEFCSIVRKIYIYTKEEVQKMNSKSAAPRKEESPAAGGGGGCAAATNE

SEQ ID NO: 50151 - protein, 231 aa, Zea mays
  Coding DNA Sequence Number=SeqID_6776
  Subcellular localization annotation: CTP_CleavageSite=2; ConfidenceScore=5.04e-01
MRASTEAKSLGGSRPNPKGTRWESVGTSWSTGGDEVTSGADYTVVSGARVTPNKSFASVLASSVCLGLAFCGETALVFVSDASPGLGEVEAPPRSRSSLSSKAEVESEPLGQARRRPSAEARAESEPWGRAKRSSSSSGAEPESEPWGRAKRSSSSSGAEPESELWGRAMRSSSSSGAEPESEPWVGRGGASYGARGRTLLLSASLCRVAQQLERRRRRCPLVRPVSGAAK

SEQ ID NO: 50152 - protein, 328 aa, Zea mays
  Coding DNA Sequence Number=SeqID_6777
  Subcellular localization annotation: CTP_CleavageSite=31; ConfidenceScore=5.58e-01
MKLWKETSRSSKTTTSSRCGLAATPSRLPVKAAMARLRHTARKSVNPFLPSRLAERPLRHPVAGQSSHLERLHHRLREEQERRRQEQQSSSFSLHQEIESVRSCSPVLPLEPPPAPPLGAPASGVAAGGDPDDGDGDDSSSHDTDFSANPEPEGWHSRGVYPDRWEATCLVRCPENSLQGAEACSEHYSISERDSAKAAMQDAARRALSHYCSVFGGAADDLDLKYYPRRPSGSTRGVIVSPVGEDNPRLSSTVNLAAVLNTELDHALDELSRARDEIALLRAERAERRHLDDGSPAPVGTQHPYRSPRRGHQPYGNPDCKTKINLEP

SEQ ID NO: 50153 - protein, 121 aa, Zea mays
  Coding DNA Sequence Number=SeqID_6778
MDVVSRRELDPHCRRCCVPRCVLAGSKSVVTAAHSLFVHQASCVLVFAVELLNPSSLARDFIIARALTGFVSSPARSRIDLVVVPCVIKKSQESGEDEASSVIFPKCSTQGLNQNPCRVRG

SEQ ID NO: 50154 - protein, 180 aa, Zea mays
  Coding DNA Sequence Number=SeqID_6779
MELPCRPSLGLPRRRAPLPLFARAQPRPSGSAAHLPELAPALGFSPSRSLVQPHAPPCAQLEPRVLSCAAPRASILCVTTTIQSRPWIIFGISLRGKEPFARSYGVVIARNRSLGALDHQRRDLHSIKLSYLTEDRATSTIISSSARPKCSAWLCGQVPFLVVVGEKAQPSLSHFDLAWI

SEQ ID NO: 50155 - protein, 131 aa, Zea mays
  Coding DNA Sequence Number=SeqID_6780
MDTVGTRWRPWNKPETAADDDRAPWMSDNAAANGQTVHPGRSARMLKMHFTELVTFGVFLFFNGRTPEARRSALGLIWCPLLLRTVRSVNAVFAVFWFEAHPGVVDDPRKGDFPKSFSCPKYSTVFRTVDL

SEQ ID NO: 50156 - protein, 123 aa, Zea mays
  Coding DNA Sequence Number=SeqID_6781
  Subcellular localization annotation: CTP_CleavageSite=53; ConfidenceScore=5.15e-01
MGARLRLCWFLAHWTVSGALGQAPCEQATLGNSEARSVRNSVATEVRGHRTVRFMLRRSAFCTVGLRVSLGGCSPELRVDFCKQSTRRSSLQRSAFFFFGDDDSLGAPKVHPMGVAPELRVDF

SEQ ID NO: 50157 - protein, 53 aa, Zea mays
  Coding DNA Sequence Number=SeqID_6782
MPEFAGGDPLAERDGTRGGRCHPAAKQAIMKKGYAFLNVTPGEPVGRFPGVYT

SEQ ID NO: 50158 - protein, 258 aa, Zea mays
  Coding DNA Sequence Number=SeqID_6783
  Gene Ontology: Mol. function=binding; Cellular component=integral to membrane; Biological process=transport
  Homolog annotation: Hit_ID=O80414; Match level="QueryCoverage=23%, HitCoverage=16%, E-value=3e-20, Identity=78%"; Hit description =Mitochondrial phosphate transporter
MALGKEARFAESHIKHSAKNLTWGPADGFFAECWTLLFAEYCLALGKEGFADVLCVEPSLPSATLGKAFADYWDMTIMSSNSHPKKMALNYCLLGSPRPAKGTSSARSCAATGAAARLHASAPAPVAAGAGGAVPFSIQAPNEKIEMYSPAFYAACTAGGIASCGLTHMAVTPLDLDKCNMQVSGQRPRSVSPGGINRERSEIAEIEAASTSEAARLRAALRRAPPGAVREPHQSFERLTQTCFDKSRAAILQFRTTT

SEQ ID NO: 50159 - protein, 124 aa, Zea mays
  Coding DNA Sequence Number=SeqID_6784
MAEVQGLDDAGQWSPEAVPCLPRVPALSLARAAGKRIQWRESEVCVANGTRGVAVCAVSESVKLAKVQHFGYITIAMFLARAAACPDPDHSQLKDKCSHEADRCNEILCRKLLRAAQSTGIVIL

SEQ ID NO: 50160 - protein, 176 aa, Zea mays
  Coding DNA Sequence Number=SeqID_6785
  Subcellular localization annotation: CTP_CleavageSite=13; ConfidenceScore=5.46e-01
ENSVARSAPTAVSATPATTDNKSRSTTEFSLERNRKLHLARPHAPASGGGFRLARPQSPALERSLRLARPSDSASTPVSGRIVSSPDPGLGLKRSLRLDRPWARTDRANRGYIISLFLAYSGYKEQDRRPIWLTPATGDDEDDIGFDYGYGFWYSFCLERVAFGAIYAQMPLTMTF

SEQ ID NO: 50161 - protein, 121 aa, Zea mays
  Coding DNA Sequence Number=SeqID_6786
  Homolog annotation: Hit_ID=Q6J9V9; Match level="QueryCoverage=60%, HitCoverage=25%, E-value=3e-19, Identity=71%"; Hit description =Putative uncharacterized protein
MSCNRRAGYDVREVTLPLAPMLRLLDCGTSTGTRGSPAQDPTVPIKGTGKVDVVERILLGGGSGPRALLLIRGSKAGPSEGFRQPPQSTRTSSPLLIRGSKAGPLEGFDSRPRAPGLRAHY

SEQ ID NO: 50162 - protein, 473 aa, Zea mays
  Coding DNA Sequence Number=SeqID_6787
MHRALPPFEPLDGVLQRRLALAVVRGAWPCGDRHLLAIARLQGFSLCSPAAFPHQWAVWWGEASRAAASALPSASRIFVILAEAERELSRGSTSRMGRRVVSSFSIQGRRRSPTLWRGKLRQRRTGRPQASSAPACLARWLSWFYRGLRRCLLPLDPGSGVCCAVHTGGPSKTSYAAWATLGRPPFVGVAPAHRRLLSSVLRWWQPGKVSPPTRPSVPAAAGPRLFGFDGLSSPLEKRRGRGPRHSSVGLEVIAAAVQPPGAGVVVAVGVVATGEPLGVCYFTGPLVWRLPLLSFWNPRLLCDEPEPEAAVLAWTDAKSARKETSSARDMAASQAEEDVVAAAGAWPRHLLARCWRPPLGGGPFAWVTVRGRAWFRRGWKQRRGCCCSPCRCPNLQDLSINSRIVYPNKSYFSRKLMSEDLFGSRIAYPSMSYFSRKVMSEDPAIDTEVESTKVVLVENFSEENFDAEGVPPF

SEQ ID NO: 50163 - protein, 345 aa, Zea mays
  Coding DNA Sequence Number=SeqID_6788
MSARNWAETHWIARSTRGGGRPKSGEVNLGPPVKSGRVRGLGKLHGLLAELAEALAFPEDGWSGLATVAEALAAMAGGIELAGAKGKWLAGEAGSAVRILLTSPCCRKGLRATGVMVHAGHHHYPSLGPSPGSVEAETSLEAEAGVGRGRDSSQDRGRGRVRGSGEAETSSRGWSLRSGEAETSSRGRSMRSGEAELPVALEAKLGGIGRGGLAKVASQRSLPSRASGVPRGRPLREEALGRGVNLSGTTVPTRGWARENSVARFAPTAVSATPATTDNKSRSTTEFSHGRNRKLRLARPQAPASGGGLRLARPPDSASTPVSGGITSSPDPGLGLKRSLCLDRP

SEQ ID NO: 50164 - protein, 153 aa, Zea mays
  Coding DNA Sequence Number=SeqID_6789
MGKNNKRKREPTPPSEDFGDSEYSEEEFSSESEGSPAPVSPPASSDDSDDSQGLAAEVWTYIRAIERSGLEGSDESEYSSDEEDSDDGGKDEDDDDDDDDDDGDGDGSGSGRGGSNGSSKGSTRGGSSRGSTKGGSSRGSTKGGGGGRGRASG

SEQ ID NO: 50165 - protein, 261 aa, Zea mays
  Coding DNA Sequence Number=SeqID_6790
MHRALPPFEPLDGVLQHRLALAVIGGARPRGDRHLSAIARLQGFSSCSPAAFPHQWEVWWGETSRATASAPPSASRIFVILAEAEGELSRVIWGKGVRRLWCFAHRWTVQDAIRRKVGVRVLGLSCPHSGTTPPREGQGLPIREDLSGYLPVQVGASAIRWRGAGTQVAAVVGAEVLAAGEGFSADETIGASYGWTPGSLALMACPRPSSRDVGEGLVTAASALRPSGVEVVRTHGSRTGVPFVRRYTGFLPEQTVTASST

SEQ ID NO: 50166 - protein, 191 aa, Zea mays
  Coding DNA Sequence Number=SeqID_6791
MVPRVHHDAGGSQPLTAARRRQQDPCRTASCAPTGLRRSSDGHAITCTGLKLSPDSHVGICRVEDAPDSLAWGVETEDNEICVRQRMLARTHSECALAVSAPAACTSSPGQSRTAPEPRHAANVDAGEPFSSEPVVSVPHRALRRATVSCPRNLYVVPRNNCRHAPESCCVSSRLLGLVVPHSPSCELALS

SEQ ID NO: 50167 - protein, 365 aa, Zea mays
  Coding DNA Sequence Number=SeqID_6792
  Gene Ontology: Mol. function=heat shock protein binding; Cellular component=nucleus; Biological process=protein folding
  Homolog annotation: Hit_ID=A2X204; Match level="QueryCoverage=31%, HitCoverage=43%, E-value=9e-48, Identity=79%"; Hit description =Putative uncharacterized protein
  Pfam annotation: Domain name=DnaJ; Domain location=239-285; Score =54.6; E_value=3.4e-13; Accession=PF00226.22; Description=DnaJ domain
  Pfam annotation: Domain name=TCP; Domain location=118-246; Score= -54.0; E_value=0.0059; Accession=PF03634.4; Description=TCP family transcription factor
  Pfam module annotation: Pfam domain module=DnaJ::TCP; Domain location= 239-285::118-246
MNRIVRRRRTIPRPLDKRTPLKPPDRRSWWSKDARATHASRDRRSDPHPSWPPPPLPAPTAPRATVVATGSRSSPSSPTPRSRQPPRPDLDPPSAARPWLPDLTASADAAPPPSPLKSDQRLVEALAGERELPSNGSLPVDRLGFDKANKTVNWLLAQSKPAIDRLNRVRLGSERQFMAFCKRHGLSARGSNADLIAHLDTALGVGASSRVTRRSSLAVAAAVLPPLVGPKRGREEAAGVEKTASQQEIKKVYHKLALRLHPDKNPGDEKVISILGDAEKRALYDETGITDDDALVGEAANNLQEYFRTMYKKVMEANIEEFEVKYRGSDSEKMDLKELYTKYKGNMNRNSYLLYHIVKSETVLL

SEQ ID NO: 50168 - protein, 210 aa, Zea mays
  Coding DNA Sequence Number=SeqID_6793
MTPRVDELMGDEKASPQARHLTPSDVQQLWLGAVRCGRRHLLLLVARIAPETDGLRPIKAPTIESKSIYLSFLYFCPKMIDTQIGANTLLATPLGTSRGDLLDRPPMAGSKDNSDVSPATSSSRLWRLCRLKIYQYQFEEHKEQLIKDPQEKFLANFKVDRNHKVVRQQVTDLASLRPAATTPKIVADFIIGHQIGDTQELDISYITITP

SEQ ID NO: 50169 - protein, 577 aa, Zea mays
  Coding DNA Sequence Number=SeqID_6794
  Homolog annotation: Hit_ID=UPI0000F34A83; Match level="QueryCoverage =94%, HitCoverage=95%, E-value=1e-11, Identity=32%"; Hit description =UPI0000F34A83 related cluster
  Subcellular localization annotation: CTP_CleavageSite=22; ConfidenceScore=5.24e-01
MQAACNRAKWTHFSDSRHARMEAQARASRNRRAGCCMRATASPAPPPCLLAEPIPRLEATQRATQRRQLDTAANAAKGGPVVMTVADAREQRARRQPSSRPIRGQRESPLSRCEDNAPVIRSSNGSRTPNGCPANYSPRRINSAAGQVTLLAGATGDASPSPEQPHQKRDRERRIPRKGILPLEGTRLRASLLIRGSKAGRPKGSTAASDRVGPTPTTGQRLAPEGFTVASDAERGMTRGDRVRQITRRYFWACLWAPSRPLTNGARTSTRITRLQFTGDTMFGAHRGGSGAALANPAPAEPLTASTYQPENLSPDRLGLGLRPRKTTNSASPDPGLGLGLRPRKTTNSALARPRGSDSASADDLRLARPKGSDSASADDLRLARPRGSDSASADDLRLARPGGSDSASADDLRLARPRGSDSASADDLRLARPRGSDSASAMEDRLDPGFGGASTSPNLGHRPATSTGSAIITLPRADSGRREQDRSPGPSRGTCASPSTRLRLSSVRRSQVGAVLTEGVRSEADASCRRQGDRGLGLIEPVCTMPRRRSTSSRHCLIAPSEAVGLGKWRNNSLAA

SEQ ID NO: 50170 - protein, 367 aa, Zea mays
  Coding DNA Sequence Number=SeqID_6795
  Homolog annotation: Hit_ID=A2XKE5; Match level="QueryCoverage=24%, HitCoverage=24%, E-value=4e-09, Identity=33%"; Hit description =Putative uncharacterized protein
  Pfam annotation: Domain name=zf-CCHC; Domain location=31-48; Score =14.5; E_value=0.0097; Accession=PF00098.14; Description=Zinc knuckle
MTSSSGDGGQLGNPKTSPPVLKKEIDPARRFFCQICGGDGHHARDCFKSMCSQAKPKSKLHTIWIVAENVPGELQNYQTICELGSTIGVVEEVDMLSLDNKDIVRFKVHVKNVAMIPPIVDVGCLKIWEKARNDEETYGVDDNPSGILGGSSSQGNNSLRLYELLEKDMLDMKLDRSNEDKINDGFDDSEDDTLSSQDLGEYAKDDDTLTQECQNKGNNVVDEHMSVDVPQGVGKSRCHMFRNCGWGVQTEVDSNIHEESDTTSVHELENVMCKHPMLVGDDFNILRKEAKKNKPGFTKWSSLFNSIIDLHNLIQLELVSHAILEDKPNANHHNASNNNKEYARILQTRAIYIDNSIGLWLMIIKTK

SEQ ID NO: 50171 - protein, 209 aa, Zea mays
  Coding DNA Sequence Number=SeqID_6796
  Subcellular localization annotation: CTP_CleavageSite=32; ConfidenceScore=5.35e-01
MQDGSTLYPWLLFLSASASGFEDLINVGLTAQRSERSKSESMMCPSSRTRTFSGLRSRIFTQVLPDTLEIRNLEVFRCLAWCCDPEHIPSKKDLWITEPDQASAAEGKKALVYPVQIRWGPTALNLIPGAPQSPVGAGDQDKPDTPPSRRRCGDNPPPTQHAAIFEDPVIKTHNQRRPMHDRLGPLRRSDSPRELSQPWVLVDTEAWSS

SEQ ID NO: 50172 - protein, 150 aa, Zea mays
  Coding DNA Sequence Number=SeqID_6797
MGKNNKRKREPTPPSEEFGDSEYSEEEFSSEPEGSPAPVSPPASSDDSDDSQGIAAEVWTYIRAVERAGLEGSDESEYSSDEEDSDGGEEGEDDDDDDDDDDDDGGSSGGGDGDGRGGTKGSSGGSGDSTRGSSRGSTRGGGGGRGRASG

SEQ ID NO: 50173 - protein, 614 aa, Zea mays
  Coding DNA Sequence Number=SeqID_6798
  Pfam annotation: Domain name=OmpH; Domain location=75-439; Score= -18.5; E_value=0.046; Accession=PF03938.5; Description=Outer membrane protein (OmpH-like)
PSPPATVLVLAPPPPQAANTRDDPSPAAAEQEAVPYRGHRRRPRPGQPHASPAAAPTMPPPPPPHSGSDKGCVVVVSAALELVFFVMAGIVFVLDLRRQLVGLKSPNLGSRTGRGARALRRHHLQIRYCHHRRSCQPDRHHRGGSGSNSSRGGSSSNVCPASKATGRASSSSASVDVPSPPVAMPAGGSGSHRHAPTGDVARRSVSGYHGCSFLVGAKPTIGGGPGGSCCVCPHCADDAGAELAPSDPQDPPVTVEATPSGSQVPAGGPEVAALPTAAAGPTGIGCSVGGRRGGRVQLSRRKLRRVRRKPRRRLSGESGRRSKPSTNALATGAKDFKEEIRKVSDREEEVTRKERSLVKKKEHLDRKEEAVTALHDKLKAYNAVLEKQRDKQAAAEAKLQQELADKASDIARAEGNLKAREASLVKRTTDLTWQEEDLAFREEMWARRNKLLDELELEAEEKGKRLEGKVWTLEEQVRQFQAAHATQTAPGSQAVEVMRKTLDDLRAEQHAGAQRIAAWAGEASTTLVPLGMSPIPALVRSASISDALPILDSAADRLRRLDQILGARLEAEGSRLCRRPLSPVADTEDAAWKSVQDAVDAVVGRFQRDPADNE

SEQ ID NO: 50174 - protein, 61 aa, Zea mays
  Coding DNA Sequence Number=SeqID_6799
MTAPPTTRPVALTPRRDRRRFWQEKRATLCLRRDNRAKKGVRRLAPEGFTTASDAERGMTR

SEQ ID NO: 50175 - protein, 80 aa, Zea mays
  Coding DNA Sequence Number=SeqID_6800
MAVAVAAAGVVVANSPLEGHNNCQVAREEPKHNNHKKSITEMTRWLSRGSAKYKTCLLHVVASQRTRVALNSSQVIQRST

SEQ ID NO: 50176 - protein, 176 aa, Zea mays
  Coding DNA Sequence Number=SeqID_6801
  Homolog annotation: Hit_ID=Q6J9V9; Match level="QueryCoverage=66%, HitCoverage=31%, E-value=6e-12, Identity=41%"; Hit description =Putative uncharacterized protein
MGRAAKQRSPGRPSPSRRGGGGEDKDRRHLWQAKQATLHLRHDDRVKKGTGKGDTPKGILLREGSGPRAPLLIRGSKAGPSEGFNSRLRALGLRAHYWSEVRRLAPRKGSTAASGHSSSAPAIDQGFVGWPPKGSDSRLRARRARDDPGYVRYITKARATLPRYPRTFPRPTGTIL

SEQ ID NO: 50177 - protein, 43 aa, Zea mays
  Coding DNA Sequence Number=SeqID_6802
MGSLALCWAAWAGQPGWAGVLAIRPLPGPPGRPPGLFKVILGV

SEQ ID NO: 50178 - protein, 76 aa, Zea mays
  Coding DNA Sequence Number=SeqID_6803
MASLQRAFLNDNDFDAIPPDFFDGLADLLEILLANNPRLNDLPVGGERWGSQAGLGSAGRRLHREDPWEVVSRARR

SEQ ID NO: 50179 - protein, 111 aa, Zea mays
  Coding DNA Sequence Number=SeqID_6804
  Gene Ontology: Cellular component=ribosome
  Homolog annotation: Hit_ID=Q5N864; Match level="QueryCoverage=36%, HitCoverage=46%, E-value=2e-10, Identity=72%"; Hit description =Ribosomal protein-like
MPEVAAAMDMAKAKITSGFEGREATKRKLLVIINRRWQDQMEDRDRKLRIFSGNEHPFHDRPLEPFVMPPRQVREMRPRARRAMIRAQKKQQANRAKEEEDAKNAAAEVTA

SEQ ID NO: 50180 - protein, 106 aa, Zea mays
  Coding DNA Sequence Number=SeqID_6805
MEDEFRELKAEFPEEEDEIQEVVSEEESASVPAHQAWDDGGILRGDEFIIQARYLCQTIAHWEWRDGGSGVYPPGMWLDGGVPYSRVARTGSRSGGPVGMVDICKG

SEQ ID NO: 50181 - protein, 309 aa, Zea mays
  Coding DNA Sequence Number=SeqID_6806
MESHDLRAEWESRLVGGYEIDGFGYDYGAGDRVCEELLPCASPGAAPCTTTGRPSFRSSSSANLEPEGDPDDGGGDDSSSHDTDFSANPEPEGWVARPITRDAARGCHFHDALDTLLRRAFDRHTWSVEYRCVVYQHSRGVYPDRWEATCLVRCPENSLQGAEVCSEHYSISERDSAEAAMQDAARRALSHYCSVFGGAADGLDLKYYPRRPSGSTGGVIVSPVGEGNPRLSSTVNLAAVLNTELDHALDELSRARAEIALLRAERAERRHLDGGSPAPVGTQHPYRSPQRGHQSYGNPDCKTKINLEP

SEQ ID NO: 50182 - protein, 114 aa, Zea mays
  Coding DNA Sequence Number=SeqID_6807
  Subcellular localization annotation: CTP_CleavageSite=57; ConfidenceScore=5.35e-01
MLLPEAANSTAPASPLQRPIAPARPAALSAPPPARGGDPATQLARHGRLGRPRTLPRARPARPPPCPPGLGRPWPVQPPPWPVQPPWPQLARPFPRPGLARPYLRSPALAVIIR

SEQ ID NO: 50183 - protein, 216 aa, Zea mays
  Coding DNA Sequence Number=SeqID_6808
  Gene Ontology: Mol. function=nucleic acid binding
  Homolog annotation: Hit_ID=Q5NKP8; Match level="QueryCoverage=91%, HitCoverage=33%, E-value=6e-30, Identity=41%"; Hit description =Putative uncharacterized protein 9C20.4c
MDVLDELDGVLCRLEPDIGCNESCDVSDDEENQEGEINNNNAGDRMEEDDNSIICHKIVDNMKIPNVVCDTSSPLHVAHDQMEQIGASSEAKKRLNFNVDVINLSMPDRARPKGWTIKNMEERIMKLGAKGEKKKNRRCQLCGIADGHNIRTCLSVEENRARLARLANRKRGRPTRSRLNTKTTAPQWNETSTAKKHRIDKEVENESAAEHIGLGE

SEQ ID NO: 50184 - protein, 208 aa, Zea mays
  Coding DNA Sequence Number=SeqID_6809
MDVKDAEPPKIKWPDHYRPVNLALATSEVLIPCPEESLPKFVDFFEYRLWYINGRLTKMMASFAYIDIRRRVLALATLDRMPASVARCRSLTFGDDIPHGGRKPHRKRLHEELRDTVDEANCHTRVSGHQDPGANIITRRRPIPYTSTEEARQGNITRPLQSSTSFRKPATVYRKLQCRSPLTDRHRSKINQGPPYTDHSPTALAPFG

SEQ ID NO: 50185 - protein, 141 aa, Zea mays
  Coding DNA Sequence Number=SeqID_6810
  Subcellular localization annotation: CTP_CleavageSite=52; ConfidenceScore=5.07e-01
MAPATTLAKFVQRPARFRVQRRFGEIDGRNARSAGKGRPDTQPHMAVSRATRARAAGGETSYVPSVAGMNYPKIELSMKSVWCAAGVYADWFDTPILKNPDRDELREARCVVERETSQRDEALKSFSISQDLSQGQSKRAS

SEQ ID NO: 50186 - protein, 76 aa, Zea mays
  Coding DNA Sequence Number=SeqID_6811
MGGKGRLKEKLHLNNLWNVLCVINLRHRYPTDKQWNEVKVIIRIKASNRRRGNIFRTGPNRAEEPFQLLHAAAAKI

SEQ ID NO: 50187 - protein, 120 aa, Zea mays
  Coding DNA Sequence Number=SeqID_6812
MPGAQRFRSQAPNSEIRSVHCEEELKADRGKGFFIEVRGEDARVRSGGRARGGATGLARNRELRSYRWPTDPALSQEAATGDPDDEDVYADAIVDITPQFITLNQRSKSYKYHKNKHSSS

SEQ ID NO: 50188 - protein, 164 aa, Zea mays
  Coding DNA Sequence Number=SeqID_6813
MGVRATPRSTSQAGRQTPEAKCGVQPFPKPSRAGIAPGLRDAGQVCSCADDDVTVKQLAAAVLMMSPPPGRSANTEIRQVWHTLINYTGLLCVEPKFGRSRYIDCSRCLFTSVVPLHGFIAQQRAQPWNPVEPEFPKYASSYHAHQVAYCLPVEPEFPMSSNPI

SEQ ID NO: 50189 - protein, 164 aa, Zea mays
  Coding DNA Sequence Number=SeqID_6814
MRALEGQQLLEDDPTVVYLTAYLLTLDAQYDFLARHHRQMIARAEDVEKRNRKLHVDLTTAQARVAVLESREVIVVEALKQAMDEYVQKLMEAYLPLTMKKIPAPSLEVKEEAASTPPAPPPSKDLQEPIPLEEEFDPVLPSQSPLEEVININSLLTHPGDVSD

SEQ ID NO: 50190 - protein, 291 aa, Zea mays
  Coding DNA Sequence Number=SeqID_6815
  Subcellular localization annotation: CTP_CleavageSite=72; ConfidenceScore=5.41e-01
MPVQRYSLAECRFPALRCRSTPSGSAAIFVRLPPSFSGLRPAPSCSTTQRHRPALQRLHRPPSPTPPFHSPAANSRDKIPSWWISKIRWMDGQITDIRLAAAILRAGRRGVSSEAEVEFAFCCRGRARAKGSGEAEVVRPRPRAESEPWGRARRSFVVFQALARVRALGSGGAEFAVFRVLARVRALGSGGAEFAVFRVLARVRALGSGGAEFAVFRVLARVRALGSSGAEFAVFRVLARVRALGSGGAEFAVAPLARPDCLSDSLCRVALQSEWRRRRCPSVRLASGAVE

SEQ ID NO: 50191 - protein, 140 aa, Zea mays
  Coding DNA Sequence Number=SeqID_6816
  Subcellular localization annotation: CTP_CleavageSite=31; ConfidenceScore=5.05e-01
MDSTTASRKRASPPSPSDEIHFRTFGGNETMMMEKTGSTPELGRTWTVPPRQGKRRIASGKSQQSAVGSRCLLTWGRLMSSMMARKNSETGIPRPGFILTSNGDEEEMSPASVLGDPGGENFSSRGWGGIPQWGFPCCHL

SEQ ID NO: 50192 - protein, 1061 aa, Zea mays
  Coding DNA Sequence Number=SeqID_6817
  Gene Ontology: Mol. function=transferase activity, transferring phosphorus-containing groups; Cellular component=membrane; Biological process=two-component signal transduction system (phosphorelay)
  Homolog annotation: Hit_ID=Q2ACB8; Match level="QueryCoverage=93%, HitCoverage=96%, E-value=0.0, Identity=93%"; Hit description =Histidine kinase
  Pfam annotation: Domain name=CHASE; Domain location=143-387; Score =249.1; E_value=9.3e-72; Accession=PF03924.4; Description=CHASE domain
  Pfam annotation: Domain name=HATPase_c; Domain location=560-740; Score=131.2; E_value=2.9e-36; Accession=PF02518.17; Description =Histidine kinase-, DNA gyrase B-, and HSP90-like ATPase
  Pfam annotation: Domain name=HisKA; Domain location=448-513; Score =88.5; E_value=2.1e-23; Accession=PF00512.16; Description=His Kinase A (phosphoacceptor) domain
  Pfam annotation: Domain name=Response_reg; Domain location=916-1052; Score=98.2; E_value=2.6e-26; Accession=PF00072.15; Description =Response regulator receiver domain
  Pfam module annotation: Pfam domain module=CHASE::HATPase _c::HisKA::Response_reg; Domain location=143-387::560-740::448 -513::916-1052
MGILAKEQEWSVACGADRRACESCGGWGVEPGMGVGGGGGQAAVSAPAPVPAEEAGKDAEEGGGWTVKAKLIAAAVLVWVLGSAALWVFLHSYFRHAALRKAEEALVSMCEERARMLQDQFAVSVNHVHALAILVATFHYEKHPPALDQNTFADYTARTSFERPLLSGVAYAQRVVHADREGFERHQGWIIKTMKHEPSPAQDEYAPVVYSQETVSYIEGLDMMSGEVCGDVSRSFLADGLQLFSAGVGSEPGCVSVVLQEDRENILRSRASGKAVLTRPFRLMSNHLGVVLTFPVYHADLPSDAKEEDRVAATAGYLGGAFDVESLVENLLRQLAGNQELVVNVYDVTNISNPLVMYGSEVPLGNPSPSHICMLDFGDPFRKHHMVCRYRNKPHVPWSAISTPSGVFVICMLVGYIAGAAWSRYDNVKEDCRKMEELKKQAEAADVAKSQFLATVSHEIRTPMNGVLGMLDMLLDTDLTSTQRDFAQTAQVCGKALISLINEVLDRAKIEARKLDLESVPFDLRSILDDVISLFSSKSREKGIELDVYVSERVPEILLGDPGRFRQIITNLVGNSIKFTERGHIFVQVHLADHSNLATESKVEPVANGMNGHTDEKTAVATSVSLNTLSGFEAADSRNSWENFKLLLSYEKNEMPYESVSDKVTLVVSVEDTGIGIPLDAQAKVFTPFMQADSSTSRTYGGTGIGLSISKCLVELMGGQINFVSRPHVGSTFTFTAVLKRCDRSAIGDSKPVMLHPLPSSFKGLSALLVDRRPVRATVTKYHLQRLGIACDVVATIELALGVLSGRNGSSLTSMKQPCMLLIESDSWGFNIDVSLRSRLLEMKQNGHTHVLPKIILLAAAESGKLKEHYAVDSVITKPLKASALAACLFQTLGIKQSSNERSDNSGSLYGLLLGKNILVVDDNKVNLRVAAGTLKKFGAKVECVESGKDALALLQVPYKFHLCLMDIQMPEMDGFEATKQIRAMEAKANEQAVACDNSEIDGATRAARWRLPVLAMTADVIQATHEECTKCGMDGYVTKPFEEKQLFQALQKFLDPGMSC

SEQ ID NO: 50193 - protein, 158 aa, Zea mays
  Coding DNA Sequence Number=SeqID_6818
MDGDATAEKFLAAASFPDKSARSEYSEEDARGDPRATEPPSEKVCVDPSSPAKRLSSSGRRAAVGLVQATPPLTFADRRPGRSVRRRRRRSSLSAGTFGLGSRSKGGHPFADRSTLSRSASFEVQGPRCFLSAMNNLISPIRNKTAPNFFMYAPWLAK

SEQ ID NO: 50194 - protein, 119 aa, Zea mays
  Coding DNA Sequence Number=SeqID_6819
  Homolog annotation: Hit_ID=A2XLH1; Match level="QueryCoverage=99%, HitCoverage=52%, E-value=1e-27, Identity=56%"; Hit description =Putative uncharacterized protein
HGAVDTGAVEDGSNPRNAKKLRPDASSVASFLDKYRREFSVVVPFAINHDRKQQDYCSTTNEADANKSVEFYDFLQVNANSSDTKCGSSIEEQEENRDDQAEGQVQFIDFLEVGVSHPQ

SEQ ID NO: 50195 - protein, 240 aa, Zea mays
  Coding DNA Sequence Number=SeqID_6820
  Gene Ontology: Mol. function=DNA binding; Cellular component=nucleus; Biological process=regulation of transcription
  Homolog annotation: Hit_ID=Q10DV5; Match level="QueryCoverage=98%, HitCoverage=99%, E-value=4e-60, Identity=52%"; Hit description=ZF-HD protein dimerisation region containing protein, expressed
  Pfam annotation: Domain name=ZF-HD_dimer; Domain location=9-66; Score= 90.1; E_value=7.2e-24; Accession=PF04770.3; Description=ZF-HD protein dimerisation region
MDQQQHQERPWEVYRECMRNHAAKLGTYASDGCCEYTPDDGQPAAMLCAACGCHRNFHRKAFLADAAAGAHGGAHGAMLPSPGASPGYGMHHMAIAAAGMGGDAGAHGSGSGGRRRTRTKFTDEQKERMARLAERLGWRMPKREPGRALGDDEVGRFCREIGVTRQVFKVWMHNHKSGGGGSQGEGASAGAAGAAQTTSSSTTRGGGGGGVVGGGGSMSTAMMGADVEDDEEVRGSEMCM

SEQ ID NO: 50196 - protein, 296 aa, Zea mays
  Coding DNA Sequence Number=SeqID_6821
MQPGRTPPPAVTQDGDLRLDGGGKRDGLRPLPLPQPQGFSSPRLGRGVCRVGVGPCVGGGPLLHSVMGGGAVVVRGAGSCSVSGFRTRVASEPLAAPASATAAGRGSSAGVIARAGHGLTSNSTAFCPSLPYEFRHGRGPPGSSTRPEVSAAAVRPPGAEVVVVAAAGAGDGVPFVGLPLLRRPSPRSGVVRTCGGGTGVPFVTALRMPPGCPSAGPTPESISRGLGPGWRPWKMVGRGPRGNRPSRLLGPDSRRSPWTASPSEAGSDLTEGVVDAEGAIPPFQREDPILQDQVSL

SEQ ID NO: 50197 - protein, 123 aa, Zea mays
  Coding DNA Sequence Number=SeqID_6822
  Subcellular localization annotation: CTP_CleavageSite=35; ConfidenceScore=5.08e-01
MAHRTGSGAPGRTADEPATLRNSRARFAIIHRTVRCTSGATALCASGRLCRDEQWMSEVRGHRTVRCNKTTKTPTVDQLRTLTVALMWRAPDSTQWLSGDAPDCPVRPSLAAFTNGYGSGWGL

SEQ ID NO: 50198 - protein, 361 aa, Zea mays
  Coding DNA Sequence Number=SeqID_6823
  Gene Ontology: Mol. function=GTPase activity; Biological process =immune response
  Homolog annotation: Hit_ID=A3B6T9; Match level="QueryCoverage=60%, HitCoverage=29%, E-value=7e-47, Identity=72%"; Hit description =Putative uncharacterized protein
  Pfam annotation: Domain name=GBP_C; Domain location=133-360; Score= -150.8; E_value=0.094; Accession=PF02841.5; Description=Guanylate -binding protein, C-terminal domain
MGRKWNELLSSAPWRTGEAAEDEDAARMSREGKVSVTSNPEEMPTMSVPWSRRPDLDLTIDDFEEDEIDPELRYSFQRNSRGPCYASDTFGVRRADDTVLPLLQEFYLDLAEDNRKITPRDYLELALRPVQGGGRDISAKNALLFVVLYLKFSANIICCRLLLKHIYTLNSLMACTNYVCPFMTALNVFAVGAGSARSKFEKLLHSSLKKAFEDYKRNAFLEADLQCSNKVQNMESKVRAACNSSNEKLDDIVRLLDDLLKEYESTAYGPGKWKRLATFLQQCLAGPVLDLFRRQLEHIDAERNALRLKCNSRDVELSEKDKNVGTHVLNVKNVGTVELNVQPTQTHAGHISSTATCPRRT

SEQ ID NO: 50199 - protein, 1611 aa, Zea mays
  Coding DNA Sequence Number=SeqID_6824
  Gene Ontology: Mol. function=translation initiation factor activity; Cellular component=eukaryotic translation initiation factor 3 complex; Biological process=translational initiation
  Homolog annotation: Hit_ID=A3BG67; Match level="QueryCoverage=54%, HitCoverage=93%, E-value=0.0, Identity=72%"; Hit description =Putative uncharacterized protein
  Pfam annotation: Domain name=AAA; Domain location=409-599; Score =185.6; E_value=1.3e-52; Accession=PF00004.20; Description=ATPase family associated with various cellular activities (AAA)
  Pfam annotation: Domain name=PCI; Domain location=1344-1474; Score =123.9; E_value=4.8e-34; Accession=PF01399.18; Description=PCI domain
  Pfam annotation: Domain name=eIF-3c_C; Domain location=1475-1611; Score=67.0; E_value=6.2e-17; Accession=PF05469.2; Description =Eukaryotic translation initiation fac
  Pfam annotation: Domain name=eIF-3c_N; Domain location=731-1338; Score=1034.9; E_value=0; Accession=PF05470.3; Description=Eukaryotic translation initiation fac
  Pfam module annotation: Pfam domain module=AAA::PCI::eIF-3c_C::eIF-3c_ N; Domain location=409-599::1344-1474::1475-1611::731-1338
MVAHHQKTVIGGGALESPPDLVNFLGGIDPCDGRQSGSRELWNDIHCRLVEPAAWDVLENFEQRWKKQDKGDNLLVALNRAWAELPENNGWANPRSGEGGRWWGLDGQGDRGMAFPVLDEMPHDGSEAVIVPFSEGFDYPMFDEMSAEEVVWDAEVLLGCDSRGLCQRLAHEVGDQMHSACEKDVVPDAPWMFVGMSQQASTHPVFREMGPKVAWDEEMQTESHMHEGLLKQLAQGGEALKESANKDDVGDDVGALRGEEALVESTKKDSDVEDEASRPHPPREVMPDDSLLVDEPDEGPARSWMRSGRGAMPWLIGCLDMHGPAAWGLSVGASGWGHQGGISTSLMPRMQTTGPSSKGGADIQPMQVDENVSYISGLSEYIDALQEMVFFPLLYPIFFANYHITSPRGVLLCGPLGTGKTLVARALACVASKASQKVNFDMRKGAVVLSKWVGEAERQLKLFFEASQKNQLSIIIFDEIYGLAPVRSSKQEQIHNSIVSTLLVLMDGLASRGQVVLIGATNRIEVMDGALRKPSCFDHEFYFPLPDSEARAEKLDIHTKKWKDPPPRKLKMELAASCVGYCGADLKALCTEAAIRVFRKTHSQVYASDAKFSYENFNGSTPILYIVKDMNEPSIFNGSEVLMPKDAMHYGDVEHREMHTIHGARLKLRKQQNHGIPFLGTGTCFLLRNGTSVPGDSESEEEEVEEVESEQGSDSDDDGGRGGAGRGAQNRYLKNQEDDSDESDTGHRVIRSLRDKRNEEMRSIVDQMRNAMKINDWVSLQESFEKLNKHLEKVVRVNESTEVPKMYIKALVLLEDFLAEALANKEARKKMSSSNSKALNAMRQKLKKNNKQYEEQIQKCREHPESFEDEAADDKDVDDDDADESDAEIEDPDKIAMSESEEEQDEEDDDKDGWEQKRSKKDKLMDKQFLKDPSEITWDIVDKKLKEIIASRGKKGTGRIERVEQLTFLTRVAKTPAQKLEILFHVISAQFDVNPSLLGHMPVNVWKKCVNNMLLVLDILQQYPNIVVDTSFEPDENETQKGADYNGTIHVVGDLVAFLERLDSEFLKTLQCTDPYTKDYVQRLREEPLFLVVAQNVQDYLERVGNFKAAAKVALRRVELVYYKPQEVYDAMRKLAEQPEDCVDDDDAEAGDEHKAVDDNRGPSPFVVIPEAVHRKPTFPESGRTLMDGLMFLIYKYGDERTKARAMLCDIYHHAISDEFSVARDLLLMSHLQDGIQLMDISSQILFNRVMAQLGLCAFRAGLINEAHGCLTELYSTGRVKELLAQVLMQSLSLQERLERRRQMPYHMHINLELLEATHLICAMLIEVPNMAASTYDKRRPMSKTFRRLLEVSERQTFVGPPENVRDHVMAATRALNKGDHQKAFSVINSLEIWKLLRNREHVLEMLELKIKEEALRTYLFSYSSSYESLSLNQLTTMFDLSEQHAHSIVSKMMMHEELHASWDQPTKCIVFHSVDQTRLQGLLFQMADKLSVLVEINERAYEARTGGTLEGVPPRRRGEGQDNMGKWQDNFVSSQGRQGGGNRFGYSGRGAISGQSGGGHQRDRGNQGYRGGYGGVSRFQDARGRNQSIPSGRGGDGGARMVNLNRMGRV

SEQ ID NO: 50200 - protein, 314 aa, Zea mays
  Coding DNA Sequence Number=SeqID_6825
  Gene Ontology: Mol. function=hydrolase activity, hydrolyzing O -glycosyl compounds; Biological process=carbohydrate metabolic process
  Homolog annotation: Hit_ID=Q84YR7; Match level="QueryCoverage=20%, HitCoverage=5%, E-value=2e-20, Identity=79%"; Hit description =Putative 1,4-beta-D xylan xylanohydrolase
MAWIRKMNFLQRIHVGKWMLMGINGMKLKQHSSLKSSHPKLLHMFKALLQVLILESWTFIYMLSKKIDKFFQFMTLVIVSLVVDKNQWVNCGQVDADGDQWYEIKAAFKLEKQPSKVTAYVQGPPAGVDLRVMDFYIYAVRENRQGWSDMGIGLLCGIEKFDASRGFRMSTYVYWCIHQLPYEDMTPFQAAVAIVQKIDWIYMGLTLLVLKEKERAWLAGPVHGPSRDADTKGHSEHERGIKENIQNSFPVVFLVEKRPGEFVGVSRPVPRRRWPRDVTSGIRGFGSSAVRCGHALSTAVLFGGHDFAMLEFLI

SEQ ID NO: 50201 - protein, 101 aa, Zea mays
  Coding DNA Sequence Number=SeqID_6826
  Gene Ontology: Mol. function=24-methylenesterol C-methyltransferase activity; Cellular component=integral to membrane; Biological process=steroid biosynthetic process
  Homolog annotation: Hit_ID=O82427; Match level="QueryCoverage=48%, HitCoverage=13%, E-value=3e-14, Identity=77%"; Hit description=24 -methylenesterol C-methyltransferase 2
MGSIRRDKVQDKDKQYWSFFRRPKETTTKAASAEKVPAVVDTFYNLVAEGRRSGLTLEELEEDADDDNHQRVIICRDSESDSLASGGRVVVGKRKQEGGDE

SEQ ID NO: 50202 - protein, 279 aa, Zea mays
  Coding DNA Sequence Number=SeqID_6827
  Homolog annotation: Hit_ID=Q6QP51; Match level="QueryCoverage=81%, HitCoverage=90%, E-value=9e-14, Identity=66%"; Hit description =Putative growth-regulating factor 1
MTRLLDCRTSVATRGSPAHDPTVPIEHNDHGDQERGYFERDPSPRRKQASSPPTDQGFEGWPLGRAGPSEGFDSRPKARRARDDSGYVRYMAEARATLPRSRPRLPRDAISPRPSPTSGGNSSPGLIHASPEGLLKRRVHPRLARSPARAGFVMKQPWPNRLTNRPYHRRIQCGDRLTPYPDTRASVGKVEDEADNSQVQPRVQQEAPPRPTPGLGLNLGLGRSFTPRPTPGLGLNLGLGRELRPHPTSASASGGVSALPDLGLGPTAPRGIHHYPTPS

SEQ ID NO: 50203 - protein, 251 aa, Zea mays
  Coding DNA Sequence Number=SeqID_6828
  Gene Ontology: Mol. function=protein serine/threonine kinase activity; Cellular component=integral to membrane; Biological process=recognition or rejection of self pollen
  Homolog annotation: Hit_ID=Q8LJZ0; Match level="QueryCoverage=93%, HitCoverage=28%, E-value=7e-79, Identity=61%"; Hit description =Receptor-like kinase
  Pfam annotation: Domain name=B_lectin; Domain location=78-189; Score =134.0; E_value=4.2e-37; Accession=PF01453.15; Description=D-mannose binding lectin
MESPTNRFLNLPAMIFPVLLLFLRGSAAGIASDTLSSDGNITDGEILVSSGSSFTLGFFSPTGVSAKRYLGIWFTASPDAVCWVANRDAPISNTSGVGVLAVGSTGSLRLLDGSGQTVWSSNTTSSAPAVAQLLESGNLVVRQLSSGNVLWQSFDHPSNTLLAGMRLGKDPKTGAEWSLTSWRAPNDPTTGDCRRVMDTRGLPDCVSWQGNTKKYRTGPWNGLWFSGVPEMASYSTLFSNQVVVVMTRGRG

SEQ ID NO: 50204 - protein, 1014 aa, Zea mays
  Coding DNA Sequence Number=SeqID_6829
  Gene Ontology: Mol. function=translation initiation factor activity; Cellular component=eukaryotic translation initiation factor 3 complex; Biological process=translational initiation
  Homolog annotation: Hit_ID=A3BG67; Match level="QueryCoverage=84%, HitCoverage=93%, E-value=0.0, Identity=67%"; Hit description =Putative uncharacterized protein
  Pfam annotation: Domain name=PCI; Domain location=639-769; Score =125.1; E_value=2.1e-34; Accession=PF01399.18; Description=PCI domain
  Pfam annotation: Domain name=eIF-3c_C; Domain location=770-905; Score= 52.6; E_value=1.4e-12; Accession=PF05469.2; Description=Eukaryotic translation initiation fac
  Pfam annotation: Domain name=eIF-3c_N; Domain location=45-633; Score =889.4; E_value=1.7e-264; Accession=PF05470.3; Description=Eukaryotic translation initiation fac
  Pfam module annotation: Pfam domain module=PCI::eIF-3c_C::eIF-3c_N; Domain location=639-769::770-905::45-633
MASRFWGQGDSESEEEEVEEVESEQGSDSDDDGGRGGAGRGAQNRYLKNQEDDSDESDTGHRVIRSLRDKRNEEMRSIVDQMRNAMKINDWVSLQESFEKLNKHLEKVVRVNESTEVPKMYIKALVLLEDFLAEALANKEAKKKMSSSNSKAFNAMRQKLKKNNKQYEEQIQKCREHPESFEDEAADDKDTDDDDVDESDAEIEDPDKIAMSESEEEQDEEDDDKDGWEQKRSKKDKLMDKQFLKDPSEITWDIVDKKLKEIVASRERKFDVNPSLLGHMPVNVWKKCVNNMLLVLDILQQYPNIVVDTSFEPDENETQKGADYNGTIHVVGDLVAFLERLDSEFLKTLQCTDPYTKDYVQRLREEPLFLVVAQNVQDYLERVGNFKAAAKVALRRVELVYYKPQEVYDAMRKLAEQPEDCVDDDDAEAGDEHKAVDDNRGPSPFVVIPEAVHRKPTFPESGRTLMDGLMFLIYKYGDERTKARAMLCDIYHHAISDEFSVARDLLLMSHLQDGIQLMDISSQILFNRVMAQLGLCAFRAGLINEAHGCLTELYSTGRVKELLAQAACRSLELKLESSSQPCANAALSLQERLERRRQMPYHMHINLELLEATHLICAMLIEVPNMAASTYDKRRPMSKTFRRLLEVSERQTFVGPPENVRDHVMAATRALNKGDHQKAFSVINSLEIWKLLRNREHVLEMLKLKIKEEALRTYLFSYSSSYESLSLNQLTTMFDLSEQHAHSIVSKMMMHEELHASWDQPTKCIVFHSVDQTRLQGLLFQMADKLSVLVEINERAYEARTGGALEGVPPRRRGEGQDNMGKWQDNFVSSQGRQGGGNRFGYSSRGAVSGQSGGGHQRDRGNQGYRGGYGGVSRFQDARGRNQSNPSGRGGDGGARMRLIKYTNTNLKYGAESSTANDIVSTEKSFVALIKVDSSTEATDGASRSACIRLRQVQKDVDAAPASQTSLGPWKKKEARELLRTDGRTSCGSGLGTERLRPIDFLEWDGSGSEENIS

SEQ ID NO: 50205 - protein, 147 aa, Zea mays
  Coding DNA Sequence Number=SeqID_6830
MGKNNKRKREPTPPSEEFGDSEYSEEEFSSEPEGSPAPVSPPASSDDSDDSQGIAAEVWTYIRAVERVGLEGSDESEYSSDEEDSDGGDEGEDDDDDDDDDDDGDDSGRGGGDGGRDSTKGDSRGSTKGSSRGSTKGGGGGRGRASG

SEQ ID NO: 50206 - protein, 345 aa, Zea mays
  Coding DNA Sequence Number=SeqID_6831
  Homolog annotation: Hit_ID=Q6QP51; Match level="QueryCoverage=61%, HitCoverage=69%, E-value=2e-09, Identity=31%"; Hit description =Putative growth-regulating factor 1
MAAPRTTRPVTLTLRQDRRHLWQAKQVTLHLRHNDRVKKGTGKGDTPKGILLHEGSGLRAPLLIRGSKAGPSKGFDSRLRALGLHAHYWSEVRRLPPRKGSTAASGHSGSAPTTDQGFVGWPPDGFDSRPRARRVRDDSGYVRYITNDRATLPRGSGAALANPAPAKPLTASTYQPENSEPDYAPGQRPENSAACAAPTAVPPARVRLTAAKSSLGRHRNLLARPQGSDSTSTPEDGLRLARPQGSDSTSTSDDGLCLARPPGSDSTSTPGRRSPPRPTPGLGLNLNLRTTVSTSPDPRARTQPRPRRSHHLAPADHTTRGAIITLPLASPGYGEQDRRPIWLTP

SEQ ID NO: 50207 - protein, 248 aa, Zea mays
  Coding DNA Sequence Number=SeqID_6832
MPSHFPHASLPSAFRAPGWGAPAAFPHQWAVWWRSEPGCSLRPTLSFKDLRHPCWGGGRDEPELYLPYGPTGHLLLQHSWERALTGLAEGADFDNTWPSGRKHRRLQCAWFAGSAGSGTASGAISHRWAECGYLPAVRVAVASRAPGDRPRRRALLGRRSCSWAVLPLLRHDAFARGSVLARLGGLDWGSAGGQVAGEVLVADEIAAAIYAPGLWLFGFDSLSLPLEWRRGRGPCHSSVYPEVVAAAV

SEQ ID NO: 50208 - protein, 531 aa, Zea mays
  Coding DNA Sequence Number=SeqID_6833
  Homolog annotation: Hit_ID=Q6QP51; Match level="QueryCoverage=38%, HitCoverage=92%, E-value=3e-38, Identity=47%"; Hit description =Putative growth-regulating factor 1
MDGGNNPRSAPVAAGGDHHSLRKRRKPPVVIPEIKPSVLPPLVRRHKDGRDVLLRVPLPQLEGAATGPHYHTDLLRIRRQGKELRREEVGPQILVNFDPQKALTNRREDGCLRNGVGVEVVQLHPVVVQERARKAARWHSKPPLMEGDEANHVPRRQGRDGLARGHPLWLRPTREGTEQTIGDEGLQILHDDGGGGPRVARRDNGHPVSHHRTEVVEAEGMRLAPRKGFDSRLEHSGFKPITDQGFEGWPLGRVRQPPQSTRAPRPLLIRGSKAGPSEGFDSRPKACRVRDDSGYVRYMAKARATLPRYPRTFLRPAGMICNGIPSEGGIDPSDPIEGVRVRRITRRGRLTPYPDTRASVGQAEAKTDNKSRSTTEFGLGRNRKLRLARPQAPASGGGLRLARPPDSASTSVSGGIASSPDPGLGLKRSLRLARPWARTDRANRGYIITLSLASSGYKEQDRRPIWLTPAAGLRRFSDGHAITCTGLKLSPDSHVGMYTRLRHFSAGHDNTRLVPPLVFHPAPTHLGRGTQ

SEQ ID NO: 50209 - protein, 99 aa, Zea mays
  Coding DNA Sequence Number=SeqID_6834
MTAGLCVTVVDDEVKVMWVRADGVSSVIRKRHCAKSLVGAVNGLPSRNINRLRGRGAPDVRSRPGPAAWKAPDPVPSERTSGIDPGPFQMWFGRFTTES

SEQ ID NO: 50210 - protein, 966 aa, Zea mays
  Coding DNA Sequence Number=SeqID_6835
  Subcellular localization annotation: CTP_CleavageSite=19; ConfidenceScore=5.29e-01
MPSSSSFAAATPPAVPSPPAAASSETLSSLLAEELRAGDSVDFGVSRMSSKRMIGDEVAQFGSCTFTPKTGKTTMQVVELVPCARNKWGNWNEFWFYVAEGTVEGHEGLPVSEMCSHFYSAYPPFEVAEENVDEGALRCAAGLSSGRDLVEEFVAYGVWPLAHGWVLGEVCPRQMPFYGGRVVRSPAFALNLQNRDPAAFVREAEDGAVRLVGRYVPKTEGQRSWDIRGSNDRLNRVFELNQLPYDGYPGQDDADRRGKKPAVETGDDPAPAAAPSSKKRKLGTAMGGLGVSDGFARELMRTCAAPGERMSSPELRESSARMLRVTGGCWPRNVPIPRAAGRDFFTSRMVRQWRVFPYGRNIAAVVSAVMDKDRQGAAQKRQAAVRLVEARPKRQRGSAKAAAPGGGRPPPAGQLAMVAPAAATTTAVAVPKAKGGALSAGGEVSALAIVMDEAGAATRRLKEATEALSQVADFASRTASGALMAAMAAEVERLRTQHADAVREKSAADSKCRKLADKVATLEGEKPDLRRQLAGERRETNEALVKAQAAQAEANLARAEGNLARERAEQLQERLTALESCVERAEAMSRAEAERTRQLLVDTYRGLGAGTGDFEVPDREPGLRCLEWVQEELQALPTVVEGFMAYASLVTCEGAMNALSREGYRHFEVFDQADKDFERDIFKVEDPVVKESAGALYDRMWGLHGREVVRERAETTRAQALRGERVDDFGALNSMLSDPEPTPGTAEDAPGAPASAAAGEGLPPEVAEGAPDALAAAAPSAEDPAAVAAEAAAETTAEPTAEAPATSEPSQVQDFGPAHTTATTKFLAALTAEDGNECGGSASVCFDCADSGSSVEWTEESSEDLDYFAALDVAAAEASPRVADAGDAPGPSTGRRRRRAIAKRRVSGAEGARLRVSGAGRQELLSLPAAVNTGEGELRSLFAGEELRIMLFNYREMGIIPKVEPM

SEQ ID NO: 50211 - protein, 129 aa, Zea mays
  Coding DNA Sequence Number=SeqID_6836
MACHLCPLFNLRLLLLLGAVLGNADLGRGGGAEASDRAEPVGVKLTTVSHGLSRVQPRAQQGAPPRPTPGLGLSLGLGRRSPPRLTSASASGGVTTSPDLNLGLRRSHRLARPQPRTDYATGDTSLPYL

SEQ ID NO: 50212 - protein, 63 aa, Zea mays
  Coding DNA Sequence Number=SeqID_6837
  Subcellular localization annotation: CTP_CleavageSite=46; ConfidenceScore=5.34e-01
MAHRTVRCATGHFQRLVLTASVGLMAHRTVNSSLSGAHRTVRCGVRCATKIQLQTLRSRVSGK

SEQ ID NO: 50213 - protein, 99 aa, Zea mays
  Coding DNA Sequence Number=SeqID_6838
  Subcellular localization annotation: CTP_CleavageSite=63; ConfidenceScore=5.00e-01
MSGASAKREIGTSEMPATSHGKAPSGESANKVKGSPSHNKSGRSGDKKKMMRKSEADRQSGPAAGTIGSSTSPDPGLGLGLSPGRRRTPLRPTQGSDSG

SEQ ID NO: 50214 - protein, 125 aa, Zea mays
  Coding DNA Sequence Number=SeqID_6839
  Gene Ontology: Mol. function=kinase activity; Cellular component =ornithine carbamoyltransferase complex; Biological process=amino acid metabolic process
  Homolog annotation: Hit_ID=Q6QP54; Match level="QueryCoverage=52%, HitCoverage=36%, E-value=2e-21, Identity=60%"; Hit description =Putative kinase
MAPPVDVAGLRPRLGDVEAPPKPRSSLSSVAEVESKPLVGRSGVRRLPGLIPSPSTGSGGAEFVVFRDFSPSPSPGSGRAEFIVFRDFSPSPSPGSGGAEFAVFRGLARVRALGRAERSSPSSGA

SEQ ID NO: 50215 - protein, 220 aa, Zea mays
  Coding DNA Sequence Number=SeqID_6840
MAERYQLPRSCVPPTMRRKDGGYPPSGGLEGGKTRYIREREDMVAFQGGHPPFKGDSPYLRLQPSWAESSPTHSKVLPYDAGAGPHTSCKPARSGRSQTAARGGASGRRSGRRFAFTIITASKKGPGKGDTPKSILPHEGTRLRASLLIRGSKAGPSEGFDSRLRSRGLYTHYWSEVQRPAPRKGSTAASGYSGSAPTTDQGFEGWPPKGSQPPQTQSEG

SEQ ID NO: 50216 - protein, 156 aa, Zea mays
  Coding DNA Sequence Number=SeqID_6841
MGCPSSTRDGWSGGVNLVARPLLPTLIGLLVRVVSWCRWRRLRSFDEILSPFVGGDVEVRLPEQLPGGSRRLLKYGSDEGRIIGSPIEVLNHRCFRNLEDTISHGLKPFEVRSENLIPSAPDGFEVQWLHRFVGERLEVGNEAPTEVAPVVDAVSR

SEQ ID NO: 50217 - protein, 228 aa, Zea mays
  Coding DNA Sequence Number=SeqID_6842
  Subcellular localization annotation: CTP_CleavageSite=7; ConfidenceScore=5.33e-01
MRRWAPSAVADGNPGSGRNPKASTEPRRAPLTLPQLGRSLQGPGPNRGYLLGAIANSSLSMLVCSLDTSSLHPKGGGQSCASDNPRFGSREWTLVSWGGPEPSSRSAWSRTVSQHAPPLCDRAMLEASSGQPHQRQRPPLHRRLASGGDHLYAKRLTSDGDHLCTSNGDHLRSERLASGSDHLRVCAMVKRPSLPSPYWSEDKAIQAMELEARRQVALAVWPVPREST

SEQ ID NO: 50218 - protein, 76 aa, Zea mays
  Coding DNA Sequence Number=SeqID_6843
  Homolog annotation: Hit_ID=Q7XBE0; Match level="QueryCoverage=67%, HitCoverage=9%, E-value=7e-09, Identity=44%"; Hit description =Putative gypsy-type retrotransposon
MAGGQHQLVGGASLEMRRGRKMEYLDILLKDTLEITEAKVLLAEIHLLKERVVSPTQLGVTNKRIPAVDFGEPTGK

SEQ ID NO: 50219 - protein, 115 aa, Zea mays
  Coding DNA Sequence Number=SeqID_6844
MAEVKVMRARADRPGAVKGECWVLTDGSEQPGRGGVDRVAGVVEDWRDTRLIVEDVHEVRCSRQVWWFGPQNHPALQMPGFGEFGSQNSVVAVPDRTDGGTRRDRGGCVKAKHSV

SEQ ID NO: 50220 - protein, 97 aa, Zea mays
  Coding DNA Sequence Number=SeqID_6845
IGRAGNDGVFAKVCLGLKKTYGSSEMDFVEKYTSLAWTFFLNATRNKAIAPSRLSPLWECATDAYLIWMHRCSQKSKNSELVKLYPRSELASFTSLN

SEQ ID NO: 50221 - protein, 215 aa, Zea mays
  Coding DNA Sequence Number=SeqID_6846
  Subcellular localization annotation: CTP_CleavageSite=48; ConfidenceScore=5.44e-01
MPAFPRKPFWTPHGSSLLMGPCRNGYNMRRWAPSAVADGNPGSGPNPKASTEPRRAPLTLPQLGRSRSQSRLPPGGHRQLFLKYAGLQPRHIEPTSQGGARNGLHYNSRATLEASSGQPHQRQRPPLHRRLASRGDHLYAKRLTSDGDHLCTSNDDHLRSERLASGSDHLRVCAMVKRPSLPSPYWSEDKTIQAMELEARRQVALAVWPVPREST

SEQ ID NO: 50222 - protein, 156 aa, Zea mays
  Coding DNA Sequence Number=SeqID_6847
MGCPSGTRDGWSGGVNLVARPLLPTLIGLLVRVVSWCRWRRLRSFDEILSPFVGGDVEVCLPEQLPGGSRQLLKYGSDEGRIIGSPIEVLNHRCFRNLGDTISHGLKPFEVRPENLIPSAPDGFEVQWLHRFVGERLEVGNEAPTEVAPVVDAVSG

SEQ ID NO: 50223 - protein, 297 aa, Zea mays
  Coding DNA Sequence Number=SeqID_6848
MQPGRTPPPAVTQDGDLQLDGGGKRAGLRPLPLPQPQGFSSPGLGRGVCRVEVGPRVGGGPLLHSVIGGKGGRRPWRWQLHRAWLLDVSGFGAARGAGVRHGSLKSIRPEVSAAAARPPGAEVVVAAAAGAGGGAPFVGLPLLRRPSPMEWGCSYLRRGNRSSVRNGTLNASVFVHCGCRGLNMYHYVSPVDYLNRFTKHESPRVKVTSEPGCPSAGPTPESISRGLGSGWRPRKMVGRGPRGNRPSRLLGPDSRRSPWTASPSEAGSDLTEGVIDAEGATAPFQREDPSLQDQIVL

SEQ ID NO: 50224 - protein, 78 aa, Zea mays
  Coding DNA Sequence Number=SeqID_6849
MLVDLWFGGLGLKTTQRYRCLVLLSLGLKTRWWRFRIEPMAARGVIAEGASRRSIPCEGRGRWIENLGVGPFRPRWSG

SEQ ID NO: 50225 - protein, 23 aa, Zea mays
  Coding DNA Sequence Number=SeqID_6850
EQATVDSKVQQVEVAEQELIESK

SEQ ID NO: 50226 - protein, 130 aa, Zea mays
  Coding DNA Sequence Number=SeqID_6851
MGCAGVQREDLRRRHPPQRTHRRRDCALCLHPPQQVGSAELAFPPTAGGAQSCRGGALPPVLGFKDVHQPRTGGERAGLRLRLLPELVTRFFLQHSKKGMITSLVKAGGELRVHGEREMCPWAISKYFGD

SEQ ID NO: 50227 - protein, 128 aa, Zea mays
  Coding DNA Sequence Number=SeqID_6852
MGKLRRRKAETLKAKGRRELEGERAPRVGEKQGMAATRGMNPLLKADSPARAPKRHGRVSPDAHQGTHPMAWGPTPHVIQLARWCEEGKSLREERATAPRRTENSPEYGSGPLGKHSGPLGWGSDPSE

SEQ ID NO: 50228 - protein, 225 aa, Zea mays
  Coding DNA Sequence Number=SeqID_6853
  Pfam annotation: Domain name=zf-CCHC; Domain location=193-210; Score =25.0; E_value=0.00025; Accession=PF00098.14; Description=Zinc knuckle
MASEAGLGCCQPHSVEWHSSRSSAGGAVILSGRARVRIRCQAILALNAPAIRSVGVAIWPRLLLGEDWASGEPKLCADGGYQLRLGVLGVPLIMVPDTNESETTKQKNQILFSGIKSQWSPQEQLIANALSDDELPGFPKRKHHKDAELQKEAHECYIDGWTITCTQFPPRRRIRSKKQRWKHGKSQEITSRKSCYLCGREDHYLRNCPEKSSLPNTLGIKLSQS

SEQ ID NO: 50229 - protein, 308 aa, Zea mays
  Coding DNA Sequence Number=SeqID_6854
MNKTPALKVPLQTELRFCLRGYEQPPTIGGPTEPVPRLEATLRMTQQCQPGTSVTGQSAAGEGVTVDTARNGPAVMAVAGGRKQRPSRQPSSRPLLGSERTLSHGVKTARPCSVPRMARARATATPRTTRPVALTLRQDRRHLWQAKQATLHLRHNDRVKKGVPRHSIPYPFPLPLSLSYNRDRERGYPERDPSPRRKRAPSPLLIKGSKAGPSEGFNSRLRALGLRAHYWSEVRRPAPRKGSTAASGHSGSAPTTDQGFVGWPSKGFDSRLRRRARDDPRYVRYITKARATLLRYPRTFLRPMGTIL

SEQ ID NO: 50230 - protein, 353 aa, Zea mays
  Coding DNA Sequence Number=SeqID_6855
MACGCLGGATASVRVSARLFRWHGGMWVRRHCGGVRYWALIKLDSDGSTTQDSDTDVKTESSVSSIERSKKEDTEPTSLNRVGADESRGRGGSRRVGSHGGERRPGGALLGGLGVGVWASWAKSGLGRHRRLRLARPQGSNSASAPEDDELHLARPQGSDSALALEDDELHLARPRARTRPRPRKTTNSASPDPRARTQPWPQPTVSASPDPGLGLDLDLGRQTRSQPRRSLRLAQPRARTDHVTRGAIITLPLASSGYGEQDRRPIWLAPVKQIMMAPRVLHDDGGSQPHYRSKETSARTRQPRQLSFRKAPALLRRPRHHTNRVPKPLRLPRRHGPLTEGWLRGEDGTARA

SEQ ID NO: 50231 - protein, 381 aa, Zea mays
  Coding DNA Sequence Number=SeqID_6856
MERVETSTCSEVERTRKQLVDSYRELGARTADIEVPDREAGLRFLEWLQEELLALPTIVEGFMSFASLVTCEGAMNALSREGCSHYEVFDRSDEDFGREIFKVEDPVVKDSTGALFDRMWGPHSREVVREQSDRARDQAARAEVVEDFGPLNSVRPEAEANPVVAEAEVDPAPPPETGEGSLAAPAATVSGGGSSPTAVPRAEDPSKTATEPAAEDAMAAAGSSQVQDFGPAHATATANFVAASTVDAGNESDESASEFSDFGDSGSSIEWTEESSDEDLDYFAALNVAAAEASPLVANAEAVSGPSAGRRRRRAVAKHRVSEVDGGRLRVGRAGKQELLSSPAGASVGEGELRSLFEGEELRIMLFNYREMGIIPKVEPM

SEQ ID NO: 50232 - protein, 571 aa, Zea mays
  Coding DNA Sequence Number=SeqID_6857
  Homolog annotation: Hit_ID=Q7XBD4; Match level="QueryCoverage=71%, HitCoverage=39%, E-value=4e-08, Identity=23%"; Hit description =Cinful1 polyprotein
MTSYGGQPSVEVFAKYYCLHWQKRRIENKITQFGCCTFTPKTGKTSMEVVELVPCARNKWGNWWEFWFYVAEGTVEDHPRIPVAVMCSHYYSAYPRFEVAEEDGDEGAFRCAARVSSERDLVEECVGYGVWPLARGWALGEVCPRQMPSRGGMLVRSPAFTLDLHGRDPAAFVREAEDGAVQIVGRYVPRTEAQRSWDIRGSNDRLNRVFELNCLPYGGYPGQDVVDRRGKKSAGETEDDPAPEAAPSTKKRKLGTAMGELGVSDSFSMELMGTCAAPGGRMSSPELRESSARMLEVTGGRWPKNVPIPRAAGEDFFTSRMVRNLRVFPYKRNIAAVVSAVMNKDRQEAAQKRRAVIRLPKARPKRARGTVKATIPGSSEPTLAAKSAAPGSGKVPESVKAADAGGTKSAPDGAAKVRELPSPGKRVADFGTNISVDDYLVGEGQLAVVPPVVATTVSVAVPGVRGSALSAGGEISAVAAVKDEAGTVSRRLREASQRLSQAADFADRVASGALTADVSAEVERLRAQHADVVREKSAVDSKCRKLHGEGGCLGGREDGPPAPAVGGEEGG

SEQ ID NO: 50233 - protein, 182 aa, Zea mays
  Coding DNA Sequence Number=SeqID_6858
  Subcellular localization annotation: CTP_CleavageSite=35; ConfidenceScore=5.13e-01
MSSAPDDLVEQVPRRANVGAKAKTPPFARCLCQTRCTNGDKTTGTLTLRPTRRRAKTCDEVVLSRGLVQHGGPHVIRPIAIGPAWPLHITGLICKGLHSVLFMILMFQMERGHLASAYSFGSGRLDTGIVPKALPCSLDYKLVTVGVPYAVDHFQHLRNEDSREKPRSETLAIHLGSEYGSS

SEQ ID NO: 50234 - protein, 89 aa, Zea mays
  Coding DNA Sequence Number=SeqID_6859
MAGSAASLHGRLGRPLRRPLPRRRARGYERPRELQRLVILDQRYFGTGGYEIDGSGYDYGAGCQHCNHCSGEDEAVEGDFQEFQDYDEF

SEQ ID NO: 50235 - protein, 265 aa, Zea mays
  Coding DNA Sequence Number=SeqID_6860
MQAACNRTKGAHPFDSDAPSMGAQAHTSCNRCASYYVRETAPPLAPVPRLLDCGTGVATRGNPAHGPTVPTEHIGHGSVSHGRRCDGRYGQKWAGSDGGGRRAEAAVKSSAGSRPLLGQRESPLPRRKDDAPVFRSSNGSRTHNGCPTNHSSRRINSAAGQADHSEGFDSRLRPLGLRAHHWLAPEGFDSRLRARRARDDSGYVRYMAEARATFRRPLADPYRMGHGRPLGSPVSNSLETPCSAPSEGNMALSPLLLAERRHRGI

SEQ ID NO: 50236 - protein, 323 aa, Zea mays
  Coding DNA Sequence Number=SeqID_6861
MGSARGSSVLSSLEERNFAEVASRIFIILAGAKSEASRSSTSRTGRRATSSSSFWGGNHPPALWRRRPPAMPGKANCCCLAKVQHSVLCPRFRGEDESEDLPVRFGAVGARWCGVGGQVDAAVGADVVAAGESFSTDEPVSATHGPTSGSLALMSGSRPLSGDANKSLPAAAFVLGPSLLMQRSLANHQEFVVPQALRCGETLGRSAMSRSRRQRRQHGQRQSWLEKKLRRPEPGRAVHRPDQRRSWVAEAMSRADVLGGQLAEATEQPVEPSARAGFPEETLAAMAQAWCRQAGSDFADGGVDAEGAVAPPLMSDPAGTVYL

SEQ ID NO: 50237 - protein, 90 aa, Zea mays
  Coding DNA Sequence Number=SeqID_6862
MVIGGRRGTSSSEAPRTPGWTTNGLVDDDLRNGESAREEELKKKGREFGRIYRERAPREGREMAGGFMAAIDGAHQRREVARRFGSMARS

SEQ ID NO: 50238 - protein, 22 aa, Zea mays
  Coding DNA Sequence Number=SeqID_6863
MVTVNALGEQSPPVYARALPRE

SEQ ID NO: 50239 - protein, 183 aa, Zea mays
  Coding DNA Sequence Number=SeqID_6864
  Gene Ontology: Mol. function=structural constituent of ribosome; Cellular component=intracellular; Biological process=translation
  Homolog annotation: Hit_ID=Q6YUV4; Match level="QueryCoverage=30%, HitCoverage=37%, E-value=3e-18, Identity=87%"; Hit description =Ribosomal protein S21-like protein
  Pfam annotation: Domain name=Ribosomal_S21; Domain location=86-140; Score=40.6; E_value=5.6e-09; Accession=PF01165.11; Description =Ribosomal protein S21
MDAECKAGKRMRERAAWAQQAAKSAVSHGRTSAMAFLKLVEELQETYDDGVIPLGHLPLEHGQRGMRWGRLLDAGERGPDEEVELILVDENEGEESIFRRFRREVMRAGVLQEIKRHRRYESKTDEKKRKAREARCCNRRWSAKSDRSSFVTPGDAPLLHLATPNTNTSTQRVDFLMSAPVKL

SEQ ID NO: 50240 - protein, 234 aa, Zea mays
  Coding DNA Sequence Number=SeqID_6865
MEVQCQTSFCHNEDGFPKLLRACTIRLVIRSQAEYDGREFVEHGTEKCVVIIYIGSSPYHVEWSVTAAGHRFKDTCQVVARKALRALCQIYEEEVANTPLRFFPPFQRDRPAWMARMRALEEQQLLEDDPTVVYLTAYMLTLDAQYDFLARHHRQMIAREEDAEKLNPLKQAKDEHVQKLMEAYVVTHNQRRALRIQEPASYNPVQPRRAEDPQILEGHPVSIRGEKKAWELPE

SEQ ID NO: 50241 - protein, 319 aa, Zea mays
  Coding DNA Sequence Number=SeqID_6866
RIRTLQVVSELLGWPQDMEVQCQTSFCQNEDGFPKLLRACTVRLGIRSQPEYDGREFVEHGTEKETGPVWMARMRALEEQQLLEDDPAVVYLTAYLLTLDAQYDFLARHHRQMIARAEDAEKLNRQLHVDLTTAQARVAALESREVIAVEALKQAKDEHVQKLMEAYLVTHNQRRALRIEEPAPSNPVQPMRAEDPQILEGHPVSVRGEKKAWELPEGAIVLEGIPVFPQAMDKQEHPESSQDPQPELFEPLTMKKIPAPSLEVKEEAASTRPAPPPSEELQESVPLEKEFDPVLQSQSMLEEVINISSLLTHPGDVSD

SEQ ID NO: 50242 - protein, 373 aa, Zea mays
  Coding DNA Sequence Number=SeqID_6867
  Homolog annotation: Hit_ID=Q6QP51; Match level="QueryCoverage=26%, HitCoverage=49%, E-value=2e-12, Identity=43%"; Hit description =Putative growth-regulating factor 1
MHISYALHSLDCNLADGEYVLIPEQGPVQEEDQEQASEAAIEDLPAAPAIEGKPRSPSPAWLEDASSAELEDGFHHQKLEEEVASRPAQEVEPRLASLSAPARMMNILEAECGTKIAARRHGLSLLQHAPRSSPYGAGAGSHASCKLAQGRRSQTAARGGQEQRSRRQPSLRPIRGQRENPLSRREDGTPMFRSSNGSRTRNGRPANHSPRRIDSAAGQAAPLGPGKGDTPKRILLREGNRLRASLLIRGLKAGPSEGFNSRLRAGSKAGPRRVHSRLRHRARDDHGYVRYITKARATLPSHFAAPLTGLIEGQRRLRRSDCCATRQSEADRQSGPTSGTIGNSTPPDPGLGLGLSPGRWRTPLRPTQGSDSG

SEQ ID NO: 50243 - protein, 145 aa, Zea mays
  Coding DNA Sequence Number=SeqID_6868
MGNTNVPDGNAFTDEMEINLNMFCGLVLERVDREVNSVDVIAIYEEGTPGDRVVEFLKKLMEPTRLGHAIGDDEVLHFGTGVGDQRLTLEGSGDELVLEEHNIAGGDQKKNDEGGGHQAEDEAQERLDTILGEEYAILNPYSSGL

SEQ ID NO: 50244 - protein, 416 aa, Zea mays
  Coding DNA Sequence Number=SeqID_6869
  Gene Ontology: Mol. function=nucleic acid binding; Cellular component= nucleus; Biological process=mRNA processing
  Homolog annotation: Hit_ID=Q2L3U7; Match level="QueryCoverage=16%, HitCoverage=12%, E-value=9e-13, Identity=54%"; Hit description =Putative uncharacterized protein
  Pfam annotation: Domain name=RRM_1; Domain location=254-321; Score =5.8; E_value=0.043; Accession=PF00076.13; Description=RNA recognition motif. (a.k.a. RRM, RBD,
MVSSSPIDAHLTRALQQQTREILSELDKRFATIDSKWARRVGAPESQAVESAQHCDEFSSALYAGVEAHLSAATLQSTGTRVAALQSALHVFDARRPRAQWRSSVEVRHVFADRDISEQPAGVHGRLDNSTTITMGSNINPDGVAAGGAADRPVRAAAAGWSCVPNAGPVPHKTDDAAPARGYTGVATPAPGRHGRCLPQQAARHDQEGKYCSGNPYFWQRASTDPLVSKTGARKLFDEMPTSDRRSPDRVLDVTIRQVCYPMSESVLHAVFAPYGRIERIHVIGGLDPVLAKVVFQLKHEAAEAYGDLHGRNIYDGCCQMEINWGFSQEQDVSRSSVESNLRSSNASHARRSIAGVTNNGVHKVLFPVGQQSDNEPPSAGLRYATGGVYNENGSVVGRLGNDDFGSNNHTFDEGS

SEQ ID NO: 50245 - protein, 95 aa, Zea mays
  Coding DNA Sequence Number=SeqID_6870
MAAAARVRGEGEAGGVGVAGIQTRAPQVMKMAMMRRGECSNRCPELETCLRKPPRSRGSYENAQKDATVTPVQGECGDQLNFQATRPLRAELVPD

SEQ ID NO: 50246 - protein, 29 aa, Zea mays
  Coding DNA Sequence Number=SeqID_6871
MPLELLHMDLFGPIAYISINERKSQPKRL

SEQ ID NO: 50247 - protein, 385 aa, Zea mays
  Coding DNA Sequence Number=SeqID_6872
MEVSLHAMLLISASEVRCELHAELFPGVDRSWGEVWLELGWPSHRTEMIRQCSAAHAGQWDTRLDPGACWSLRSSGLSRETGASSPACLWLSSARRSSVGAALTEVDIVTPLLHGPGKAVELGGWRSNSLAANKAPGATLDALDVCAGVRCCAERTTAAPGAGPMEVRGVEDTASSHREFLENEVVVLDDLNHAVWAYCLLVEWTGMSPAEWTGRRLPTEWTCLIKCGGGTSPASGMDRAQLMSRRHIACQWTGQAAALSAINAEAAQPRGLTSGPVHWLTSRAPCHVAASGLRLSGEQKQSRDPAVSGPDPTQRGPEPILGVRFALVEVLDLTRRPGLYIQGSDTFPWGSGLTVDTLEYIIFFGHVVVPESSTWWGRVLFAGTE

SEQ ID NO: 50248 - protein, 81 aa, Zea mays
  Coding DNA Sequence Number=SeqID_6873
CNLADGEYVLVPEQGAAQEVAPDPAPEDLSATALEGKPRNPIEMNTSSLEDMVAGVTWPSILPPGWTIEWDPTSAEEEHEE

SEQ ID NO: 50249 - protein, 280 aa, Zea mays
  Coding DNA Sequence Number=SeqID_6874
  Subcellular localization annotation: CTP_CleavageSite=43; ConfidenceScore=5.51e-01
MLGPPLPPPPRGNLPQGNQQQQRQQQQQRSPRFQGRWKVQGPKASSPSAPKAAPPPPDTMPGGSGIQQQASAGSGAGGPPPAAATAPTATAAPTTAMSSSTPSTTVEEGPTAPTPAIEGDAEGTSSSIPPPTLEETEVVFGRRLRFGAEPEAAPVPLPRVLSRAHQALHETEASILREWEALEAEHQRLSDWRTQLEEHTKAASSQFASEWSELERDRKDYKKDLHKVYARELEASRKEKRLAKREEVVTELSAKLSAMNEILEEQRIQQTAAMERLQKL

SEQ ID NO: 50250 - protein, 131 aa, Zea mays
  Coding DNA Sequence Number=SeqID_6875
MDLARRETDLTRREKDLAFKEEMLERREKLLAEHELEAKGKEGTLEERVRRFEAAQAAPGPQVAEAAKKALEDLQAEHRAGVQWIAEWAGEASTTLVPLGISPIPVSGPPASIFDALPVLDSAAERLRHLD

SEQ ID NO: 50251 - protein, 48 aa, Zea mays
  Coding DNA Sequence Number=SeqID_6876
MAHRTVRCATGAPTVRHRGLDAFRRDLSWLTWINSTYLVFIPGEYKRM

SEQ ID NO: 50252 - protein, 771 aa, Zea mays
  Coding DNA Sequence Number=SeqID_6877
  Gene Ontology: Mol. function=ATP-dependent DNA helicase activity; Cellular component=nucleus; Biological process=regulation of transcription, DNA-dependent
  Homolog annotation: Hit_ID=A2WU00; Match level="QueryCoverage=96%, HitCoverage=71%, E-value=0.0, Identity=84%"; Hit description =Serine/threonine protein phosphatase
  Pfam annotation: Domain name=DEAD; Domain location=285-446; Score =1.5; E_value=3.3e-05; Accession=PF00270.20; Description=DEADDEAH box helicase
  Pfam annotation: Domain name=Helicase_C; Domain location=536-609; Score=47.8; E_value=3.9e-11; Accession=PF00271.22; Description =Helicase conserved C-terminal domain
  Pfam annotation: Domain name=ResIII; Domain location=281-441; Score =28.0; E_value=2.2e-07; Accession=PF04851.6; Description=Type III restriction enzyme, res subunit
  Pfam annotation: Domain name=SNF2_N; Domain location=287-543; Score= -115.7; E_value=0.038; Accession=PF00176.14; Description=SNF2 family N-terminal domain
  Pfam module annotation: Pfam domain module=DEAD::Helicase _C::ResIII::SNF2_N; Domain location=285-446::536-609::281-441::287-543
MAGGDGDRHRAPKRHKSSTPSKAALVDESAEFDYADDFDDDAHDADTEVKKRDFTKLELKVDHASRPLWACADGRIFLETFSPLYKQAYDFLIAIAEPVCRPESMHEYNLTPHSLYAAVSVGLETSTIISVLSKLSKTKLPREIIDFIHGSTANYGKVKLVLKKNRYFVESPFPEVLSTLLRDEVISRARISPEDSLGAPSFTVSKTSGQIASGHEDLLNGMEIAAATEDKETHSFEIDPSQVENVKQRCLPNALNYPMLEEYDFRNDTVNPDLDMELKPQARPRPYQEKSLSKMFGNGRARSGIIVLPCGAGKSLVGVSAACRIKKSCLCLATNAVSVDQWAFQFKLWSTIKDENISRFTSDNKEKFTGMAGVVVTTYNMVAFGGKRSEDSEKIIEEIRNREWGLLLMDEVHVVPAHMFRKVISITKSHCKLGLTATLVREDERITDLNFLIGPKLYEANWLDLVKGGFIANVQCAEVWCPMTKEFFAEYLKKENSKKKQFRACEFLIRFHEQQRGDKIIVFADNLFALTTYAMKLRKPMIFGATSHAERTRILYQFKNSPEVNTIFLSKVGDNSIDIPEANVIIQISSHAGSRRQEAQRLGRILRAKGKHQDRMAGGKEEYNAFFYSLVSTDTQEMYYSTKRQQFLIDQGYSFKVITSLPPAEEGPNLSYYTLDEQLELLSMVGHFYGPIHLYQQALNAGDDMIGVERLEEDSDGKALIRARRSAGSMSAFSGAGGMVYMEYSTGKGKGVQKKHKDPSKRHHLFKKRYA

SEQ ID NO: 50253 - protein, 375 aa, Zea mays
  Coding DNA Sequence Number=SeqID_6878
  Gene Ontology: Mol. function=phosphoprotein phosphatase activity; Cellular component=cytosol; Biological process=protein amino acid dephosphorylation
  Homolog annotation: Hit_ID=Q9SX52; Match level="QueryCoverage=100%, HitCoverage=100%, E-value=1e-137, Identity=88%"; Hit description =Phytochrome-associated serine/threonine protein phosphatase 1
  Pfam annotation: Domain name=Metallophos; Domain location=43-238; Score=141.3; E_value=2.7e-39; Accession=PF00149.19; Description =Calcineurin-like phosphoesterase
MDVDLWISKVKEGQHLAEHELQSLCEYVKEILIEESNVQPVNSPVTVCGDIHGQFHDLMKLFATGGHVPETNYIFMGDFVDRGFNSLEVFTILLLLKARYPAHITLLRGNHESRQLTQVYGFYDECQRKYGNANAWRYCTDVFDYLTLSAIINGQVLCVHGGLSPDVRTIDQIRTIDRNCEIPHEGPFCDLMWSDPEEIETWAVSPRGAGWLFGSRVTAEFNFVNGIELVCRAHQLVQEGLKYMFQEKGLVTNVGLQKDDMFSMTSVAEVCTLRWICGHTRRDRLWNVDIRDRLGVASIEEKLVLKWFEHAQEAPVWSAPNYCYRCGNVASILSFDEKMRLDLKRAMKERDVKFFTETEENNQMRGPRTAVPYFL

SEQ ID NO: 50254 - protein, 28 aa, Zea mays
  Coding DNA Sequence Number=SeqID_6879
MAALVEAQGSSRRGGLDAETFYLHLSWR

SEQ ID NO: 50255 - protein, 252 aa, Zea mays
  Coding DNA Sequence Number=SeqID_6880
  Gene Ontology: Mol. function=translation initiation factor activity; Cellular component=transcription factor complex; Biological process =regulation of transcription, DNA-dependent
  Homolog annotation: Hit_ID=Q8W0W3; Match level="QueryCoverage=47%, HitCoverage=38%, E-value=2e-61, Identity=94%"; Hit description =Transcription initiation factor IIB
  Pfam annotation: Domain name=TFIIB_Zn_Ribbon; Domain location=124 -167; Score=57.7; E_value=3.9e-14; Accession=PF08271.3; Description =TFIIB zinc-binding
MTCSLLSRYIRSNGATAMDIDLTIRDEISSIVSQSAPSINMRQIITVRHRRRAWLPLLLAPLALTHATVSLPRSRCIPRNPRPSAMRSRLLLPPSWRSRAPPPRARRLSRPCHPRPAPREMSDSYCPDCKKQTEVAFDHSAGDTVCTESGLVLEAHSVDETSEWRTFANESNDNDPVRVGGPSNPLLTDGGLSTVIAKPNGAQGDFLSSSLGRWQNRGSNPDRSLILAFRTIANMADRVGYHRGGSRFGTSD

SEQ ID NO: 50256 - protein, 174 aa, Zea mays
  Coding DNA Sequence Number=SeqID_6881
MGIKQCIPPAGFTKFHKDLKKLLELKRWEALLTKTEGNRGRREEEPLTEEEDEVAGDGCRRWLGVRRRRRGESPETERAECWRALAGKRRPLARLGLGAVFLKREMGTPDSLQWLSGAHRTAHSRCPVNHRTTYRKRGIVRAAAGAPDIAQCGVRCTPDCPVLAPSYTFQNILP

SEQ ID NO: 50257 - protein, 338 aa, Zea mays
  Coding DNA Sequence Number=SeqID_6882
MRATAQRLRAFLHFRPDQRVKGRTAMQAACNRTKRAHPFDFDASSMEAQAHTSCNRRAGYYVQETASPLAPVPRLLDCGTGTATRGDPAHDPTVPTEHIGHRSVSRRRRRYGRYGQKWADSNGGGRRAEAAVKSSAKLTSPPGTVREPSPTTDRERGYSEKDPSPRRKWAPSPLLIKGSKAGPSEGFNSRLRALGLRAHYWSEVRRPAPRKGSTAVSGHSGSAPTTDQGFVGWPPKGSTAASDAERGMTQGTNDDTYQKLKEENERLKISLTQLKGKCIAQPSQDNRDHMVKKLETGTTVACTTSLEENVKDLRIAKRKKQKKKFNTSSKSLNHASTK

SEQ ID NO: 50258 - protein, 40 aa, Zea mays
  Coding DNA Sequence Number=SeqID_6883
MPKLPCARLRLCANLRVPCASSYRGSDPSPKIPINVRLIE

SEQ ID NO: 50259 - protein, 89 aa, Zea mays
  Coding DNA Sequence Number=SeqID_6884
MAGIARSTRAGGCSHRRRVYRPNHGDLVQSKGTASIPCSESFTELCTLVSEGWMGLGQAGLAGLRRQWLGWPRSRCARANGGELGSGEA

SEQ ID NO: 50260 - protein, 102 aa, Zea mays
  Coding DNA Sequence Number=SeqID_6885
  Gene Ontology: Mol. function=kinase activity; Cellular component =ornithine carbamoyltransferase complex; Biological process=amino acid metabolic process
  Homolog annotation: Hit_ID=Q6QP54; Match level="QueryCoverage=79%, HitCoverage=36%, E-value=2e-18, Identity=54%"; Hit description =Putative kinase
  Subcellular localization annotation: CTP_CleavageSite=88; ConfidenceScore=5.03e-01
MALPVDVASLRPRSGDVEAPPKPRSKARAESEPWGRAKRSSSSSGVEPESEPCVRRSGVRRLLGPSPSPSPGSGGAEFAVFRGLARVRALGRAERSSPSSGA

SEQ ID NO: 50261 - protein, 150 aa, Zea mays
  Coding DNA Sequence Number=SeqID_6886
MGKSNKRKCEPTPPSEDFGDSEYSEEELSSEPEGSPAPVSPPASSDDSDDSQGIVAEVWTYIRAVERSGLEGSDESEYSLDEEDSSDSYEEGGGGDGGDYDDDGGDDDDGDDGGGGGDGGSKGGSKGGNGGSSRGSNGGGSSKGSNKASG

SEQ ID NO: 50262 - protein, 530 aa, Zea mays
  Coding DNA Sequence Number=SeqID_6887
MPFHGGRVVRSPAFALNLRNRDQAAFVRDAEDGAVRLVGRYVPRTEGQRSFDIRGSNDRLNRVFELNQLPYDGYPGQDDADRRGKKPVVETGDDPAPAAAPSSKKRKLGTAMGGLGVSDSFARELMRTCAAPGGRMSSPELRESSARMLRVTGGCWPRNVPIPCAAGEDCFTSRMGREWRVFPYGRNIAAVVSAVMDKDRQGAAQKRQAAVRLHEARPKRQRGTAKAAASGGGKPPLAAKSGASALARRRRQRQAPEAPNRRRWCRRDEAGAATRRLKEVTEALSQVADFASRTASGALTAAVSTEVERLRTQHADAVREKSASDSKCRKLTDKVAALEREKADLRRQLAEERREANEQAAQAEARLARAEGNLARERAEHLQERLTALESRVKGAEAAMRAEAERTRTQLMDTYRELGARTGDFEVPDREPELRCLEWVQEELQELPTVVGGFMSYASLVTCEGAMNALSREGCRHFEVFDQADEDFERDVYKVEDPVVKESAGALYDRMWGPHGREVVRERAETARAQ

SEQ ID NO: 50263 - protein, 36 aa, Zea mays
  Coding DNA Sequence Number=SeqID_6888
MGSHDPRAKRESRLMGKEEGVEADLQEFQDFNEFEN

SEQ ID NO: 50264 - protein, 272 aa, Zea mays
  Coding DNA Sequence Number=SeqID_6889
MNALSREGCRHFEVFDQADEDFERDVYKVEDPVVKESAGALYDRMWGPHGREVVRERAETARAQAARGERVDDFGALNSALPDPEPTPAEAVSGVALEPTPETAEGAPDAPTSAAAGEDLPPKVAEGAPDAPAAAVPSAEDPAAVAAETTAEAAAEPTAEAPAASGPSQVQDFGPAHATATTEFLAASTAEGGNEYGGSASEFFDFTDSGSSVEWTEESSEEDLDYFAALDVAAAEASPHAADAQDGWSAGTVVFVGCREYRGRGTAKSFCG

SEQ ID NO: 50265 - protein, 276 aa, Zea mays
  Coding DNA Sequence Number=SeqID_6890
MPSSSSSAAATPPAAASSEETLSSLMAEELRAGDSVDFGVSRMTSARVEDMQRLGYFGGGVARAPGTEEVPEPEGELVVFEAFFAAGLRLPAHRDEAGAATRRLKEVTEALSQVADFASRTASGALTAAVSAEVERLRTQHADAVREKSASDSKCRKLTDKVAALEREKADLRRQLAEERREANEAVAKEQAAQAEARLARAEGNLARERAEHLQQRLTALESRVKGAEAAMRAEAERTRTQLMDTYRELGGRTGDFEVPDREPGLRCLEWVQEEL

SEQ ID NO: 50266 - protein, 128 aa, Zea mays
  Coding DNA Sequence Number=SeqID_6891
MTVNGSSACLIEELDGVRARLRRAGERGVVVGGRRGTTASGVDELRRVSTDGGADCDGVVELRRRRGRVRNVRKREGARGGENSCRGEQGLIGFYRERAGEEGSASSSTMNGVHQWGEGVMGKKKRSQ

SEQ ID NO: 50267 - protein, 217 aa, Zea mays
  Coding DNA Sequence Number=SeqID_6892
MTVNGSSACLIEELDGVRARLRRAGERGVVVGGRRGTTASGVDELRRVSTDGGADCDGVVELRRRRGRCHRERFAVVFHNEPLKTPSFNTVLERNIEIQLIEIKEAAEKGGDGKSKPADEKWNVNNRFMSVLYQNSDTTADPPRTELLRKQNPNLNEMKKVGFGDDRHVVTSEWKLAVGVDGRDDCSGGALPLPLGGHRDLSGGMSRLRISGKQRNS

SEQ ID NO: 50268 - protein, 103 aa, Zea mays
  Coding DNA Sequence Number=SeqID_6893
MSRLCRGKSLPSVKHSDEGTCAGIFGDIMRLGSGTQRSPYLGMKFQKWEKPPMSEYTGKGRILADVIADKLRTEIENKPSRAQGYAEGIASLLETRTLTSPAQ

SEQ ID NO: 50269 - protein, 86 aa, Zea mays
  Coding DNA Sequence Number=SeqID_6894
  Subcellular localization annotation: CTP_CleavageSite=37; ConfidenceScore=5.07e-01
MAPRVHHDAGGSQPLTAARRRQQDPCRTASCAPTGLRRSSDSHAITCTGLKLSPDSHVGIPVSLFASLIGRLYNSLAKLTKPVEPP

SEQ ID NO: 50270 - protein, 171 aa, Zea mays
  Coding DNA Sequence Number=SeqID_6895
MTLGTSDTWPRLGLRSRGTLGHFRDWRERFVTEFHRREASSPRTLSKGSGSSESPAEARGLLSHPATAKLLTLSTNQLDNLEPDHAPGLRPGRMRERSDRPRHHKKHSDLRGVKQFFRGLGGYTRRVRSRAPTRTKKNRERPVPAPKMRQKPPSEYQHSLRGSGATVGYHN

SEQ ID NO: 50271 - protein, 168 aa, Zea mays
  Coding DNA Sequence Number=SeqID_6896
  Homolog annotation: Hit_ID=Q6J9V9; Match level="QueryCoverage=41%, HitCoverage=24%, E-value=4e-22, Identity=78%"; Hit description =Putative uncharacterized protein
  Subcellular localization annotation: CTP_CleavageSite=49; ConfidenceScore=5.33e-01
MAKSGPAVTAAADERKQRSSHLQARVPSRSDGRALSHGVKTTHPCPVPRTARTRNGRHANHPSRRINSRRSRRHLWQAWRASLCLRHDDRVKKGTGKGDVVERILLGEGSGPRALLLIRGSKAGPSEGFRQPPQSTRASSPLLIRGSKAGPSKGFDSRPRALGLRAHY

SEQ ID NO: 50272 - protein, 216 aa, Zea mays
  Coding DNA Sequence Number=SeqID_6897
MGRQEEPTSSIPYAFACDEIKGKRKAPTLSSSSEEEEEEESDDDEDNQPSTSSSKDEETIRRVGKEKSKEREDALHAGRRTTLGTTVQIWPNPQKGRAKARRLQVSKLGMTLQTKMNLQGRAATDPHNTHHDHHASALLQEDVYTKQKAQLKTLKNKLISSQNDYKCLLEKFETFANLNCELSTKIEQLESSVPSSTTDDGLTKKNEKLKAKLASS

SEQ ID NO: 50273 - protein, 210 aa, Zea mays
  Coding DNA Sequence Number=SeqID_6898
  Gene Ontology: Mol. function=catalytic activity; Cellular component =ribonucleoside-diphosphate reductase complex; Biological process=DNA replication
  Homolog annotation: Hit_ID=A7PRZ8; Match level="QueryCoverage=35%, HitCoverage=20%, E-value=2e-12, Identity=52%"; Hit description =Chromosome chr14 scaffold_27, whole genome shotgun sequence
MPPSYPIEPCVAVLTIGVTLPAATVTTILSRSPLPHPILSLPYLVSLAAWARTLGVQQESSPARKMYVVKRDERRETVQFDEITVRLKKLSYGLSQDHFNLMLVMQKIKEIYMYFNETFTISKMMAPLVAEDVCELIMRGYYLADEPGVHFVWQPNQESSVLIMSRAFDDYYIEDCCVILASEVTQRRIDNSDQFVILATVRVAFVPTCL

SEQ ID NO: 50274 - protein, 50 aa, Zea mays
  Coding DNA Sequence Number=SeqID_6899
MVLSSPTTPYRCSLKSGQSSCYACTFQRKKKTPPVHDVWAQGQGSMLQIG

SEQ ID NO: 50275 - protein, 273 aa, Zea mays
  Coding DNA Sequence Number=SeqID_6900
  Gene Ontology: Mol. function=oxidoreductase activity; Biological process=metabolic process
  Homolog annotation: Hit_ID=A2X5A5; Match level="QueryCoverage=23%, HitCoverage=87%, E-value=7e-19, Identity=73%"; Hit description =Putative uncharacterized protein
MEFHLLLHSVLMHVTAALLILVYIPLSVPVKLLVRAFVRPLGKEDLRGKVVLITGASSGIGEVSTTLINIYYMTVPAGVPAGAINPRVAGLGNIRYPSRVAGAGKQHYSPCSDYCANHKGKTNNSKSRPLPSSASGATGSSASPDPWPRPQPQPREKVSASPDPRPRPREKVPASPDLSLGLGRSHNLTRPQPRPQEKSPPRPTSASDRLRYRGYIITLPLASRLRLRRNKTGVTSRLLRQQVMMVPCMRQQDPGPHRQLRFYRAQALLRRPR

SEQ ID NO: 50276 - protein, 268 aa, Zea mays
  Coding DNA Sequence Number=SeqID_6901
  Homolog annotation: Hit_ID=Q6J9V9; Match level="QueryCoverage=48%, HitCoverage=48%, E-value=5e-22, Identity=45%"; Hit description =Putative uncharacterized protein
  Subcellular localization annotation: CTP_CleavageSite=52; ConfidenceScore=5.51e-01
MADTPRVARPVALTPWQDTRLLWQAGGRRFASVMMTASKKGSGKGTFRRSPSQQKKRALSPPTDQGFEGCALRGSATALEHSGSEPFTDQGFEGWPLEGIRQPPQNMQSQARAMLPRYPKTFPRPAGTVCNGIPPKGGTEPSDPIEWVRVQQITCRVRLTTVSHDLSRVQPRAQQGAPPRLTPGLGLSLSLGRRSPPRLTPDLGLSLGLGEKVPASPDLSLGLGRSHNLARPQPRPQEKSPPRPTSASDRLRYRGYIITLPLASHLRL

SEQ ID NO: 50277 - protein, 353 aa, Zea mays
  Coding DNA Sequence Number=SeqID_6902
  Gene Ontology: Mol. function=oxidoreductase activity; Cellular component=cytoplasm; Biological process=metabolic process
  Homolog annotation: Hit_ID=A2X597; Match level="QueryCoverage=81%, HitCoverage=81%, E-value=1e-115, Identity=72%"; Hit description =Putative uncharacterized protein
  Pfam annotation: Domain name=KR; Domain location=67-234; Score=-69.1; E_value=0.0025; Accession=PF08659.1; Description=KR domain
  Pfam annotation: Domain name=adh_short; Domain location=67-223; Score= 35.5; E_value=5.7e-08; Accession=PF00106.16; Description=short chain dehydrogenase
  Pfam module annotation: Pfam domain module=KR::adh_short; Domain location=67-234::67-223
  Subcellular localization annotation: CTP_CleavageSite=24; ConfidenceScore=5.15e-01
MSSGAESLRPSYGCDRTRPTKRVRCGSQRGPSWLAATKQQHVVVTFCRGFAARLWAPRPTSWRRMKGQELAYQYAKEGACLALVARRVQALKAVAAAALERGAPDVLVFPADVSDPEQSRRAVEETVAHFGKLNHLVANAGVWSSCAFDQITNITAFTKLMDVNFWGSVYPTYYALPHLKASKGKLIVCCSAAGTVATSRMAFYNASKAAQLRFYETLRTEVGSEVGITILTPGYVESEITKGKGMQKSGEVAVDEEARDAQIGVFPVGRVEALCEVALDGIRNGDWYVTWPSMYRPLQLIACLAPEVLDWMSDAMYKETTQGRRPLGQRIMEATGAKRLYPPSLLQPRIKAD

SEQ ID NO: 50278 - protein, 180 aa, Zea mays
  Coding DNA Sequence Number=SeqID_6903
  Subcellular localization annotation: CTP_CleavageSite=57; ConfidenceScore=5.37e-01
MGGGLLAAASALRSSLPLFGPSEQKSSSSPLLERVMACLKGTPRPLFDEPRPGVAVSAWTEAELARKEDLVGRSLAGSSVSGTDAGVVLPRPRAGLMSSGDSWPRPRGDQPSHLLGLDSRRKPWRRWPGRDDDVVLQSGDPQTASPSEARSDLAEGVADAEDAAAPFNRQDPSLQDQIIL

SEQ ID NO: 50279 - protein, 155 aa, Zea mays
  Coding DNA Sequence Number=SeqID_6904
  Subcellular localization annotation: CTP_CleavageSite=68; ConfidenceScore=5.60e-01
MQAACNRAKWAHLSDFQRAHHGSPGPRVMQPVRRMLCTSNCTATRATATPPRLRNQYRDSRQPYARPSSASLARWNQAPSLPTDQRFEGWPLEGFNSRLRARGLHTHYWSEVRRPAPRKGSTTASGYSGSVPTFDQGFEGWPPKGSQPPQTQSEG

SEQ ID NO: 50280 - protein, 243 aa, Zea mays
  Coding DNA Sequence Number=SeqID_6905
  Homolog annotation: Hit_ID=Q6QP51; Match level="QueryCoverage=67%, HitCoverage=56%, E-value=6e-38, Identity=56%"; Hit description =Putative growth-regulating factor 1
LAPRKGSKATPEHSGFKLITDQGFEGWPLGRVRQPPQSNRAPRPLLIRGSKAGPSEGFDSRPEHAERGMTLGMSVTRPRLGLRSRGTLGHFRDQQERICNGIPPEGGIEPSDPMKRVRVRQITCSRQGRSDRSHFALSLTDLTGKQCRSLRSDCCATHQGEADNSQVQPQAQQEAPPRPTLGLGLGRRSPPRPTPGLGLNLGLGRWSKPRPTPGLGLNLGLGRNRVLVRPRPRPQEESPPRPT

SEQ ID NO: 50281 - protein, 324 aa, Zea mays
  Coding DNA Sequence Number=SeqID_6906
  Gene Ontology: Cellular component=integral to membrane; Biological process=protein transport
  Homolog annotation: Hit_ID=Q75IC7; Match level="QueryCoverage=94%, HitCoverage=94%, E-value=1e-146, Identity=81%"; Hit description =Secretory carrier-associated membrane protein 4
  Pfam annotation: Domain name=SCAMP; Domain location=121-306; Score =323.3; E_value=4.5e-94; Accession=PF04144.4; Description=SCAMP family
MAGRSRYDNPFEEGGADEVNPFADQAKRGGSTAQSGYSGGAFYTTQSQRPAPPSTRLSPLPPEPADFYNDFATPVDIPMDTNKDMKTREKELLAKEAELNRREKEIKRREDAAARAGIVLEEKNWPPFFPIIHNDIGNEIPVHLQRTLYVAFASLLGIDVYPDIRLVGLVLCLFWNIICITAAWAKGSGPKIWFLAIIYFILGCPGAYYLWYRPLYRAMRNESALKFGWFFLFYLIHIAFCAYAAVSPSILFVGKSLTGILPAISLIGDSVIVGIFYFIGFALFCLEALLSVWVIQRVYLYFRGSGKEAEMRREAARGAARAAF

SEQ ID NO: 50282 - protein, 197 aa, Zea mays
  Coding DNA Sequence Number=SeqID_6907
  Homolog annotation: Hit_ID=Q75ID7; Match level="QueryCoverage=26%, HitCoverage=59%, E-value=1e-11, Identity=69%"; Hit description =Expressed protein
  Subcellular localization annotation: CTP_CleavageSite=55; ConfidenceScore=5.11e-01
MEGGGSNTPFYRGNSTALATNPSAAAAAAAAVFLFLAFSSPNLHAGNLCYAVWLCAIAYSTPLALGDSRNSGSRHEPFMLIITAKGVTTVYLSEISILVSFVNLCERDSRGEQNGAQKGDREAAIDAEIVRVNDLPAHSSYAIHRMKVLNKLRHLLSIKPDFDEECDTISRFEPSSKEICKEPNVQDGTFNIEKTSI

SEQ ID NO: 50283 - protein, 173 aa, Zea mays
  Coding DNA Sequence Number=SeqID_6908
  Subcellular localization annotation: CTP_CleavageSite=53; ConfidenceScore=5.55e-01
MTTAVLNPLRKQGDVIKVPAAPTAVLLQGSSAPPTATTPRTQGSSTSPTATLACTQGSGTSLPDTLAHSYTPIVHLDPLLASIKGRTRALMQEGGRVGGRADEQALSLSLANACNPYCKRIPPWRRITRAAFFPPCVPSRANPSGLGHAATILLVGQGTPGVETPTSAERDQK

SEQ ID NO: 50284 - protein, 910 aa, Zea mays
  Coding DNA Sequence Number=SeqID_6909
  Gene Ontology: Mol. function=helicase activity; Cellular component =nucleus; Biological process=viral genome replication
  Homolog annotation: Hit_ID=Q1EPC6; Match level="QueryCoverage=99%, HitCoverage=57%, E-value=0.0, Identity=72%"; Hit description=DNA helicase homolog, putative
  Pfam annotation: Domain name=DUF889; Domain location=575-811; Score =461.5; E_value=1.1e-135; Accession=PF05970.5; Description=Eukaryotic protein of unknown function (DUF889)
MQRKYKLTCPEQYDLLISAEIPSNKYPELRKMVIKHMMHGSCGSLNPNCPCTKGRKSCKNHYPRPFSDTTLQGKDSYPIYRRRDDDRKEKVRGCELDNRWVVPYNPYLLRLFNCHINVEACGSIKAVKYLFKYIYKGHDRASVVMRDASKADDDVDEIKQYRDARWVTPPEALWRIYGFELSQISPPVMQLQLHLPNMHMVAFHERQMVERVVNRPGVDRSMLTSYFEANRFNKEARGILYRDFPEWYTWQSGKGKVWQRRKRDTGGQVGRIVSAHPAEGERYYLRVLLNHVTGAASYVDLRTVDGVTLPTFREAAERRGLLESDNTLDECLTERALFQMPSSLRRLFATILVYCEPSDVAVLWQKHKDSMSEDYQHKSQNKTHVEQMVLIDIRNMLQSMGKDIKTFPLPPMIDAFTRRKVSNRQWKMWLLKTLNEEQRAAYDNIMSAVDTDQGGLFFVDGPGGTGKTYLYRVLLATLRNQGKIAVATTTSGVAASIMPGGRTAHSRFKIPLTIDDGAVCSFTKQSGTAELLRKASLIIWDEASMTKRQAVEALDNSMRDIMGRPALPFGGKTIVFGGDFRQVLPVVRKGSRAQVVASSLRMSYLWESMSHLKLVSNMRAKNDPWFAEFLLRVGGGTEETNSDGDIRLPDDVCVPYSGSDNDLDNLIDFAFPNLNENMSDSTYITSRAILSTRNDWVDMINVKMIDRFQGEHMVYHSFDSAVDDPHNYYPPEFLNTLTPNGLPPHVLKLKIGCPVILLRNIDPANGLCNGTRLVVRGFQRNSIDAEIVLGQHVGKRIFLPRIPLCPSDEEMFPFQFKRKQFPVRLSFAMTVNKAQGQTIPNVGVYLPEPVFSHGQLYVALSRATARSNIKILVIPAVDGRKKSRKGVKTTPTVYCGTYTKNIVYKEVLTN

SEQ ID NO: 50285 - protein, 604 aa, Zea mays
  Coding DNA Sequence Number=SeqID_6910
  Gene Ontology: Mol. function=cysteine-type peptidase activity; Biological process=proteolysis
  Homolog annotation: Hit_ID=Q109R5; Match level="QueryCoverage=85%, HitCoverage=50%, E-value=8e-61, Identity=30%"; Hit description=Ulp1 protease family, C-terminal catalytic domain containing protein
  Pfam annotation: Domain name=Peptidase_C48; Domain location=80-287; Score=53.5; E_value=7.1e-13; Accession=PF02902.10; Description=Ulp1 protease family, C-terminal catalytic domain
MESLFVGLSHNKPKKSVATAIVREVLSHDWLLLDYICTQGDLALIDFIKEIPCEPRVEVVLIDDAFVERKWMECLFQPSAYLGDEVIDCYINLIKAQKHLKCRSGGRVHIENAFQFNFLKRDGDLEIKTEELYPIKDMTHICSAERRVLLYLDHDMVFIPINIRETHWYLAVIHARNMEIQVLDSLGTSQDRKDLTDSIKGLQRQIDMISQRKELKDHRWPDLQVASWPLREIDMGYAKQTDSSSCGLFLLNYIEYWTGDELSDSFTQDDMSHFRKKMAAILLSSDLNKRRGCLLYKNEKEVDSGSPSDVEILENPTDSNKRKLLHVLDDSEVVFEDEEGPITQADLQRRTWVRSFNPFKIEISVKDLQNILTTTQDMILRCFDMAVRLLANKESRKPKEEIINNRKHYMDMRFWRMVGFGKLPKYHQDPTTEELAKTLDCWPSMNYYITGCRYVLMPWKFNGCHALFVIDHVKKHVTFIDFTPTQNWCKHMPYKRFAEAIIMASKKYKIAYNKKRSGWAEDIFKWEHTIQTGVPIDLRGFNTSYLVLQAMAMWGNDKRLKFVGDAKTLRRNFVIDLLSYEDNSCRYAIPANIQQRLADIAKKD

SEQ ID NO: 50286 - protein, 189 aa, Zea mays
  Coding DNA Sequence Number=SeqID_6911
MRRKDGGYPPSGGLEGGKTRCIREREDMVYFQGGNPPFKGDYPYSRPQPSRAESSPTRSKALPCGGGWVPHVMQTGSEQKKPNRRARCARPPSGGWEQWSHRQPSSRPIRGQRENPLSRHEDNAHVIRSSNGSRTRNGRPANTRPAALTPRRDRRRLWQEKRATLRLRHNDRVSKGTEEGGYPGKDPSP

SEQ ID NO: 50287 - protein, 192 aa, Zea mays
  Coding DNA Sequence Number=SeqID_6912
  Subcellular localization annotation: CTP_CleavageSite=2; ConfidenceScore=5.09e-01
MSSSSLMRRVFPSSKPPDGGSNPGCDLGPTLSFKDVHHPRWGGCRAEPALYLPRGAGRRRTSSPPACRSRRLGSRRPLRPEGGCRAVCTGGPPTTPRAARAAFVFWGGPAFARGWRPRAEADAPLVWEDLSGDLLGGLVAPAISAEAEAAREVPVTDGITATIRAPGLRFFVLVLAPRASVWARARSQQRPP

SEQ ID NO: 50288 - protein, 165 aa, Zea mays
  Coding DNA Sequence Number=SeqID_6913
  Homolog annotation: Hit_ID=Q6QP54; Match level="QueryCoverage=35%, HitCoverage=20%, E-value=8e-07, Identity=50%"; Hit description =Putative kinase
  Subcellular localization annotation: CTP_CleavageSite=32; ConfidenceScore=5.00e-01
MSGCGLRGETRDGCGGTAMAGGRSGLWPRRARRAYRRSLGPTSECRRVPQPRWVEREGEREGGEARQPETGMREVGIPRPSCLSRAQVGVMMALPVDVAGVRPRLGDVEAPPKPRSSLSSMAEAESEPLGRARRRSSADARAESEPWGRAKRSSSSSGAEPESEP

SEQ ID NO: 50289 - protein, 142 aa, Zea mays
  Coding DNA Sequence Number=SeqID_6914
MDGGGYSSISRRGFVRAGFDLDGDDGYYYDDVVVFHPSSFSSSSSSKADGPGAPYHTAGAPRPSARARLRALWRRVMREKKRILLCSTGCVPAPPPPREPYDAYSYAQNFDDGEAWVEPDDHSRSFSARFAVPSRAFQRVAA

SEQ ID NO: 50290 - protein, 22 aa, Zea mays
  Coding DNA Sequence Number=SeqID_6915
MAERDGKKDDGARKQVHEKDDK

SEQ ID NO: 50291 - protein, 1245 aa, Zea mays
  Coding DNA Sequence Number=SeqID_6916
  Gene Ontology: Mol. function=protein binding; Cellular component =nucleus; Biological process=multicellular organismal development
  Homolog annotation: Hit_ID=Q9AWL7; Match level="QueryCoverage=83%, HitCoverage=99%, E-value=0.0, Identity=78%"; Hit description=Protein GIGANTEA
MALPVDVAGPRPRPGDVGAPPKLGSNLSSVAEAESEPLGRARRKSFGRGQGGVRALGSGEAEFVVFRGRARVRALGSGGAEFAVFRVLARVRALGSGGAEFAVFRVLARVRALGSGGAEFAVFRVLARVRALGSGGAEFAVFRVLARVRALGSGGAEFSMAPLARPDCLSDSLYRVVLQSEWRRRRCPSVRPALELPSMSDSNVKWIDGLQFTSLYWPPPLDAEQKQAQILAYVEYFGQFTADTDQFPEDIAQLIQSSYPSKENRLVDEVLATFVLHHPEHGHAVAHPILSRIIDGTLCYDRHGPPFSSFISLFSHNSEQEYSEQWALACGEILRVLTHYNRPIFKVERQHTEAECSSTSDQATSSDSTDKRSNNSPGNESDWKPLRPLTPWITDILLAAPLGIRSDYFRCRGSGKHPQLMPSTPRWAVANGAGVILSVCDEEVARYETANLTAAAVPALLLPPPTTPLDEHLVAGLPPLEPYARLFHRYYAIATPSATQRLLFGLLEAPPSWAPDALDAAVQLVELLRAAEDYASGMRLPKNWMHLHFLRAIGTAMSMRAGIAADTAAALLFRILSQPTLLFPPLRHAEGVEVHHEPLGGYVSSYKKQPPTLSWSLYLPLLKVFEYLPRGSPSEACLMRIFVATVEAILRRTFPSETSEQSRKPRSQSKNLAVAELHTMIHSLFVESCASMDLASRLLFVVLTVCVSHQALPGGSKRPTGSDNHSHEEATEHSRLTNGRSRCKKRQGPVATFDSYVLAAVCALSCELQLFPFITKNGSHSNLKDSMKIIISGKNNGMNNELHNSISSAILHTRRILGILEAVFSLKPSSVGTSWSYSSNEIVAAAMVAAHVSELFRRSRPCLNALSALMRCKWDAEISTRASSLYHLIDLHGKTVSSIVNKAEPLEAHLTLTPVKRDNQHHREESNTSSLDSVKLENKNGSTSHKKNGFSRPLLKCAEEVLLNGDVASTSGKSIASLQVEASDLANFLTMDRNGGYRGSQTLLRSVLSEKQELCFSVVSLLWQKLIASPEMQMSAESTSAHQGWRKVVDALCDVVSASPTKASAAIVLQAEKDLQPWIARDDEQGQKMWRVNQRIVKLIAELMRNHDSPEALVILASASDLLLRATDGMLVDGEACTLPQLECRLSTTIRCLSHPSAHVRALSMSVLRDILSNGSVNPNKTIQGEQQRNGIQSPSYRCLAAGIINWQADVERCIEWEAHSRRATGLTLAFLSAAAKELGCPLPS

SEQ ID NO: 50292 - protein, 147 aa, Zea mays
  Coding DNA Sequence Number=SeqID_6917
MGKNNKRKREPTPPSEEFGDSEYSEEEFSSESEGSPAPVSLRESSDDSDDSQGLAAEVWTYIRAVERSRLEGSDESEYSSDEEDSDGGGEDEDDDDDDGDDDGDGDGDGSGGDSKDGDGGGSRGSNRGGSSRGSTRGGGGGSNRASG

SEQ ID NO: 50293 - protein, 53 aa, Zea mays
  Coding DNA Sequence Number=SeqID_6918
MAPKRKTASSSAAVIPPIDPNSQLPFAEHPATERHGLSSISVSRASRLNSGYQ

SEQ ID NO: 50294 - protein, 468 aa, Zea mays
  Coding DNA Sequence Number=SeqID_6919
  Subcellular localization annotation: CTP_CleavageSite=41; ConfidenceScore=5.59e-01
MSSRSPHALRLSTFRAPGWGAPAVLPPCRRWRNTTSQKLVPFSHRSASRIFIRQPGRIPSSVVTQDGDHQFQGGEKQAGLRPLPLPQLQGCSSSVLGRGVRRVRACLRAGSGPLLPSVMGGRAFAVRGAGSCRVSGSPARAASAPLPVPLPAEAAERGFSADEIVGAARELTSNSTTFCLSSPLEWGRGRGPYGSSIHPEVIAAAVRPLGAEVVVAAALRASVSRLGFRRPPLFDEPKLEAAVLSWTEAELARKEDFVGRSLAGPSTGGTDGGVELPRLRAGLVSSEDSWLRLRGGRPSRLLGPDSWRRPRRRWPGRGADVVLRSGDPPTVLPSEARSDFAEGGVDAEGAAAPPPSTSEPAGSVHLVVIVCPSESYFSRKVMSEDSVIDIVEKARKIASAERFPSIKTCSVSGIAYPSVSYLSQKVMSEDPTFPRKILSSRKARKTKDVLTEKIFSEENFDTEGVPPF

SEQ ID NO: 50295 - protein, 20 aa, Zea mays
  Coding DNA Sequence Number=SeqID_6920
MGLVFCSQQTVQVFELSNSS

SEQ ID NO: 50296 - protein, 166 aa, Zea mays
  Coding DNA Sequence Number=SeqID_6921
  Homolog annotation: Hit_ID=P17847; Match level="QueryCoverage=18%, HitCoverage=5%, E-value=6e-07, Identity=86%"; Hit description =Ferredoxin--nitrite reductase, chloroplast precursor
MEEIHAAKLTKDDVDVRLKWLGLFHCCKHQCTLTKSTPPAMGKLLVEGITQCAAWHGRTIRQQTQQARRLLDDLDTAYQQMGRDALNAERARRPSAQWQAARPLLNKCRGCMALRQARPDGLCHGQQAAGLRLSGKTVSTTVAKWFVPITRGTVDKIYRFGPLRDA

SEQ ID NO: 50297 - protein, 874 aa, Zea mays
  Coding DNA Sequence Number=SeqID_6922
  Homolog annotation: Hit_ID=A2Y9N4; Match level="QueryCoverage=46%, HitCoverage=17%, E-value=5e-14, Identity=23%"; Hit description =Putative uncharacterized protein
  Pfam annotation: Domain name=zf-CCHC; Domain location=223-240; Score =10.5; E_value=0.039; Accession=PF00098.14; Description=Zinc knuckle
  Pfam annotation: Domain name=zf-CCHC; Domain location=242-259; Score =16.6; E_value=0.0046; Accession=PF00098.14; Description=Zinc knuckle
  Pfam module annotation: Pfam domain module=zf-CCHC::zf-CCHC; Domain location=223-240::242-259
  Subcellular localization annotation: CTP_CleavageSite=83; ConfidenceScore=5.42e-01
MARASSGPARDPSSPARDPSTAHSTAPPNSPVAYHPTPAAVHSINGGAAAPLRPKSSTSAAQARSVGRHPAPATIHTIYDAATASLRQVASPSAPSSPFPESSTSATQGRSKFQRWNESAAGSPDDGLQPRSWAGRPLFRDTLLHPRVPLVPALTASSPREPSPLETGTLNPHHEHQHRWFRGLESAPETTLGGWTRVESRKAKKRRLRALRARRPVPNDLKGRCFNCFADNHLAAFCHLEPRCFRCKTVGHRSYYCPGPVKADRKVPVHRRLLRGTVWNRLSTVEPTIADRVPQYQLPRVPVWKRLQPFVPLSCKKVCIWRRISPPGIEKGPAHHMMIAGGVDAHVSDSPPREVGAAARSASLGTLPPRPRRRRQRKRKSSSRGGSDPGWMQSDQPGNDEAPLTETGSTHHQQPCVIGWNSLMEKAEEDLKFAVSIFVVSDVPVSDVDIADAVAQKLEVSSDSLILRKLAHGHFLLMLPSLQFADQLTVRWNTIRAGAFSLHCKKWSKFFGSSSASLPIPVEFELRGIPIHAWELTTVQQLLNPFAWVQEVHDDTLQLKNLDVFRCYGWCYDLALIPQTRDLWITDPLGIGPGVGRLALVYHVQIKVLVGQRAVPDPTQVPSDLDDSAWRRRRFCSRSPPGDRDGRRGSADDGDPVDEPGTVEQLAPSTEDSIAVTFIPSANLPLLTWEEDRLGAAVVPDIVSNQGIPHPVERHRSVEPQDAAINRRGGLPSNLQVYFRRKRHSKKCSAPDAPAVSFNDLEKIIKPVVQLLPMPVAKIRSSKTVVAVPRRSRRVAGVKPCSPGPIITEAQKKVIRSLGLAATEEAIDQKAQDNYFKLFEGRLTDSHLAALAAIFGWQAERFDDSSSPVLLAGC

SEQ ID NO: 50298 - protein, 48 aa, Zea mays
  Coding DNA Sequence Number=SeqID_6923
MAKKKTGLIGKRGYVIVYTENSEFHLRNEIYSGKAVTAQHKELPKSME

SEQ ID NO: 50299 - protein, 32 aa, Zea mays
  Coding DNA Sequence Number=SeqID_6924
MAMMDSTLEKMYLCQEFLDSFVNGFFDNPYRF

SEQ ID NO: 50300 - protein, 393 aa, Zea mays
  Coding DNA Sequence Number=SeqID_6925
MGNTRSSSALSLEERNFAEVGTFQPSFGFKDFHQPSRPHPLAGGHPRRFKDVHHQCWRGECAELGSVPARAVARSFPQRSGGRAFAVRGAGSCRVSGSPVRTALALLPVPPFTAAAGRGFSADEIVSAARGLTSNSTAFCSSSPLEWGRGRGPYGSSIRPEVIAAAVRPLGAEVVVAAAGAGGDEPSIDLLLLCRPSNRGGNPLPLFDEPKPEAAVLAWTEAELARKEDFVGRSLAGPSTGGTDAGVELPRPRAGLMSSGDSWLRLRGGRPSCLLGPDSWRRPWRRWPGRGADVVLWSGDPPTALPSEAWSDFAEGVVDAEGAVAPPLSRSEPAGLVYLVVIVCPSESYFSWKVMSEKVMSEVSVSRRRRSPSARSALAAYVYSVVFRIPLSK

SEQ ID NO: 50301 - protein, 382 aa, Zea mays
  Coding DNA Sequence Number=SeqID_6926
  Subcellular localization annotation: CTP_CleavageSite=73; ConfidenceScore=5.06e-01
MQAACDRTKGAHPFDFDASSMEAPGPHVMQPAGGSSGQVVSQARVPFWDSERTLSHGVKTARPCSVPRTARARATAAPRTTRPVALTLRQDRCHLWQEKQATLRSRHNDHVKKVCHVIRFHILFLFLFLSLTTGTGKGDTPKGILLREGNGPRAPLLIRGSKAGPSKGFNSRLRAPRLCAHYWSEVRRPAPRKGSTAASGHSGSAPTTDQGFVGWPSKGSTTSSDAERGMTLGSGAALANPAPAKPLKASTYQPENLGPDSKSGLGRHRKLCLTRPQGSDSASAPEDDELRLARPQGSDSALALADGLRLARPRGSDSTSTSEDRLNLDLGGASALPDPGARTRPRPRKTDSTSTSEEPPPRPTQGSDRPRHRRGHHYPTPS

SEQ ID NO: 50302 - protein, 250 aa, Zea mays
  Coding DNA Sequence Number=SeqID_6927
MVGISAVTARAAAGVSGALYAKAVRPGRERGIDGDGCHVWGQSTLTCRTIQEMVDEVGSEPLGRARRRPSAEARAESEPWGRARRSSSSSGAEPESEPWGRARRSSSSSGVEPESEPWDRARRSSSSSGAEPESEPWGRARQSSSSSGTEPESEPWDRARRSSSSSGAEPESEPWGRAMQSSSSSGAEPESEPWGRAMRSFLWRLRPDLAAVSLTLSSGTAVGGGAGGAVLLSGRSVERRSDCGHFGSVD

SEQ ID NO: 50303 - protein, 152 aa, Zea mays
  Coding DNA Sequence Number=SeqID_6928
MALRLPARLLPPWLTPPHAPGPPCRELALARIWRSAPASLLPPVLPAHCSPAAPSLASASLASRVELHPWPELLPALLVGRASSLACSCSSLDARPCSSLFSTVPASLSLSSLRTPSRAAPSVARSSPTSLAVASSFLVSVPLSLVSCAALL

SEQ ID NO: 50304 - protein, 68 aa, Zea mays
  Coding DNA Sequence Number=SeqID_6929
MSNAARAVLVFWDAPGEDESEDLSNLRLLYNEPKLKVAVAWTEAMSARTEAFSVREQAAFRAEKVQQR

SEQ ID NO: 50305 - protein, 107 aa, Zea mays
  Coding DNA Sequence Number=SeqID_6930
MTLGTSVTWLRLGLRSRGTLGHFRDQREQFVMESHRREAPSPRTLSNGSGSSKSSAEARGLLPHQATAKSSTTSTKQLKNSEPDHAPGLRPGRLREQQGRPRHHKKN

SEQ ID NO: 50306 - protein, 113 aa, Zea mays
  Coding DNA Sequence Number=SeqID_6931
MGGKEESATPQRLHEPQTVAVADAIPTCRQRHASMSPRPLPPGCRRGPGQPCRQDADEALVSPAALAKGRRLSHVAATSWNPAKNRTDATKPKQNRPAATFLGVARTSGGALR

SEQ ID NO: 50307 - protein, 267 aa, Zea mays
  Coding DNA Sequence Number=SeqID_6932
MKSCMALGSQSLEKSQLTSGSSSSSEPTGPEVETTVSRSQVDHIWYPRRSGYALTKALTEAGSLSGSKLNLKGTGWKTDGTCWLVDGSEVASEVECAVISGVRLMPDKGASVVDSLWSDSRRGAAPRLAMVAPSPSPPARRVAGLTQVFFFRHVEMSSSSSSSPPGKLTTVVVVVLRGEQYHVVAAVEGHELKTSEVEHHPGLKRLLKIVHLELNGKVLSTRSVPLPGAPTVGVSDPGDPQLDRLVNFSVACPYPDGLMQDGTQAKG

SEQ ID NO: 50308 - protein, 885 aa, Zea mays
  Coding DNA Sequence Number=SeqID_6933
MEVVELVLRARNKWGNWWEFWFYVAEATVEDHPGLPVAEMCSHYYSVYQQFEVVEEDENEEALRCAARMSSGRDLVEEFVRYGVWPLARGWAVGEVCPRQMPSRGGMLVRSPAFALDLHGRDPAAFVREAEDGAVRIVGRYVPKTEAQRSWDIRGPNDRLNRVFELNRLPYGGYPGQDVVDRRGKKMAAETEDDSAPAVAPSTKKRKLGTAMGGLGVSDSFAMELMGTCAAPRGRMSSPELRESSARMLEVTGGRWPKNVPIPRAAGEDSFTSRMARDLRVFPYGRNIAAVVSAVMNKDRQEAAQKRRAIIRLPEARPKRARGTAKATAPGRSGEGQLAVVPPVVATTVSAAVPGAKGGALNAGGEISAVAAVKDEAGTMSRRLREASQRLSQAADFADRVVSGALTADVSAEVERLRAQHADAVREKSVADSKCRKLAEKVDALEGERTDLRRQLLEERREANQAIAKVQAAQAEANLARVEGSLANQRAEEWEERYNALQARMKRAEASTCSEVEWTRKQLVDSYRELGARTADFEVPDREAGLRFLEWLQEELLALPAIVEGFMSFASLVTCEGAMNALSREGCSHYEVFDRCDDDFGREIFKVKDPVVKDSAGALFDRMWGPHGREVVRERSDRARDQAARAEVVEDFGPLNRVRPEAEANPVVAEAEVDLAPPPETGEGSHAAPTAAASGGGSSPTAVPRVEDPPKTTAEPAAEDPMAAAGSSQVQDFGPAHATATANFVAVSTVDDGNESDESASKFFDFVDSGSSVEWTEEYSDDYLDYFAALDVAVAETSPRGADAEVVPGPSAGRRRRRAVAKRRVSEVDGGRLRVGRAGKQELLSSPAGVSVGEGELRSLFEGEELRIMLFNYREMGIIPKVEPM

SEQ ID NO: 50309 - protein, 100 aa, Zea mays
  Coding DNA Sequence Number=SeqID_6934
MEHRGIWKLLGPPEEDSIKGTSKAFTTKIKMKTILARLKGNIANPKNQGHNNNLHRAISTHQPQEEEDVVESLEEDLTHNQESSIVFVDKIKATLRRLAS

SEQ ID NO: 50310 - protein, 160 aa, Zea mays
  Coding DNA Sequence Number=SeqID_6935
MTEEVNSRGRSILRKLRDSNKALSGRQLQEVEAPGASEEDMGTSPGKSTAYFVVKIRATIQERVKSPSKSKKKSQKPKPRKISRSRSCTLLRVIHPTYQNMWVIIPQLLLLRLVSRKFLGHISHLRRHYSLPTHETYENAEATKRYSFQNAELKIALKFD

SEQ ID NO: 50311 - protein, 166 aa, Zea mays
  Coding DNA Sequence Number=SeqID_6936
MGKSNKRKREPTPPSEDFGDSEYSEEEFSSESEGSPAPVSPPASSDDSDDSQGIAAEVWTYIRAVERSGLEGSDESEFSSDEEDSDGGEDEDDDDDDGDDDDGGDGDGDGSNSGGAAAARAAPEAAAARAAPEAAAARAAPGAAAARAAAARPVAKRHWSLDISIV

SEQ ID NO: 50312 - protein, 171 aa, Zea mays
  Coding DNA Sequence Number=SeqID_6937
MKTLTTFCGYHPLEMLMHPPLGLFPTEKKDDPMWCNHALQSDAMAHLANIAQTTKLTLDSREDFVVNLSSELVEKDLQVERLSQRITTLEQQVDIRDNTIDVLENQLHDVQRELEEANDHLDMHHLEMEANEVESEGEEAPEELGPAPGANGTTSAMPPSPASSVASTTQG

SEQ ID NO: 50313 - protein, 212 aa, Zea mays
  Coding DNA Sequence Number=SeqID_6938
  Gene Ontology: Mol. function=protein serine/threonine kinase activity; Cellular component=cytoplasm; Biological process=protein amino acid phosphorylation
  Homolog annotation: Hit_ID=Q7XB94; Match level="QueryCoverage=90%, HitCoverage=39%, E-value=3e-80, Identity=73%"; Hit description =Disease relative signal 1
MAPELYDEEYNELVDIYAFGMCLLELVTFEYPYCECSNAAQIYRKGEKPGSLAKIGDPEVKLFIEKCIAKVTERLSANELLMDPFLLDVSDEKIFYPVHPNINTTGHAQNIHFPFDIEADTLISVAMAMVVQLDLTDQDVTTIAEMIDAEIRSHIPDWAAEESIDNQGDEAAYSETHSSEGDEGTSELRDEIGCRYTHIGDMHWIFARHQRS

SEQ ID NO: 50314 - protein, 274 aa, Zea mays
  Coding DNA Sequence Number=SeqID_6939
  Gene Ontology: Cellular component=integral to membrane; Biological process=vesicle-mediated transport
  Homolog annotation: Hit_ID=A3ANH6; Match level="QueryCoverage=16%, HitCoverage=18%, E-value=2e-15, Identity=91%"; Hit description =Putative uncharacterized protein
MATKLKLLQGHMLLSSLVWFLSSLDSIASFIISNSTTLKLMPLSVLDTFIHKTKKLYLDTRTQRNLAKLNDELYEVHQIMARNVQEVLKCGEGMIRQLILKGINQASKETILSLGIYVDILRSIAGQLQKLVSVLTNRHRPLLERQELLLHCHQTRGNMVLAEIVSEFLPGDSVGVGMGGKIGLPPRLGCSSQQTGTIKNFLPVVALSGVQLPLHGAQPIFSIHGVRRVGEHWGMTSHEFSTLVSGHLRHLRWWLLLLNGGQSLTNGLNCLSLH

SEQ ID NO: 50315 - protein, 488 aa, Zea mays
  Coding DNA Sequence Number=SeqID_6940
  Gene Ontology: Mol. function=hydrolase activity, hydrolyzing O -glycosyl compounds; Cellular component=anchored to membrane; Biological process=carbohydrate metabolic process
  Homolog annotation: Hit_ID=Q10P58; Match level="QueryCoverage=80%, HitCoverage=91%, E-value=1e-160, Identity=72%"; Hit description =Glycosyl hydrolases family 17 protein, expressed
  Pfam annotation: Domain name=Glyco_hydro_17; Domain location=46-369; Score=407.5; E_value=2e-119; Accession=PF00332.9; Description =Glycosyl hydrolases family 17
MAPCCLLQIGWCLERPRGFRLAAALCAAVVALALAPALDATSASLLGINYGRVGNNLPPPQSVMPLLEGLGIGRVRMYDADPTVLRAFARTGVELIVGVPDECLAAVADPSGAAQWLKENVAPFLPDTKISVLAVGNEVLTGANSSTLSRTLLPAMQSLHGAVAALGLDKQITVTSAHNLGVLGTSYPPSAGAFRKDLLPYLCPILDYHARTGSPFLVNAYPYFAYSSDPRGVQLDYALLDPGFAGVQDPNSRLHYPNLLVAQVDAVYHAIAAANTAASRVVEVRVSETGWPSAGAANETAATPQNAARYNSNAMRLVAEGKGTPLKPGAPLRAYVFALFNENLKPGLASERYYGLFKPDGTPAYELSFKLPRDNSTFGHGDTGKGGGGIGGNGNGNGSSWNNSGGGNSGYYDISASARDTTDQEWSGVAVLGQRPDLVLLRWIRFACLLEMKPFPNTGSTLMDPKNRNPNWDRWGPKDASAGFPVVG

SEQ ID NO: 50316 - protein, 50 aa, Zea mays
  Coding DNA Sequence Number=SeqID_6941
MTLGDVGTDSSIKSKGITSIESTIETKATAYHPNGGIPLQDLRLWSKKIE

SEQ ID NO: 50317 - protein, 568 aa, Zea mays
  Coding DNA Sequence Number=SeqID_6942
  Gene Ontology: Mol. function=acyltransferase activity; Cellular component=integral to membrane; Biological process=metabolic process
  Homolog annotation: Hit_ID=Q10P61; Match level="QueryCoverage=93%, HitCoverage=97%, E-value=0.0, Identity=86%"; Hit description =Senescence-associated protein 15, putative, expressed
  Pfam annotation: Domain name=ACP_syn_III; Domain location=253-325; Score=-10.3; E_value=0.0093; Accession=PF08545.1; Description=3 -Oxoacyl-[acyl-carrier-protein (ACP)
  Pfam annotation: Domain name=ACP_syn_III_C; Domain location=418-504; Score=3.5; E_value=6.4e-06; Accession=PF08541.1; Description=3 -Oxoacyl-[acyl-carrier-protein (ACP)
  Pfam annotation: Domain name=Chal_sti_synt_C; Domain location=362 -506; Score=10.2; E_value=0.00026; Accession=PF02797.6; Description =Chalcone and stilbene synthases, C-te
  Pfam annotation: Domain name=Chal_sti_synt_N; Domain location=97-325; Score=-90.3; E_value=0.097; Accession=PF00195.10; Description =Chalcone and stilbene synthases, N-te
  Pfam annotation: Domain name=FAE1_CUT1_RppA; Domain location=115-405; Score=707.0; E_value=1.4e-209; Accession=PF08392.3; Description =FAE1Type III polyketide synthase-lik
  Pfam module annotation: Pfam domain module=ACP_syn_III::ACP_syn_III _C::Chal_sti_synt_C::Chal_sti_synt_N::FAE1_CUT1_RppA; Domain location= 253-325::418-504::362-506::97-325::115-405
MESAPAAVMERERLTAEMAFRGADEARRDGGEPAPSIVIKIRRRLPDFARSIKLKYVRLGIRHGGSPTSVLPMLCVPAVAAAAYSFVRLDVIYYSIDLLTCVAWLGTALLLLTVYYFKRPRPVYLVDFACYKPEEQLKISKSAFLEMTESTGSFNEAALDFQTKITNRSALGDETYLPPGVQARPPRLNMAEARMEAEAVMFGCLDALFESTGIDPRRDVRILIVNCSLFNPTPSLASMIINHYRMREDVKSFNLGGMGCSAGLIAIDLAKDMLQANPGSYAVVLSTENITLNWYFGNDRSMLLSNCIFRMGGAAALLSNRRADAGRAKYRLLHTVRTHKGATDECFNCVYQREDEVGKVGVSLARELMAVAGDALKTNITTLGPLVLPLSEQLKFLKSLMMRRVFRVKGVRPYIPDFRRAFEHFCVHAGGRAVLEEVQRSLSLQDTDMEPSKCSLHRFGNTSSSSLWYELAYAEAKGRVRRGHRVWQIGFGSGFKCNSAVWRALRDVPPLSSSTGAAAGPPGRKGAQSCCNPWVDDVDSLQKENHRGVPDQYQGKVIHVVASMPTHW

SEQ ID NO: 50318 - protein, 156 aa, Zea mays
  Coding DNA Sequence Number=SeqID_6943
  Subcellular localization annotation: CTP_CleavageSite=9; ConfidenceScore=5.32e-01
MPAPPPPPSAGKVTGQTRMLLFRNAGKTSSIPPPAGGLTVAIVVVARRRKEYHVVAAVEGHELKTPETEHRPGLERLLETTHLELDRKLFVNTQQAPTLARQLSAFRPRGVPGPTSKLSLRVPAQMGRRETEHKGENSKGKPQPRVVLRPGRMRLQ

SEQ ID NO: 50319 - protein, 102 aa, Zea mays
  Coding DNA Sequence Number=SeqID_6944
MALELEEIIVASRSGGGLRSEDSRGEDPPEEALEDANGGAWHGEGYAWSRMGDASAGWNNKSGRHGGKGAGGRSESPPLTPTSWGGGMGGGGVGWRRFRAGG

SEQ ID NO: 50320 - protein, 221 aa, Zea mays
  Coding DNA Sequence Number=SeqID_6945
MSGAPGVSDFKLFTLGNFQRPLRYNSPDCPVCTGHVRCSKEGRPQELASLGFSLQPLRYNSPDMSGVHRTVRCILGATATSRQRSPAGAFNARQKRAVVRHAGAGAPDIEQFMSGVHRTSRRAQKTEPQRSIQRLFGDVAVAPDMSGVHRTVRCAIEQTAPPTVKFGGAVCSMAHRTVRCTPDMSGATATSPNSRWIDRWGSVFWARLVVPVHTGHELFNV

SEQ ID NO: 50321 - protein, 1168 aa, Zea mays
  Coding DNA Sequence Number=SeqID_6946
  Gene Ontology: Mol. function=carbamoyl-phosphate synthase activity; Cellular component=cellular_component; Biological process=nitrogen compound metabolic process
  Homolog annotation: Hit_ID=Q8L6J9; Match level="QueryCoverage=93%, HitCoverage=91%, E-value=0.0, Identity=80%"; Hit description =Putative carbamoyl phosphate synthase large subunit
  Pfam annotation: Domain name=CPSase_L_D2; Domain location=193-429; Score=456.2; E_value=4.5e-134; Accession=PF02786.8; Description =Carbamoyl-phosphate synthase L chain, ATP binding domain
  Pfam annotation: Domain name=CPSase_L_D2; Domain location=751-963; Score=111.8; E_value=2e-30; Accession=PF02786.8; Description =Carbamoyl-phosphate synthase L chain, ATP binding domain
  Pfam annotation: Domain name=CPSase_L_D3; Domain location=489-612; Score=229.1; E_value=1e-65; Accession=PF02787.10; Description =Carbamoyl-phosphate synthetase large chain, oligomerisation domain
  Pfam annotation: Domain name=CPSase_L_chain; Domain location=622-749; Score=85.1; E_value=2.3e-22; Accession=PF00289.13; Description =Carbamoyl-phosphate synthase L chain, N-terminal domain
  Pfam annotation: Domain name=CPSase_L_chain; Domain location=71-191; Score=183.6; E_value=5.1e-52; Accession=PF00289.13; Description =Carbamoyl-phosphate synthase L chain, N-terminal domain
  Pfam annotation: Domain name=Dala_Dala_lig_C; Domain location=751 -952; Score=-81.4; E_value=0.00022; Accession=PF07478.4; Description =D-ala D-ala ligase C-terminus
  Pfam annotation: Domain name=GARS_A; Domain location=198-369; Score= -119.7; E_value=0.076; Accession=PF01071.10; Description =Phosphoribosylglycinamide synthetase,
  Pfam annotation: Domain name=MGS; Domain location=1035-1122; Score =104.0; E_value=4.5e-28; Accession=PF02142.13; Description=MGS-like domain
  Pfam module annotation: Pfam domain module=CPSase_L_D2::CPSase_L _D2::CPSase_L_D3::CPSase_L_chain::CPSase_L_chain::Dala_Dala_lig _C::GARS_A::MGS; Domain location=193-429::751-963::489-612::622 -749::71-191::751-952::198-369::1035-1122
  Subcellular localization annotation: CTP_CleavageSite=45; ConfidenceScore=5.61e-01
MATSLYTPSQLRPSHSQARRLGSHPRVCSARCPARRRRAAAISVRASTDGDAAVTVRRFPAAPTKAGGLSGVKKIMILGAGPIVIGQACEFDYSGTQACKALVEEGYEVVLVNSNPATIMTDPGLAHRTYIGPMTPTLVERIIDAERPDALLPTMGGQTALNLAVSLADSGALDRLGVRLIGASLPAIRAAEDRQLFKQAMDRIGLQTPPSGIGTTLEECLTIAEDIGEFPLIVRPAFTLGGTGGGIAYNRAEFEDICRAGLTASHTQQVLVEKSLLGWKEYELEVMRDMADNVVIICSIENIDPMGVHTGDSITVAPAQTLTDKEYQRLRDYSVAIIREIGVECGGSNVQFAVNPADGEVMVIEMNPRVSRSSALASKATGFPIAKMAAKLSVGYTLDQIPNDITKKTPASFEPSIDYVVTKIPRFAFEKFPGSEPILTTQMKSVGEAMALGRTFQESFQKAVRSLETGFAGWGCGPIKELDWDWEQIKYSLRVPNPDRIHAIYAAFKKGMRVEDIHEISFIDKWFLTELRELVDVEQFLLSRSLDQLSKDDFYQVKRRGFSDKQIAFATSSSESDVRSRRLALGVTPSYKRVDTCAAEFEANTPYMYSSYEYECESAPTNKKKVLILGGGPNRIGQGIEFDYCCCHASFALREAGYETIMMNSNPETVSTDYDTSDRLYFEPLTVEDVLNVLDLERPDGIIVQFGGQTPLKLALPIQQYIEENKMVSASGTGNVKIWGTSPDSIDAAEDRKRFNAILEELGIEQPKGGIARSESDALAIASEIGYPVVVRPSYVLGGRAMEIVYNDEKLIKYLATAVQVDPERPVLVDKYLIDAVEIDVDALADTAGNVVIGGIMEHIEQAGIHSGDSACSLPTRTVSAKCLEVIRSWTTKLAKCLNVCGLMNCQYAISTSGDVFLLEANPRASRTVPFVSKAIGHPLAKYASLVMSGVTLPELGFTEEVIPKHVSVKEAVLPFEKFQGCDILLGPEMRSTGEVMGIDYEFSGAFAKAQIAAGQKLPLSGTVFLSLNDLTKRHLAEIGRGFRELGFSIVATSGTAKVLQLEGVPVEPVLKIHEGRPNARDMLKNGQIQIMVITSSGDALDSKDGLQLRRLALAYKVPITTTVDGARASIDAIKSLKNKSIEILALQDYFQTADASEDLQAVARTAP

SEQ ID NO: 50322 - protein, 211 aa, Zea mays
  Coding DNA Sequence Number=SeqID_6947
MVLVLIIEEANGGCQGPGRLEQGALGYEGRSRATTFHMLLRISQIALLAICAPSQIALLAICALLCAAPIMGATLPGRAWEQAPPPRYSSETSPDTDPRSGYCTPMRTFHSMRTSSFSPSSDVPFVFPTFVLFFLPNLLPPPTVAVAGRPALVDASTGRVDLTPGLSPCVVLRRTRWRLPRLGYLSDEESRAGKALVLSRPSRTDAWCGCL

SEQ ID NO: 50323 - protein, 218 aa, Zea mays
  Coding DNA Sequence Number=SeqID_6948
MKLPERGIELCLAGEASPRSPDFTRPLVNVDRAPRIHVSYSLHSIDCNLADGEYILVPEQGVAQEENNVTRPAPTAVPPARVRLTIAKFSLRRNRKLCLARPWASASGGGLRLARPQGSAPTSALEGGLRLARPQGSASTSASEGGVRLARPQGSASTSASEGGLRLARPQGSASTSTSGGIASLSDPGLGLRRSLCLARPWARTDRATRIHHYPTPS

SEQ ID NO: 50324 - protein, 332 aa, Zea mays
  Coding DNA Sequence Number=SeqID_6949
MADPAGGRGQPCPGIVNDTSLDVPGLMTRFSRECSACPLLLDVLPELHKLPCFLVELGLHLVDLLELPRGIVILRHTKIVAFVATPQIDVETFVTWVTNFVVKAVAIIGAIGEAVVICGHEVPHSTGITEPGEIPTRVRLVFFLGNQGLVGRDDRQSVPGWKTEGTSRSMDGDEVTSGTDCTVISGTRREDNARHVPHWGAGVVDSLDSRRGADSCLAMVAPPPPPAARKAAGQTRMLLFRHGGKTSSSSPPSGKVTAIVAVSLRGEEYHVVAAVEGHELETPEAEQRPGLKRLLETTHLELNGKLFVNTQQAPTWRANCQRFDPGGVPGPT

SEQ ID NO: 50325 - protein, 208 aa, Zea mays
  Coding DNA Sequence Number=SeqID_6950
MYLVILLLHLPESFCKDDICCTDCVYKDIVNQKPLDDTRYNHCIIVRIILELKVFLGEELEPPVIGSISFVAEGATAWLPCEAIVAVVEITRVYLVFSFSARSEPKLMVASAFCIVASMQGLRLENLRQKKGGPLYHFAEGVFVLRTFGGEDPQQLPYMSSNTLQWSHITKPNTGTTQTKGQGKLSSFGFLPSSHFETILLLVTSFTS

SEQ ID NO: 50326 - protein, 138 aa, Zea mays
  Coding DNA Sequence Number=SeqID_6951
  Homolog annotation: Hit_ID=A5B1P9; Match level="QueryCoverage=97%, HitCoverage=9%, E-value=3e-11, Identity=30%"; Hit description =Putative uncharacterized protein
MDTHRPPHFDGTNFPYYSARMTCYIEAIDLGVWRVTHDGMKPPKNPEKLTTNNELVRYMYSHLNLIINELNSIGINKLGDADIVRKIISLLPQQRYGSIITILHNMEELSTMTPTIVIGKIAAFEMSRKMCRGEEPNF

SEQ ID NO: 50327 - protein, 394 aa, Zea mays
  Coding DNA Sequence Number=SeqID_6952
  Gene Ontology: Mol. function=nucleic acid binding; Cellular component= cytosol; Biological process=regulation of mRNA stability
  Homolog annotation: Hit_ID=A2X692; Match level="QueryCoverage=66%, HitCoverage=92%, E-value=1e-135, Identity=89%"; Hit description =Putative uncharacterized protein
  Pfam annotation: Domain name=RRM_1; Domain location=106-177; Score =40.9; E_value=4.7e-09; Accession=PF00076.13; Description=RNA recognition motif. (a.k.a. RRM, RBD,
  Pfam annotation: Domain name=RRM_1; Domain location=199-271; Score =70.2; E_value=7.1e-18; Accession=PF00076.13; Description=RNA recognition motif. (a.k.a. RRM, RBD,
  Pfam annotation: Domain name=RRM_1; Domain location=300-365; Score =73.2; E_value=8.7e-19; Accession=PF00076.13; Description=RNA recognition motif. (a.k.a. RRM, RBD,
  Pfam module annotation: Pfam domain module=RRM_1::RRM_1::RRM_1; Domain location=106-177::199-271::300-365
MQMAAAVAPTDAPASASAAAAPSRPHAHAAAAVAAASPHPHALHPHHHMPQPRWVVIPYPPPHHPMVAAPPPPSLQFVKHFTPPSSVTPPPPTGSGGNGGEDNRTIWVGDLQYWMDENYLHSCFGSSGEVVNIKVIRNRHSGVSEGYGFIEFYTHVSAEKALQNFSGHVMPNTDRAFKLNWASYSMGEKRSEISSDHSIFVGDLAVDVTDAMLLELFSNKYRSVKGAKVIIDANTGRSRGYGFVRFGDDNDKIHAMTEMNGVYCSTRPIRVGPATPRRSQGDSGTSPPRQSHVDSTNRTVYVGGLDPNVSEDELRKAFAKYGDLASVKIPFGKQCGFVQFVNRVDAEEALHGLNGSTIGKQAVRLSWGRSPASKQWCDNVAKYGMGMTITNEKR

SEQ ID NO: 50328 - protein, 39 aa, Zea mays
  Coding DNA Sequence Number=SeqID_6953
MAESGLATVAECSGCLAGSAELAGAKCCAWGVRGHYFMG

SEQ ID NO: 50329 - protein, 397 aa, Zea mays
  Coding DNA Sequence Number=SeqID_6954
  Subcellular localization annotation: CTP_CleavageSite=48; ConfidenceScore=5.63e-01
MAAAGGRKQQSNHLQAHVRSWNSERALSYGVKTTRPCFVPRMARACTTAAARTTRPVTLTLRQGRRHLWQAKRATLHLRRNDHVKKGTGKGDTSKGILLREGSGPQAPLLIRGSKAGPPEGFDSRLKALELRAHYWLEVRRLAPRKGSTAASGHLGSAPTTDQRFVGWPPNGFDSHPRARRVRDDFVYVRYITKARATLPRGSGATLANPASANPLTASTYQPENSEPDYAPGQQPVRMREQPGRPRHHERHQDLEGVKPLLRGLEGYTRQENSAACAAPTAVPPARLRLTAAKSSLGRHRNLRLARPQGSDLTSLQKKVSASPDPRAQTRPRLGRRSPPCPTQGSDSTSTSEDSLRLARPQGSDSTSTSEDGLRLARPQGSDSTSTSDDGLRLARP

SEQ ID NO: 50330 - protein, 409 aa, Zea mays
  Coding DNA Sequence Number=SeqID_6955
  Gene Ontology: Mol. function=GTP binding
  Homolog annotation: Hit_ID=A7PKU7; Match level="QueryCoverage=94%, HitCoverage=94%, E-value=4e-90, Identity=45%"; Hit description =Chromosome chr7 scaffold_20, whole genome shotgun sequence
  Pfam annotation: Domain name=MMR_HSR1; Domain location=9-116; Score= -20.6; E_value=0.082; Accession=PF01926.14; Description=GTPase of unknown function
  Pfam annotation: Domain name=Ras; Domain location=11-198; Score= -92.4; E_value=0.022; Accession=PF00071.13; Description=Ras family
  Pfam module annotation: Pfam domain module=MMR_HSR1::Ras; Domain location=9-116::11-198
MEGSLEARPGVLLVGAPGVGKRTILSQFLGAEIPDVHDLSSGVLCQGWTIETKYYSADLSIWTANLGEEFSLDSLPHLDRVAALVMESTLLTLQSWAASVDIQRFEILLCVGNKADLVPGHSVHVEYRRRMQNLGESSSDPHPDYFNFGINESEGCSLLSEEEPCIKIRNSTAQWCIEQNIEYIEACASNADFDKCLSVDGDSQGLERLLGALSAHMWPGMILKSGNRITVPSLVEKQESTDDESNYDFEYEVLSHGSDDQWEFIGETSTSRRFERPNEPDGAQDHTHQVVNAGTDSSASNSPPTNTPTETAEENTVTQSNKTDNSDHVDKTTAYSTEDHQSDLREANHLFEDEHYGLDDLEKIMSEIGNMRSNLRLMPDFQRREMAAKLAMKMAAMFGDDDEEAFDDI

SEQ ID NO: 50331 - protein, 865 aa, Zea mays
  Coding DNA Sequence Number=SeqID_6956
  Gene Ontology: Mol. function=catalytic activity; Cellular component =nucleus; Biological process=metabolic process
  Homolog annotation: Hit_ID=A2XWU7; Match level="QueryCoverage=100%, HitCoverage=100%, E-value=0.0, Identity=45%"; Hit description =Putative uncharacterized protein
  Pfam annotation: Domain name=PPR; Domain location=236-270; Score =42.2; E_value=1.8e-09; Accession=PF01535.11; Description=PPR repeat
  Pfam annotation: Domain name=PPR; Domain location=337-371; Score =27.3; E_value=5.6e-05; Accession=PF01535.11; Description=PPR repeat
  Pfam annotation: Domain name=PPR; Domain location=407-441; Score =17.5; E_value=0.049; Accession=PF01535.11; Description=PPR repeat
  Pfam annotation: Domain name=PPR; Domain location=469-503; Score =23.5; E_value=0.00076; Accession=PF01535.11; Description=PPR repeat
  Pfam annotation: Domain name=PPR; Domain location=505-539; Score=3.7; E_value=2.9; Accession=PF01535.11; Description=PPR repeat
  Pfam annotation: Domain name=PPR; Domain location=571-605; Score =43.3; E_value=8.7e-10; Accession=PF01535.11; Description=PPR repeat
  Pfam annotation: Domain name=PPR; Domain location=606-640; Score =13.4; E_value=0.2; Accession=PF01535.11; Description=PPR repeat
  Pfam annotation: Domain name=PPR; Domain location=642-675; Score =10.8; E_value=0.41; Accession=PF01535.11; Description=PPR repeat
  Pfam annotation: Domain name=PPR; Domain location=708-742; Score =15.2; E_value=0.12; Accession=PF01535.11; Description=PPR repeat
  Pfam annotation: Domain name=PPR; Domain location=72-106; Score=30.0; E_value=8.8e-06; Accession=PF01535.11; Description=PPR repeat
  Pfam module annotation: Pfam domain module=PPR::PPR::PPR::PPR::PPR::PP R::PPR::PPR::PPR::PPR; Domain location=236-270::337-371::407-441::469- 503::505-539::571-605::606-640::642-675::708-742::72-106
MAVTQAFADALRSCGARGALAGARALHGRLVAVGLASAVFLQNTLLHAYLSCGALSDARRLLLMDIAHPNVITHNVMLNGYAKLGRLSDAVELFGRMPARDVASWNTLMSGYFQSRQYLVSLETFLSMHRSGDSWPNAFTLACAMKSCGALGWHSLALQLLAMVQKFDSQDDSEVAAALVDMFVRCGAVDLASRLFVRIKEPTMFCRNSMLAGYVKTYGVDHALELFDSMPERDVVSWNMMVSALSQSGRVREALDMVVDMQSKGVRLDSTTYTSSLTACARLSSLRWGKQLHAQVIRNLPHIDPYVASALVELYAKSGCFKEAKGVFNSLHDRNNVAWTVLISGFLQYGCFTESVELFNQMRAELMTLDQFALATLISGCCSRMDLCLGRQLHSLCLKSGQIQAVVVSNSLISMYAKCDNLQSAEAIFRFMNEKDIVSWTSMITAYSQVGNVAKAREFFDGMSEKNVITWNAMLGAYIQHGAEEDGLRMYKVMLSEEYVRPDWVTYVTLFKGCADLGANKLGDQIIGRTVKVGLIIDTSVANAVITMYSKCGRILEARKVFDFLNVKDIVSWNAMITGYSQHGMGKQAIEIFDDILKRGAKPDYISYVAVLSGCSHSGLVQEGKFYFDMMKRAHNISPGLEHFSCMVDLLGRAGHLTEAKDLIDDMPMKPTAEVWGALLSACKIHGNNELAELAAKHVFELDSPDSGSYMLMAKIYADAGKSDDSAQIRKLMRDKGIKKNPGYSWMEVDNKVHVFKADDVSHPQVLAIRKKLDELMEKIARLGYVRTDSTRSEIHHSEKLAVAFGLMTLPTWMPIHIMKNLRICGDCHTVIKLISTVTGREFVIRDAVRFHHFNGGSCSCGDYW

SEQ ID NO: 50332 - protein, 1391 aa, Zea mays
  Coding DNA Sequence Number=SeqID_6957
  Gene Ontology: Mol. function=ubiquitin-protein ligase activity; Cellular component=ubiquitin ligase complex; Biological process =protein ubiquitination
  Homolog annotation: Hit_ID=A3AWT1; Match level="QueryCoverage=63%, HitCoverage=98%, E-value=0.0, Identity=57%"; Hit description =Putative uncharacterized protein
  Pfam annotation: Domain name=Pkinase; Domain location=980-1259; Score= 243.8; E_value=3.9e-70; Accession=PF00069.16; Description=Protein kinase domain
  Pfam annotation: Domain name=Pkinase_Tyr; Domain location=980-1218; Score=-37.1; E_value=3.9e-10; Accession=PF07714.8; Description =Protein tyrosine kinase
  Pfam annotation: Domain name=U-box; Domain location=487-562; Score =40.8; E_value=4.7e-09; Accession=PF04564.6; Description=U-box domain
  Pfam annotation: Domain name=efhand; Domain location=1234-1262; Score= 38.6; E_value=2.3e-08; Accession=PF00036.23; Description=EF hand
  Pfam annotation: Domain name=efhand; Domain location=1270-1298; Score= 25.2; E_value=0.00024; Accession=PF00036.23; Description=EF hand
  Pfam annotation: Domain name=efhand; Domain location=1306-1334; Score= 34.2; E_value=4.8e-07; Accession=PF00036.23; Description=EF hand
  Pfam module annotation: Pfam domain module=Pkinase::Pkinase_Tyr::U -box::efhand::efhand::efhand; Domain location=980-1259::980-1218::487- 562::1234-1262::1270-1298::1306-1334
  Subcellular localization annotation: CTP_CleavageSite=74; ConfidenceScore=5.34e-01
MAPPPPSLLRELLTADGFKNRRKPLDSSAPPTSRAASMPLQHRRPGKPPSRSQSDVLTRSRLRQANADADDGSRDAAGAERRRAATATRGLSASLTSVRKVHSNKGEGDSGSGAGARRGASASDPSAVPALDESALTALISLAAGPLKRFALDEAFRASLRAGCASCLGDSSHRAVLDLRVQSQTVERAAREGLDPRELKRASLRLHEVASLQGKDADAVTAAGVPHTRLAACAHLYMSAVSKLQKRDHSAAVHALEAFCLAPREARTVLLPALWDRLFRPGLSHLRTWRDRESASASADERVEEVEKVFLGVLDDGTRALACYYRDWLLGRTDAMALPDVPAPPSTVHPSTPRCSASTSYDISSEVMFGSGSSSLAKFAYDDIMRASEEIEEEEEAVYPEAAAEAVTVLHQDQERDGAGGEERSYTPTPLAEENEPVPNNVDRETFDPHSPSAYNFVLMGVISCKLISEAPLQSDTNGNELSIFSTVPSDFLCPLTRQIFSNPVTIETGQTFERHAIVQWLDRGFRTCPVTGQDLSSSTVPDTNRVLKRLVDSWRSEHFKHLTSGGAGLDVKLTVSAIDKALGSARDVSEKFDRARHLMAIGGIDFLLCKFQEGGGDEQPRVAEHLLSCIRAEGSCRDYVAIKMDGSSILRLLQSKVLSTRRTAVDLLMELVEPNRNNTYREEAIKAITRSLRCCLSEDTVVPSTRRALLLLGGQFTFSGDLHAEDWMLEHAGFVDPSRATTATSDAVDKKAAENDAWLRHVAAALLGSRSGIRRPFLEALSRCLGSPNAGLVGACLTTAAWLSRSLASLDEDGATDTSLAAFSALVPRLKQCLAPGRPVRHRVLAAVSLHNFSRIPDCRELLMLLADGMRDHLAELAQLTWTAAVYASLVRFIPNPFGLSGALRSKYLHSFKHAASQRHDSEYSASADDSPRKPTPPATTDAHAPAPPAAAMRRGAAGATPDLGSVLGHPTPNLRDLYALGRKLGQGQFGTTYLCTELATGIDYACKSISKRKLITKEDVDDVRREIQIMHHLSGHKNVVAIKGAYEDQVYVHIVMELCAGGELFDRIIQRGHYSERKAAALTRIIVGVVEACHSLGVMHRDLKPENFLLANRDDDLSLKAIDFGLSVFFKPGQVFTDVVGSPYYVAPEVLLKSYGPAADVWTAGVILYILLSGVPPFWAGHPWIRDHGVAPDRPLDPAVLSRIKQFSAMNKLKKMALRVIAESLSEEEIAGLKEMFQIMDTDNSGAITYDELKEGLRKYGSTLKDTEIRDLMEAADIDNSGTIDYIEFIAATLHLNKLEREEHLVAAFSYFDKDGSGYITVDELQQACKEHNMPDAFLDDVINEADQDNTHFIDQHSSFDAQLINVANAFKCNELPSESFYLIKAYTN

SEQ ID NO: 50333 - protein, 58 aa, Zea mays
  Coding DNA Sequence Number=SeqID_6958
MRLGVPFIAPRQLGAVEHKSGRPFLPSVVGGTGQSATCLAQIARPTVGPADRWLTGQS

SEQ ID NO: 50334 - protein, 151 aa, Zea mays
  Coding DNA Sequence Number=SeqID_6959
  Subcellular localization annotation: CTP_CleavageSite=41; ConfidenceScore=5.59e-01
MSSRSPHASRLSIFRAPGWGAPAVLPPCRRWRNATSRKLVPFSHRSASRIFIRQPGRIPLPVVTQDGDHQFDGGEKRAGLQSWSRPQLQGSSSSWLGGGRAEPELYLPRGFVGHLLPQHSRERALTGLAGGSDFDNAGLVGGERRQLHRVG

SEQ ID NO: 50335 - protein, 428 aa, Zea mays
  Coding DNA Sequence Number=SeqID_6960
  Subcellular localization annotation: CTP_CleavageSite=36; ConfidenceScore=5.09e-01
MSGAPATSPGRWDSTVGASDFWACLAVRCTPDKYCRLSGAPSRACLASARFWRALNAPAETLFLGAPDTPVNYSGAPLDFPEGDEFDLESPGAPDTVRWHTGQSAGSGSAPGAPSCRESGCRAARTGGPPKTSRAARVAFVFWGCPAFAPVVAAEEVLVADGITATIRAPGLRLFGFDSLSSPLKRGRGRGPCCSSVRPEAIAAAVWPPGAEVVVAAAGAGVGEPSVGLLLPRRPSNVGGCSYLRRRNRSSICNGTLSAGVCSLWLSGPEHESLGSVGLAARGFSCLVKGNPRPLFDEPKPEAAVLAWTEAELAQKEDFVGRSLAGPSTGGTDAGVELPKPRAGLVSSEDSWLRLWGGRPSRLLGSDSWRRPQRRWPWRGADVVLRSGDPPTVFHSRLGRTSPKVELTLRVLLLALRRRPSLQDRFIL

SEQ ID NO: 50336 - protein, 148 aa, Zea mays
  Coding DNA Sequence Number=SeqID_6961
  Subcellular localization annotation: CTP_CleavageSite=29; ConfidenceScore=5.23e-01
MELLVHFNRTLPSWFGRSRSRRRPPPPVLVARIASTTSDADQHTDVTVVTSPTSLTTPPELYCRRYGGYKCGHCTTAVGVSEALYAKAVSLDLLTGNRWGRLMCVGTECLAMSCSLEDMVAGVTWPSALPPGWTVEWDPASAEEEHEE

SEQ ID NO: 50337 - protein, 263 aa, Zea mays
  Coding DNA Sequence Number=SeqID_6962
MTSHGSSNDGNALSHTDGLAREGFPRILWEVLQGAGYTTPPQYAVQQFEKHRVPRCRVRMTLEPHPLQPGWRSLDSESFGYRAEDTIEAIALHGLTTFCGFHPLELSTHPIGLFPAEREDDPMWKDRVEHAKDIWALYPGQTAHLTATKITLDNKEELVVDLSQEIVEKDLQVEQLSDEIQELEELVGTRENTIEVLEDQLINTQQQLAEANEHLDMHHQEIQDVEANEDVDIEGGEEPASSVDTAGSGRPPSPESSVASFAH

SEQ ID NO: 50338 - protein, 95 aa, Zea mays
  Coding DNA Sequence Number=SeqID_6963
MEHRPGLERLLETAHLELDGKLFVNTQQAPTWRANCRCSETGGSLSRRVNVAACPSSRWVECKSEREGGERGGRRPVRKERIQVYNGGCSRVLRV

SEQ ID NO: 50339 - protein, 252 aa, Zea mays
  Coding DNA Sequence Number=SeqID_6964
  Gene Ontology: Mol. function=kinase activity; Cellular component =ornithine carbamoyltransferase complex; Biological process=amino acid metabolic process
  Homolog annotation: Hit_ID=Q6QP54; Match level="QueryCoverage=41%, HitCoverage=36%, E-value=1e-17, Identity=50%"; Hit description =Putative kinase
  Subcellular localization annotation: CTP_CleavageSite=40; ConfidenceScore=5.12e-01
MAPPIDVAGLRPRLGDVEAPPKPRSSPSSMAEVGSKPQVRARRRSPAGAGAESEPWGRAKRSSSSSGAEPKSEPWVGRGGDRRLLGPSPSPSPGSGEAEIVVFWDLARVRALGRAEFAVFRDLARVRALGRAEFAVFRDIARVRALGRAEFAVFRDLARVRALGRAEFAVFRDLARVRALGRVEFAVFRDLAELPMVPLAGPDCLSVSLCQVAPQSGWRRRRCPSVRPLCADGGYQLRIRSLEGTPNYGPRQ

SEQ ID NO: 50340 - protein, 166 aa, Zea mays
  Coding DNA Sequence Number=SeqID_6965
  Subcellular localization annotation: CTP_CleavageSite=64; ConfidenceScore=5.07e-01
MDCQGKHGVKPPTPMLAGSDAAYVCKALVVSNKGSRSIWSSNEAAGGGQGQGRRCKAGAAAGPRAGTRVGGAVARLEQRQGHGRGQGGSPPHRQSCGGLIPAGEPPLPSAGTPLSPVASPSADSLASLASIAVLHHGALGGATNPVIPDSVAPELGGDSGHIPLMP

SEQ ID NO: 50341 - protein, 47 aa, Zea mays
  Coding DNA Sequence Number=SeqID_6966
MTEAERRTHRFGGVSGSSSRPGVHLYTHVLYKDLRSRRTQQARWMYS

SEQ ID NO: 50342 - protein, 99 aa, Zea mays
  Coding DNA Sequence Number=SeqID_6967
MEHSGQPEGDSPSVLSCSSMVAISNATVSDWRSTALVKALLEINSEPLKASLLHLTPNVSKPILAEIAGRKALLGRATCGWLLEALLEAFDFARGGGDL

SEQ ID NO: 50343 - protein, 396 aa, Zea mays
  Coding DNA Sequence Number=SeqID_6968
  Gene Ontology: Mol. function=helicase activity
  Homolog annotation: Hit_ID=Q5NA16; Match level="QueryCoverage=58%, HitCoverage=58%, E-value=2e-19, Identity=25%"; Hit description =Helicase-like protein
MAICSTKTPIPYKGTTIAMLFTPITELNPQKINVVIRVRVIRKLEFRGATNDGPLRHINLILADEQLTLLRISDVYTLQHTTYYTHFANTYYITHAGYNNSSIVKDIFIKDISDASLKITLWGDQASGFSIDNVCNQSNNKSIVIMFVGCLAKQFKGQSYLSGTTTTTWYFNPNIPEAQEYYINHKGLNAPPLYHDSYKITNGGFQLAPNAENLCLKPPLDTAAHHVVVQTYKLSFVATDGTCEAEFFCFDTIAKRIVGKPCDTLITTTMTSQGFPLDLAAIVSLKFTFVVTLNMSAFSLTNRVFSILYVLTNHGRQTSVPSTMLNYPQEQLLTQDDVFESTATQDSPATSFAKLSTSVRQENTVQRVLQYYDASKNSEFEKCKQCDYSAEVFTET

SEQ ID NO: 50344 - protein, 132 aa, Zea mays
  Coding DNA Sequence Number=SeqID_6969
  Gene Ontology: Mol. function=nucleic acid binding; Cellular component= spliceosome; Biological process=mRNA processing
  Homolog annotation: Hit_ID=A7PRL0; Match level="QueryCoverage=76%, HitCoverage=71%, E-value=1e-30, Identity=61%"; Hit description =Chromosome chr14 scaffold_27, whole genome shotgun sequence
  Pfam annotation: Domain name=zf-CCCH; Domain location=61-87; Score =31.8; E_value=2.4e-06; Accession=PF00642.15; Description=Zinc finger C-x8-C-x5-C-x3-H type (and similar)
  Pfam annotation: Domain name=zf-U1; Domain location=1-39; Score=44.0; E_value=5.3e-10; Accession=PF06220.3; Description=U1 zinc finger
  Pfam module annotation: Pfam domain module=zf-CCCH::zf-U1; Domain location=61-87::1-39
MPLGKYYCDYCDKQFQDTPAARKRHLQGVQHQRARALWYDSIRHQDQHGGASSLLLPDGTLAKGICHHFVRTGACKYGDSCRYFHPKPNGVNPALAAPGKILGGHASWGNLPPSLQPPPEGGYPPLPFIDWG

SEQ ID NO: 50345 - protein, 183 aa, Zea mays
  Coding DNA Sequence Number=SeqID_6970
  Gene Ontology: Mol. function=peptidyl-prolyl cis-trans isomerase activity; Biological process=protein folding
  Homolog annotation: Hit_ID=Q0JRB3; Match level="QueryCoverage=43%, HitCoverage=25%, E-value=2e-17, Identity=62%"; Hit description =Peptidyl-prolyl cis-trans isomerase
  Subcellular localization annotation: CTP_CleavageSite=59; ConfidenceScore=5.67e-01
MKGARVASGVQTPAPTQRHNPSPRPPPPKLGRRTAAGASIAIAVASALLAVSPAPSKAREAEAEAAVVVVSCLAKLPVTAKAFLDVSIGGEPAGRITAGLFGGGGGGAAPAGVARFLSLVMGMGYRRKEFMKVVPGYVQHGGVVSYLAEPAVTERLAAEAEAVRARCGARAVHAAAGAVSIPV

SEQ ID NO: 50346 - protein, 64 aa, Zea mays
  Coding DNA Sequence Number=SeqID_6971
MSPTREGYRIGSRGKRRGLLSEDAAALFSHRKELRHTVRVRREMVRVRLADGKKNLVREDSIQV

SEQ ID NO: 50347 - protein, 105 aa, Zea mays
  Coding DNA Sequence Number=SeqID_6972
MAGLSKRTPPRASQACRGTKTVYELDGDSPERAGHRRASFHGAADGIGGNLELELVGEPLGAILDVELYRLYNLHEAKKPGKFLSKKSWVSHVASASECWFHCIL

SEQ ID NO: 50348 - protein, 208 aa, Zea mays
  Coding DNA Sequence Number=SeqID_6973
MGEPVSGPVRGKVYRQVQSGPRAHAGEFVGGGDSGLTRAAGSNQTGLGVATRAGGENNSDEGGTASPVRHRLVSCFGELYGTLGKLAEARDLAEMDGSGLATVVECSGGLAGGAELAGAKDWAGTVRALCTGGHGPEWALGRSQLDAGRPLQIRPVMRSGHAGPVTMGRITRGPPCWTRSQARSAKASSEGWRLHLRPNICPPRDQFD

SEQ ID NO: 50349 - protein, 268 aa, Zea mays
  Coding DNA Sequence Number=SeqID_6974
MDCNLADGEYVLIPEQGTVQEEDQEQAPEAAIEDLPAAPAIEGKPRYGGYKCGHCTTAAGVSGTLYAKAVRCKIWLMMNSPTLASGGDTRFSSDFLSHDGFPSILWEVLNSACYPTPPLYTVQLYEEHRVPRCRVWLTLEAHPLQPGWRSLDSETVGFRMDDTTEAAAMKTLTTFCGYHPLEMVMHPLGLFTAEKKDDPMWCNRVSHVKDVWAMYPDLVGRVTVQCMSALYRLQALQSDAMAHLANIAQTTKLTFGTCSPRQVDPMGE

SEQ ID NO: 50350 - protein, 675 aa, Zea mays
  Coding DNA Sequence Number=SeqID_6975
  Subcellular localization annotation: CTP_CleavageSite=13; ConfidenceScore=5.22e-01
MPSSSSSAATTPTAEASSKDTSSNVAATELRPGDTVEFGVSRISLVRVQDMQQLGYFGSGVGRVPGAEEVHQLTPNVVVALAKYIWATTSYGEAEVKDHPGLPAAIMCSHYYVAYPPFDVAEDDENERAVRIAARTSSGRDLDEEFIGGGLGVSDSFAVELMGTFAALGGRMSSPELRESSARMLEVTGGRWAKNVPIPHAAGEDFFTSRMARDLRVFPYGRNIVAVVSTVMNKDRQDAAQKPRVVVRMADPMREAKRARGSTKAAASGSSKPLPAAKPAAPGPSKASTGAKTAAAGGTKPPPGGPSKGREPPSPAKLPSPGRRVADFGTNISVEDYLVGKFFFDWRYVAGSGEGQLVVVPPSVATTSPSAVVRAKGAAQDPWAAFYASGEILTATAAKDVTGTMSQRLREVSQQLKQHADAVREKSAEESKNRRLAEKAAQVEAKVARAENSLASQHAEEWEARFNALRSRVDKAEASARSKVERTHAQLVEAYHDLGARTADFEEELVVLPTFVQGFMSFASLVTGEGTMNALSREGCKHYEVFDQSDENFEREIFKVEDPCGKAMARAEDVEDLGDLVGALPEAEVNPVLPSDAGEGSSTAPVPTAAEESSDEDLDYFAALDVAAAEASPRVMGGEDLPGEGELRSLFEGDELRIMLFNYREMGIIPKVEPM

SEQ ID NO: 50351 - protein, 95 aa, Zea mays
  Coding DNA Sequence Number=SeqID_6976
MAGMEAKSHHQPNQGGTCKNYATSKAEYTNTQLDLPVAALVPTISRMGDLVSGHVRDKVRARLHSDWTQGFLAELDKNLLEDNTLEIPLESTDSD

SEQ ID NO: 50352 - protein, 50 aa, Zea mays
  Coding DNA Sequence Number=SeqID_6977
MGEANDLNSEFSLQGLTALAYNAPLTPAAAVQWPHLYPPYLEWETQSQVA

SEQ ID NO: 50353 - protein, 86 aa, Zea mays
  Coding DNA Sequence Number=SeqID_6978
MNLPLSLNCNLADREYVLIPEQGTVQEEDHEQALEATIEDLPVAPTIEASPGTLQDMVDGVTWPTTLPPGSTVEWDAAPAGEEHEE

SEQ ID NO: 50354 - protein, 309 aa, Zea mays
  Coding DNA Sequence Number=SeqID_6979
  Subcellular localization annotation: CTP_CleavageSite=35; ConfidenceScore=5.49e-01
MARARAYKALPGFDCTLPRTLKPHRSLARRRLPVRSVSVAAQSLCHRRPANRAIPNPVQPSEKTVHTSVKLPERGIGVCFAGEASPRSPELSTPPEYVDRVIHSTILRFLVHTITTLPREAHRALGLNQIVVVWPVHSPPTRTPACARGPSDSGHPRRQAVPRRDRQSLPEPTPPFAGPSSPPDTRAIQIPYVYPQQKPKPKDCNLADGEYILVPEQGAAQEVAPDPAPEPAPEDLPATALKGKPRRLCPSRDLRRGLPFRLWWVQVRSLHDGSRGSLEEMVAGVTWPSILPPGWTVEWDPASAEEHEE

SEQ ID NO: 50355 - protein, 136 aa, Zea mays
  Coding DNA Sequence Number=SeqID_6980
LAAEERAEGLTGGETAPVKWPRAGELVGGEESGLSRAQLTNQMGQRTSPGIKEGGRPKSGEGNLGSLVKFCRVRGLGKLHKLLAKLTERLARLGSNWGGLATVSEDRVAMAGGKELARAKEGPLAGEGIKVNTLGL

SEQ ID NO: 50356 - protein, 200 aa, Zea mays
  Coding DNA Sequence Number=SeqID_6981
MTLEPHPLQPGWRSLDSESFGFRAEDTVESTALDVLTTFCRFHPLMLSTHPIGLFPAEKEDDPMWKDWVERAKDVWALYPGHTAHLTVRCMNALYRLLALLGEVTSQLMVLVDSTKITLDNIEDLVVDMSTKLVEKDRLVEQMTTQIQELEDQVEARENTIEVLEDQLQTTSNSLRKPTSTWICTVMRFRIWRQKGPMRM

SEQ ID NO: 50357 - protein, 206 aa, Zea mays
  Coding DNA Sequence Number=SeqID_6982
  Gene Ontology: Mol. function=structural constituent of ribosome; Cellular component=ribonucleoprotein complex; Biological process =translation
  Homolog annotation: Hit_ID=O22424; Match level="QueryCoverage=75%, HitCoverage=78%, E-value=5e-63, Identity=65%"; Hit description=40S ribosomal protein S4
  Pfam annotation: Domain name=KOW; Domain location=165-199; Score =20.5; E_value=0.0061; Accession=PF00467.20; Description=KOW motif
  Pfam annotation: Domain name=RS4NT; Domain location=45-82; Score =77.6; E_value=4e-20; Accession=PF08071.3; Description=RS4NT (NUC023) domain
  Pfam module annotation: Pfam domain module=KOW::RS4NT; Domain location=165-199::45-82
MAKNFGSETVQIAMNAVHLRTSLQHRYLRVERSRNESTIEENEARGLKKHLKSLSAPKHWMLDKLGGAFAPKPSSGPHKSRECLPLILIIRNMLKYALTYCEVISILMQRHVLVDGKMSFPSLRQTRIIGCFRLHPIRDEDAKANDTIKIDLETNKIMDFIKFDIGNVVMVTGGRNTRHVGVIKNREKHKGSFETIHVLLGAFCYV

SEQ ID NO: 50358 - protein, 25 aa, Zea mays
  Coding DNA Sequence Number=SeqID_6983
MAPFIKVIVLDTERMQLKLVLDRDA

SEQ ID NO: 50359 - protein, 115 aa, Zea mays
  Coding DNA Sequence Number=SeqID_6984
MAVPEIVASHGIIVVEFYAPWFAASMAVPEGTTCFLHTICHRGQERPSSVGLLVADDGGTGPFASSGAGTGSLKAHQPDGWPRWRIWLRPLRRTVASRQETTTGRGSAAAGSEST

SEQ ID NO: 50360 - protein, 739 aa, Zea mays
  Coding DNA Sequence Number=SeqID_6985
  Gene Ontology: Mol. function=phosphoenolpyruvate carboxykinase (ATP) activity; Cellular component=endoplasmic reticulum membrane; Biological process=gluconeogenesis
  Homolog annotation: Hit_ID=A2X8I6; Match level="QueryCoverage=33%, HitCoverage=73%, E-value=1e-110, Identity=83%"; Hit description =Putative uncharacterized protein
  Pfam annotation: Domain name=PEPCK_ATP; Domain location=395-721; Score=-333.7; E_value=0.002; Accession=PF01293.11; Description =Phosphoenolpyruvate carboxykinase
  Pfam annotation: Domain name=SNARE_assoc; Domain location=84-205; Score=104.2; E_value=3.9e-28; Accession=PF09335.2; Description=SNARE associated Golgi protein
  Pfam module annotation: Pfam domain module=PEPCK_ATP::SNARE_assoc; Domain location=395-721::84-205
MGRDERFPVWEAALGAGVAAAFAAGLVGVYLSMPDSDYSFLKLPRNLQELQILTGHLENYTSDYTLQVLVGYCAVYIFMQTFMIPGTIFMSLLAGALFGQLRGVALVVFAATAGASSCYFLSKMIGKPLVFTLWPDKLSFFQRQVAKRREKLLNYMLFLRVTPTLPNTFINLASPIVDVPYHIFLLGTLIGLIPASYVTVRAGIALGELTSLSDLYDTQSIALLFLIGVVSVTPALLGKDEAQEKPSEMASSKSSWADDPTWATPQPHCWATRVELGMGSSPPPLRRAGSERRSPQPAAKRRQAGEGERWKRSGAPANRICSGFFVAQPSPQRHRRRRTSDRCGLPSCILRIQKHLMLNFQCAYHRSSERLSPIREDQEVSYGLNWAIAGKGVIVKDKVLHNLETSELQKGGATYPDFLSGIPLHVRGDVIGGVPGVSKAQFAKLLKLVTFHLSSISCLYVQDGAIGSSAECDAKVRVISDNPSAVMLLSNVLWKIPDRAISHDTSPLTIYATSSISNNVKTVLGSGTQYANGFAVADIERSSLILCGKAFADSAIVKDALTAMTAPILSARGGLPVPGWILNFGGSTVLLFAPVEIMMSCVEIHNALLSIDCGAVISSKGSGAIPSVCKLSPGQAAYHFLAGYHDGKFVPAYNRAPSPADPLALASSLFSHLKEDDTPSYLINAKHSGKYIDGNGFMKLLKLALSHDLPDIKTEGSRASLANVYPRNSLFRRYTLRLQ

SEQ ID NO: 50361 - protein, 624 aa, Zea mays
  Coding DNA Sequence Number=SeqID_6986
  Gene Ontology: Mol. function=RNA-directed DNA polymerase activity; Biological process=RNA-dependent DNA replication
  Homolog annotation: Hit_ID=A2Y9N4; Match level="QueryCoverage=37%, HitCoverage=11%, E-value=3e-14, Identity=25%"; Hit description =Putative uncharacterized protein
  Pfam annotation: Domain name=zf-CCHC; Domain location=19-34; Score =12.2; E_value=0.022; Accession=PF00098.14; Description=Zinc knuckle
  Pfam annotation: Domain name=zf-CCHC; Domain location=36-53; Score =18.0; E_value=0.0029; Accession=PF00098.14; Description=Zinc knuckle
  Pfam module annotation: Pfam domain module=zf-CCHC::zf-CCHC; Domain location=19-34::36-53
MAGWRHGASVAIVLLRWWCFNCLSHDHFAFQCTQKTRCFRCRKQGHRSFDCNLLKRPMRLEAVKVAVNNSAASRPETKISVWRRINLPEPSTTSGDRLREQPRPETRLSVWRRLSSSSATSVIKVKKKRLVWRRKDNQHPPSDSGIAVRHQETSTMEGDGGGLISLDAVGVQSKRQRTRKRRRRAKPISDLDKRPAGPVSPTEDDKPCILRWSQQMTRAEDDLQKAVVITVISDREKVPVEEIAELIAPRLELEEGTLIIRQYSESSFILFLPGCDMVEMLVGNWPFLRAATFTITCRKWSRFLNSRGAVLPVLLDFELQGIPIHAWETITVEQLLNPFASVHQVHPDTLELKDVAVYRCSAWCLDPSLVPASRELWIVEPPFVVDGISSGRRTLMYPIRITFSSAPRRDGSDPKLHAITSGGDGSGHVQQGSPPFSRPPHSSGRRGDHGHSGRLSVHERLGPRDESMQQRSISFGVAVSDLKRTLDSDGGNLPPRLAEMTDDMVIVSPVKAKQLKVYFRQRLKNVLNQEEAGTPNSVTVLPPSPSDVAAADTDPSEYPVSDVDAVLATPSRTLTSSLSDVAAAHAAPSEANALDVDAELAAPSEEDISEREMCLWAISKYFGD

SEQ ID NO: 50362 - protein, 467 aa, Zea mays
  Coding DNA Sequence Number=SeqID_6987
MPTSSSSAAATPAADASPPADASSEETLSTLVAEELRAGDTVDFGVSRMSSIRVQDMQRLGYFGGGVARVPGTEEVPEPEGELVVFEAFFAAGSDEGQLVVVPSAAATTAAAVMPKAKGGAPSAGGEMPALAAVRDKAGAVSRRLEEMKEALSQQVPQAGGQGGRAGGGKSGLRRQLVEERREANEALAKAQAALAEANLARAEGNLARERAVQLEERLNALQSRVERTEAATRAEAERTRKQLVDSYHELGARTGDFEVPDREPGLRCLEWVQEELQALPTIVEGFMSYASLVTCEGAMNALSREGCRHFEVFDQADEDFERDIYKVENPIVKESAGAIYNRMWGPHGREVVRERAETARAQAARGERVDDFGALNSALLDPESNPAEAVPEAALEPPPETAEGAPDALAAAVAGGGPPLETAESVPDAPAAAAAGEGPPPTADPTTVALEATAEAPAMAGSSQVA

SEQ ID NO: 50363 - protein, 655 aa, Zea mays
  Coding DNA Sequence Number=SeqID_6988
  Gene Ontology: Mol. function=helicase activity; Biological process =viral genome replication
  Homolog annotation: Hit_ID=Q8LML8; Match level="QueryCoverage=99%, HitCoverage=61%, E-value=0.0, Identity=59%"; Hit description =Putative DNA helicase homolog
SDPKHLELYFYDDDPLLSHRMRLARDEVFKAKDQNVMTKLANLLRENPYAETFRSIGQYGNIDEYRIDLNTDYKLDQRTFNTPTSSEVAAVWVEGTELHRQFERGVTLYGNDNAFYSIKPHHGCYDPLAYPLFFPRGELGWHSGIPKVGVNTARIDGRQSTDSDNPGSKLTVPDQYDAVISAELPDKNRFPELFDMGKDSYPIYRRRDDRQKVRVRGHDLDNRWVVPYNPTLLRMYDCHINVEVCSSIKAVKYIYKYIHKGHDRASVTVIDVDGGQSINEIENFRDARWVSPQEALWRIYSFDLHGISPPVLQLQLHLPGMHLVSYNINDDMRQVLNKDNIDKSMLTEYFRANQLFDWASNYLYREFPEVARWWPGAKKWTARQQRMQVGRIVSAHPAEGERYYLRVLLNHVRGATSFESLRTYDGNVYPTFREAAEKRGLIEADNNIDECLTEASGFHMPPSLRRLFATILVFCEPTDVVGLWNKHLEAMSDDFCRTHSNSNVVEQLVLLDIRDMLQTMGKDIRLFPLPAIKDEHDNMADVVREIFEEMNIPEDPEAEFVVSSLNHEQRHAYDVILSSVENISGGVFFVDGPGGTGKTFLYKALLATVRRSGKIAIATATSGVAASIMPGGRTAHSRFKIPLNIKEGDVCSFTK

SEQ ID NO: 50364 - protein, 615 aa, Zea mays
  Coding DNA Sequence Number=SeqID_6989
  Gene Ontology: Mol. function=cysteine-type peptidase activity; Cellular component=ribonucleoprotein complex; Biological process =proteolysis
  Homolog annotation: Hit_ID=Q109R5; Match level="QueryCoverage=67%, HitCoverage=48%, E-value=8e-45, Identity=28%"; Hit description=Ulp1 protease family, C-terminal catalytic domain containing protein
  Pfam annotation: Domain name=Peptidase_C48; Domain location=154-326; Score=-35.1; E_value=0.087; Accession=PF02902.10; Description=Ulp1 protease family, C-terminal catalytic domain
MDEEKVDVGTIVNPSFEVMAGSGCSAQILIKCSDTHELDNNDGENIKDIVGNVVEQSLDVVAVGNDPVHVSAKADVGEQPNVTPLSSLDVQNESTQISSDVDTLEQIEQDNLDTLIRICEHNKPKKLNVARVLPKDYTCTTEDLQLIEYIKSLPRKQVVVLSAYIHSIRDEEHILHREGGKVFLESTFISSLLKRDGDPKILLNCKEDTLENRVDNYLQADMVFIPINIENFHWYLAIVNAKKNEVHILDSMGPQITDRRDLYTTNDITKFRFKLPAILWNSRLNTKKGHQETNHHADEDGGSSCDVEIIKTPCELPISLNASSQVQPFISSCALPATLTSTNTQELMSALCTYIMEIDDAEYLEKHWIQSTKPYPISLSLQQLKNILDVNKPMDKDCFNIAVRMIACSDALFLLENKYHYMDLQFCSITNYGQDPRLRAKLDTNVLANLFECWPDMEYTISDCSQILLPFCFLGHFSLYVFNMNTRSIYIMDSMPLPSWFKGNDPNMHYIHKIHNIANNMNVAIKLANPTWKDDIYMWRRIVPSWVPKTLNWDLSGFLVINFMHSWNGKRLPCISTTSSVLRTKFLVELMKYQDNECNDNIPEEIQKIIKRISV

SEQ ID NO: 50365 - protein, 161 aa, Zea mays
  Coding DNA Sequence Number=SeqID_6990
MAVAGGQEQRSRRQPSLRPIRGQRENPLPRCEDKALVFRSSDGSHTHNGCPANHSPRRINSAAGQGPGKGDTPKRILPREGTRLRAFLLIRGSKAGPSEGFNSRLRARGLHTHYWSEVRRPAPRKGSTTASSYSGSAPTTDQGFEGWPPKGSQPPQTRSEG

SEQ ID NO: 50366 - protein, 510 aa, Zea mays
  Coding DNA Sequence Number=SeqID_6991
MNVCELTLAVSHPPTGQEQATDFADCVASGALMAVVSAEVERLRAQHAESVREKSAADSKCRKLAEKVAVLEGERTELRRQLAEERREANQALAKAQSAQAEANVARVEGSLARQRAEELEERFNALQARVEMAEASMRSEAERTRKQLMDSYHELGARTADFEVPDRESGLRCLEWLQEELLALPIIVDGFMSYASLVTYEGAMNALSREGCRHYEVFDRSDEDFEREIYKVEDPVVKESAGALFDRMWGPHGREVVREWSDTARGQAACDEKVDDFGALNSARPEAESNPVAAGPEAAPAPPPETVEGSLGAPAATAAGGGSSPTAAPTAEDPPKTTVEPAAEDPAAAGSSQVQDFGPVHATATANFLAASTVDDGNESDESASKFSDFDDSGSLVEWTEESSNEDLDYFAALDVAAAEASPRAADAEVVPGPSTGRRRRRAVAKRRVSEADGGQLHVGRAGRQELLSLPAVASVGEGELQSLFEGEELRIMLFNYREMGIIPKVEPM

SEQ ID NO: 50367 - protein, 107 aa, Zea mays
  Coding DNA Sequence Number=SeqID_6992
MVLFILVLVARVASTTSEADPHTDVTVVTSPTSLTTPPELYYRRHIPSRDLRRGLPFRLWWVQVRSLHDGSRGSLEDMVAGVTWPSILPPGWSVEWDPASAEEEHEE

SEQ ID NO: 50368 - protein, 85 aa, Zea mays
  Coding DNA Sequence Number=SeqID_6993
MTVVVVVLQGDEYHVVAAIAGHELETPEAEHRPRLKRLLKATHLELNGKRSRSEAVVGARRRLLPETEVEVGRGCDSLRAPRGGE

SEQ ID NO: 50369 - protein, 80 aa, Zea mays
  Coding DNA Sequence Number=SeqID_6994
  Subcellular localization annotation: CTP_CleavageSite=28; ConfidenceScore=5.52e-01
MCAPIFPHRPKTGTGAPVAPFLAPVIARCAQPRRPVALVNAVVRARLVNLVVRAEPLTIAVVHAPSSHALAISVELQDRI

SEQ ID NO: 50370 - protein, 67 aa, Zea mays
  Coding DNA Sequence Number=SeqID_6995
MGLGVCGSLCQGGDEEDGYDHDYGNGKWYSFRLERVAFGAIYAQVKKKENSVEADLREFQDFYEFED

SEQ ID NO: 50371 - protein, 42 aa, Zea mays
  Coding DNA Sequence Number=SeqID_6996
MGTNGHLDLDTRGKSVDQKILCFPYACVQGSKPILRKFTLGP

SEQ ID NO: 50372 - protein, 71 aa, Zea mays
  Coding DNA Sequence Number=SeqID_6997
MARFSGTKTSRCSALLCSEPMAAGSEHRQNATMGRKSTRLRPGVELEFKLGLNFVPVPKFQRKAQACIFDI

SEQ ID NO: 50373 - protein, 35 aa, Zea mays
  Coding DNA Sequence Number=SeqID_6998
MARITTNSAALSSDSTWFNLIRKNNKAWKHLCTTE

SEQ ID NO: 50374 - protein, 84 aa, Zea mays
  Coding DNA Sequence Number=SeqID_6999
MPRWLHAALATRHGLLAAPQVLGSATIWAAAGRGLVRTRQGSIARHQWARHGEGVTMARAHLCTNDYDHMWKKLKEQKCKGLGS

SEQ ID NO: 50375 - protein, 160 aa, Zea mays
  Coding DNA Sequence Number=SeqID_7000
  Subcellular localization annotation: CTP_CleavageSite=55; ConfidenceScore=5.40e-01
MVAPPPPLSTGKVTGQTRMLFFRHAGKTSSIPPSSGGLTAAIVVVARRRKEYHVVATVEGHELETPETEHRPGLERLLETTHLELDGKLFVNTQQAPTWRANCRRFDPGGSLDRRVNCRCVSQPRWVGARRNTRGKTLYLCLGKDWFPKDTITITRMREQ

SEQ ID NO: 50376 - protein, 224 aa, Zea mays
  Coding DNA Sequence Number=SeqID_7001
MGSTRVASVLLSLEERNFAEVGTFQPSLGFNDFHQAARAASPRRWSPKTVTTSLMVGRSKPGCDLCPALSFKDLHHPCWGGGRGEPGLAFAWAGVPLLPPVSRGGNHPPALRRRRPPAVPGKDGSEDLPVRFGAAVARWCGVGGQVDATAGAEVVAAGESFSTDKTVSATRGPTSGSLALMSSSRPSSGDANESLPAVASVLGPSLLLQRSLASHPEFVVPQAL

SEQ ID NO: 50377 - protein, 208 aa, Zea mays
  Coding DNA Sequence Number=SeqID_7002
MRMEASGEESCNASFECYKNEDGVIDCSSMVRASCTVGISDPGGSLGPTRVPLAVGVTSALRERGRDTELARRFPRANPPQGGPGPPFYRGKERVQTSTAGSAARILLTSPCCRKGLRATGVMVHAGHHHYPSPGPSPGSVEAETSLEAKVGVGRGRDSSRDRGSCEAETSSRGWSLKSGEAENFSRDWSMRSGEAELPIAPEAELGG

SEQ ID NO: 50378 - protein, 373 aa, Zea mays
  Coding DNA Sequence Number=SeqID_7003
MGVSPAIRMDRHAACQRYGQVSLNAEAAHCLSVEWTGVTQPGGLTSGPARWLTSRAVGHMAASGLRLGGEQKRYADRSTPGWAWTRVGIGPLPEQGPVPGVRVMPAGSWTLSGGSVYMYKGLALSHGELAPKKDNSWARAPVPETGQLVSAEMKRRTAAGGGMLLTRRSAASWEVALFYQCSVSRMFISLAEVESELSCGSIFRMNFIASCSGLMARLHELVELQLHFSGQATGRRVSPRFQLFGFNGPDIASNDEGPFVSAHTSRRPPPPASRSEGRTDLQDLVWEAKLCVRTPWTTVPDTRTPVAEWWSVHAYDQQAGFMRADLTGLTKRFSFCCGKTDTPGSAYFRHLEGSFSAGREFADPFLVRYSPWD

SEQ ID NO: 50379 - protein, 255 aa, Zea mays
  Coding DNA Sequence Number=SeqID_7004
  Gene Ontology: Mol. function=DNA binding; Cellular component=nucleus; Biological process=regulation of transcription
  Homolog annotation: Hit_ID=A2WYL6; Match level="QueryCoverage=100%, HitCoverage=87%, E-value=1e-61, Identity=53%"; Hit description =Putative uncharacterized protein
MERRGVQLPAVRPRPKWAAVSAYCRRHGVERGPMQCRKRWGNLSWDLKKIVAWEGKAIAGAGAGAAQHESFWDMRGDQRRARQLPSSFDREVYDALVCGASAGEDAAAAAVLPPDFGDGEPEGVYRQPPIMVMPISVRKYEPPPATSEHECSGPVTESDQKKAGAAASDKNSTSSQHDGGFKDSDATFVADQAEGTATASIGKQVVEALERGNRALAQQLEAHRSWWDADREQRAALLRAMDRVADAVCRIADKL

SEQ ID NO: 50380 - protein, 495 aa, Zea mays
  Coding DNA Sequence Number=SeqID_7005
  Gene Ontology: Mol. function=histone-lysine N-methyltransferase activity; Cellular component=nucleus; Biological process=chromatin modification
  Homolog annotation: Hit_ID=Q8L821; Match level="QueryCoverage=71%, HitCoverage=49%, E-value=0.0, Identity=90%"; Hit description=SET domain-containing protein SET118
  Pfam annotation: Domain name=Metallothio_2; Domain location=242-297; Score=-22.4; E_value=0.1; Accession=PF01439.9; Description =Metallothionein
  Pfam annotation: Domain name=Pre-SET; Domain location=197-300; Score =124.3; E_value=3.7e-34; Accession=PF05033.7; Description=Pre-SET motif
  Pfam annotation: Domain name=SET; Domain location=312-472; Score =130.6; E_value=4.6e-36; Accession=PF00856.19; Description=SET domain
  Pfam module annotation: Pfam domain module=Metallothio_2::Pre -SET::SET; Domain location=242-297::197-300::312-472
MAATSAEGAGGEADGDATTSVHMGSWVEKGGDGWGSSPVSSLAPTVAAPMVGVAAAMGSSPVPTTATTAGRRAAPERSAMVLEVVPEVVPGRSVMVPATGQVRRVSGHVERRDRATEGVSVVGMRRGWARGEGGGKSYGWGGVVDDWVQKGVQGHVVFKFKLKRLEGQPSLTTSEVRFTRAEAPTTISELPGLVCDDISGGQENIPIPATNLVDDPPVPPSGFKYLKSLQIPKDIKIPSSIIGCDCEGGCASNKKCLCAQRNGSDLPYVSYKNIGRLVEPKAVVFECGANCSCNHDCVNRTSQQGLQYRLEVGIPLSKSVEVFKTASKGWGVRTWDTILPGAPICEYTGVLRRTEDLDGSQNNYCFDIDCLQTMKGLDGREKRAGSEMHLPNLHPENDSDAQPAPEYCIDAHSIGNFARFINHSCQPNLFVQCVLSSHNDVKLAKVMLFAADTILPLQELSYDYGYRLDSVVGPDGKIVKLACHCGAPDCRKRLY

SEQ ID NO: 50381 - protein, 407 aa, Zea mays
  Coding DNA Sequence Number=SeqID_7006
  Pfam annotation: Domain name=zf-CCHC; Domain location=121-138; Score =25.1; E_value=0.00024; Accession=PF00098.14; Description=Zinc knuckle
  Pfam annotation: Domain name=zf-CCHC; Domain location=262-279; Score =18.5; E_value=0.0024; Accession=PF00098.14; Description=Zinc knuckle
  Pfam module annotation: Pfam domain module=zf-CCHC::zf-CCHC; Domain location=121-138::262-279
MEDLSTMIPTIVIGKIAAFEMSRKMCQGEEPTSSRPYAFACDERKGKKKAPTPSSSSEEEEEEESDDEGDNQPSTSSSENEETIRRVEKVMGMIHKINLMGVPLQVEDLLFNIDRKKQRKRGCFACGEKGHFRDNCPTMAEPKKERSKGKALTSVKTWDDSSSEDEPPRTRSHGSSSSSSRSSCKCLMARGKMSIPSSSDESSSDDEETCLNEVAKENKQLNQGVAHLGKALYNKKGKAKQIQPPQDNTTAGVNEPVEGETVICRLCHKEGHKSFQCKAMTGDKKKQKLKQNPSSKISNTYINKVDKKAATPYLIKKKKNGKVIAIKANKQANKGKEAKHIWVPKEIISTMKITKRFGSRKGSEVVQTITGNLETWQIRWHCGEKTTGLSGVKSLRANDHLRCQPND

SEQ ID NO: 50382 - protein, 148 aa, Zea mays
  Coding DNA Sequence Number=SeqID_7007
MGKSNKRKREPTPPSEDFGDSEYSEEFSSESEGSLAPVSPPASSNDSDDSQGLAVEVWTYIRAVERSGLGGSDESEYSSDEEDSSEEGGGGDGGDDDDDDGGGDGDNSDDDGDGGSKGGNGGSKGGNGGSSRGSNGGGSSKGSNKASG

SEQ ID NO: 50383 - protein, 144 aa, Zea mays
  Coding DNA Sequence Number=SeqID_7008
MGKSNKRKREPTPPSEDFGDSEYSEEEFSSESEGSPAPVSPPASSDDSDDSQGLAAEVWTYIRVVERSGLAGSDESEYSSDEEDSSEEGGARDGGDDDDDGGGDGDDGDDDGDGGSRGGNGGNGGSSRGSNDGGSSKGSNKASG

SEQ ID NO: 50384 - protein, 81 aa, Zea mays
  Coding DNA Sequence Number=SeqID_7009
MEKAQSYNIVPEARGQVPPEPLPFETLHEGSAIRFLGSVYATAQSLPPADMTSEVGQGSRSSERMGGHAVYVAICLFSVVP

SEQ ID NO: 50385 - protein, 80 aa, Zea mays
  Coding DNA Sequence Number=SeqID_7010
MKIVEERGVDCEGFVPTSPGATKATLVGWRYGVSSCPLGLRIKPCLDRGATMKVFYDALDIKGSSRIKNLTTAHEPWTKD

SEQ ID NO: 50386 - protein, 343 aa, Zea mays
  Coding DNA Sequence Number=SeqID_7011
  Subcellular localization annotation: CTP_CleavageSite=2; ConfidenceScore=5.34e-01
MSSSSLMRRVFPSSKPPDGGYPPSFRLIVGGTQLRGSWYLSAIVRLQGFSSHSPVAPLRWWSPKTVTSSSWMGRGKPGCDPALSIGGVRHPRWGGERGEPGLYLLRGSADHLLFQLLVVAIVLPRCDGDVLQSCRGRRTVAAQLGCNIPSFPSHSRRGRQRGSAGALGSGPLFGFDGWFASLERDREQEPSGGRVHPGPWLLLQRSLASLPMFAAPQARGRLSPRGRNRSSICKGTLNASVFVHRGCRGLNIRGLGPGWRPWKMVGRGPWGNRPSRLLGPDSRRSPWTASLSEAGSDLAEGVVEAEGATAPFQREDLSLQDQIVLKRVPSAAAEARKHTLAAL

SEQ ID NO: 50387 - protein, 38 aa, Zea mays
  Coding DNA Sequence Number=SeqID_7012
MAGVLLSAKASLLLTTALVRRVQALLVREVKTGSNKVW

SEQ ID NO: 50388 - protein, 214 aa, Zea mays
  Coding DNA Sequence Number=SeqID_7013
MVEGGVGRFSRAPALAAALLAETWAPLAVALAALATLPSLLRRLQVIVLRLRSCGKEAIQSHIGTYYYSSCDEDDGDSDEDESSDDEAEAGSSGDDEEDLERVGFYEGPADGVLPWGGAVVRTWQGRFSGCASGGGAVGATASGAASPAAVRLWGAGTASGEPWWAACSADESGWRDGAAAEADQVVVGWPREHASQQRRRRERRAVPLALTGR

SEQ ID NO: 50389 - protein, 98 aa, Zea mays
  Coding DNA Sequence Number=SeqID_7014
  Gene Ontology: Mol. function=kinase activity; Cellular component =ornithine carbamoyltransferase complex; Biological process=amino acid metabolic process
  Homolog annotation: Hit_ID=Q6QP54; Match level="QueryCoverage=78%, HitCoverage=36%, E-value=1e-15, Identity=54%"; Hit description =Putative kinase
MALPVDVAGPRPRPGDVGAPPKLGSSLSSVAEAEPEPLGRARRRSFGRGQGGVRALGSGEADPSPSPGSGGAEFAVFRGLARVRALGRAERSSPSSGA

SEQ ID NO: 50390 - protein, 179 aa, Zea mays
  Coding DNA Sequence Number=SeqID_7015
  Gene Ontology: Mol. function=carboxyl- or carbamoyltransferase activity; Cellular component=ornithine carbamoyltransferase complex; Biological process=amino acid metabolic process
  Homolog annotation: Hit_ID=Q8SA97; Match level="QueryCoverage=100%, HitCoverage=24%, E-value=8e-14, Identity=33%"; Hit description =Ornithine carbamoyltransferase
MALPVDVAGQRPRLGDVEAPPKPRSKARAESEPWVGRIGVRRLPGLSPISSPGVGRSGVRRLLGLSPSPSPRVGRSGVRRLPGLSPSPSPGSGGAEFAVFRDLARVRALGRAERSSPSSGIGVAQAALSFCQAGQWSGEVTTATLALLGACVRIKLYADGGYQLRIRSLEGTPNYGPRQ

SEQ ID NO: 50391 - protein, 168 aa, Zea mays
  Coding DNA Sequence Number=SeqID_7016
  Subcellular localization annotation: CTP_CleavageSite=71; ConfidenceScore=5.75e-01
MVAPTSAQIPATTHAPNPYSSPPLVRSAIPHSQTPQLAFARASSLLRALRRPPPLAAPHAPVPSPPLGLRRAFRLGESCLGARNLRRASIYSLPLWFPLPVLTGASLAQPESHRRRPKPSSCPYRRSRVPKSSLEIRTLTRAPPLGPTGQCLRPLARDGNRSSLDRVE

SEQ ID NO: 50392 - protein, 92 aa, Zea mays
  Coding DNA Sequence Number=SeqID_7017
MQVPRAPDSPAPLLLPLRPPLPVAGAFRIDDAPVRTRRSSELVKKCLQFERRREEAKRRPPSTRKKDDGTSDDPGDKDAATIVNSRGTILVL

SEQ ID NO: 50393 - protein, 310 aa, Zea mays
  Coding DNA Sequence Number=SeqID_7018
  Gene Ontology: Mol. function=transcription factor activity; Cellular component=nucleus; Biological process=regulation of transcription, DNA-dependent
  Homolog annotation: Hit_ID=A2Y9M2; Match level="QueryCoverage=81%, HitCoverage=24%, E-value=7e-13, Identity=57%"; Hit description =Putative uncharacterized protein
  Pfam annotation: Domain name=AP2; Domain location=205-255; Score =55.9; E_value=1.4e-13; Accession=PF00847.11; Description=AP2 domain
  Pfam annotation: Domain name=AP2; Domain location=34-84; Score=56.3; E_value=1.1e-13; Accession=PF00847.11; Description=AP2 domain
  Pfam module annotation: Pfam domain module=AP2::AP2; Domain location =205-255::34-84
MEEHRPRCNATAPTRRVAGGGKRKAAAAGAPTEPRYMGVLRRRRGRYVARTRDRKGKRMWLGTFDTAEKAARRYDSETHRLRGPSAITNFPATSDDRVPLPAPSLHAVEEHSFAADESQPVVGSPVSTTPPTKPLDAVAETLSTFSSSDEADAGGGAEAAAGPRKFVMEIHMEEHRSRCNATAPTRRVAGGGKRKAAAAGAPAKPRYRGVLRQRRGRYVARTHDRKGKRMWLGTFDTAEEAARRYDSETRRLRGPSAITNFPTTSDDRVPLPAPSLHAMDGHSFAADESQPVVGSPVSTKPPLKPVDAAA

SEQ ID NO: 50394 - protein, 500 aa, Zea mays
  Coding DNA Sequence Number=SeqID_7019
  Gene Ontology: Mol. function=N-acetyltransferase activity; Biological process=metabolic process
  Homolog annotation: Hit_ID=Q10Q85; Match level="QueryCoverage=82%, HitCoverage=99%, E-value=1e-145, Identity=66%"; Hit description =Acetyltransferase, GNAT family protein, expressed
  Pfam annotation: Domain name=Acetyltransf_1; Domain location=94-179; Score=64.9; E_value=2.7e-16; Accession=PF00583.15; Description =Acetyltransferase (GNAT) family
MVVAAMRDEGEEGRRRAVVAIRDYDPKTDRDGTEAVERECEVGPAAAAGGMSLHADLLGDPVARIRHSPHYLMLFDFDLDNEQVAETSGPDGRIVALVRGTVKSVASGKSRPGAPAFARVGYILGLRVAPSHRRMGIARQLVHRLEQWFELMGAEYAYMATDRSNEASLRLFTGRCGYSKFRTPSLLVHPVHSHRLRPPPRATVVRLGARDAERLYRSRLAHVEFFPADIGAVLGNALSRGTFLATVGGYEWGGVDRFLACPPASWAVASAWDCGGVFRLQVRGASRLRRAAAAATRALDRAAKWLRVPSVPDFFRPFAGWFVYGLAGSGGRDAAMAAEAVFASIVNMARGRAAAVAVEVAAMDPLRGRIPHWRRLSCTEDLWCMKRLGAGGGGHADGWDWARSAPGRSIFVDPREAGQRCAVFFCPVPVVVQWAAEAAPAAAAAALHICMVRVLNFTLIGPVAAVNGTERDCESGMGIERLRSVDFLERNGSGSEENIP

SEQ ID NO: 50395 - protein, 110 aa, Zea mays
  Coding DNA Sequence Number=SeqID_7020
MSDDRVSLPVPSLQAMDEHSFATDESQPVVWTYIRAVERSGLEGSDESEYSSDEEDSDDGGEDEDDDDDDDDEGGGGGGSGGSGSGGSKDGDGGGSRGGSGGGGSNRASG

SEQ ID NO: 50396 - protein, 162 aa, Zea mays
  Coding DNA Sequence Number=SeqID_7021
MGKSNKRKREPTPPSEDFGDSEYSEEEFSSESEGSPAPVSPPTSSVDSDDSQGIAAEVWTYIRAVERSGLEGSDESEFSSDEEDSDSGEDEDDDDDDGGDGDGDGSDGGSGGGDGSKGGTRGGSSTGSTRGGSSKGSTRGAAVAAAARPVAKRHWSLDISIV

SEQ ID NO: 50397 - protein, 381 aa, Zea mays
  Coding DNA Sequence Number=SeqID_7022
  Gene Ontology: Mol. function=transcription factor activity; Cellular component=nucleus; Biological process=regulation of transcription, DNA-dependent
  Homolog annotation: Hit_ID=A2Y9M2; Match level="QueryCoverage=63%, HitCoverage=28%, E-value=4e-11, Identity=50%"; Hit description =Putative uncharacterized protein
  Pfam annotation: Domain name=AP2; Domain location=182-232; Score =59.2; E_value=1.4e-14; Accession=PF00847.11; Description=AP2 domain
  Pfam annotation: Domain name=AP2; Domain location=336-381; Score =37.2; E_value=5.7e-08; Accession=PF00847.11; Description=AP2 domain
  Pfam annotation: Domain name=AP2; Domain location=34-84; Score=45.4; E_value=2e-10; Accession=PF00847.11; Description=AP2 domain
  Pfam module annotation: Pfam domain module=AP2::AP2::AP2; Domain location=182-232::336-381::34-84
MEEHHLRCNATTPTRRVAGGGKRKAAAVGAPAEPRYRGVLRRCRGWHVARTRDRKGKRMWLGTFDTAEEAARRYDSKTCRLRGPSAITNFPATSDDRVPLPAPSLHAVDEHSFAADESQPVVGRRDKADAGGGAEAAAEPRKFVMEIHMEEHSPRYNATPPTGRVAGGGKRKAAAAGVPAEPRYRGVLRRRRGRYVARTRDRKGKQMWLGTFDTAEEAARRYDSETRRLRGPSAITNFLATSDDRVPLPAPSLHAVDEHSFTADESQPVVGSPVSTMPPQKPSPRSPPATRPTPVVVLKRRRGREHRPCYNATSPTGRVAGGSKRKAATAGVPAEPRYMGVLRRRRGRYVARTCDRKGKRMWLGTFDTAEEAARRYDSETR

SEQ ID NO: 50398 - protein, 406 aa, Zea mays
  Coding DNA Sequence Number=SeqID_7023
  Gene Ontology: Mol. function=transcription factor activity; Cellular component=nucleus; Biological process=regulation of transcription, DNA-dependent
  Homolog annotation: Hit_ID=Q5MJ54; Match level="QueryCoverage=14%, HitCoverage=27%, E-value=6e-09, Identity=55%"; Hit description=AT -rich element binding factor 2
  Pfam annotation: Domain name=AP2; Domain location=226-276; Score =38.6; E_value=2.2e-08; Accession=PF00847.11; Description=AP2 domain
  Pfam annotation: Domain name=AP2; Domain location=71-105; Score=5.0; E_value=0.53; Accession=PF00847.11; Description=AP2 domain
  Pfam module annotation: Pfam domain module=AP2::AP2; Domain location =226-276::71-105
MDAVAETLSTFSSSDEADVGGGAEASAGPCKFVMEIHMEEHRPRCNATAPRGRVAGGGKRKAVAVGAPAEPRYRGVLRRRRGRHFDTAEEATRRYDSETHRLCGPSAITNFPATSDDRVPLPTPALHTMDEHSFAVDESQPVVGSPVSTTLPPKPVDAAAETFSMFSSSDEADVGGGVEAASGPRKFVMEIHIEEHRPRCTATAPTGRVAGGGKRKATAAGAPAEPWYTGVLIRCRGRYVARTRDRKGKRMWLGTFDTAKEAVRRYDSETRRLRRPSGITNFPMISDDRVSLLAPLLHAVDEHSFAADESQPVVGSPVSTTPPPKPVDVAAETLSTFSSSDEADAGGGAEAAAGPCKFIMEIHMEEHRPCCKATAPMGRVAGGGKRKAAAASAPAEPRYRSVLRRR

SEQ ID NO: 50399 - protein, 1312 aa, Zea mays
  Coding DNA Sequence Number=SeqID_7024
  Homolog annotation: Hit_ID=A4FS08; Match level="QueryCoverage=35%, HitCoverage=66%, E-value=8e-09, Identity=37%"; Hit description =Ethylene responsive transcription factor
  Pfam annotation: Domain name=AP2; Domain location=1057-1107; Score =47.3; E_value=5.5e-11; Accession=PF00847.11; Description=AP2 domain
  Pfam annotation: Domain name=AP2; Domain location=1228-1278; Score =48.4; E_value=2.5e-11; Accession=PF00847.11; Description=AP2 domain
  Pfam annotation: Domain name=AP2; Domain location=196-246; Score =57.4; E_value=4.8e-14; Accession=PF00847.11; Description=AP2 domain
  Pfam annotation: Domain name=AP2; Domain location=35-85; Score=50.2; E_value=7.2e-12; Accession=PF00847.11; Description=AP2 domain
  Pfam annotation: Domain name=AP2; Domain location=367-417; Score =42.1; E_value=2e-09; Accession=PF00847.11; Description=AP2 domain
  Pfam annotation: Domain name=AP2; Domain location=538-588; Score =48.1; E_value=3.1e-11; Accession=PF00847.11; Description=AP2 domain
  Pfam annotation: Domain name=AP2; Domain location=709-759; Score =46.3; E_value=1.1e-10; Accession=PF00847.11; Description=AP2 domain
  Pfam annotation: Domain name=AP2; Domain location=886-936; Score =45.0; E_value=2.6e-10; Accession=PF00847.11; Description=AP2 domain
  Pfam module annotation: Pfam domain module=AP2::AP2::AP2::AP2::AP2::AP 2::AP2::AP2; Domain location=1057-1107::1228-1278::196-246::35 -85::367-417::538-588::709-759::886-936
MEEHRPRCNATAPTRRVACGGKRKVAAVAGAPAEPRYRGVLRRRRGRYVARTCDRKGNQMWLCTFDTAEKAARRYDSETRRLHGPSAITNFPATSDDCVPLLAPSLHAVDEHSFAADESQSVVGSSVSTTPPLKPVDATAETLSTFSSSDEADAGGGAEAAGGREHHPRCNATAPTGRVAGGGKRKAAATGASAEPRYRGVLRRRRGRYVVRTCDRKGKRMWLGTFDTAEEAARRYDSETRQLRGSSAIANFPATSDDRVSLLAPSLHAVDKHSFAADESQPVVGSPVSTTPLPKHVDAAAETPSMFSSSDEAHAGGGAETAAGPRKFVMEIHMEEHRPCCNATVPTGRVAGGGKRKATAASAPAEPRYRGMLRWRRGRYLARTHDRKGKRMWLGAFDTAEEAARRYDSETRRLRGPSAITNFPATSDDRVPLPTSLQHAVDEHSFAADESQPVVGSPVSTTPPPKLVDAAAETLSTFSSSDEADAGGGAEAAAGSRKFVMEIHMEEHRPRCNATTPTGRVASGGKRKAAAASAPAEPRYRGVLRRRRGRYVARTRDRKGKRMCLGMFDTAEEAARRYDSETRRLRGPSAITNFPTTSDDRVPLPAPSLHAVDEHSFAADESQPVMGSSVSTTPPPKPVDATAETLSTFSSSDEADAGGGAEAATGPCKFVMEIHMEEHHPRCNATAPTGRVAGGGKRKASTAGAPAEPRYRGLLRWRRGRYVARTRDQKGKRMWVGMFDTAEEAARRYDSETRRLRGPSAITNFLATSDDRVPLPAPLLHAVDEHSFAVDESQPVVGSPVSTAPPPKPVDAAAETLSTFSSSDEADAGGGAEAAAGSRKFVMEIHMEEHRPRCNATAPTGRVASGGKRKAAAASAPAAASAPAEPRYRGVLRRHRGRYMARTRDRKGKRMCLGTFDTAEEATRRYDSETRRLRGPSAITNFPTTSDDRVLLPAPSLHAVDEHSFAADESQPVVGSSVSTTPPPKPVDATAETLSMFSSSDEADAGGGAEAAAGPCKFVMEIHMEEHHPRRNATAPTGRVAGGGKRKAATAGALAEPRYRGVLRWRRGRYVARTRDRKGKRMWLGMFNTAEESARRYDSETRRLRGPSAITNFLATSDDRVPLPAPLLHAVDEHSFAVDESQPVVGSPVSTTPPPKPVDAAAETLSTFSSSDEADAGGGAEAAAGSRKFIMEIHMEEHRPCCNATAPTGRVASGGKRKAAAASAPAEPRYRGVLRRRRGRYVARTRDRKGKQMCLGTFDTAEEAARRYDSETRRLCGPSAITNFPTTSDDRVPLPAPSLHAVDEHSFAADES

SEQ ID NO: 50400 - protein, 263 aa, Zea mays
  Coding DNA Sequence Number=SeqID_7025
  Gene Ontology: Mol. function=transcription factor activity; Cellular component=nucleus; Biological process=regulation of transcription, DNA-dependent
  Homolog annotation: Hit_ID=A2Y9M2; Match level="QueryCoverage=63%, HitCoverage=59%, E-value=6e-12, Identity=31%"; Hit description =Putative uncharacterized protein
  Pfam annotation: Domain name=AP2; Domain location=85-135; Score=44.9; E_value=2.8e-10; Accession=PF00847.11; Description=AP2 domain
MVGSPVSTTLPPKLVEAAAETLSTFSFSDEADAGGGAKAAAGPLKFVMQIHMEEHRPRCNATASTGRVAGGGKRKAAAAGAPAEPRYGGVLRQRRGRYVARTRDRKGKRMWLGMFNTAEEAVRRYDSETRRLRGPSVITNFPATSDDRVPLPAPSLHVVDEHSFAADESQPVVGSPVSTTPPLKPVDAAAETLSTFSVVDALLPQLVEDAFSFAGVPFNDDLPTLQLGGLDYLATDPALELGSLPMWPGVDGCRFSDIGDDDF

SEQ ID NO: 50401 - protein, 450 aa, Zea mays
  Coding DNA Sequence Number=SeqID_7026
  Homolog annotation: Hit_ID=Q75UJ4; Match level="QueryCoverage=14%, HitCoverage=26%, E-value=2e-08, Identity=50%"; Hit description=ERF -like protein
  Pfam annotation: Domain name=AP2; Domain location=206-256; Score =52.7; E_value=1.3e-12; Accession=PF00847.11; Description=AP2 domain
  Pfam annotation: Domain name=AP2; Domain location=35-85; Score=47.7; E_value=4.2e-11; Accession=PF00847.11; Description=AP2 domain
  Pfam annotation: Domain name=AP2; Domain location=366-416; Score =46.2; E_value=1.2e-10; Accession=PF00847.11; Description=AP2 domain
  Pfam module annotation: Pfam domain module=AP2::AP2::AP2; Domain location=206-256::35-85::366-416
MEEHRPRCNATAPSGRIAGGGKRKVAAVAGAPAEPRYRGVLRRRRGRYVARTYDRKGNQMWLCTFDTAEEASRRYDSETRRLHGSSAITNFPATSDNRVPLLAPSLHAVDEHSFAADESQPVVESSVSTTPPPKPVDATAETLSTFSSSDEADAGGGAEAAAGPRKFVMEIHMEEHHPRCNATVPTGRVAGGSKRKAAAAGASAEPRYKGVLRRRRGRYAVRTCDRKGKRMWLSTFDTAEEAARRYDSETRRLRGSSAITNFPATSDDRVSLPAPSLHAVDKHSFPADESQPVKPVDDAAETLSMFSSSDEVDDGGGAEAAAGSRKFVMEIHMEEHRPRCNATTPTGRVASGGKRKAAAASAPAEPRYRGVLRRRRGRYVARTRDRKGKRMCLGTFDTAGEAARRYDSETRRLRGPSAITNFPVTSDDRVPLPVPSLHAVDEHSFAADES

SEQ ID NO: 50402 - protein, 502 aa, Zea mays
  Coding DNA Sequence Number=SeqID_7027
  Gene Ontology: Mol. function=transporter activity; Cellular component= integral to membrane; Biological process=transport
  Homolog annotation: Hit_ID=Q6ZAK1; Match level="QueryCoverage=97%, HitCoverage=99%, E-value=1e-154, Identity=60%"; Hit description =Transporter-like protein
  Pfam annotation: Domain name=MFS_1; Domain location=9-360; Score =116.4; E_value=8.6e-32; Accession=PF07690.7; Description=Major Facilitator Superfamily
  Pfam annotation: Domain name=Sugar_tr; Domain location=8-432; Score= -122.2; E_value=0.00033; Accession=PF00083.15; Description=Sugar (and other) transporter
  Pfam module annotation: Pfam domain module=MFS_1::Sugar_tr; Domain location=9-360::8-432
MAEAGRRTLALVNLAAIMERADEALLPAVYREVGAALGATPVALGALTLYRSAVQAACYPLAAYAAVRYNRAHVVAVGAVLWAAATFLVAVSDTFAQVAIARCLNGIGLALVTPAIQSLVADCSDDNTRGAAFGWLQLTGNIGSIIGGLFSLMLAPTTVMGIAGWRVAFHIVAVISVVVGVLVGLFAVDPHFLHVESGEQLLRKSAWAEMKDLVREAKAVVKISSFQIIVAQGVTGSFPWSALAFAPMWLELMGFTHNRTGLLMVTFALASSLGGLLGGKMGDHFATRFPNSGRIVLSQISSASAIPLAALLLLGLPDNSSGSLHGLVIPIFAEIVPERSRTSIYALDRSLESVLASFAPPVVGFLAEHVYGYNPVPYGAADNNVGRDKSNAGALAKALYTSIAIPMLLCCFIYSLLYRTYPRDRERARMDSLITPELQQIELERCHGQADYYSGRKDKDGSTVFDMDYRGIDAYDDEKGLIDQQAKQSGNVKWHRSHSQNL

SEQ ID NO: 50403 - protein, 353 aa, Zea mays
  Coding DNA Sequence Number=SeqID_7028
MWDPAPAPQGRTLERVGEDSARDGWRRKQGEWPLKGGRSLSEGDHVFSLSYASRLSTFQAPGWGMPAVFSPYRWRNATPWELVPFSHRSASRIFIMQPGCTPPPAVTQDGDLQLDGGGKRAGLRPLPLPQPQGFSSPRLGRGVCRVGVGPCVGGGPLLHSVIGGKGDRRPWRRQLHRAWLSDASGFRAARSAGVCHDSLKRFFRRIRPEVSAAAVRPPGAEVVVVAAARADSPVDYLNRFTKHESPRVKVTSEARGSGISMNRGGVGSKMKPGWPEPSWVVRQRDRRRSRSAEASGRAGALGRWLAEAPGSGDPQTASPSEARSDLAEVVVDAEGAAAPFQRQDPSLQDQSVL

SEQ ID NO: 50404 - protein, 287 aa, Zea mays
  Coding DNA Sequence Number=SeqID_7029
  Homolog annotation: Hit_ID=Q6JAD6; Match level="QueryCoverage=84%, HitCoverage=70%, E-value=6e-17, Identity=55%"; Hit description =Putative uncharacterized protein
MEKCKPIKTPMPTNGHLDQDEGVVRSGCPRTKNVSAPGGGNNEDPHRPFRQVKGKTVYLEQQEGRKKLCMDRAARAAAASATAAAEQAELGDQPQTPSDQIAYRVHRLASRPRSSTPTTASTPPPTLPAPVTPAALSTTSTTPASTAPPLASAPPIPPARFWERDETELMLWHSDLLVALTAVLLLLIQPPQFQGTLEASRLLFGSYRPAPEDPVPAPAPVFDTQAEDTALHQFEAQDAAVDDYDDDDFGIPPPPPPPMPPRSHDHENGSSSGAAPLAIDPALAAIL

SEQ ID NO: 50405 - protein, 118 aa, Zea mays
  Coding DNA Sequence Number=SeqID_7030
MWCKRGPKCYTRKKQSMHILCKKVHTQPIKRSRVGFNKRAKGQPKAPLVWHTGLSGAPPDMSGAPEDSNANLLPSGISRGDSTIIHRTVRCTPDSVRCAKEEPPQELASFGNLQRLVR

SEQ ID NO: 50406 - protein, 57 aa, Zea mays
  Coding DNA Sequence Number=SeqID_7031
RIRGVVRFAVVPSMGLGVCGSLCQGGNEIDGSGYVDGAGEDEAVEGDFQEFQDYDEF

SEQ ID NO: 50407 - protein, 180 aa, Zea mays
  Coding DNA Sequence Number=SeqID_7032
  Subcellular localization annotation: CTP_CleavageSite=28; ConfidenceScore=5.53e-01
MARSPRPRLAGHGVPGAPPWPVRPDPPLGSTNRGGPMPSRGESRPPARARPPTSLTRARHGGVRPGLTGAAPSVPGAPCVPALSSAARLRVRRGALARPFGPASPARRPAPPASQALPPARPSRPAPGLGAAAWRARCRPARPARAARPRRARCSRSQRARDLRRGAFTAPARRRVPLAS

SEQ ID NO: 50408 - protein, 92 aa, Zea mays
  Coding DNA Sequence Number=SeqID_7033
RLNLPWQAWQPVCQSDWQTDAQTDLQTDCWSEVRGVRDQLNCPSGPVQLVLTREFRRENPSSTARRQVQLLYGQRGSQLKLSSAEVEKAQLS

SEQ ID NO: 50409 - protein, 257 aa, Zea mays
  Coding DNA Sequence Number=SeqID_7034
  Subcellular localization annotation: CTP_CleavageSite=9; ConfidenceScore=5.06e-01
MVWRPARLLAAAPGVAARSRRDPLAFGAARPPAWRARGLPAHGHGAQSAPGARLAARFVVPLLSSLHSSVYVALVVAKRKRYNFPNVASIVASLILANQQSSFSDQVIEFFEFHEVEDPEHLFGEGKVRHRWFGEEASGGWDLVISETRGEKQADQGKRYKLDRFESSLVGFCGLDDNPIKGLTSVLSVEQVLNAKLTGFNTKTTDQTKDGGKKSFEVPSVREKVKETRNPKPGVKKKTCKVKVDRVKSYGASRITT

SEQ ID NO: 50410 - protein, 54 aa, Zea mays
  Coding DNA Sequence Number=SeqID_7035
MARCMGSDQLRGKWVTRLVGKDVQPLLSVKLVYSKGEEQVVEEELSNIEAFNLI

SEQ ID NO: 50411 - protein, 546 aa, Zea mays
  Coding DNA Sequence Number=SeqID_7036
MNKDRQDAAQKRRAVIRLPDPRHEAKRARGSVKAAAPGGSQPTLAAKPAAPGSSKVPESTKVVVSGGTKSTPGEAAKVRELPSLGKRVADFATNISVDDYFVGWRFLRWRRDFVGHCRQGRGGHHVPPAQGGVTAAVAAAKSSKLSWASVFAAFMGIVHADAVREKSAAESKSRRLAEKVAALEAERTDLRRQLVEERREANRAIAEAQAAQAEAKLARVEGSLASQRAEEWEVRFNALRGRVERTEASTRSEVERTRAQLVDSYHELGARTADFEVPDREAGLRFLEWLQEELLALPTIVEGFMSFASPPSLRRGPMNGAVSRGAADTTRSLTKRMRDLNARSLRPKTPVCEAMERFEDVEDFGGLIGAPPEAAEGKPVLPSDAGEGPSDVPVPAATGADPVSALCRRSKALRRWWRSRQSKALRPRTRPRRSSVVWTEESSDEDLDYFVALDVALAEASSRVMGAEVPGPSVGRRRRRAVAKRRVSEVEGGRLRVDRAGKWELLSSPAGASVGEGELRSLFVGEELRIMLFHYREMGIIPKVEP

SEQ ID NO: 50412 - protein, 286 aa, Zea mays
  Coding DNA Sequence Number=SeqID_7037
  Subcellular localization annotation: CTP_CleavageSite=14; ConfidenceScore=5.03e-01
MASRQKYINVQAPKAAMNKRRHLRCHYKRNSGSAPAGTNNLHIGEPAGRQTPFDSNASSVEAQAHTSCNRRAGYYVRETAPPLAPVPRHLDCGTGAATRGNPAHGPTVPTEHIGHGSVSRGEGATVDMAKSGPAVMATAGGRKQRSHRLQAYVPSWDSDRALSHGVKTTCPCSVPRTARARTTAAPRTTRLVALTLRQDRQHLWQAKQATLHLCHNDRIKKGPRKGILRKGSFSAKEAGPEPPTDQRFEGWPLGRVRQPPQSTRAPSPPTDQRFEGWPLGRVLKVA

SEQ ID NO: 50413 - protein, 133 aa, Zea mays
  Coding DNA Sequence Number=SeqID_7038
MAAVVGAEVVAAEEVLVADEIATTICALGLRLFGFDSLSSPLEWGHGRGPYRSSVCPEVIAAVVWPPGAEVVVAAAGVGGGEPPGILSSRRPSNVGGCSYLRGWNWSSVCNGTLCAGVCSLRLSGPEHLCIWA

SEQ ID NO: 50414 - protein, 95 aa, Zea mays
  Coding DNA Sequence Number=SeqID_7039
MVLGQMLLLKGPRSRPLTGDENQPLKPLTYGDHHLNTDDSGHLPTNTAPANGGRPKAQWQVLTPILAIGTRMGPSQNTSTALTAYDMLCDPRCDR

SEQ ID NO: 50415 - protein, 219 aa, Zea mays
  Coding DNA Sequence Number=SeqID_7040
  Homolog annotation: Hit_ID=Q6J9V9; Match level="QueryCoverage=57%, HitCoverage=43%, E-value=2e-59, Identity=88%"; Hit description =Putative uncharacterized protein
  Subcellular localization annotation: CTP_CleavageSite=78; ConfidenceScore=5.07e-01
MEVVEAEGMRWVVSFSLAALLGCGNQSRMASDTSGRRSGRRFASVMMTASKKGPGKGLFRKRILPSEGNGPRALLLIRGSKVAPFGVRQPPQSTRAPSPLLIRGSKAGPSEGFDNRPRARRVRDDPGYVRYMTEARATLPRYPKTFPRPAGTICNGIPPEGGIEPSDPIEWARASALASASRGVTSSPNLGLGLRRSLRLARPQPRTNYATGDASLPYS

SEQ ID NO: 50416 - protein, 240 aa, Zea mays
  Coding DNA Sequence Number=SeqID_7041
  Gene Ontology: Mol. function=aspartic-type endopeptidase activity; Biological process=DNA integration
  Homolog annotation: Hit_ID=Q33BC8; Match level="QueryCoverage=61%, HitCoverage=9%, E-value=3e-11, Identity=33%"; Hit description =Retrotransposon protein, putative, Ty1-copia subclass
MAEYSSKRTVDQFSLPNDTNIQYFHTQLQFDVFWGTLMDIKFHRHQLIVWMTGFKHYVATFAEFVTPNSLNYDMISQGVDLYTEDQFEDYAQYYETARLGIPKRFGETPGLRHHPAVINKIARVTILLKSGDKSRIRNKFWNIIDRVMKGEHGLQIHMDGQFQGMMSHVDDCFDHMQSNFDGQFSDMHDRFSVVDSQLDEVHSQFIDLRSHIQTTVHDPIMSRMNNMQQSFQDIMGALSS

SEQ ID NO: 50417 - protein, 146 aa, Zea mays
  Coding DNA Sequence Number=SeqID_7042
MTGYLHTLDNHYDDLSSHCTHLNSRVESLERQVRELKQEKASLQECLDIAEGEEANTCEAYRTLKMDYDKKLKKLAPKKKIQKKTTNRGCQTEKKKKKTPPAPPPPKVDDWSDAEDLSLASLDDLLKEFGDTLEKEFSSTSGNALV

SEQ ID NO: 50418 - protein, 327 aa, Zea mays
  Coding DNA Sequence Number=SeqID_7043
MAHLRHIAQKSVIPFLPSRLAERPLRRPVTGQSSHLERLHHHLHEEQERRRQELEQQGSSSPPQQGVESVRSCSPMLPLETPPAPPLSAPAARVAIGGDPDDGGDNSGSSFSTDLSAEQEPEGLVARPITRDAARGCHFHDALDTLLRQALDRRTCRGVYPDRWEATCLVRRSENSLRGAEVYSEHYSISERDSAEAAMQDVARRALSHYCSVFSGVADGLNLWYYHRRPSGSTGGMVVSPVGEDNPRLSSTVNLAAVLNTELDHALDELSRARAEIAQLRAERAERRHLEDGSLAPIGTQHPYRSPRRVHHAYGNPDCRTRINLEP

SEQ ID NO: 50419 - protein, 169 aa, Zea mays
  Coding DNA Sequence Number=SeqID_7044
SLRDPVKLTMPSDLTSSPWFGRYTRRRRGHPPARVDRAIPAISDVESYLDVTARVSPSRPHPSPDLPRCRARTRAKPRKTANSAPPDPGLGLGLSPGRRRTPLRPTQGSDSGSAPEDDELRFARPQGSDSALASAERPPPRPTQGARARPRPRKTDSTSASEEPPRRPT

SEQ ID NO: 50420 - protein, 275 aa, Zea mays
  Coding DNA Sequence Number=SeqID_7045
  Subcellular localization annotation: CTP_CleavageSite=54; ConfidenceScore=5.37e-01
STLARVPACPAPRPSQTSTVARARAYKALPGFDYTLPRTLHTSPELARRRLPVRSESAAAQSLCHHRPASSAIPDPVQPSEKPVHTSVRLPEQGIGVYFAGEASPRSPELSTPPEYVDRGAGYTTPPQYAVQQFEKHRVPRCRVRMTLEPHPLQPGWRSLDSESFGYRAEDTVEAIALHGLTTFCGFHPLELATHPIGLFPAEKEDDPMWKDRVEHAKDIWAIYPGQTAHLTVRCMNALYRLQVMRGEAMSHLMALLEATKITLDNREELVVTNL

SEQ ID NO: 50421 - protein, 58 aa, Zea mays
  Coding DNA Sequence Number=SeqID_7046
  Homolog annotation: Hit_ID=Q8W0X4; Match level="QueryCoverage=56%, HitCoverage=1%, E-value=6e-07, Identity=72%"; Hit description =Putative pol protein
MAVVIKCFKTALKGRKEYPYKNKSKGKRFCFKCAFDKSSLFPNEHHTCLMAKEKKIRT

SEQ ID NO: 50422 - protein, 383 aa, Zea mays
  Coding DNA Sequence Number=SeqID_7047
MSPTAVVRAKGAAQDPWAAFCVSGEILSAAAAKDMAGSISKRLREASQQLKQAADFANRVASGVLTADVAAKVERLRAQHADAVREKSAAESKNRRLAEKVAAMEAEKTDLRRQLAEEKREANQAIAEAQAARAEAKVARAKSSLASQRAEELEARFNALRSRVDKAEASTRSEVERTHTQFVDAYRELGAWTADFEVPDREAGLRFLEWLQEELLVLPTIVEGFMSFASLVTCEGAMNALSHEGCRHYEVFDQSDENFEREIYKVEDPVVKQSAGALFDRMWGPHGREAVRERSDRAIEQMAHAEDVEDLGALVGAPLEAVEVNLGPPLDAGEGSSAAPVPTVAGEDPVLAPALTDEDALKVVAEPAAEDPTAAAGPSQVAK

SEQ ID NO: 50423 - protein, 25 aa, Zea mays
  Coding DNA Sequence Number=SeqID_7048
MAGAELAGLREGARLGWWAAGTGGP

SEQ ID NO: 50424 - protein, 36 aa, Zea mays
  Coding DNA Sequence Number=SeqID_7049
MESHDLRAKRESRLVGKEEGVEADLQEFQDFDEFDD

SEQ ID NO: 50425 - protein, 71 aa, Zea mays
  Coding DNA Sequence Number=SeqID_7050
MAGSAASLPAGSAAPPPGSAAPYPPPCPAGGYEIDGSGYGYGAGCQHCNHCSGEDEAVEGDFQEFQDYDEF

SEQ ID NO: 50426 - protein, 48 aa, Zea mays
  Coding DNA Sequence Number=SeqID_7051
MEGAKIAPIMILQLGEDINVNQNIRQYEKIVPMKNINCGIVPSYIAMS

SEQ ID NO: 50427 - protein, 468 aa, Zea mays
  Coding DNA Sequence Number=SeqID_7052
  Gene Ontology: Mol. function=sugar:hydrogen symporter activity; Cellular component=integral to membrane; Biological process =carbohydrate transport
  Homolog annotation: Hit_ID=Q8H6J2; Match level="QueryCoverage=99%, HitCoverage=76%, E-value=0.0, Identity=85%"; Hit description =Putative sugar transporter protein
  Pfam annotation: Domain name=Sugar_tr; Domain location=8-459; Score= -95.3; E_value=2.9e-05; Accession=PF00083.15; Description=Sugar (and other) transporter
MTSHRPAGEIAAIVEGVDIISDSTVGAARAQSFSGTSASHTWPRSTFYWQLSDPLVDLLGSVHENMSEGGSRRNSFFPVFNSFSFPEHEHMNEHRDGNSDQQTRETYYAGEANNGDGLRASLLSQAASVEVNDTNTSFTSEGSSSYLRRHGTSVLAQEFMASIHDYDIEEEEEEIHGFALPHQSAPRDMESTGRHPFRHQIVRLSETADMKFKWRVLLQPGIRHALCYGMLIQALQQVRLCVIVDYVFNSAWSSVYLRTGYHSTGISGLLRCAPEIFEQSGVASLFSDIGLSPHSTSILMSTLNALLILPCITAAMLLMDVCGRRVIVLATTPVLILSLSVMSMSTLVNMGPFESAVLFHFALTICFWSYVIGLGPIPNILCSEIFPTKARATCASFCSLSFWFGGLLSAYCFPVMLSTIGLGGACGIYALVCCAPLFLVYYRIPETKMLNLELIAELFKLSRQEHVQ

SEQ ID NO: 50428 - protein, 272 aa, Zea mays
  Coding DNA Sequence Number=SeqID_7053
MDWTVFCDGPEETRYWCEWRCDFSAPRNQHAGCVTCGPGPPCQRLDRRLQQRRGGALPRGGSMLLVLWFAFLTVGRSEDEGGVLPRGGSTLPVRRFAFFALEGQRASYMTCGTGPPCHGMDTSVCIGGGFSRRFEAGAGEPAFKEGSLLRVAVVTMALLDPCERFQPEVALNLARNPLGWGVLAFAGRTCAGVSPLGDLAVKEFVFFVSKLPSGLALPIPSFFVQLLEGLSPQPLPVVSCFILQAAIVAYLRGMSVEATLLPASSSSIRREG

SEQ ID NO: 50429 - protein, 122 aa, Zea mays
  Coding DNA Sequence Number=SeqID_7054
  Gene Ontology: Mol. function=kinase activity; Cellular component =ornithine carbamoyltransferase complex; Biological process=amino acid metabolic process
  Homolog annotation: Hit_ID=Q6QP54; Match level="QueryCoverage=82%, HitCoverage=36%, E-value=3e-12, Identity=46%"; Hit description =Putative kinase
MALPVDVADPRPRPGDVGVPPKLRSSLSSVAEAEPEPLGRARRRSFGRGQSGVRALGSGKAEFVVFRPESEPWVGRSGVRRLPGLSPSPSPGSGGAEFAVFRGLARVRALGRAERSSPSSGA

SEQ ID NO: 50430 - protein, 372 aa, Zea mays
  Coding DNA Sequence Number=SeqID_7055
  Subcellular localization annotation: CTP_CleavageSite=42; ConfidenceScore=5.48e-01
MNKNTGIRSAITNGTPVPPPQRRRRRLLLRGPNSGNADLRVDAAARRPPPMPKLVRQGRAEGRRVGGQPVVGPGYRAGGRTSSSCRGRRRRRERLRSHSRLKTGHAAAASATDNNRSFPPSLSEGAGHHPRRGRPQLGTLPSPALVMKILEAEGGAEVAARLAFPHHQAGRSPSWVTAGGGVQPGCTMKILEAERWLKGTNSHGVAFLQQGGGKTADTPHPGAWKMERHAAAPPTTRPVALTPRRDRRRSWQEKRATLRLRRNNRVKKGIGLRAPPTDQGFEDWPTEGFNSRLRSRGPDTHYWLAPEGFTVASDAERGMTRGSGAALANPAPAKPLTASTYQPVSLGPDRAPGLRPVRMREQPDQPKHYARH

SEQ ID NO: 50431 - protein, 452 aa, Zea mays
  Coding DNA Sequence Number=SeqID_7056
  Homolog annotation: Hit_ID=Q6QP51; Match level="QueryCoverage=21%, HitCoverage=40%, E-value=1e-29, Identity=72%"; Hit description =Putative growth-regulating factor 1
  Subcellular localization annotation: CTP_CleavageSite=44; ConfidenceScore=5.25e-01
MATTTSAPTTAATCLPTPCRRTATAPKHTGSRWCKEDLGVAGPRVARPSPEKRTKSCTLAREQQFAFPRMAGGRLRRAGGCPSPPNAGGRKGSSAHAEAPPHSMHSSASARVMKILEAEGGAEVAARLASPHHQADLLTCAPKRHGQSFHRRAPGFPPHDTRAGSHTSSELTQDAKEANRRMQGMKPPCGYKRSLILARTSGRKIEPPRREHATAPQLCTLSASSLPVDQQEGPVPHTVQPARWSLRARKPHRHLRQCCVFSTAEPVPQLKAAPRVTQQCQLSAAVTGQSVAGVGTAVDVAKSGPTIAAATDGRKQRASDTVGRRSKRRFTTVVMTASKKAGPSEGFDSRPEHLGSAPITDQGFEGWPLGRVRQSPQSIRAPRPLLIRGSKAGPSKGFDSRPRTRRVRDDPGYVRYMAEARATLPRGSGATLAPGYGQTVDSVNKPASKLGT

SEQ ID NO: 50432 - protein, 228 aa, Zea mays
  Coding DNA Sequence Number=SeqID_7057
MAKLTEALARLRGDWGGLATVAEALAAMAGGKELAGAKEGWLAGDGERRVKLKHQQGEERHPRRRFHPRRNLAQPQTAMRAGASASHSEAPASCPPRISARLTASVAWLRDWSCSRVIWPNPSCRCCTSSAWEATCSRAEKASVRADVASVHAIAAFSFGSSQSSRRYEQPPHQGARGITNSKRLTADLCSSSDNDLCLERLDSSSDGLRANATTEGPSFTSLTEDEN

SEQ ID NO: 50433 - protein, 463 aa, Zea mays
  Coding DNA Sequence Number=SeqID_7058
  Gene Ontology: Mol. function=nucleotidyltransferase activity; Cellular component=cytoplasm; Biological process=metabolic process
  Homolog annotation: Hit_ID=Q6ZJ97; Match level="QueryCoverage=99%, HitCoverage=99%, E-value=0.0, Identity=78%"; Hit description =Putative UDP-N-acetylglucosamine pyrophosphorylase
  Pfam annotation: Domain name=UDPGP; Domain location=61-447; Score= -26.2; E_value=3.1e-13; Accession=PF01704.9; Description=UTP--glucose- 1-phosphate uridylyltransferase
MKEEMVVGLSAPGPVGRWGAAPPQAMLERMKDYGQEGAFALWDDLSPEDRELLVRDIESLDLSRIDRIIRRSLGSQGIPLPAVEPVPESSVSKVEDRSPEDKERWWKKGLKAISEGKLAVVLLAGGQGTRLGSSDPKGCFSPSNTVLIHWYIMTSPFTDASTRKFFETRRYFGLDPDQVTFFQQGTLPCVSADGRFIMETPYRVAKAPDGNGGVYAALKSKKLMEDMAARGVKYVDCYGVDNALVRVADPTFLGYFIDKGVSSAAKVVRKAYPQENVGVFVQRGRGGPLSVVEYSEMDAAMTTEINQSTGRLRYCWSNICLHMFTLDFLNQVANSLEKDSVYHLAEKKIPSIHGFTTGLKLEQFIFDAFTYSPSTELFEVMREEEFAPVKNANGATYDTPDSAKLMLLRLHSRWVVAAGGFLTHSVPLYMTGVEVSPLSSYAGENLEAICRGRTFHAPSEISF

SEQ ID NO: 50434 - protein, 55 aa, Zea mays
  Coding DNA Sequence Number=SeqID_7059
  Gene Ontology: Mol. function=structural constituent of ribosome; Cellular component=ribonucleoprotein complex; Biological process =translation
  Homolog annotation: Hit_ID=A2XXG4; Match level="QueryCoverage=92%, HitCoverage=9%, E-value=1e-11, Identity=70%"; Hit description =Putative uncharacterized protein
MAEQTEKAFLKQPKVFLSSKKSGKGKKPGKGGNRFWKSIGLGFKTPREAIEVGGQ

SEQ ID NO: 50435 - protein, 243 aa, Zea mays
  Coding DNA Sequence Number=SeqID_7060
MAERCQLPRSCVPPTTRRKDGGYPPSEGLEGGKTRCIREREDMVAFQGGHPPFKGDSPYLRPQPSWAESSPTRSKVLPYGAGAGSHTSCKPAQSRRSQTAVRGAYNRPAVTSGSPRLPRPVGERAGSHAGGMQPRQVGALLRLPTRPGPGKGDTPKRILPREGTRLRASLLIRGSKAGPSEGFNRRLRARGLHTHYWSEVRRPAPRKGSTAASGYSGSAPTTDQGFEGWPPKGSQPPQTQSEG

SEQ ID NO: 50436 - protein, 307 aa, Zea mays
  Coding DNA Sequence Number=SeqID_7061
MGRGKSGCDLGPALSLKDVRHPCWGGERGEPGLYLPRGPVGHLFFQLLVVATILQLCGGDVLQPCRGRRTVAAQLGRNILPSSSLSWQGRERRPAGALWSGPLFGFNSWFASLEWEREREPSGGRVRPGTMAAAAEVAGGSPDSPVGCLNRFTKRESPRVKVTSELKEPLARSSMSRGQGVAVSVRTEAELARKEDLVGRSLTGLSVSGTDAGIDLPRPRVGLMSAGDNRPRPRGDQPSRLPEPDSRRRPWRRWPGRGDDVVLQSGDLRTASPSEARSDLAEGVVDAEGAAAPFKRQDPSLQDRIVL

SEQ ID NO: 50437 - protein, 67 aa, Zea mays
  Coding DNA Sequence Number=SeqID_7062
MGRSSSGLDVVITFLLDECFPPIFLPDMLHKEVNIFFSLVMWFMQSLSIIQLEPRMHKPARQFRLGF

SEQ ID NO: 50438 - protein, 100 aa, Zea mays
  Coding DNA Sequence Number=SeqID_7063
MGQIARGASEPDEDALRDDFVAGLRLVPIKRSVSLPVLSLSEQRLSAKASSEGWRLCLRPNRLKPVYCFCQPDPDHGSIDVWLGLSSQSDLSRSNPTTET

SEQ ID NO: 50439 - protein, 186 aa, Zea mays
  Coding DNA Sequence Number=SeqID_7064
  Subcellular localization annotation: CTP_CleavageSite=65; ConfidenceScore=5.93e-01
MSSSSSSSSSSSSSSGVSGDGSLGSPSLSCRRRSLSKASRARIRSRARAFFVSFFSFLFSTVTLRAARSTAQLGPPRPPGPVAGKACETPTSWRQTKSLGCENRGQSDARRKKERILTRYAHPRSGRIEGWEKVPASNFPTVPATHLWRSSAGRGSEDICKPSKSTPGVISQSGSRRSVKGSTLRR

SEQ ID NO: 50440 - protein, 86 aa, Zea mays
  Coding DNA Sequence Number=SeqID_7065
MKEGPQSLRIHYFITGTSRRFNSALADLSLMDAGAHEEGQAKVPKLGPQVERVLGGTYGAGCSCGHSGTFKSQNILCTQTGYQLHK

SEQ ID NO: 50441 - protein, 215 aa, Zea mays
  Coding DNA Sequence Number=SeqID_7066
  Subcellular localization annotation: CTP_CleavageSite=55; ConfidenceScore=5.82e-01
MAATPRTQTISPWVLSVVRRKSSRGRNQSTTTGRFSFAQSVGDELVTVKTRSDPRGSMVTRWARIVRGATGDSSPELEIRTTPWPGVPASPLSEANKGEQWWQQGYVLEGYSSVNLASHGHCAGARNARRPRRARYNGPDRTWASEPDEDALRDDFVAGLRLVPIKRSVSLPVLSLSEQRLSAKASSEGWRLCLCPNICPPRDQFDKVTWCRRRR

SEQ ID NO: 50442 - protein, 115 aa, Zea mays
  Coding DNA Sequence Number=SeqID_7067
MIKECTEGSEMGTAAHSALGLGDARARGRGRRRLASGTGIEALGLGDGDGDARARRWGRGRRSWARGRRGVAGAQLGDGGAWARARRRRGGRSRLGDGVAAQYQPGGVVSAPGET

SEQ ID NO: 50443 - protein, 120 aa, Zea mays
  Coding DNA Sequence Number=SeqID_7068
MGQSPGLQVSDQVATLRGYNGDPNRFTQLRISNHMTYVALNRCIWQPFPQILHNVNWQKPSFLRITPELGINAKDNLYPQDLSRNKHFCKSYFDTSSEVSIKVGPTDDIVVQRRPLLAPS

SEQ ID NO: 50444 - protein, 191 aa, Zea mays
  Coding DNA Sequence Number=SeqID_7069
MASKPLCPLSHGVRPLLPSLYQRPAMVVADLPTPCCCSPCLDEKQPSALPVHGVEQQLPFPGDILLAVVHGAPANLPVHGHKSLRPSLRSAPAVFLPASSLLSAAGSQGATPLLLSTPQNSQHAGASSPWTPRILAASPLPRSPSRRARDVVVLAVLSRQSTAAAAPPWRVLHLDTPSVPVVLLRLRFGLP

SEQ ID NO: 50445 - protein, 215 aa, Zea mays
  Coding DNA Sequence Number=SeqID_7070
  Pfam annotation: Domain name=zf-CCHC; Domain location=79-96; Score =18.1; E_value=0.0028; Accession=PF00098.14; Description=Zinc knuckle
MNEKNESQRYFGMKNNKRNRKMFGYMISPPQPQAKATKHMDTQTEESSQAQLYEIQTPNQPSPPIEQAKLTPKELKARGACYYCKNEGHIICECPKKRLDRLKKKAAKHDLSNNSEDQPFYKFDDEGRLISIHCEAKKYLRTRVKIVHDLESMVETKVDAVPKLHARELRLSGRKRNRLKGERLSSPRCIVLKTIVNMKGMTVILHRLRPMPINR

SEQ ID NO: 50446 - protein, 53 aa, Zea mays
  Coding DNA Sequence Number=SeqID_7071
MGLGVCGSLCQGGDEDDGFGYDYGNGCPRCNHCSGEEEVVEENFHEFQEYDEF

SEQ ID NO: 50447 - protein, 203 aa, Zea mays
  Coding DNA Sequence Number=SeqID_7072
  Subcellular localization annotation: CTP_CleavageSite=3; ConfidenceScore=5.03e-01
MARTALRPGRLPRRARRRHATAPPRPGTDARTGSLTALETDSRNREKRWRARPRHRTSAHQGESTAREPGWIVDGADRWALSWGMDREARPWKADCGRARLASRKEQKMTGKQTALGKKLVSRIRSRPWTTLPRPGRARPDLRKRREAGEQGELTAEERLDRPGTTRPGTTREQGDNGELCGRARRRAPIVAAVRKGEAPDAG

SEQ ID NO: 50448 - protein, 66 aa, Zea mays
  Coding DNA Sequence Number=SeqID_7073
RIRGVVRFASCRQWGSVYAARSAKVDLSLGEECGGYEIDGFGYEHGAGEDEAVEGDFQEFQDYDEF

SEQ ID NO: 50449 - protein, 27 aa, Zea mays
  Coding DNA Sequence Number=SeqID_7074
MALLVSGSGALARGQTDRIRDQYRSTS

SEQ ID NO: 50450 - protein, 169 aa, Zea mays
  Coding DNA Sequence Number=SeqID_7075
MNVDEQGGFDGQGNERDRRAARTELRLGDADGCYNTPAQRRPPRRTGGTGRRGEEPQESRFPKKLFLESEPLLAAHVHLVADDVLELDGDGAVELGEHHGVHHGPGRGRWGYDIVEDVIDDSIALQGEEDLPPPARVVGGHRVQHDGHEGQDVVETGSLCVEGSGRCRV

SEQ ID NO: 50451 - protein, 211 aa, Zea mays
  Coding DNA Sequence Number=SeqID_7076
  Homolog annotation: Hit_ID=Q6J9V9; Match level="QueryCoverage=30%, HitCoverage=33%, E-value=2e-07, Identity=43%"; Hit description =Putative uncharacterized protein
MTASKKGPGKGDTPKRTLLREGTRLQASLLIRGSKAGPSEGFNSRLRARGLHTHYWSEVRRPAPRKGSTAASGHSGSAPTTDQGENDLVTESHQREALSPRTPSTGDRVWQITRSSPETPCSAPTEGNMALFPVLLAERRRRGVCKKVESVPDRPLALCRGSGAALANPAPAKPLTASTYQPENLEPDRAPVLRPARMRERPDQPKHYARH

SEQ ID NO: 50452 - protein, 79 aa, Zea mays
  Coding DNA Sequence Number=SeqID_7077
MGKPVPSLLMLLLSRGRYNGSSSLISCKKQTIRIEFLSLQVTALVPTITGMGDHVSGRMRGYVHCQVHSGLNNIMLKRN

SEQ ID NO: 50453 - protein, 87 aa, Zea mays
  Coding DNA Sequence Number=SeqID_7078
  Gene Ontology: Mol. function=sulfotransferase activity; Cellular component=integral to membrane
  Homolog annotation: Hit_ID=A3C1C3; Match level="QueryCoverage=71%, HitCoverage=15%, E-value=3e-19, Identity=70%"; Hit description =Putative uncharacterized protein
LSESILLRIEQLGGLFIWTHTYSLMQKSGKLYHKMQSKSIQCPVDSDEEHEQAKEDGPAGCADEEAPLPTSVKPREHEHGEEEEHQM

SEQ ID NO: 50454 - protein, 64 aa, Zea mays
  Coding DNA Sequence Number=SeqID_7079
MASAAGRAHTRGEELDLFMDKWRNLLKGYQENSQKSTLLYLEPSLVEKIRNLAAKQPYPYRRHR

SEQ ID NO: 50455 - protein, 26 aa, Zea mays
  Coding DNA Sequence Number=SeqID_7080
MKLHGGMDIFKLRSKALQDLVARIGS

SEQ ID NO: 50456 - protein, 285 aa, Zea mays
  Coding DNA Sequence Number=SeqID_7081
MLALLGRALGRLESRHWFRNRRGAVVAQVAVQLLACSIRRAGLRDAWAWASMLACWESEKHVHLARLHAACMAARPFRPLPGCTPPPAVTQDGDLRLDGGGKRAGLRPLPLPQPQGFSSPGLGRRECRVGVGPCVSGGPLLHSVIGGKGGCRPWRWQLHRAWLSDASGFGAARGAGVCHGSLKRFFRQRDSQGRPWTDLQLYGLLPVLALRVWAWGGGLLAAAPALRSVLPLFGPPEQKSSSSLLLEQVTARHSSVFCCSAGPPLSSGVVRTCGGGTGVPFVMAL

SEQ ID NO: 50457 - protein, 65 aa, Zea mays
  Coding DNA Sequence Number=SeqID_7082
MALPVDVAGLCPRSGDVEAPPKPVGVAQAALSFCQTGQWSGEVTAVTSALPGGERQDKGVRPPLR

SEQ ID NO: 50458 - protein, 174 aa, Zea mays
  Coding DNA Sequence Number=SeqID_7083
MVNSSLLCFLVWVNLCRLWAGILISRQKTMSRPSQQTTFKEIGTNGLLMIHLYSSPIWTCHLTSSRPGLLPPKHAVVESDLRRSKRLRDAQAGFRQGSCQKKNCLMCQHKFEGPPSLSAKTIRRLGESFCNLSEVELADKALKKKKNPPGCVGPNKSGKKDKGDKKQDSSDDDN

SEQ ID NO: 50459 - protein, 32 aa, Zea mays
  Coding DNA Sequence Number=SeqID_7084
MGLGVCGSLCQGKEEGVEADLQEFQDFDEFED

SEQ ID NO: 50460 - protein, 73 aa, Zea mays
  Coding DNA Sequence Number=SeqID_7085
MAGLRLAEFSSVVCDADSLAAPRLCAHALSAGCREKRKNQAGGILMAETRAGPGKEDDSIDGAHVTVARVKLI

SEQ ID NO: 50461 - protein, 221 aa, Zea mays
  Coding DNA Sequence Number=SeqID_7086
  Subcellular localization annotation: CTP_CleavageSite=87; ConfidenceScore=5.09e-01
MKLSKPRIGHHLTGDTGSTSPDFNRPLSHLDRATRPKHTPLTSPTVCAHGQPYFGHHRRRSTPRRDCEDLPDLTRPSTGPLSPPVVVLEPAPEPATEDLPVPAFEGKPRCGGYKCGHCTTTVGVSEALYAKAVSPVLLTGNRWGWLMAEDTIESMALHVLTTFCGFHPLELSTHPIGLFPAEKEDDPMWKDQVEHAKDVWALYPGHTAHLTVRCMSALYRL

SEQ ID NO: 50462 - protein, 169 aa, Zea mays
  Coding DNA Sequence Number=SeqID_7087
  Gene Ontology: Mol. function=aspartic-type endopeptidase activity; Cellular component=chromatin; Biological process=chromatin assembly or disassembly
  Homolog annotation: Hit_ID=Q75HA0; Match level="QueryCoverage=65%, HitCoverage=32%, E-value=2e-09, Identity=28%"; Hit description =Putative uncharacterized protein OSJNBa0056E06.12
MKELMAQRNENLRQLAQSQPPPQHYGGGDHHQCAPAAATYQEFLSTQPPLFTRAEDPLDADVWLRVVESKFPLLNGDCSDAAKYAGYHADTDEKKRDKFRRGLSTKLHDRLNTVKANSYNELVNMAISQEDCITARQAEKKRKTPMAGLSAQPQRFRIVSDTQSRGPQQ

SEQ ID NO: 50463 - protein, 163 aa, Zea mays
  Coding DNA Sequence Number=SeqID_7088
MGCSTHHSRRCSRVSLPRRALHPATPGTRPAYLVHRVSLCGLPGQSRGLPEPLGGDLLGAPSREQFPGCGGGVIVSPVGEDNPRLSSTVNLAAVLNIELDHALDELSRARAEIAQLRAERAERRHLEDGSPAPVGTQHPYRSPRRGHQAYGDPDCRTKINLEP

SEQ ID NO: 50464 - protein, 437 aa, Zea mays
  Coding DNA Sequence Number=SeqID_7089
  Gene Ontology: Mol. function=potassium ion transmembrane transporter activity; Cellular component=membrane; Biological process=potassium ion transport
  Homolog annotation: Hit_ID=Q6K2H1; Match level="QueryCoverage=27%, HitCoverage=48%, E-value=3e-26, Identity=51%"; Hit description =Putative uncharacterized protein OSJNBa0052M16.7
MKTLCPKPGKGGKIHPSPAEDPTAAAFRLLPAAILVLVAGLCPEDQRVLAHLVTRSFLLGWDTITAPPPEQARGGPRRRRGHPPTVGCLCFQCYGSFWSRWDCSPQHDRIHAVLDAFEEHLNAAESAAAATATPPSSKRRDKGKRSRAPAATTPPPQPPTRGSPESQEPPSEVAHEPSAPLLPSCPCTPPPPAPAACLSENKENVPEETGAEAKAEQCGGEVAAEADEERKRGWADVMGGGNAAGESSRATQLLAYQSLGVLYGGEGGTFALYSLICRHVRAGLLPGGGTRDELMEEEKTTGRHGERPVSRDRAVLEKYRVMQRLLLLFTLLGTCMVIGDDLLTRQSQVGPLATVLVLDGWSQSASPVASRPSRMPASARFSPTPINMRHPRIPPPHKPPRPRHRPVRAIPADYIEGHATALQAAAQAAAKDASNCQ

SEQ ID NO: 50465 - protein, 56 aa, Zea mays
  Coding DNA Sequence Number=SeqID_7090
MELRLRPANGKVEGMSKGQTGSKATTGNGIREKMKTLKSQWYKYNKEWRYVKAYTR

SEQ ID NO: 50466 - protein, 227 aa, Zea mays
  Coding DNA Sequence Number=SeqID_7091
  Subcellular localization annotation: CTP_CleavageSite=20; ConfidenceScore=5.40e-01
MGAIKVKAQYTQGKRSSLARAQPQAKAADPGGFTSRPRAPSSDGHTFGSPEAQSLQRSNLGQIATPTDPSGAIGSSASPDPRARAQPRHWTTDSALPDPRARTQPWPWKTVSASPDPGLGLNLDLGRRTPPRPTPGLGLSLDLGRRTRPRPRRSLRLARPRARTDHVTGGAIITLPLASSGYGEQDQRPIWLAPPLMEARRRQQGFDIPDSCPSIGPKRSSDGHDIT

SEQ ID NO: 50467 - protein, 229 aa, Zea mays
  Coding DNA Sequence Number=SeqID_7092
MTGVLLWPKPNSRSSERFPSPNSKNGYPVCSGHGDSADNQKEQCVPVDPWRSSSIRGVEELEEDLRTLEQSTRALERTWNKLATVKKARAVAIESDDDARRSEEWEVTGARDLWHLPWQLSPAMIRRPKYVAQGRESAITGELIRNDRGNSVNSGRELGHEIIKKSEKDTHDARAEAKRAEEAAECERCIAELSPPPEPYDPLADPEMKEALEIISMADSILDEVITNS

SEQ ID NO: 50468 - protein, 52 aa, Zea mays
  Coding DNA Sequence Number=SeqID_7093
MARVACTLRGKRLDGGVSVLSVRKRQIFVASVQRWYPKTSTKTRVAGGKALR

SEQ ID NO: 50469 - protein, 86 aa, Zea mays
  Coding DNA Sequence Number=SeqID_7094
MGSSYIIGADARLGDLRWFSAAARSRSSQVGINLGGGQPVSALVSEALNRIPDGTVLKISQDQITSPPVNRALGFTPVAVIRAAGK

SEQ ID NO: 50470 - protein, 114 aa, Zea mays
  Coding DNA Sequence Number=SeqID_7095
MAVGSVLSHGAPDSQVRHRTLFDNVLSAESKKVAGEAPEQQQFGEGKCYLTYHVTEPPKSLGPPTVVLVHQTSDNPAGAPDHLTSSVSVFFTLPKSVSPVTQILQHIEGTSMRK

SEQ ID NO: 50471 - protein, 129 aa, Zea mays
  Coding DNA Sequence Number=SeqID_7096
  Gene Ontology: Cellular component=extracellular region; Biological process=sexual reproduction
  Homolog annotation: Hit_ID=Q56TP8; Match level="QueryCoverage=34%, HitCoverage=16%, E-value=8e-13, Identity=75%"; Hit description=Beta -expansin TaEXPB4
MDSKRRLQGPFSLRITNESGETLVAYQVIPANWAPNSYYRSNIQYEAFGSATGQATGSAVGLLISSATRLHTLITRIIGLICLVLLYHLQGIEVVDVALWEMYTCIWCWIAGLSCLVLAVVGAHSFELF

SEQ ID NO: 50472 - protein, 159 aa, Zea mays
  Coding DNA Sequence Number=SeqID_7097
MSTRVKIASHRHGAVTKGDGEAEIEDEHMKGNDDAVAHSTKANDNDMGSAGCGRIRSELHFGDHQIDIETRRQRNTTTGWGQTGYDGLGRVRRLTAGNFMMGSEARRRTREIARTGEGLGKQQAWASGAGKTPGVAGEQEKDSVWEFDASWRAKGHCRA

SEQ ID NO: 50473 - protein, 212 aa, Zea mays
  Coding DNA Sequence Number=SeqID_7098
  Pfam annotation: Domain name=IQ; Domain location=48-68; Score=27.0; E_ value=6.9e-05; Accession=PF00612.18; Description=IQ calmodulin -binding motif
MGDLWTNVRADLAKMQAMLQKVEQGLLQIKVAVQHEQHRLVLSTRLQTSAVVGIQAAARGFLARRRTREMRRQMLEAALVTVDLGTRGHDLALSNGHQQRHRAAISKCEHGTCPAGDKLQLYGSGGKEGTSLVIGKDALLSATTFRYRPPRGRLHWLLLRPIPGQVDSVFEHSSCCSSRTSCLSRRGVVSGPKEAHVGATVAAAMGPLRRIR

SEQ ID NO: 50474 - protein, 154 aa, Zea mays
  Coding DNA Sequence Number=SeqID_7099
MAAWYRGWGWLVQGLASGACHGGAPSSGLQRLVLDDFVPKWSCVDVITVADPEGMPGMHRHILQNQCRMHMARNAQRPRRACYNGPDHTWASMLGEVARWDDLVTGLRPMSYGTKGEPVHCLVSVGPTIAAKASSEGWRLRLRPNICPPRDQFD

SEQ ID NO: 50475 - protein, 153 aa, Zea mays
  Coding DNA Sequence Number=SeqID_7100
MGKGNKRKREPTPPSEDFGDLEYSEEEFSSESEGSPAPVSPPASSDDSDDSQGIAAEVWTYIRAVERSGLEGSDESEFSSDEEDSDGGEDEDDDDDDGDDDDGGDGDGGKGSTRGGSSTGSTRGGSSKGSTRGGGGNDSTRGGGGGSSSKASG

SEQ ID NO: 50476 - protein, 53 aa, Zea mays
  Coding DNA Sequence Number=SeqID_7101
MGLGVCGSLCQGGNEIDGSGYDYGAGCQHCNHCSGEDEAVEGDFQEFQDYDEF

SEQ ID NO: 50477 - protein, 250 aa, Zea mays
  Coding DNA Sequence Number=SeqID_7102
  Subcellular localization annotation: CTP_CleavageSite=62; ConfidenceScore=5.19e-01
MHRVFPPSEPPDGGRPRFFRLVVVGGTQLRGSWYLSTIVRLQGFSSGRPAASPPRWSPKTVTTSSRVGRSKPGCGLCPSLSFKDVHHQCWGGECAELGPVSARAVARSFPQWSWGRAFAVRGAGSYRVSGSPARAASAPLPVPPPAEATGRGFSADEIVGAARGLTSNSTAFCLSSPLEWGRGRGPCGSSIRPEVIASAVRLLGAEVVVAAALRATASHPSVFCCSAGPPTWGIVRTCGGGTGVPFVMAS

SEQ ID NO: 50478 - protein, 219 aa, Zea mays
  Coding DNA Sequence Number=SeqID_7103
  Homolog annotation: Hit_ID=Q6QP51; Match level="QueryCoverage=26%, HitCoverage=27%, E-value=9e-13, Identity=63%"; Hit description =Putative growth-regulating factor 1
MRAQAHTSCNRRAGYYVQETAPPLAPLPRLLDCGTGTATRGNPAHDPTVPTTHIGHGSVSRGRRRDGRYGQKWADSNGGGRRAEAAVTSSASSRPLLGQREDPLPRREDDASAFRSSNGSRTHNDRPVNHSSSRINSATGQATPLGSGKGILRKGSFSAKEAGPEPPTDKRFEGWPLGRVQQPPQSTRVLRPLLVRGSKAGPSEGFNGRLRPLGLCAHY

SEQ ID NO: 50479 - protein, 98 aa, Zea mays
  Coding DNA Sequence Number=SeqID_7104
MFLGTVADLEKSRKENDVEDHASLSAKKCQEAGLREYMEASALKEDLCADNGGKGGIRRAQVEDSDVHVADRGQGHGRRQGGGGGKGESLGHYHRHER

SEQ ID NO: 50480 - protein, 196 aa, Zea mays
  Coding DNA Sequence Number=SeqID_7105
  Subcellular localization annotation: CTP_CleavageSite=34; ConfidenceScore=5.02e-01
MGHVRPLGLPVSNSLETPCSAPSEGNMALSPLLLAERRRRGSLRRSTDRPDKKTVPPASLRLLCHSIEVRLTAAKSGLGRHRKLRLARPQGSDSASALEDDELRLAPTLGLGLGLGSGRRRTPPRPTLGLGLGLGSGRRRNSASPDPGARTRPRPRRSLRLAQGSDRPRHRGAIITLPLASSGYGNKTGVPSGLFR

SEQ ID NO: 50481 - protein, 36 aa, Zea mays
  Coding DNA Sequence Number=SeqID_7106
MAKHGGKVIEPFYSKAAVTPLAHLTVRCYTGQSGEL

SEQ ID NO: 50482 - protein, 280 aa, Zea mays
  Coding DNA Sequence Number=SeqID_7107
  Subcellular localization annotation: CTP_CleavageSite=41; ConfidenceScore=5.61e-01
MSSHFPHASRPSTFRAPGWGAPALHSSCRRWRNATSRKLVPFSHRSSSRIFIRQPGYIPSSVVTQDGDHEFDGGEKQAGLWPLPRPQLQGSSSSLLGRRARRAGALPPARVGGPPLLPASGGGNHPPALRRRRPPTMSGKANCCCPARVQHSVLCPHFRGEGESEDLPVRFGAAGACWCGVGGQVDAAIGAEVVAAGESFSADETVSATRGPTSGSLALMFCSRPLSGGREREPSGGNVRPGSIAAAAEVAGESLGVCRPAGSPMWRLFIPVGGEPKFRL

SEQ ID NO: 50483 - protein, 172 aa, Zea mays
  Coding DNA Sequence Number=SeqID_7108
  Homolog annotation: Hit_ID=Q6QP51; Match level="QueryCoverage=95%, HitCoverage=58%, E-value=6e-10, Identity=36%"; Hit description =Putative growth-regulating factor 1
MAKQEASRSDRNHFAAPLTDLTSGQRRLRRSDCCATRQRLGLGSAPEDDELRLARPQGSDSALAPEDDKLRLARPQGSDSALASADGLRLARPQGSASASAPKDDELRLARPQGSDSALASADGLRLARPRGSDSTSTSEDRLDLDLGGASASPDPGLGPTTSQEGPSLPYP

SEQ ID NO: 50484 - protein, 16 aa, Zea mays
  Coding DNA Sequence Number=SeqID_7109
MAVSKLREIRTMQWRY

SEQ ID NO: 50485 - protein, 513 aa, Zea mays
  Coding DNA Sequence Number=SeqID_7110
MDKDRQGAAQKRQATIRVHEARPKRQRGTAKAAASGGGKPPLPAKAGASAPSKAPEATVGAGGSKLTKVVPPASGVAEAAKVARTLPLPGKRVADFGTEINVDDYLGGSGEGQLALAAPGAATVTAALAPKARGETLGVGGEVSALALVRDEAGAATRRLKGVTEALSQATEALSQVADFTSRTASGALTAALSAEVERLRTQHADAVREKSASDSKCRKLADKVAALEKEKADLRRQLAGERREANEAIAKEQAAQAEAKLARAEGNIAKELAGQLQQRLTALESCAKGAEAAMRAEAERTRTQLVATYRELGARTGDFEVPEREPELRCLEWVQEELQELPTVLEGLMSFASLVTCEAAMNALSREGCRHFEALDQADEDFGRDIFEVEDPVVKESAGALYDRMWGSYGREVAERGERVDDFGALNSALPDPETTPAEAATGVALGPTPETAEDAPVAPASAAAGEDLPPKVAEGAPDAPAAAVPSVEDPAAVEAEAAAEAPAAAGPSQVA

SEQ ID NO: 50486 - protein, 192 aa, Zea mays
  Coding DNA Sequence Number=SeqID_7111
MERTLTWDTYPRSGRIMGWVRALASSLPTMTATRLRRSSAEREAEDICEPSKSIPGFISESGNRRSAKGSTLRRWMAATTPAAVSPPSRNLCKASRRDWSFSYFSRVAPPMPVAAGGGHHSLRERREPSVVVTEVKPPALPPLVQRHKDGRDVQLRAPRPQLERAATGPHRHTDLLRLRRRGKELRGEAMGP

SEQ ID NO: 50487 - protein, 355 aa, Zea mays
  Coding DNA Sequence Number=SeqID_7112
  Subcellular localization annotation: CTP_CleavageSite=53; ConfidenceScore=5.30e-01
MKRLAGTLNPCSWKETKLTTYPGSGVGSASLAGAIHSGYGSPERGRSKPSVTRASRSSTVTVEKGHGSRGGTTVTLSTIAERRGWRQRGQGTGKGDISKGTLLREGSGPRALLLIRGSKAGPSEGGSKAGPSKGFDSRPRARRVRDDSRSDFVTESHQREASSPRTLSNGSGSGKSPAETDGHDLGQCFVYPRGAISPRPSPTSGGNCSPRRSYISPEGLLRQWAHPRHARGPTRAGFVKKQPWPNRLSNRPYHRRIQCEDHLTPYPDTRASVSKVEASASEGGLRLARPQGSASTSASEGGLRLARPQGLASTSASGGIASSPDPGLGLRRSLRLARPWAQTDRATGDTSLPYP

SEQ ID NO: 50488 - protein, 55 aa, Zea mays
  Coding DNA Sequence Number=SeqID_7113
MEALPADDQRPFEDLVMRDEKEVMRQWNEQRDKEEAELLHKLSKRRKEAVDNRNH

SEQ ID NO: 50489 - protein, 82 aa, Zea mays
  Coding DNA Sequence Number=SeqID_7114
MAVKRDDGSVQRWRTTAAAWRTAGERGQRKSGRERRNWSVSRVADVEAKLTVAEGTAGLRRRRGNGLGTVAPLWRANEGRRG

SEQ ID NO: 50490 - protein, 137 aa, Zea mays
  Coding DNA Sequence Number=SeqID_7115
EPAKPIEQEVPTEDLLEPTGCHMIFGKAEAYDNKRHIKATHRIPHPRAYPLAVDPIVASKRLTKVLMDGGSGLNIMGQGRTPDRGRAGDHAARGRGHTPGLRGHAQGRQGVAPEGPGAGRGRAVQGEQGEGLPRQGG

SEQ ID NO: 50491 - protein, 421 aa, Zea mays
  Coding DNA Sequence Number=SeqID_7116
  Gene Ontology: Mol. function=protein binding; Cellular component =membrane; Biological process=meiosis
  Homolog annotation: Hit_ID=Q655Y4; Match level="QueryCoverage=74%, HitCoverage=87%, E-value=1e-154, Identity=83%"; Hit description=LEM3- like
  Pfam annotation: Domain name=CDC50; Domain location=69-341; Score =386.2; E_value=5.2e-113; Accession=PF03381.6; Description=LEM3 (ligand-effect modulator 3) family  CDC50 family
  Subcellular localization annotation: CTP_CleavageSite=53; ConfidenceScore=5.24e-01
MSSHAVGTSNGGSGDAAAGGAARRNTRMPKYSKFTQQELPACKPILTPKWVVSVFLIVGVIFVPIGVVSLLAARDVVEIIDRYDEACVPVNMTENKLAYIQNETISKECIRNLTVTKYMKQPIFVYYELDNFYQNHRRYVKSRNDAQLRDASKANQTSACEPEKTTANGQPIVPCGLIAWSLFNDTYNFTRGNENLTVDKKDISWKSDREHKFGKDVYPSNFQNGALKGGATLNPKIPLSEQEDLIVWMRTAALPTFRKLYGRLYFDLKENDTITVRLNNNYNTYSFGGKKKLVLSTATWLGGKNDFLGFAYLIVGGLCIFLAFAFTLLYFVKPSPFYLCIFYCQLKVEVALRAKAVGCVGNWETTTTYPGTDARMFRNTKCPYYSKCSLYEMKCSEPEMSMGISKHGSGKNFMYIFYEGV

SEQ ID NO: 50492 - protein, 105 aa, Zea mays
  Coding DNA Sequence Number=SeqID_7117
  Pfam annotation: Domain name=RVP_2; Domain location=2-92; Score= -22.0; E_value=5.4e-05; Accession=PF08284.2; Description=Retroviral aspartyl protease
MADIPEGAPVMTGIFSVLKYPAIILFDSGASHSFISTKFSAKCQLPFHHTNGGITISTPTGSKIHPWRQKVNWEKRHLDQIKPLAFVAPPEPPVLLLWGGVRQQG

SEQ ID NO: 50493 - protein, 249 aa, Zea mays
  Coding DNA Sequence Number=SeqID_7118
MTSHGSSDEGNAQSHTDGLAREGFPRILWEVLQGAGYTTPPQAEDTIEAIALHGLTTFFGFHPLELSTHPIGLFPVEKEDNPMWKDRVEHAKDIWAIYLGQTAHLTVRCMNALYRLQVMRGEAMSHLMALLEATKITLDNREELVVDLSTEMVEKDLQVEQLSNEIQELDELVGTRENTIEVLEDQLINTQQHLAEANQHLDMHHQETQDMEANEDVDIEGGEEPASSLDTAGSGRPPSPESSIASFAH

SEQ ID NO: 50494 - protein, 224 aa, Zea mays
  Coding DNA Sequence Number=SeqID_7119
MGEPVPSLLVLLLCRGLRFLPKHNGLRLGLPLKCFSRHSRGFAGLVRRLTRSTCSGGIPNSGEHDCAILVAGVLCSSLGKLHGLLVELSKGLDRAEEGGKGFSHSGCPWAALAGRGKVAGAMGELGGVWRGREEATGKLAGHWGGLYSRGMNVVTGRPRAHGRALSAPPSVSPRRTRVGLLLPWFNGRFERLSVQILAKPPCTVSSLHQILPFLCEFQARIRSG

SEQ ID NO: 50495 - protein, 138 aa, Zea mays
  Coding DNA Sequence Number=SeqID_7120
MATSTLGAGYCWATTHGPREPQVHLRRRRVFYQVYRGKGSIHNNVKDCLEILLGKDCLPIRSPVRAPHSTMANTLASATSGTSASPSAPSLPSPQYITHNLTASWSAPTARFSLPSRKMLLDDKKGKWADYYLKQSGR

SEQ ID NO: 50496 - protein, 382 aa, Zea mays
  Coding DNA Sequence Number=SeqID_7121
  Gene Ontology: Mol. function=protein dimerization activity
  Homolog annotation: Hit_ID=A2ZLQ7; Match level="QueryCoverage=51%, HitCoverage=24%, E-value=7e-51, Identity=52%"; Hit description =Putative uncharacterized protein
MACLRRANSCYMACIAANIAAGLIESPLGACRLPGALRGGIATATGMRIISVVAVSAGPGGGQGVQPPWASKFVGPPRYVHRTSSRVALSQLQLQLFPNRALFPNPNYGIWFSRRCATSVCMSPWALHPTQVTEKSKLLCAIMPRRKEPSGSEKRKKRKRVDDFIESQRGAMDKFVKSNSSASMNPNNELAIVVEEEEPGIEISEEEGNVDTDNFDDNNVSGAENPNISSEARTQPTNVDEEPVYTYDIYDPRNWDHLDNKAIDILVEKGPIREQGIEFPLDDASRHFSYTHYYRKLSNGEIFKTSGSKSQSFLAHDGYKNWRHISEKLKEHENSVDHISNMNRKKLFKIEIIEELFEVNNVSRKVKSFGDFMHREKIIGRD

SEQ ID NO: 50497 - protein, 122 aa, Zea mays
  Coding DNA Sequence Number=SeqID_7122
  Subcellular localization annotation: CTP_CleavageSite=43; ConfidenceScore=5.04e-01
MSFGPVNHQHRRGLFYSSAIRRFKRSPTTCIDVRPPVAKPLILSNTGRKYGKRDGLVLHCLESSAGPSLGRTRRSLASALVLGLCFVAEGLQGRSGLKCVSRYLRTRIRKGKATKVDTAPKL

SEQ ID NO: 50498 - protein, 215 aa, Zea mays
  Coding DNA Sequence Number=SeqID_7123
MPRTRKTALKSTGPIGVPRHQLAPRHEGISSGSNDPIRDLEAQVEQLRTELRHRNRVWAEDGQRINELAADVRRLEDKLVERDLAVDWAVNSRSVAWDREAKARARVTELSAALDNLQMPSRTRAHDVRVLPVVRKILLIHHLYHQCWPRLSLPWPTRLQIIPAFYVKWRVTNSSSKAEGLLPRDRVKPHTWTSLKCLPHSLKLKILLKLMSGSG

SEQ ID NO: 50499 - protein, 312 aa, Zea mays
  Coding DNA Sequence Number=SeqID_7124
MNALSREGCKHYEVFDRSDENFGREIFKDEDPVVKDSAGALFNWMWGPHGREAVRERSDRAREQMARAEDVEDLGGLNGARPEAEVNPVLPEAEVNPEAIEGSSAGSMPTMSGEGSLPAPAPTAEGPPKAVAELAAEDPKAAAGPSQVQDFGPAHATATDTANFVAASTVVAENDSGDSVSKFFESDDSGSLVVWTEESSDDDLDYFAALDVAAAEASPRVVGAEVPGPSVGCRRRRALVKRRVSEVEGGHPRVDRTGKRELLSSLAGASVGEGELRSLFEGEELRIMLFNYREMGIIPKVEPILGVMPSLY

SEQ ID NO: 50500 - protein, 164 aa, Zea mays
  Coding DNA Sequence Number=SeqID_7125
  Subcellular localization annotation: CTP_CleavageSite=52; ConfidenceScore=5.72e-01
MVGRASNSSCSHSRKRRPASRSGTSKSAVHAPSSRYESTSCVRVRSTSERVEASALSMRPCRALNRTSHSSARWLARFPYARANLACASAMAWLAFLLSSTSWRRRSVLLPSRAATFSDSLRLLLSAADFSRTASACYARSLSTLTDTYAVRAPDATRSAKSAA

SEQ ID NO: 50501 - protein, 224 aa, Zea mays
  Coding DNA Sequence Number=SeqID_7126
MSSPELRESSARMLEVTGGRWPKNVPIPHAAGEDFFTSRMARDLRVFTYGRNIAAVVSAVMNKDRQDAAQKRRVVIRLPDARREAKRARGSVKAAVPGGSQPTLAAKPAAPGSSKVPESTKAVGAGGTKSAPDRAAKVRELPSPGKHVVDFGMNISMDDYLVGSGEGQLVVVPPAVATMESTAVLGVKGGAFSAGGKISVATAVRDEAGTMSRRLREASQQLSQ

SEQ ID NO: 50502 - protein, 347 aa, Zea mays
  Coding DNA Sequence Number=SeqID_7127
MSSPELRKSSARMLKVTGGWWPKNVPIPHAAGEDFFTSRMVRDWRVFPYGRNIAAVVSAVMDKDRQGAAQKRQAVVRLPEARPKRSRGTAKAAALGGSHPTLAAKSTAPGSSRVPEAVKAASADGTKPAPTGAAKARELPPSGKRVADFATEISVDDYLVGSGEGQLVVVPPAVATAAAAVVPRARGSALSAGGEIPALTAIKDEAGAVSRWLKEALSQAADFADRVASGALTAVVSVEVERLRAQHAYAVREKSAANSKCRKLADKVAALECERADLRCQLAEERREAHEALAKAQSAQAEAKLARVEGSLARQRAEEWEERFNALQTRVERAEASTRSEAERTRK

SEQ ID NO: 50503 - protein, 182 aa, Zea mays
  Coding DNA Sequence Number=SeqID_7128
  Gene Ontology: Mol. function=nucleic acid binding; Biological process= DNA integration
  Homolog annotation: Hit_ID=Q8W0Y3; Match level="QueryCoverage=53%, HitCoverage=11%, E-value=1e-13, Identity=41%"; Hit description =Putative gag protein
MKSAFLNGPIKEAVYVEQPPDFEDSEYPSHDYDTEIRDVNDGRVENAKPIKTPMGTNGHLDLDMGGKSIDQKGRRAKIHRTVRCTPDSVRCSNRTRLRNSPASGFHEGCSAIIHRTCPVCTGLSGASSEQRLLRANGYRQRIKCALQRAEGRRAHTGAPDNEQFMSGAPPDIVADPEVRTPT

SEQ ID NO: 50504 - protein, 80 aa, Zea mays
  Coding DNA Sequence Number=SeqID_7129
MRKWLKKKRMKTKTMSHLKRRTLIKVEMKMIKTRKMIKRFRIKDHCIQESTKQFKEITPSTPYLVTSTRRYQMGIPQQAR

SEQ ID NO: 50505 - protein, 84 aa, Zea mays
  Coding DNA Sequence Number=SeqID_7130
  Subcellular localization annotation: CTP_CleavageSite=26; ConfidenceScore=5.19e-01
MCSSHPATLQLMTSASVWGKLRRLVSLASKVNVCKKFNKGQYLQNELLMNAVMKNKKSGNGYNSFVQKKAINQNKAKQNPKHIK

SEQ ID NO: 50506 - protein, 158 aa, Zea mays
  Coding DNA Sequence Number=SeqID_7131
MGTEAVRVLRCWRVRRDWPDDAGLSEGQSELGAMGDGGRYRRLEPATGGAQRRGGAGDGTALGRGLGNGIGEESAREFRLGELWSTMEAGRREARAGAATRAAELESGAIRAGRAGRAADWSSARAEGREGTGLGRRRGRRPAGEMTVGEKNGEGACG

SEQ ID NO: 50507 - protein, 121 aa, Zea mays
  Coding DNA Sequence Number=SeqID_7132
MYIALARNEVPLYVSGDLLVSVYGDYALGAWDLHAQEGDYKWARTVSRTLHGPRHQTTRSSLGRDTLCSRAQGLWSLPRLLPRATQAGDVDERSHEERPLQTVDPFASKPSVVLRRIPRLW

SEQ ID NO: 50508 - protein, 214 aa, Zea mays
  Coding DNA Sequence Number=SeqID_7133
MSTGPRARERGRANDVGRLTGRGEPVGENPTADEVQRRFSAVVPVIHDRGGSSSGSNNPIGDLEARVERLMSELRHGSRERARDSRRIAELVAEVYRLQEEIAERDTTIDWAVNSRSFAWDCEAKALAWVAELSASLENLQAYCNTMHEEVHLLYDRLHPNVSLEVAAMEAGPSEAANGEPDGELDLFGAPPSMNLADERSPEAGSGAAKDEDN

SEQ ID NO: 50509 - protein, 246 aa, Zea mays
  Coding DNA Sequence Number=SeqID_7134
  Subcellular localization annotation: CTP_CleavageSite=28; ConfidenceScore=5.28e-01
MALTLSERPQAGIPSKARLQANEAEQLSSSSRWARGRLAASSSSTRPRGSKQAADGRVAGWLRRPHPLVRVEASSSSQQGAPAQEQAARCGLRATERAAGSKRKWGTGARPHGDSGSTAVCRARSRDAAQSGDGAEGGTATEPSARRAACLQASGGGGRNSASPDLRPQPRKVVSASPDPWAQPQPQPRKVVSASPDPRARPQPRPREESRPRPTLASASGGVSASSDLGLGPTAPQGIHHYPTPN

SEQ ID NO: 50510 - protein, 217 aa, Zea mays
  Coding DNA Sequence Number=SeqID_7135
MARSVRAQGRGRRRLLLRPRTGSGEDAIPPEAKAILTLNAPAIRSVGEAIWPRLLHNEACPSWASGKSRLLATAAGVFISVGFIYRHLHRGASNRRLPEIVPFMLCVCAGVLHFLLFVGASAASGGADVDHGAEARALGLAALRVLPAAATVTFFLGTMLIFAARISAGGEEPVQAPVGLRLLSRMALAAAAALVCMMAVAVYGAYCSRLEVGIPGL

SEQ ID NO: 50511 - protein, 181 aa, Zea mays
  Coding DNA Sequence Number=SeqID_7136
MEGSWIIRTSYCLEEEGFPHLLRSCALRMGIRKKPDYVWKEYRENGVEKCSMAVYLGESRSYPNHPPFQVTFTGHHFPDTCQNVARKALQQLCQNYSKERKRLQALSGRDPTEDDPTIVYMAGYLHTLDNHYDDLSSHCTHVNSRVESLEQQVKELKKEKASLQECLDIAEGEEANTREAY

SEQ ID NO: 50512 - protein, 174 aa, Zea mays
  Coding DNA Sequence Number=SeqID_7137
MLVDYTTVLDGPIVSVEGPTQQGVESVVEVTPTSGVTSDGSSDPSLRLWLLRELRAMAQTATSVVVISVSVRVSSSSRDAMWWCRGYLWLGCRGRRPLRLHLLLRRGGRIMLLLVLLLASALLLLVQATMQSLEVTGLTWHRATQWKLRQARRQKGDHKLTCSAPDTGHLQKTS

SEQ ID NO: 50513 - protein, 316 aa, Zea mays
  Coding DNA Sequence Number=SeqID_7138
MDYMLFEVAELDGAAMICHTNSKMKGKCALGPFLSILVIECQHKWTQVNLWIKCKSSKKTNVLCLSAGNRRNQVEKEMALFNQRQLGLGAPDSVRWCTGCPVCQTRVCQLAALGKQLTAYGYKSPDCPVVHRTVRWCNSRPGQRSATESARDAWQEPTIRRGTGLSGVHRTVSGALTAPRLQQSTSPNEERNPHRTVPIMIVTRNKGTRGKIRKLTIRLRARHTLERSGTRIVRRPTPTTKDSPPPPSTSRPSSPTSITPASWKDCPVPQGRATLNSPGSGIRSAIIHRTCPVHTGLFGEPAEQRLFRANGHLLQH

SEQ ID NO: 50514 - protein, 261 aa, Zea mays
  Coding DNA Sequence Number=SeqID_7139
  Gene Ontology: Mol. function=nucleic acid binding
  Homolog annotation: Hit_ID=A3AQ03; Match level="QueryCoverage=36%, HitCoverage=47%, E-value=3e-07, Identity=38%"; Hit description =Putative uncharacterized protein
MAHRRSQKNKKTTPKENKETNPLKEEEENERWRPNDESTSPNGLSSHFDSYICCVANENDSGSTNENEEEERSFMQLYARLSQEDKAIMLKLLERAREQSEARQRLENVLSLKMLYFDELTKEHEELKCSHVDLVQSKSSFELEFAGTNNDSYQKLKEENERLKRSLTQLKGKCIAQPSQDNRDHMVKKLETGTTEACTNSLEENVKDLRIAKRKEQKKKINTSSKSLNHASIKGNIQGNKELILCQKIKAYNMEESQRMI

SEQ ID NO: 50515 - protein, 207 aa, Zea mays
  Coding DNA Sequence Number=SeqID_7140
MAPPKQTPRMRVGPRGMPKHHMASRAVETGSSSRAPQSQDYSNELHEEVHQLYYQLHPNDAPGAAEAEGGVVLADGGEPDANLEEDVAPMLVPGVESPGGSDVSEIDSDTEDGDGTSRGGAEADINPPPPLVPPTLADAIAALVNATANNARVLHEIAHHQNNQGGPRIPQNHQRNATYMEFMETRTPVFAKGEESLDAIEWLQVIE

SEQ ID NO: 50516 - protein, 64 aa, Zea mays
  Coding DNA Sequence Number=SeqID_7141
MAAGQSWSSAATEGRLAMEKKLSTEILGAIQGASTVGRLAALRGQQREAPCSDMRYLAESDKID

SEQ ID NO: 50517 - protein, 114 aa, Zea mays
  Coding DNA Sequence Number=SeqID_7142
MEDLVVDLSTELVEKDLQVEHMATQIQELEEQVGARENTIEVLEDQLLTTQQQLEEANQHLDMHHQEIQDMEAEGADEDVDIEGGEESKPASSLDTAGSGRPPSPESSVASFAQ

SEQ ID NO: 50518 - protein, 107 aa, Zea mays
  Coding DNA Sequence Number=SeqID_7143
  Gene Ontology: Mol. function=nucleic acid binding
  Homolog annotation: Hit_ID=Q8VY37; Match level="QueryCoverage=33%, HitCoverage=4%, E-value=5e-09, Identity=77%"; Hit description=Opie2a gag protein
MTREKKDTGRGKRRRPTRRRSARCTLAKNGIRTALLPTPTTKDSLPQPSTNRHSSQTSAILASWQRRKRCKDFDVDACVEHLTSITKLNGEVASLNAQLKTAKMTNL

SEQ ID NO: 50519 - protein, 157 aa, Zea mays
  Coding DNA Sequence Number=SeqID_7144
  Homolog annotation: Hit_ID=Q8S466; Match level="QueryCoverage=35%, HitCoverage=56%, E-value=2e-07, Identity=54%"; Hit description =Putative pol protein
MTQNFEISMMGELPYFLRFQGRQFKAAPFFSQSKVHPKPCPRVSGMKDPKPGEDPHWPRTAMWPSTKGGQCVVRRPRCRRPTTVLSSPPSSFAAALGINQSTDLPCKRKGKRNRLAVHAVGKRKRNRASSVEVESETLNRVAARGRGRGVDWLPAAA

SEQ ID NO: 50520 - protein, 615 aa, Zea mays
  Coding DNA Sequence Number=SeqID_7145
  Homolog annotation: Hit_ID=Q6JAD6; Match level="QueryCoverage=88%, HitCoverage=88%, E-value=1e-174, Identity=57%"; Hit description =Putative uncharacterized protein
MPRTKNASASGGGDDEDPRRPFRQVKGKTVFLEQQEGRKKRRSDREARAAAAAAAAAAQAALGDQPDVPSDQIAFRARRLASRSRSSTHTSASTPPPTLPAPVTHIAPSTSHRHTHYQHYASFHCFPLPPLPASAPPVHPPRFRERDETEVHPLCFGSSSDLIFSVLLQPGAQMSAQIALRVHRLLDLPAFLLAAGAESEAHLTYLPGLLSFLTISGRYVEEWVRVFYASVWIDPDHHWMRFRFEREDVTITASQIRQLFGFPESTTRLHSLCYGTSDPPHRPHGGVAPGTAHVAALFRPPFTDGSRRSPADFTTAAKYLYELVRRTLLPRMGYREATTHIQLWLLGALSTLEASRLVFGSYRPAPEIPVPAYAPVFDTQAEDAALRQFDTQGTAADDDDDDDDDDFGIPPPPPPPMPPRSHDHEAGSSSAAPATPPAMDPALASILQTLTQQQAHLAAEQARLSDRILSMFQNMQDRQDALQQQLIQDRAENRAFMALMLQHSDISAPPVQSAPPSSLHAPVVPSILSAPPVVTSPLRPVTLAFTSPVLSSVCPQPPVPPASAVTTTVVAVSVTASVPILDPRLTLTLRRHSLCYLDLDRMRPRRLLLLQMFRF

SEQ ID NO: 50521 - protein, 154 aa, Zea mays
  Coding DNA Sequence Number=SeqID_7146
MNVNEGEWFDGLGGRERAQGKTLLGKRINELRTDIRHLQDELVERDLALDWAVNSRSIAWDREAKARARVEELSTVVDNLQVYCNTLHEEVHELYSRLHPDVPADPIGMGAGPSVTAGEALGGEMDLFKPPPSMILADKWPPTPDNEATKDDKY

SEQ ID NO: 50522 - protein, 325 aa, Zea mays
  Coding DNA Sequence Number=SeqID_7147
  Gene Ontology: Mol. function=carboxyl- or carbamoyltransferase activity; Cellular component=ornithine carbamoyltransferase complex; Biological process=amino acid metabolic process
  Homolog annotation: Hit_ID=Q8SA97; Match level="QueryCoverage=51%, HitCoverage=21%, E-value=4e-20, Identity=56%"; Hit description =Ornithine carbamoyltransferase
MNSRLPKRSTVPGLERLLETAHLELDGKLFVNTQQAPTWRANCRRFEMGVGGYKRPCGRGSERLQASACLVLVLARPTFSKRALVLPFIGVRRGSGVMMAPPVDVARLRPRLGDVEAPPKPRSSLSSVAEVESEPWGRAERSSSSSGAEPKSEPWVGRSGVRRLPGLSPSPSPGSGGAEFAVFRDLARVRALGRAERSSPSSGTLPESEPWAERSSPSSGTLPESEPWVERSGVRRLPGLCPSPSPRSGGAEFAVFRDLARVRALGRAKRSFLWCLRSGLTACQSHSVSAVGVAQAALSFCQAGQWSGEVTAVTSALSARGRASG

SEQ ID NO: 50523 - protein, 331 aa, Zea mays
  Coding DNA Sequence Number=SeqID_7148
  Pfam annotation: Domain name=zf-CCHC; Domain location=232-249; Score =28.5; E_value=2.5e-05; Accession=PF00098.14; Description=Zinc knuckle
MRKYMYYMVDYTRTCLPTLLEWEPDPWGQQMPSRTRVHDGAGTSRGWEDTPNPPPVPPMLVEAIAALVKATADNTRFLREMAGNQFQQHGGRAPPQGPHETSYLDFSETRPPLFVKAEDPLEADDWIRYLVGKFCGSSTSRTSEGCHTALAVEAKNTGQGKSKGFGGDRSNQGPKKRTRLVIRPFNQNRSSPRPPSYPFKQPVFIRPATAPTSTNQPRAPSARFPALPSSSTGCFNCGKFGHFIKDCPYPRQNKSNNQQNSGGSNQGKGNVANNSAGKNVKKTGRTYYTQVATTPEGEPIMMVPQKDLRFSPLAAGDLALGFTPAPRFMPS

SEQ ID NO: 50524 - protein, 117 aa, Zea mays
  Coding DNA Sequence Number=SeqID_7149
  Subcellular localization annotation: CTP_CleavageSite=35; ConfidenceScore=5.21e-01
MAINGVSSWMRVMGRNGRIESPLTKKRTAVSLGLRVRMARSVRGNKHHALGMVASAGTRRGINPEYGITQQVLPDQRKDSQGYAGYMGVKDEVHDGVARRMNSGEHADRPEEDKTSA

SEQ ID NO: 50525 - protein, 77 aa, Zea mays
  Coding DNA Sequence Number=SeqID_7150
  Subcellular localization annotation: CTP_CleavageSite=19; ConfidenceScore=5.06e-01
MTGSSALPDPKPRRRPQPRPQEKVSALPDLRPRPQPQPREKSPPRPTLGLGLGRSLRLAQPGPRTDYATGDASLPYS

SEQ ID NO: 50526 - protein, 79 aa, Zea mays
  Coding DNA Sequence Number=SeqID_7151
MTRKTTLCHRGPSDPVRGPSDLSSASPNSDTRLTNLSVTEHKRLEDDMKKIDKEVQRQQDQVPKVAEKWFLSHFRVDYH

SEQ ID NO: 50527 - protein, 205 aa, Zea mays
  Coding DNA Sequence Number=SeqID_7152
  Subcellular localization annotation: CTP_CleavageSite=46; ConfidenceScore=5.22e-01
MASGQMLLLKGPRSRPLTGDENQLLKPKSRRSGAQVPLTVSSAEATASARGSLTYGDRPLSTDNSGHLPTNTGPAKGDRPKSHRQPTAQGGPGRGRPTHGATDTRVADGQPHSTPAVGGGTGSSTRAAQAREPDTRQLPAPQTASALLPRSLREGAGRCPRRGEPQLGAPSSPARMMNILEAKGRGEATARLAIPHHKAYGHHPG

SEQ ID NO: 50528 - protein, 255 aa, Zea mays
  Coding DNA Sequence Number=SeqID_7153
  Homolog annotation: Hit_ID=Q6J9V9; Match level="QueryCoverage=33%, HitCoverage=29%, E-value=9e-32, Identity=81%"; Hit description =Putative uncharacterized protein
  Subcellular localization annotation: CTP_CleavageSite=60; ConfidenceScore=5.26e-01
MEARDHMSCNRRNGYYVQGNRTATRANAASSRLRNQCRDSRQPYAASDTSGRRSGRRFTSVMMTTDWERGYFEKGSFPAKETGPRALLLIRGSKVAPSGVRQPPQSTRAPCPLLIRGSKAGPSEGFDSRPRARRVRDDPGYVRYMAEARATLPSERTLRTPEAQLGQTLSYSDLDRIALPTDRSSASPDPKPRPQPRPREKVSASPDLRPRPQPRPREKSPPCLTPSLGLGRSLRLARPGPRTDYATGDASLPYS

SEQ ID NO: 50529 - protein, 86 aa, Zea mays
  Coding DNA Sequence Number=SeqID_7154
MRLHILRGMKAEVILAFADICTHEFDIILLAEMCHLTLALLNAALILYGSIDIEDDAESYEVLNLWVMLRQVLVADLGYFPWKLGL

SEQ ID NO: 50530 - protein, 64 aa, Zea mays
  Coding DNA Sequence Number=SeqID_7155
MSGCPGFFRPNGEWVTLLLFHGTGTVDLKFTSRKIVQLKNVHHAPFLYTRISLAEPFCVEMGSR

SEQ ID NO: 50531 - protein, 648 aa, Zea mays
  Coding DNA Sequence Number=SeqID_7156
MPPAAASSEETLSNAMVEELRAGDSVEFGVSRMTSGRIEDMQRLGYFGGGVARAPGTEEVPEPEGELVVFEAFFAAGLRLPAHRVFELNQLPYDGYPGQDEADRRGKKPAVEAGGDPALAAATSSKKRKLVMDKDRQVAARKRQATVRVHEARPKRQRGASKAEASGGGKPPLPAKAGASAPGKAPEATVGAGGPKLSKVVPSASGVAKAAKAARSLPPPGKRVADFGTEIDVEDYLGGLDEGPLALVVPGAAVATAAPAPKAGVETLGAGGEVTALALVRDEADAATRRLKGAMEALSQVADFTSRTASGALTAALSAEVERLRTQHADAVREKSASDSKCRKLAEKVAALEKEKADLRRQLMEERREANEAIVKEQSAQAEARLARAEGNIAKELAGELQRRLAAFESRAEGAEAAARAEAERTRTQLMTSYRELGVRTGDFEVPEREAGLRCLEWVQEELQELPTVLAGLMSFTSLVTCEAAMNALSREGCRHFEALDQVDEDFGRDIFEVEDPVVKESAGALYDRMWGSYGREVVRARAEAARAQAERGERVDDFGALNSAPPEPETTPAEAATGVAPGLTLVTAEDAPGALVPAAAGEGLLPRVAEGASDAPAAAVPGAEDPAEATAEAAAEAPAAAGPSQVA

SEQ ID NO: 50532 - protein, 267 aa, Zea mays
  Coding DNA Sequence Number=SeqID_7157
  Homolog annotation: Hit_ID=Q6JAD6; Match level="QueryCoverage=85%, HitCoverage=34%, E-value=3e-11, Identity=30%"; Hit description =Putative uncharacterized protein
RNWGVVRFAVVPLMGLGVCGSLCQDDEEEDGYDHAYGNAPAPVFDTQAEDTVLHQFEAQDAAVDDDDDDFGIPPPPPMPPCSHDHEAESSRATPAAPPAIYPALASILQTLTQQQAHLAAEQTRQATTHQQLSERMLSMFQTIQDRAFMTLMLQHSGVSIPSVQSAPPPPLQVPVVLAIQPGPPLPTVGPSSSPLRPVTLAFTSPVLSSACPQPPVPPASAVTTTVVAVSVTTSDPAASAAQPQSESVPAPASTADPGSETDFDPQL

SEQ ID NO: 50533 - protein, 277 aa, Zea mays
  Coding DNA Sequence Number=SeqID_7158
  Gene Ontology: Mol. function=cysteine-type peptidase activity; Biological process=proteolysis
  Homolog annotation: Hit_ID=Q5NKQ2; Match level="QueryCoverage=99%, HitCoverage=33%, E-value=1e-120, Identity=72%"; Hit description =Putative uncharacterized protein 9C20.3a
MVHLILGLPNAGGGKPLGIDEVVVANNLRAELGLSKEEFGVAALQDRLRKGFDDDLSIRSFFLILFNRLLFPTASWGITNHEVLLTEEMDHFHEMDWCQLIFNDLCQAAKKWHTRSVTNVSTTIYGCSIVILLYYLDHLHDSAAPQNKRGTPHIKYFDRNIIQALTRADKGKIRQGQEPFGDCSNRTNTFDVPRPDPCGQHTIHIELPLIRDLISSKLNQHPSLHRLGFIEKLSHYDTEVGKACSVIKQTLHQIVEKQYNLSDVFGELIDEVLRAES

SEQ ID NO: 50534 - protein, 123 aa, Zea mays
  Coding DNA Sequence Number=SeqID_7159
  Subcellular localization annotation: CTP_CleavageSite=45; ConfidenceScore=5.31e-01
MQAACNRVKSAHPSDFQRAQHGGPGPHVMQPARRLLHACNCTATRATTVPPRLRNQYRDSRQPCGQQGNPLPRREDGAPVFRSSNGSRTRNGCPANHSPRRINSAAGQAASLAGEAGDASPSP

SEQ ID NO: 50535 - protein, 251 aa, Zea mays
  Coding DNA Sequence Number=SeqID_7160
  Gene Ontology: Mol. function=kinase activity; Cellular component =ornithine carbamoyltransferase complex; Biological process=amino acid metabolic process
  Homolog annotation: Hit_ID=Q6QP54; Match level="QueryCoverage=27%, HitCoverage=24%, E-value=1e-20, Identity=74%"; Hit description =Putative kinase
MEHRPGLERLLETAHLELDGKLFVNTQQAPPWRANCRCFEPGGSLGRRGNDGDSHDVVGPSPGLGEAEAPPRSKSSLSSKAEVESEPLGRARWRPSAEARAESEPWGRAKRSSSSSGAELESGPWGRAKRTSSSSGAEPESEPWGRAKRSSSSSGAEPEFEPWGRVKRSSSSSGAEPESEPWGRVKRSSSSSEAEPESEPWGRAKRSSSSSGAEPESEPWVRAKRSFLWRLRPDLAAVSLTLSSGTAVRAA

SEQ ID NO: 50536 - protein, 303 aa, Zea mays
  Coding DNA Sequence Number=SeqID_7161
MSLRSLMHRVFPASEPPDGELPQSFCLVVGGTQLRGSWYLSAIVRLQGFSSCSPAVSPHRRSPKTVTSSSMAGKSEPGCDLGPTLSFKDVHHPGWGGGRAEPELYLPRGFVGQPLPQHSRERALSGPAGGSDFDNAFGEQACKVKGNPRPLFDEPKPEVAVSARTEAKLARKEDLVGQSLAGSFTGRTDAGVELPGPGAWPMSSGDSWPRPRGGRPSRLLEPDSWRRPWRRWPGRGADAVLRSGDPPTASPSEARSDPAEGVDDAKGAAAPPPSRSEPAGLVHLVVCVYFLRPPKPKHTAVVL

SEQ ID NO: 50537 - protein, 96 aa, Zea mays
  Coding DNA Sequence Number=SeqID_7162
  Homolog annotation: Hit_ID=Q8W0Y1; Match level="QueryCoverage=32%, HitCoverage=4%, E-value=2e-07, Identity=80%"; Hit description =Putative transposase
MAHKGKATSNITYNPDDEPEEYNNHAIHSRLRPARRRDDGMYGDEGEDEGREGGRAGGRASGSLGGSAKDGIDVPIHVEPWRCIESCSTTSIVSYN

SEQ ID NO: 50538 - protein, 127 aa, Zea mays
  Coding DNA Sequence Number=SeqID_7163
MANSGWWRGHNERTVQGQAQTVRHDAEARAHGRGEAGAGVGATADGPAAVAMVAKQEREKEREGKGEDIFRSFCFFGAHGGINAQAVFNDGAANVDEVYDRPCKDVIVVVEARERSFFFCWQEVFAD

SEQ ID NO: 50539 - protein, 142 aa, Zea mays
  Coding DNA Sequence Number=SeqID_7164
MGKNNKRKREPTPPSEEFGDSEYSEEEFSSESEGSPAPIPLRESSDDSDDSQGLAVEVWTYIRAVERSGLEGSDESEFSSDEEDSDGGEDEDDDDDDDGGDGDGDGGNGGGGSGGKGSTRGGSSTGSTKGGGGKGSGGKASG

SEQ ID NO: 50540 - protein, 64 aa, Zea mays
  Coding DNA Sequence Number=SeqID_7165
MAASERGARARLGSGDAAGVEPGVSEAHQTVRCTPDKHCSLSGALSRQLTVGVCSIRLLDPTVT

SEQ ID NO: 50541 - protein, 29 aa, Zea mays
  Coding DNA Sequence Number=SeqID_7166
MALFASPLYPPLLAGSKPSWTLISFLSAR

SEQ ID NO: 50542 - protein, 143 aa, Zea mays
  Coding DNA Sequence Number=SeqID_7167
MCKSNKRKREPTPPSEDFGDSEYSEEEFSSESEGSPAPVSPPASSDDSDDSQGIAAEVWTYIRAVERSGLEGSDESEFSSDEEDSDGGEDEDDDDDGGDGDGNGSGSGGGSGGGDGSKGSTRSGSTKGSTKGGSGGSSSKASG

SEQ ID NO: 50543 - protein, 63 aa, Zea mays
  Coding DNA Sequence Number=SeqID_7168
MALSWFLLACCKLLRVATLRPVINRFLTIWESLRSSPISRKKNVSLLRLATILTDCIATLATR

SEQ ID NO: 50544 - protein, 142 aa, Zea mays
  Coding DNA Sequence Number=SeqID_7169
MGKNNKRKREPTPPSEDFGDSEYSEEEFSSEFEGSPAPVPPPASSDDSDDSQGIIVEVWTYIRAIERSGLAGSDESEYSSDEEDSSEEDGGGDGEGDDDDDDGGDGGDDGGRGGNGGGRGGNGGSRGSGGGGSSRGSNKASG

SEQ ID NO: 50545 - protein, 63 aa, Zea mays
  Coding DNA Sequence Number=SeqID_7170
MALSWFLLACCKLLRVATLRPVINRFLTIWESLRSSPISRKKNVSLLRLATILTDCIVTLATR

SEQ ID NO: 50546 - protein, 132 aa, Zea mays
  Coding DNA Sequence Number=SeqID_7171
MGKNNKRKREPTPPSEDFGDSEYSEEEFSSESEGSPAPVPPPASSDDSDDSQRIVAEVWTYIRAVERSGLAGSDESEYSSDEEDSSDEDGDGDGEGDDDDDDGGDGSDDGGRGGNGGSRGSGSSRGSNKASG

SEQ ID NO: 50547 - protein, 143 aa, Zea mays
  Coding DNA Sequence Number=SeqID_7172
MGKNNKRKREPTPPSEDFGDSKYSEEEFSFESEGSPAPVPPPASSDDSDDSQGIAAEVWTYIRAVEHSGLAGSDESEYSSDEEDGGGDGEGDDDDNDDDDGGDGGDDGGRGGNGGSRGSNGGGRGGNGGSRGSGGGGSNKASG

SEQ ID NO: 50548 - protein, 156 aa, Zea mays
  Coding DNA Sequence Number=SeqID_7173
MAVAGGQEQRSRRQPSLCPIQGQRENPLSWREDGAPVIRSSNGSHARNDRLANHSPRRINSAAGQAAPQGPGKGDTPKRILLREGNRPRASLLIRGSKAGPSEGFNGRLRAPGFCAHYWSEVRWPAPRKGSTAASGHSGFAPTTDQGFIGWPLKGS

SEQ ID NO: 50549 - protein, 127 aa, Zea mays
  Coding DNA Sequence Number=SeqID_7174
MSLGYKAFGILSSYPWCGPYFTNFSVAREQNNTTAVILSFGNLRLHDDAKATAQSAPLRVLPLHDLHLFRFNEHPMEINGAFFDSVFLPHFADARDLAVHNLPSAVATESTVRAIARGNCPFSGFVT

SEQ ID NO: 50550 - protein, 974 aa, Zea mays
  Coding DNA Sequence Number=SeqID_7175
  Gene Ontology: Mol. function=peptidase activity; Cellular component =cytoplasm; Biological process=proteolysis
  Homolog annotation: Hit_ID=Q6ZIR2; Match level="QueryCoverage=16%, HitCoverage=16%, E-value=1e-37, Identity=58%"; Hit description=DegP protease-like
MSLDFKLILDELNRRFDELEIRWDRRFSPSTYLDHPPTPLSVHQSSDASASTPPTPTAAVGVVVIADNWGGCFDDGEQYYEASSVVADNWGGLFEGCDAVADISSNLLDSDPDEAFVTSHSDKALLDNHQAGVTDDGPAATATWWWCASATGDMESTLKGIRGSDASCVLDLDDVATLAGAVVDTYDEDRATEEQLATPLDTLLCAGLDPVKSHSGCLLLQRLKLLPTSIGAQVVFEEMQQSAIVRDAHAYGVTVHVPPVCMLDGVHSQHFFGTGIIIYHSEHLGLVAVDRKTVVVSIAAILLSFAPYSIEISGEVVFLRPVHNFALLAYDPSALGAGASVVRAAKLLSGSGATIVEDQKVLEEKNAQNTVLLHPLLPMVDKGPWPPPVQLEIHSSGIQLRPVPWPSLYYYAVWASWIELMVVAGYISPKPPWLSFASEAKNVHDLFIGVFLGDVYSMSLRQQLHDPGQKPVPYQYLASYYGALLGCSWSVDGKYLLSVGDNDLVQVWSMNDTNIVSCGEGHNSWTGALCMAFYAQSEETRQSHSVHKFALGTLAFEHTLSSGSPIRSEVELLPESVEVIDKDYGWTRYPTASLESSIARDCCPSTVAHRQSVVEALLQCDRKSSSRVVVSQWESFLADYFRHTCFASTVDYFLNGLQQQHGDCISSFRVHLIILQFLNVTASETKSGVCAAHNYLSDSLDQQAGIGWPLARHDEMVWPQTAVVSYNKLVEVQSRNPSIWPMPWFSFTIMSGGTAVWYCDTCWTPPSPPTYPEEKHQRPYGAPCRIALLVDFELNYQQLKFVNYGRIHFYIWEELESYQSVMNSQVQRTHDQDSRSMVLLKGNLVFILPGLILVAHDLGGACQRDTNGTLQNTQDFVCSNGKDRPLMTSIWQPRLNLERDSLLEQVLQCQSEEDRVREAKLCYHVPYRLGGKPTLKEGGMSVMRGLHGRNTTVDKSVSDQLHARWAATFDKAQL

SEQ ID NO: 50551 - protein, 248 aa, Zea mays
  Coding DNA Sequence Number=SeqID_7176
  Gene Ontology: Cellular component=spliceosome; Biological process=RNA splicing
  Homolog annotation: Hit_ID=A2YMU9; Match level="QueryCoverage=29%, HitCoverage=16%, E-value=4e-29, Identity=88%"; Hit description =Putative uncharacterized protein
  Pfam annotation: Domain name=Prp18; Domain location=24-137; Score= -43.5; E_value=0.015; Accession=PF02840.6; Description=Prp18 domain
MMLTDKDSKRMTTKFEELCNEDKILVFFKKLLNEWNQELDEMTELEKRTVKEKSMVATFKQCARYLSRLFEFCRKKGSDSGSAPEDDELRFARPQGSDSGSAPEDDELRFARPQGSDSGSAPEDDELRFARPQGSDSGSAPEDDELRFARPQGSDSGSAPEDDELRFARPQGSDSTLASADGLRLARPRGSDSTLALEDRLDLDLGGASASPNSGLGPTTSQKAPSLPYPKLTQATRDKTGVPSGSLR

SEQ ID NO: 50552 - protein, 176 aa, Zea mays
  Coding DNA Sequence Number=SeqID_7177
MQSACNRAKWARPFDSNAPSMEAQAHTSCNWRAGCYVRATAPPVAPLPCLLDCGTSTATRGNPAYDPTVPARRIGHGPDRRHLWQEKQATFRLRHNDRVRKGIGKGGYPERDPSPRRKRAPSPPTDQRFEGWPLGRVQQPPQSARAPRPLLVRGSRAGPSEGFNGRLRPLGLRAHY

SEQ ID NO: 50553 - protein, 288 aa, Zea mays
  Coding DNA Sequence Number=SeqID_7178
MGRREAEREGGKVAGGRQAWEVEPAAFVLAPRPGRGNDGASCDVVGPSPELGEAEAPPRSRSSLSSKAEVESEPLGRARRRPSAEARAESEPWGRAKRSSSSSGAEPESEPWGRAKRSSSSSGAEPESEPWGQAKQSSSSSGAKPESGPWGRAKRSSSSSGAEPESEPWGRAKRSSSSFGAEPESEPWGRAKRSSSSSGAEPESEPWGRAKRSSLSSGAEPESEPWGRAKRSFLWRLRPDWVADSLTLSSGTAVGAAQVALSPCQAGQWSGEVTTVTSALSTGGRASG

SEQ ID NO: 50554 - protein, 415 aa, Zea mays
  Coding DNA Sequence Number=SeqID_7179
  Homolog annotation: Hit_ID=A6ZIK0; Match level="QueryCoverage=63%, HitCoverage=44%, E-value=5e-07, Identity=26%"; Hit description =Putative hydrolase HD domain
MPSSTPSAAVEEVPTAPAPATEGDAGGTSSSDPPPTLEEPEVVLGWRLRSGTEPEAAPFPLPRVLSRAHQALQEIEAAIWREWEALESEHQRLSDWRTQLEERTKAASHQFAFERSELAWDRKDYKKDLQKVYARELEASRKEKRLAKKEEHLNQREEVVTELQAKLNAFNEILEEQRVQQTTAVESLQKLQRELDGKAHDAALAEEKLKAKGESLDRRETGLARREKDLAFKEEMLERQEKSLAEHELEVEKEWTLEERVRWFQAAHAALAPQAVEAMKKTLEDLQAEHRAEVQRIAAWAGEASMTLVSLGVSPIPVSELLTSISDALPVLDSAADRLRRLDQILGAHLEADGGRLCRAVIEYILTCFWSHDPTISLEPMIAGPVADTEDAAWEGVQDIVEVVAERFQRDPTDD

SEQ ID NO: 50555 - protein, 92 aa, Zea mays
  Coding DNA Sequence Number=SeqID_7180
MESSEPQEAEGWVARPITRDAARGCHFHDALDTLLRQAFDRHTWSIEYRCVVYQHSHGRCLTTGADAYRRAQLEQHDQQEEQQRQPPPPPPM

SEQ ID NO: 50556 - protein, 278 aa, Zea mays
  Coding DNA Sequence Number=SeqID_7181
  Gene Ontology: Mol. function=catalytic activity
  Homolog annotation: Hit_ID=A2Y3P0; Match level="QueryCoverage=20%, HitCoverage=16%, E-value=4e-12, Identity=69%"; Hit description =Putative uncharacterized protein
METTHLELDRKLFVNTQQAPTWRANCRRFDPGGPWTDEVEAESEPWGRARRRPSSEVEVESEPWGRARRSPSSEVEAESEPWGGARRRPSSEVEVESEPWDWARRSSSSEVEVESEPWGRARRRPSSESETRAEPWGRARRSFLWCPRLDLAAVSLTLASGTSIGAGQATLFSYQAILALIAPAIRSVGVAIWPRLLLREACPSWASGESKSYMAACAIVYDKLRRSRHLDVVQSGYTALSIVKQGDLMVVANVDDSRVVLGTASDDGAITPSSSSST

SEQ ID NO: 50557 - protein, 165 aa, Zea mays
  Coding DNA Sequence Number=SeqID_7182
MGSARVAFVLLSLEEHNFAEVGSPAASPCRWSPKTATTSLMVGRSKPGCGLCPALSFKDLHHPCWGGGRAEPELYLPHGFVGHLLLQHSGEKALTGLAEGADFDNAGRAAASVVSSSMPGSLAQLALARLPVPPPAVGRNVAICPPYGRLLRCAHQGTAQDVARC

SEQ ID NO: 50558 - protein, 89 aa, Zea mays
  Coding DNA Sequence Number=SeqID_7183
MAYTRQLFVLEIWEDNCGEFPLIDLGMFLTGDDKAEGLSLMSLLVRLTVVMPWMLEWRLSLTSELRRMVYFCAWLANYIGVEADVPPVP

SEQ ID NO: 50559 - protein, 159 aa, Zea mays
  Coding DNA Sequence Number=SeqID_7184
MVCLGLGGRRKHTLQDNPILQARILTVEGSSSTLGVNYTFGEESGSSRRLGRSPRGLGQLSPEDISPARGLGNSIPASVPPVDDPARLWPTKSSFRANSASVRADTATPGFGSSKSDRGVPLTKQEKPRTARPTEPRDSYASGIRIPHSSPLHGATHAW

SEQ ID NO: 50560 - protein, 228 aa, Zea mays
  Coding DNA Sequence Number=SeqID_7185
MAKRYQLPRSCVPPTTRRKDRGCSPSGGSEGGKTRHMREREDMVAFQGGHPPFKGDSPYLRPQPSRAESSPTRSKVLPLRRGGWVPRVMQTGPGQKKPNRPAVTSIPPLSPRPAGERADSRAGSMQLRQVGAPLRLSTHPAWKPRPTRHATSASVAMCEQLHRHSHHYHASSTAEPVPRLEATLRTTQQCQPGTTVNTAKNGPAVMAVAGGQEQRSRRQPSLRPIQGQ

SEQ ID NO: 50561 - protein, 120 aa, Zea mays
  Coding DNA Sequence Number=SeqID_7186
MAASRTTRPVALTPRRDRRRLRQEKRATLRLRHNDHVKKGNRPRASLLIRGSKAGPSEGFNSRLRALGFHAHYWSEVRRPAPRKGSTAASGHSGSAPTTDQGFVGWPSKGSQSPQTQSEG

SEQ ID NO: 50562 - protein, 289 aa, Zea mays
  Coding DNA Sequence Number=SeqID_7187
  Gene Ontology: Mol. function=methyltransferase activity; Biological process=metabolic process
  Homolog annotation: Hit_ID=Q6Z2U2; Match level="QueryCoverage=23%, HitCoverage=30%, E-value=4e-09, Identity=43%"; Hit description =UbiE/COQ5 methyltransferase-like (As(III) methyltransferase)
MTCSLRLSLNFGSITPLLSKHTPEHGVLENNWVTQPKFRVNRGEAELGAVERAGARGSRAEGGGGGEAAAQWVPLREARARVAFFADDDVDDLTRSVAHHHAIVEVCVKAASKKPDTLGDCECFPPTPPSDNSARIPSHFTDLALLCFALVWYGWNWNLLPNWNWNLLPAGPFSQRMLLMVEEKKPYEMKLVDLGNKPKWSVSLPLNILQPARGVSPVTTGLAKCHTSFLEVVEALPVEDNSIDVVIGTLVLCSVNNIDMALRDDTLLCLVQGVLDPSQQFVADGSEPG

SEQ ID NO: 50563 - protein, 168 aa, Zea mays
  Coding DNA Sequence Number=SeqID_7188
MGLQIVRRDGGERPRVARRNDGYRSAITKQRRWRRSGQGAQFSFSGYSLRLRKPKREASSRVKNHHQSLFRIYKGPGKTRSTLRPNPPRNPKLEGETTVPRTTRTTAAPRNTCPVALTLRQGRRHPWQAKQATLHLRHDDHVKKKGPGKGILRKGSFSAKEAGPEPSY

SEQ ID NO: 50564 - protein, 103 aa, Zea mays
  Coding DNA Sequence Number=SeqID_7189
MAEPYYSPVPKEERIEVEIAVTTATRLAAFLVDGKFVGVNIHVVRDFFGCLPRGVYQGCNWIGKLSLVIDLLPGAAPTFQTAIQDVCRRVKGTEEAVNRITRG

SEQ ID NO: 50565 - protein, 358 aa, Zea mays
  Coding DNA Sequence Number=SeqID_7190
  Gene Ontology: Mol. function=cysteine-type peptidase activity; Biological process=proteolysis
  Homolog annotation: Hit_ID=Q5NKP7; Match level="QueryCoverage=99%, HitCoverage=40%, E-value=1e-171, Identity=83%"; Hit description =Putative uncharacterized protein 9C20.3c
MKHVDRPPNNLKRITIQSSQECLSVDIPCAEHSNPCPDVRNPPNVDSQTLINEIVQLDSDEDDFMRAIKKRSVSESHTRVLRKVVTKRIKAEDLPRQRLNVRCNPQDVIASIHILNERQRQAIRCKGFSNILDMTVDALYSRSHLRWLMDKLDHKDMTIRPSPGKELKITKDIVHLILGVPNHGGGKPLGIDEAVAASNLRAEFGLAKDEFNVTLLQDRLRQGEDDDLTIRCFFLILFNRLLFPTASWGITNHEVLLTEEMHRFHETDWCQLIFNDLCEAAKKWHNRSTTNVSTTIYGCSIVVLLYYLDHLHAAAAPQNKLGTPRIKFFDKNIIKALTKSDKRKTRHGAEPFGYCELD

SEQ ID NO: 50566 - protein, 183 aa, Zea mays
  Coding DNA Sequence Number=SeqID_7191
  Homolog annotation: Hit_ID=Q5Z9G5; Match level="QueryCoverage=37%, HitCoverage=27%, E-value=8e-07, Identity=42%"; Hit description =Putative uncharacterized protein P0655A07.24
MTKQSMQMQIGYSPGLYLTTGSPDQLQEAPVGRGGVGDGGAVHGACGRGAAGRRGRPCGGAAATAPRVVRGGAGGLAVLCAYPFRVPARGVLPLAYVARAQGAPLGDAGSAAMEAALRDGVVPFRVDGEARTRWKVAGIIGANQWTRLRASSASSGPTAPCSPSDASPSPSSCSSDRRALCIV

SEQ ID NO: 50567 - protein, 1297 aa, Zea mays
  Coding DNA Sequence Number=SeqID_7192
  Gene Ontology: Mol. function=nucleotide binding; Cellular component =intrinsic to membrane; Biological process=defense response
  Homolog annotation: Hit_ID=A2YLA4; Match level="QueryCoverage=75%, HitCoverage=81%, E-value=9e-61, Identity=31%"; Hit description =Putative uncharacterized protein
  Pfam annotation: Domain name=LRR_1; Domain location=1012-1033; Score =9.5; E_value=5.2; Accession=PF00560.24; Description=Leucine Rich Repeat
  Pfam annotation: Domain name=LRR_1; Domain location=702-725; Score =8.5; E_value=8.1; Accession=PF00560.24; Description=Leucine Rich Repeat
  Pfam annotation: Domain name=LRR_1; Domain location=728-749; Score =16.2; E_value=0.12; Accession=PF00560.24; Description=Leucine Rich Repeat
  Pfam annotation: Domain name=LRR_1; Domain location=751-772; Score =11.9; E_value=1.9; Accession=PF00560.24; Description=Leucine Rich Repeat
  Pfam annotation: Domain name=LRR_1; Domain location=774-796; Score =11.3; E_value=2.5; Accession=PF00560.24; Description=Leucine Rich Repeat
  Pfam annotation: Domain name=LRR_1; Domain location=798-822; Score =5.9; E_value=25; Accession=PF00560.24; Description=Leucine Rich Repeat
  Pfam annotation: Domain name=LRR_1; Domain location=876-899; Score =8.2; E_value=9.2; Accession=PF00560.24; Description=Leucine Rich Repeat
  Pfam annotation: Domain name=LRR_1; Domain location=933-954; Score =1.8; E_value=1.4e+02; Accession=PF00560.24; Description=Leucine Rich Repeat
  Pfam annotation: Domain name=NB-ARC; Domain location=181-512; Score =98.0; E_value=2.9e-26; Accession=PF00931.13; Description=NB-ARC domain
  Pfam module annotation: Pfam domain module=LRR_1::LRR_1::LRR_1::LRR _1::LRR_1::LRR_1::LRR_1::LRR_1::NB-ARC; Domain location=1012 -1033::702-725::728-749::751-772::774-796::798-822::876-899::933 -954::181-512
MAVSASAFGGHVVGALKGLLLNGPLPRKAGAELHEKLKQEVRYAADAENRVLEDDRARRWLAELRRVLYRADDRILQAYDAQEQQRTTASVLSLPVSDRAAVSLPFLASVFLRSCRVPTISVSPHSQIMRRFTMDMYIKREISSLLKDIDLLSENRPPALTSSDTATYQHDGRSSSCDGLDDDLVRHGSSLVEAEKIEMRILPLVDKLTEHHEPPREFLIFAIYGPGGVGKTTVARKIFDDQRTQSAFSARAWVSISRASTVAQILQATCAAIGVLQGPKTKADALQTQLADRIEGRRVFLVFNVHNGGGPSSHHHQGGSTGAEIFGNLVEVLKLFRAAQGSRALVTTTDENVGNEIRSAQIQKGAAEGFGLQTDRLWQLPVEDGWALLLRAAGLEPAKVTPELKKVGVAIVQRCNCLPLAIEAVGGLLRRKGYAQEEWERVRDSEAFELKDPATGTQGGAGSSVYLSYQHAPPRLKQCFHYLSLFPADVEIERRRVTQLWISEGLVDPGSSEEGSSTSSRSRRHHNNNTQETAAGEQQSGASQEGSSRSSRHNNNNNNTQSGASTEIAAAAAADDDDREDSTSSSQGPPRELPRLSSSRHHSPRTSLPDTMPSHRSDQEEVADCYLTELAGTGLLQRTNRRGQYKMHDQVRKIAESLTENEVCAGDPRYAATTTLPENLIRLSFLNKGLAALPENVARMTGLRTLLLSGNPLGETDVDTVCKNLGGSLRVLDLSETEIRSVPKSLGNLARLRHLDLSRTKITAVHESVGRLRRLRFLGLRGCGDLTSLPRSIHKLAKLEYLDFRDSGVANSTRSLHSLRHLTLLHGFVVDSVSSSNAVLLEDLKHMSRLSDLQINITKTVAGKNADDKMLKEKGSLRNLELRWCPVSSAVDPKTLETMLTQLHPHQCLVSLKIDGYHGAAYPEWLCSSDLPNLQRLSLENCWSWERLPPIWHLQKLRSLRMANLPKLQRIDMPQPPAEAAAAAFPNVEEMEVEGMEVLECWSDFQPGDLLQLRKLALRRCPKLCSLPGLEHCKVISTMELKDAELVHELANIPVQELVVEAMPSLTRVSNLPLMKVFTVVGCPQLERLSGVDSLQHVHVRDDEHQLQRLPAWLGGQQHFPRIETLDVEGGEELLARCERGNEDWHIVREIPRVYAYRSPGRLPYFSYARGSDFFCRHKAPQGADAPRKGRPLRSPESAASSSSSPSRPGGGNDAAAAEAAPADEARRRFWSRGPRPVDETYKKFLSVMSLFVVIVLWMITSLTDSHRNLLEDIALFFFYVCTVCYFIFLVTKRRNV

SEQ ID NO: 50568 - protein, 332 aa, Zea mays
  Coding DNA Sequence Number=SeqID_7193
  Gene Ontology: Mol. function=nucleobase, nucleoside, nucleotide kinase activity; Cellular component=chloroplast; Biological process =nucleobase, nucleoside, nucleotide and nucleic acid metabolic process
  Homolog annotation: Hit_ID=Q6ZJ48; Match level="QueryCoverage=89%, HitCoverage=87%, E-value=1e-101, Identity=63%"; Hit description =Putative adenylate kinase, chloroplast
  Pfam annotation: Domain name=ADK; Domain location=71-295; Score=10.5; E_value=9.8e-09; Accession=PF00406.13; Description=Adenylate kinase
MAALLRLAAARSALPRRALAPHRRLAAAAAAAMEEWWSDWEQDGEEEARASAPAAGLDPAGGGPGGVQWVVMGRPGPQKHAHAARLAEVLAVPYISMGALLRQELNPSSQLYRKQKSVLAMSSPRDGPPSWTGVSKGVSKWADLVPFAYTQIANSVNEGRLVPEDIIFGLLTKRLEDGYNKGENGFILDGIPRTRMQAEILDEIVDVDLVLNFKCADGCFMKKQSRGNICAHCGQLFDVSNSASTNCSPSLGSYTWHSQAEPAGVLGLEASRMERMRTYAEQTKQLEDYYKKQRKIVELKTSARPVETWQGLVAALHLQHLDSPPTPHKLTA

SEQ ID NO: 50569 - protein, 353 aa, Zea mays
  Coding DNA Sequence Number=SeqID_7194
  Subcellular localization annotation: CTP_CleavageSite=41; ConfidenceScore=5.45e-01
MPCSSRIHRTLPPSGPPDGVRRLAAISRQWSSRGMTTSLVVERSEPGCGLPLPSASRMFIIRAGEEGEPSWGPPFHMGWCRQLPRVWLLGLDGFGAASGTASCRLVGAWMSAHRTGDGHAMHRSKDLFARVGAAAIRRYSTGAQVATDVGAEVVIAAEVVAAVGAGVVDSAGEPLGASYPVALLAWRLDLLRLDTSVPEKVVNNSREAKRPHRLRTIPWNGVPFSGAGSQAVGPPNFRIGGPKLQAWLLNSDVVMSVQMGTKPRTLVKREMNFRRVSPGSYLTAWRWASTPCCWNSNGFNVLSYFSGSKVLIEVATIDVLAALARPFQGDPGILSRKPAVEFCPEVVGLCAPY

SEQ ID NO: 50570 - protein, 502 aa, Zea mays
  Coding DNA Sequence Number=SeqID_7195
  Subcellular localization annotation: CTP_CleavageSite=89; ConfidenceScore=5.47e-01
MDISLLGWSGARVAAQPGPVPWACTLHRPATKATTSAPTAAATSAPTTRQQWRSPQHVRHCEKVLAPIFPWGATTRPLKPKSRKARRQVALMVSPAEATTSATGILTSGGDHLSADDSGHLCTGGRRLPQHTRRGPRSRPHCGSEDKTIQERGRRPRDVRHLVPPSGAAAGAGEPVDVADLRMARPSPVRWTGSHAPNKRQKAASEAAPRPSKPGNEARGGRRHPQPAGLVYPKFASSARLVNALLPQMLEEEAGRQPMRKAGPQLGSPSSPAWMMNILEAKGKGEAAARLASLHHKAGDLPTHAPKRHGQSLPRCAPGLPPYDPGARPYMSYRLIRSTKKANHRTRSVQLPRSYVPLHFRSNQRSGRRTTTQGACNCPAVMRPFIFGATSGQEGEPPHKEQATAPRLSAPSSSPKPAVEKANRHARSVRPPRGCAPPQLRCNQWFNMGAQAHMSYNQRAAVALSTRIMGQSTVGIGVTVGLTLSGPAVIAPRGAQEQQANR

SEQ ID NO: 50571 - protein, 273 aa, Zea mays
  Coding DNA Sequence Number=SeqID_7196
MELTGATGKCDGTSSIGSGRSGGDGRSWCGENGARAAPSIGAQKRDGGDGEHRRARHDGGNGANGDWDGSGRRGVRGWLGYSGGVITEAGASLNGEAMGREALGGERTVPATEERAEGLTGGETALAGELVGGEESGLSRAQLINQIGQRASPGIKEGGRPKSGEDDLGSLVKFCRVREFGKLHKLLAKLTERLARLGSDRSGLATVAEARVAMAGVRELAGAKEGRLAGEGLQVLLTGSRDREGRNRVCLTAAHKEKIPGIKVNTLGLRLKG

SEQ ID NO: 50572 - protein, 372 aa, Zea mays
  Coding DNA Sequence Number=SeqID_7197
  Homolog annotation: Hit_ID=A2YGC2; Match level="QueryCoverage=35%, HitCoverage=56%, E-value=2e-08, Identity=33%"; Hit description =Putative uncharacterized protein
MGLGVCGSLFQGGDEDDGFGYDYGNALCDDVQLCNCCMARLRHTAWKSVIPFLPSRLAERPLRRPVTGQSSHLERLHHRLHEEQERRRQELEQQGSSFSLQQEIESVRSCSLVLPLEVPPAPPLSAPAAGGDPNDGGGDDNSSHITDLSADQELEGWVARPITCDATRGCHFHDALDTLLRRALDRRTWSIEYRCVVFQHSRGVYPDRWEATCLVHRPENSLQGAEVCLEHYSISERDSAEAAMQDVARRALSHYCPVLGGVADGLNLKYYPRRPSGRTGGVVVSPVGEDNPRLSNTVNLAVVLNTELDHALDELSRARAEIAQLRAERVEHHHLEDGSPAPVRTQHPYRSPRCGHQAYGNPDCRTRINLEP

SEQ ID NO: 50573 - protein, 115 aa, Zea mays
  Coding DNA Sequence Number=SeqID_7198
MAKEHQPPRGCAPLTAARRRQDRQHHHERELSGGEIVEGGGPNVDPSREHRRTPSGGPEGGRCSDSRQPVHGPAVALSTKITGQSTVGIGVAVSMTIGGPTVIASTGAQEQQANF

SEQ ID NO: 50574 - protein, 281 aa, Zea mays
  Coding DNA Sequence Number=SeqID_7199
  Homolog annotation: Hit_ID=Q6J9V9; Match level="QueryCoverage=65%, HitCoverage=20%, E-value=8e-21, Identity=83%"; Hit description =Putative uncharacterized protein
MTEARATLPRYPRTFPRPAGTICNGIPPEGGTKPSDPIEWVRVQQITCRDRERGCCKKDPSRRRKRAPSPPTDQGFKGCALRGSVTAPEHSGSEPITDQGFEGWPLGRVRQPPRARRVRDDPGYVRYMAEVRATLSRYPRTFPRPAGTICNGIPPEGGTEPSDPIEWVRVQQITYSWQGRSDYSHFTPLLTVLTGKQHCSSRSGNCANHQDKTSNSALKPPTEARKRQQDPYRIASYASTGHKALLRRPHYYIYRAQGTSPTATLLPIQGSRHFSASHVST

SEQ ID NO: 50575 - protein, 302 aa, Zea mays
  Coding DNA Sequence Number=SeqID_7200
  Gene Ontology: Mol. function=ferredoxin-NADP+ reductase activity; Cellular component=thylakoid membrane; Biological process=electron transport
  Homolog annotation: Hit_ID=Q9SLP6; Match level="QueryCoverage=18%, HitCoverage=16%, E-value=1e-22, Identity=92%"; Hit description =Ferredoxin--NADP reductase
  Pfam annotation: Domain name=HEAT; Domain location=165-185; Score =4.6; E_value=5.5; Accession=PF02985.13; Description=HEAT repeat
  Pfam annotation: Domain name=HEAT; Domain location=186-222; Score =22.5; E_value=0.0016; Accession=PF02985.13; Description=HEAT repeat
  Pfam module annotation: Pfam domain module=HEAT::HEAT; Domain location=165-185::186-222
MSTRRLTSFSLNFTCPFYAGLLKKEGQSIGVIADGIDKNDKPHKVRLYSIASSAIGNFGDSKTVSLCVKRLIYTNDAGEIKHMYEQQKKKIQHKRSIGGPVVDLGKIVQVILANEIGLGKTVQVLSAYSFFLDACRFFEHILFCIAIASIVLIGEIGGMTEEDVATFIQVRRTACKSLGVLAKFSTQYTEKALDLLMDMMNDDTEAVRLQALEALFRMATYGCLSVQEKHMHMVLTMNILRSQMHDWSFQIDNYHRSGMVPLADLYEAEGVILLQEEKEGVILLEVEEDEVVIDFKPTPSAM

SEQ ID NO: 50576 - protein, 165 aa, Zea mays
  Coding DNA Sequence Number=SeqID_7201
MVLSYLSEASFVGGSKDQSGISSNRANPDDFVALIGYGVCSRLSYECSREYRNSTVPLASHGLPEPGGDYVPRTDSGGELLVSEEGPPPRRRACSSEWSGGERSAGERRTGGGGGAAAAHAGWERGRRGDERGRGRADGVDLRKRADDADSPKAEPGEAAYPLQP

SEQ ID NO: 50577 - protein, 463 aa, Zea mays
  Coding DNA Sequence Number=SeqID_7202
  Subcellular localization annotation: CTP_CleavageSite=31; ConfidenceScore=5.45e-01
MKPGRRGSGGAAKATALGGGQPPLAAKSAVPASSRAPDAAKAAVTGGPKSAKAAPSSSGLPEAAKAARGLPPPGKRVANFATDISVEDYFVGSDEDQLLVVPPAAAAMTAAVVPRAKGSAGGEMPALTAVKDEAGAVSRRLEEMKEALSQAADFANRAASGALTAVVFAEVERLRTQHADAVREKSAADSKCRKLADKVAVLEAEKADLRCQLAAEREEATEALAKAQAAQAEANLARAEGSLARQRAEQLEERLNALQSRVERAEASARTEAERTRKQLMDSYRELGARTGEFEVPDLEPGLRCLEWVQEELQALPTIVEGFMSYASLVTCEGAMNVLSHEGCRHYEVFDQADEDLERDIYKVEDPVVKESAGALYDRMWGPHGREVVREWAETARSQAARGERVDDFGALNSALPDPEPNPAVAVPEAAPEPPPESAEGVPDALAATAARRRPFVNCRAEG

SEQ ID NO: 50578 - protein, 139 aa, Zea mays
  Coding DNA Sequence Number=SeqID_7203
MGLWFRSRGYEQPPRQGAREMTNSKRLAGDLFSSRDNDLHLGRLNSSSDDLRTNAVVKRPSPASTHEGRGQAVKAEESEGADRGFEPTDTAPANSGRPKAHRQVLTPVLAEAAPEHEHRPRGVRRVGRPPGTADCARRT

SEQ ID NO: 50579 - protein, 114 aa, Zea mays
  Coding DNA Sequence Number=SeqID_7204
  Subcellular localization annotation: CTP_CleavageSite=32; ConfidenceScore=5.15e-01
MALPPLLLLAERRRRGENSAARPAPTAVPTTQAKTANKSRSTTKFGPGRNRKLHLARPQAPASGGGLRLARPPDSASTSGSGLGRRSLPHPTPRFGLDLGLGRNRFLARPQPRP

SEQ ID NO: 50580 - protein, 150 aa, Zea mays
  Coding DNA Sequence Number=SeqID_7205
MGDSRGACCARAVRGTEHGCIVFTPWERALLSLQEGTRACGAALSRGVGSTFEEAQHWREWRCSFLGRTLEYVSGDFARDAKGYNVALLLLSLEERDLVEIGALQPSLGLRIFVVQPGCIPSPMGSLVGRSKPGYGLRPALSFKDLRHPG

SEQ ID NO: 50581 - protein, 181 aa, Zea mays
  Coding DNA Sequence Number=SeqID_7206
  Homolog annotation: Hit_ID=A2XB60; Match level="QueryCoverage=51%, HitCoverage=23%, E-value=6e-25, Identity=57%"; Hit description =Putative uncharacterized protein
MDEIVPKQNIDPGRKVIMLWKVTAIELAWIVDTPPTWRASCRCFGSDRTPGVAPQGVFRSRTVSTTVAKWFVPVARGTVDNVYSVPPLCSTIVDGEKALIAFGSYNGNYNNELSSPLMVTIAYVVITTTDEKPRDIVATDDFDIKRTQPASNSKMIVAETDVLTGENGKLATRLAEVRDEN

SEQ ID NO: 50582 - protein, 286 aa, Zea mays
  Coding DNA Sequence Number=SeqID_7207
MNENGDLQDRIGIQMGQVKMVEIKEAAEKGRNGKAKTAEKERSINHGLMGILSWDSNPMANPPRAEFPRRKNPDGHEMEKFGLRDDGHVDQWHLATGPVAAAAAVAPAVAPAAATVIVLAAAAAAPAVAVTVTVAAATAFVVVVVIVAVLVLAAIVRVLLIRGVLRLIRALEPGALDGPDVRPDLRREPLGLASDDSRRGMGAGDPSDSEENSSSEYSESPKSSDGGVGSRLRFLPMVEMRVEERKQAVENSERCEKTRQAKALFIGKEGNRSPPTVVTEQSQSIQ

SEQ ID NO: 50583 - protein, 79 aa, Zea mays
  Coding DNA Sequence Number=SeqID_7208
  Gene Ontology: Mol. function=catalytic activity
  Homolog annotation: Hit_ID=A3B342; Match level="QueryCoverage=88%, HitCoverage=27%, E-value=1e-15, Identity=55%"; Hit description =Putative uncharacterized protein
MRRYVRQAPASRLLDAVQSGCTALSIVKQGDLMVYYLADEPGVHFVWQPSQESSALAMSRAFDDYYIKDCDVISAPELT

SEQ ID NO: 50584 - protein, 81 aa, Zea mays
  Coding DNA Sequence Number=SeqID_7209
MWAVTQSELVRSNPRVMKAGEHREDKEGECFVWFGHGGGLTPSEKGDRPPGTSNCITFESQRIGDASGGIRAVRLAAGCNP

SEQ ID NO: 50585 - protein, 68 aa, Zea mays
  Coding DNA Sequence Number=SeqID_7210
MAAVGALRSAVVAAKGVWGGAASAHGGGHACEGHGLIQALRVSFLVSSWGSSQSEEKLHYPMHAEDWA

SEQ ID NO: 50586 - protein, 75 aa, Zea mays
  Coding DNA Sequence Number=SeqID_7211
MEKKKKPVASLWRTRSSKHISLWMRSGHPSFVEEAPEDQSRKESIWEFARESRMLRKGQILLKFHLLEELQSEDM

SEQ ID NO: 50587 - protein, 72 aa, Zea mays
  Coding DNA Sequence Number=SeqID_7212
MDWVCVSPEKTPRGGTASRCPSKLRLVTAREPLIVHRTSLIRSEVEEPVAEDPGVQQIEVAEQKLIEGKLCP

SEQ ID NO: 50588 - protein, 64 aa, Zea mays
  Coding DNA Sequence Number=SeqID_7213
MAMMGSTSEKMYLYQTNTRKANTQWEWRDGESSVYPPWQEAGRWCICALGWREPDLVLRTPVAS

SEQ ID NO: 50589 - protein, 334 aa, Zea mays
  Coding DNA Sequence Number=SeqID_7214
MCSHCYVAFPPFEVAEDDEDEGALRCAARMRSGRDLVEEFIGYGVWPLAHGWVLGEVCPHQMPTLGERLVRSPTFALDLRGRNPAAFVREVEDGAVRIVGRYAPRMEALRSWDIRGSNVRLNRVFELNRLPYGGYPRDEAAAAIDRRGKKPTTTAEEGPSREAAPAIKKRKLGTSAEGLGVSGHFAVELMGTCATLGGRMSSPELRESSARMLEVTRGRWPRNVPIPRAAGEDISTSRLAHEMKIFPYGRNIAVVVSVVMDKDRQDATRKRRAFTRVGDPSREVKRARGGAKSAAPGSSKLPPAAKPAVPGPSKSSSVRGLSLPARASRPRLSL

SEQ ID NO: 50590 - protein, 194 aa, Zea mays
  Coding DNA Sequence Number=SeqID_7215
MRFCSLRDRLDKAEASSRAEVEDPVLKQSAGALYDRMWGPHGRETVRERSDWAMDQMAHDEEVKDLGGLDSALPEALSAKEGTRGELAPTSDVGEGPLATPTPPRAGRCSNWSGRFGVGERTGCRRPCGVGRPFAGGRIGARAIGVPTYGPAQATAADDTNFVAAATVVPVNDSLTGSGFGCFSSDGESGSPFF

SEQ ID NO: 50591 - protein, 852 aa, Zea mays
  Coding DNA Sequence Number=SeqID_7216
MVRSPAFALNLRNRDRAAFVREAEDEAARIVGRYVPRTEGQCSWEIRGSNDRLNRVFELNQLPYDGYPGQDDADRRGKKPVVETKGDPAPAAAPSSKKRKLGTGMGGLGVSDGFARELMRTCAAPGERMSSPELRESSARMLKVTGGCWPRNVPIPPAADEDSFTSRMVRKWRVFPYGRNIAAVVSAVMDKDRQGAAQKRQAAIRLVEARPKRQRSGAKAAAPGGGKPPLPAKSGAPASSKVAKAAQALPLSGKRVADFATNISVDDYLGGSDEGQLVMVTPAAATVVAATAPKAKGGALSAGGEVSALAVVMDEAGAATRRLKEVTEALSQVADFASRTASGALTAAVAAEVERLQTQHADAVREKSAADSKCRKLADKVATLEGEKADLRRQLAGERRETNEALVKSQAAQAEANLARAEGNLARERAEQLQERLTALESRVERAEAMSRAEAERTRQLLVDTYRGLGAGTGDFEVSDRESGLRCLEWVQEELQALPTVVEGFMAYASLVTCEGAMNALSREGCRHFEVFDQVEEDFERDIFKVEDPVVKESAGAIFDRLWGEHGRVVVRERAETARVQAARGERVDDFGALNSMLSDPEPAPVEAVPGPVLGPTPETAGDAPGASVAAAAGEGLPPEVAEVAPDASAAAAPGAVDPAAVAAEITAEATAEPTAEAPAAFKILGLRTQPATTKILAASTAEDGNECGGSASEFLDCADSGSSVEWTEESSEEDLDYFAALDVAAAEASPHVADAGDVPGPSTGRRRRRAVAKRRVSGTEGARLRASSAGIAFAVGFGFFAFVLIRLRPWATSARMVFAIDFGFLGTCCASPAAPLGDFCADLSHARVASA

SEQ ID NO: 50592 - protein, 49 aa, Zea mays
  Coding DNA Sequence Number=SeqID_7217
MESHTKKPINDVFLKLGNVLALKEHEKLVEAEHEEQVEAILLHIGAEGA

SEQ ID NO: 50593 - protein, 46 aa, Zea mays
  Coding DNA Sequence Number=SeqID_7218
MSKNTRDTRFILRFGHTTKVPYFLVEAPTKSQGIKFYNLNLGTNKV

SEQ ID NO: 50594 - protein, 147 aa, Zea mays
  Coding DNA Sequence Number=SeqID_7219
MGKNNKRKREPTPPSKEFGDSEYSEEEFSSESEGSPAPIPLRESSDDSDDSQGLAAEVWTYIRAVERSGLEGSDESEYSSDEEDSDGGDEGEDDDDDDSDGDGSGSGRGGGDGSRDSTKGDSSRGSTKGSSRGSTKGGGGSRGRASG

SEQ ID NO: 50595 - protein, 150 aa, Zea mays
  Coding DNA Sequence Number=SeqID_7220
  Homolog annotation: Hit_ID=Q6QP51; Match level="QueryCoverage=44%, HitCoverage=30%, E-value=1e-08, Identity=50%"; Hit description =Putative growth-regulating factor 1
MRHLWQAKQATLHLRHDDRVKKATGTGKGDTPKGTLLREGSGPRAPLLIRGSKAGPSEGFNSRLRALGLHAHYWSEVRRLAPRKGSTAASGHSGFAPSTGQRFEGWPLGRVQQPPQATRAPRPLLVRGSKAGPSERFNSHLRPLGLRAHY

SEQ ID NO: 50596 - protein, 152 aa, Zea mays
  Coding DNA Sequence Number=SeqID_7221
MRTNTTEGVRRRVGQGATATQGGRLALHRRGRARRDCAEVDATSRAQGEGARAPRLAAPNAGRRSRHAGVPAPRQRARAGATPATPQVPGPRALAAEPGQDGWLGCVTGRRDAAGHVWPLCAGEPRRAAEAAAGGAGEREGRGKGRASGVDG

SEQ ID NO: 50597 - protein, 64 aa, Zea mays
  Coding DNA Sequence Number=SeqID_7222
MAQITAQSLPEAKLTHDEVSRKGNQISRKEMHQRFTTQLLSPNASNKVIKILKHKEVANALGLA

SEQ ID NO: 50598 - protein, 49 aa, Zea mays
  Coding DNA Sequence Number=SeqID_7223
MAMMGSTSEKMYLYQVKKQQTFVLVRASVPRWYQMKKIKTEAAGGKVLR

SEQ ID NO: 50599 - protein, 57 aa, Zea mays; identical to SEQ ID NO: 48612
  Coding DNA Sequence Number=SeqID_7224

SEQ ID NO: 50600 - protein, 87 aa, Zea mays
  Coding DNA Sequence Number=SeqID_7225
MATSAAAPLLRPHIKISVALNSVPRGAKHSVEHGERDSGLTSDLRSPDHPPTAHRGIPSPSEKLDVPSSLIVELRVAEASTSAHDPS

SEQ ID NO: 50601 - protein, 52 aa, Zea mays
  Coding DNA Sequence Number=SeqID_7226
MARVVCNLRGKRLDGGVSVLSVKKQQTFVGYVPRWYQMKKIKTEATGRKVLR

SEQ ID NO: 50602 - protein, 183 aa, Zea mays
  Coding DNA Sequence Number=SeqID_7227
MPPAPPQGIPVAGGDPDGDRDDNDNGGSSSHSTKLSEEQEPEGWIARPITRYAARGCHFHDALNTLLRRAFQPTHLVHRVPLCGLLASSRVLPGPMGGGVIDSLDLKYYHCPSTDNAGGVIVTPISEGNPRLNSMVNLAVVLNTELYHALDELGKARAEIAELRAERMMSDNRRRGGRHAQQE

SEQ ID NO: 50603 - protein, 77 aa, Zea mays
  Coding DNA Sequence Number=SeqID_7228
  Gene Ontology: Mol. function=3-oxoacyl-[acyl-carrier-protein] synthase activity; Biological process=fatty acid biosynthetic process
  Homolog annotation: Hit_ID=O04439; Match level="QueryCoverage=67%, HitCoverage=13%, E-value=2e-10, Identity=56%"; Hit description=3 -ketoacyl carrier protein synthase III
VPVATRSRPNPNKSSSLDKKFMESFLEACSADEDGMLGFCVQSDGNGQKHLSAIAANDESILSNTNGVPGFPPKKAT

SEQ ID NO: 50604 - protein, 192 aa, Zea mays
  Coding DNA Sequence Number=SeqID_7229
  Subcellular localization annotation: CTP_CleavageSite=79; ConfidenceScore=5.09e-01
MARARAYKTLPDFDCTLPRTLEPHRSLAHRRLPVRSVSAAAQSLCHRRPASRAIPNSVQPSEKTVHTSVKLPERGIGVCFAGEASPRSPELSTPPEYMDRVIHSTILRFLVHTVATLPREAHRALGLNQFAVVWPGEGLRVRGREDCNLADGEYILVPEQGAAQEVAPDPAPEPAPEDLSATALEGKPRFYA

SEQ ID NO: 50605 - protein, 466 aa, Zea mays
  Coding DNA Sequence Number=SeqID_7230
MDDDSTDDEFVRAVEAEERLLEAQNEEDDARCFLLGSSSAAAIDVDGSNAGIGTETGTAGTPGTTETHNRSTSPTSDASTSVVVPGKRSRRRGPTSKVWLHFEEVTENQGGNEKKEFGSQMEVRCQTNFCQNEDGFPKLLRACTVRLGIRSQPEYDGREFVEHGTEKCVVTVYIGSSPHHVEWSVTAAGHRFKDTCQVVARKALRALCQIYEEEVADTPLRFFPPFQRDRPAWMARMRALEGQQLLEDDPTVVYLTAYLLTLDAQYDFLARHHRQMIARAEDAEKLNRKLHVDLTTAQARVAALESREVIAVEALKQAKDEHIQKLMEAYLVTHNQRRALRIQEPAPSNPVQPRRAEDPQILEGHPVSIRGEKKAWELPEGTIVLEGIPVFPQAMNKQEHPESSQDPLPELFEPLTMKKILAPSLEVKEEAASTPPAPPPSEELQEPVPLEEEFDRVLPSQSPPEE

SEQ ID NO: 50606 - protein, 158 aa, Zea mays
  Coding DNA Sequence Number=SeqID_7231
  Gene Ontology: Mol. function=nucleic acid binding; Cellular component= nucleus; Biological process=termination of RNA polymerase II transcription
  Homolog annotation: Hit_ID=A3C097; Match level="QueryCoverage=95%, HitCoverage=6%, E-value=2e-56, Identity=75%"; Hit description =Putative uncharacterized protein
MDRPGKREGDAAIEIMSFLKNRKLRLYTFSVNRYPLEFTSRKIGIITPYKSQLSIPRSKFTSSFGPEIVAEMEINTVDGFQGREVDILLLSTVRASNSSDGSHHTGEAHSIGFVADVRRMNVALTRARLSLWIVGNARTLQINSHWNSLVCDAEERNL

SEQ ID NO: 50607 - protein, 198 aa, Zea mays
  Coding DNA Sequence Number=SeqID_7232
  Gene Ontology: Mol. function=transferase activity, transferring glycosyl groups; Cellular component=membrane; Biological process =cell wall biogenesis
  Homolog annotation: Hit_ID=A2YAL4; Match level="QueryCoverage=82%, HitCoverage=29%, E-value=1e-58, Identity=72%"; Hit description =Putative uncharacterized protein
  Pfam annotation: Domain name=XG_FTase; Domain location=1-196; Score= -142.6; E_value=0.00025; Accession=PF03254.4; Description=Xyloglucan fucosyltransferase
MAGFRQGPDDFSFPYTSTRTAHDRLHGCLLAAGFDQEACHSRYQSAMYRRNPGRGPSEHLVSKLRRHEALQRRCGPGTAAYSSALEQLKSGKNAGESPVNLKCRYLVSISYRGLGNRIIAAASVFLYALLTDRVLLVDSSNEMGELFCEPFPDTTWLLPWRSFPLWNFSSDTRPQRRNHHDIHLPFPRARIGGVGKIF

SEQ ID NO: 50608 - protein, 173 aa, Zea mays
  Coding DNA Sequence Number=SeqID_7233
  Gene Ontology: Mol. function=RNA binding; Biological process =hemolysis by symbiont of host red blood cells
  Homolog annotation: Hit_ID=Q53M53; Match level="QueryCoverage=19%, HitCoverage=11%, E-value=1e-08, Identity=87%"; Hit description =Hemolysin A, putative
MEGLHAKKRLRPEILGESDGRSLVGDGGAAVATVAPATCGAAPTAEAKEEEKVEEKEVMIARARSSAVALPSPSPVLSQAFDASFAVEESPADWLGSGQAAVLLPVHLQLSELKRFSFPRSKVIVDGRVVNKAGTQVSDKSVIEIKAEIPKYDYPQVALLTVYFSMEHHMFMV

SEQ ID NO: 50609 - protein, 394 aa, Zea mays
  Coding DNA Sequence Number=SeqID_7234
  Subcellular localization annotation: CTP_CleavageSite=49; ConfidenceScore=5.47e-01
MEAQAHTSRNRRTECFMQSNCTATCATTAPPRLRNQYRDSRRPSARPSSASLARRSSGRRFAFAVITAPKKGPGKGDTPKRILPREGTRLRASLLIRGSKAGPPERFNSRLRSRGPYTHYWSERLGGCSRKPGSGRTVDSVNIPARELGPRPYTRATASSHEGTTRPAEALREALRPRRSETTPPRPRGLHPAGVLARTHRNKMQPRKAGPLAKKCDESLQASANTPFEAQGLLTGTIIRGTLKTPNSQLVTPISIKLLRPDGARTRAKSRKTANSAPPDPGLGLGLSPGRRRTPLRPTQGSDSGSAPEDDELRFARPQGSGSALASADDLRLARPRGSDSAPAMEDRLDLGFGGASTSPNLGHRPATSTGGAIITLPRADSGPQGNKTGVPSG

SEQ ID NO: 50610 - protein, 287 aa, Zea mays
  Coding DNA Sequence Number=SeqID_7235
  Subcellular localization annotation: CTP_CleavageSite=68; ConfidenceScore=5.26e-01
MSSRSLMHRVFPPFKPPDGGYPPSFCLIVGGTQLRGSWYLSAIVRLQGFSSCNPAAPLRRRSPKMVTSSLMVGESVPGCGLYPSLSLKDFHHQGWGGDCTVPGFRTRVASEPLAAPTSATAAGRGSSAGEVAKAGHGPTSNSTAFCPSLPHEFGHGRGPLSSSIRPEVSAAAVRPPGAEVVVVAAAGVGDGAPFVGLLLLRRPSPIECGYSPVDYLNRFTKHESPRVKVTSERLPGRCDDVVLRSGDPRTASPSEARSDLAEGVVDAEGATAPFQHQDPSLRDQSVL

SEQ ID NO: 50611 - protein, 151 aa, Zea mays
  Coding DNA Sequence Number=SeqID_7236
  Subcellular localization annotation: CTP_CleavageSite=45; ConfidenceScore=5.01e-01
MEPGGGTTVGAIESLLTSSCFRKGAESRRRHRRARGGGGGRAAVSAAVADELRCRRRALGKARRSARRGVDGGRGGRSARGAAAGAGARLGGSGERAARWAGKRGEVGGARRLRSESGARRLRKQRTSKRAEKKPRRRLSPSSAPRSMAPS

SEQ ID NO: 50612 - protein, 124 aa, Zea mays
  Coding DNA Sequence Number=SeqID_7237
MACGNILGFSELGRSCHMKLGGNSSAKCYVRCSDGSSRWYSAPNGSDRTQQKNPTAGDLPAAIRVAGVVIHGREHEEVEATEEQAPPPLETQAENGFYFDICGSEPDSPINKGKPQCICHLLVF

SEQ ID NO: 50613 - protein, 214 aa, Zea mays
  Coding DNA Sequence Number=SeqID_7238
MTSHGSSDGGNAQSHTDGLAREGFPRILWEVLQGAGYTTPPQFVVQLFEKHRVPRCRVRMSLEPHPLQPGWRSLDSESFGYRAEDTIKAIALHGLTTFCGFHPLELSTHPIGLFPVEKEDDPMWKDRVEHAKDIWALYPGQTAHLTVEHMSNEIQELEELVGTRENTIEEIQDMEANEDVDIEGGEEPEPASSLDTAGSGRPPSPESSVASFAH

SEQ ID NO: 50614 - protein, 196 aa, Zea mays
  Coding DNA Sequence Number=SeqID_7239
  Gene Ontology: Mol. function=sequence-specific DNA binding; Cellular component=nucleus; Biological process=regulation of transcription, DNA-dependent
  Homolog annotation: Hit_ID=Q10M65; Match level="QueryCoverage=86%, HitCoverage=97%, E-value=6e-46, Identity=50%"; Hit description=WRKY DNA binding domain containing protein, expressed
  Pfam annotation: Domain name=WRKY; Domain location=29-88; Score=-9.7; E_value=0.011; Accession=PF03106.6; Description=WRKY DNA -binding domain
MSPAPSSHHSQTNSRKEKRMRKVDTFAPHNDGHQWRKYGEKKINNTNFPSDHSCNSAFLPLSPSEFQLRTPSGKAVSICFDSSSGAAAAVASVATNASGGSPSSSAAAARRGTPPDISYPSDLRRSDTYPWGAGAVEQKLASCATECHDAFSAGAVPEEVVDAGRFGSIRDDSRPGLGLLNNKTSARADEAKNMVN

SEQ ID NO: 50615 - protein, 185 aa, Zea mays
  Coding DNA Sequence Number=SeqID_7240
  Homolog annotation: Hit_ID=Q6J9V9; Match level="QueryCoverage=52%, HitCoverage=34%, E-value=3e-43, Identity=88%"; Hit description =Putative uncharacterized protein
  Subcellular localization annotation: CTP_CleavageSite=73; ConfidenceScore=5.35e-01
MPGPYMVRIRVGLLKPGCDSRPRSRGPTTQGCGPPERGRSKPSETRASRSSTVTVEKGRVTRRNDGRLISHRRAEAVEAEGMRDQDRGIFRKRILLSEGNGPRALLLIKGSKVAPCGVRQPPQSTRAPSPLLIRGSKAGPSEGFDSRPRARRVRDDLGYVRYMAEARAALLRYPRTYPRPVGTIL

SEQ ID NO: 50616 - protein, 145 aa, Zea mays
  Coding DNA Sequence Number=SeqID_7241
MGKNNKRKREPTPPSEEFGDSEYSEEEFSSEPEGSPAPVSPPASSDDSDDSQGIAAEVWTYIRAVERAGLEGSDESEYSSDEEDSDGGEEGEDDDDDDDDGDGGSSGRGGGDGRGSTKGGSRGSTKGGSGGSTKGGGDGRGRASG

SEQ ID NO: 50617 - protein, 137 aa, Zea mays
  Coding DNA Sequence Number=SeqID_7242
  Homolog annotation: Hit_ID=Q8S474; Match level="QueryCoverage=51%, HitCoverage=8%, E-value=8e-08, Identity=45%"; Hit description =Putative pol protein
MDRPLHRSPPPRWIVPMNEPPVYRPVTIHHDPNHVHPMVSKVHTQPIKRSSFWIQQRSKGPTEGSSGLAHRTVRGDSAIIHRTVRCTPDSVRCSKGSRAQELASFGKCQRLVRYNSPDMSEVRRTHSGTPDSKQFLS

SEQ ID NO: 50618 - protein, 87 aa, Zea mays
  Coding DNA Sequence Number=SeqID_7243
MAPLARPDCLSVSLCQVALQLEWRRRRCPSVRSLYADGGYQLRIRRLEGTPNYGPRQASTTRRFTYSYLRLVAKIAFSDLRLVAKNF

SEQ ID NO: 50619 - protein, 53 aa, Zea mays
  Coding DNA Sequence Number=SeqID_7244
MVGTSAVTTRRQPGSVEHCTMQDLVDGVTWPTTLPPGWTVEWDVAPAGEEHEE

SEQ ID NO: 50620 - protein, 373 aa, Zea mays
  Coding DNA Sequence Number=SeqID_7245
MGTEHGVSSELQAGPTRSEATVEPLGGLAFEPLISRGGSEPGSFTGKDPFRGRPLRVREPFEERITGALSSRRERGFSCCPRTGRESGRRRDRFSRPPATVITAGPLSAVLTVAPGWRCWVHLARRLRDAWAWASMLACWESEKRVHLARLHAACMAARPFRSLVWAKGELPLKGGRPLSEGDHVFFLPYASRLSTFQAPGWGYLPSFRLIVGGTQLRGSWYLSAIVRLQGFSSCSPAVSPRRWSPKTVTTSSWVGRSKPGCDLGPTLSFKDVHHPRWGGGRAEPALYLTRGSVGLPLPRRSGERALTGPAGGPDFDNAGLVDGGRRHLQRVGLVGLAPGGPSRRRAAAASSAPTLRPALLQLDHPERGSLSS

SEQ ID NO: 50621 - protein, 132 aa, Zea mays
  Coding DNA Sequence Number=SeqID_7246
MWCKRGPKRYIRKKQFMHILCQRFIYNYTNSTVRNTVDYSGQEKLFGKTGQVRTVRTPAADRPRHKNDPRTEPMQKHKFPLQTVRRKSKDRPSPRADRPASGADRPVAVDLQGRTVRTWLADRPRSAEWCNG

SEQ ID NO: 50622 - protein, 142 aa, Zea mays
  Coding DNA Sequence Number=SeqID_7247
CQRFIYNYTNSTVQNTVDYSGQEKLFGKTGQVRTVRTPAADRPRHKNDPRTEPMQKHKFPLQTVRRKSKDRPSPRADRPASGADRPVAVDLQGRTVRTWLADRPRSAEWCNGLEVVGGYKYNPNHFHSTHPSIPTFNIQYKS

SEQ ID NO: 50623 - protein, 108 aa, Zea mays
  Coding DNA Sequence Number=SeqID_7248
  Subcellular localization annotation: CTP_CleavageSite=31; ConfidenceScore=5.51e-01
MGYVQVNASACYKNVVLGLSSMCGSANRVVRGAMRRGRRVMSVLTSEDMAPTSQWLVGVRAGAIRGWDEVAAVRDRPDRDREQTRTFDSGDSARLTGYGRTTHTGWPR

SEQ ID NO: 50624 - protein, 128 aa, Zea mays
  Coding DNA Sequence Number=SeqID_7249
MTKEANLNGSNTAPNLQGHNKALLGAEAAGASEEGTEINPEDYIAYSAVKTRATPQEHAKSQFRSKKRLPKLRHDRISRSRLLKSSKSFLREHIPIDDFVVVGISDAHYIQRFFHHEIGLGLIWLGQR

SEQ ID NO: 50625 - protein, 169 aa, Zea mays
  Coding DNA Sequence Number=SeqID_7250
MALLSTVETCSVSNLSWCCLIVLLGCWGDGISVGMGGEGVERIVEVTPASSVASDGSSNPSFRLMVSRKVGVVARAVVATSVIWVSSSSYSRSWGAQWWCRGRLQRKHRGAAPHRLYLLVERERRALLLLSSTLLLLTQAVVQSLQVAGLSGHGTAKHVTPRLEIDANS

SEQ ID NO: 50626 - protein, 286 aa, Zea mays
  Coding DNA Sequence Number=SeqID_7251
MNTLSREGCRHYEVFNQSDESFEREIFKAEDPVVKQSAGHFLIGCGGRMMERAEDVEDLGGLVGAPPEAAEGNPVLPLDAGEGPLAVPVPAMAGEDPASAPEPTVEGAPETVAEPTVEDPTTTTVPSQVQRFGPAHATATNNANFVAASTVVAENDSDDSVSKFFESNDSGSSVVWTEESSDEDLDYFAALDVAAAEASPRVMDAEVLPGSSAGRRRRRAVAKRRVSEVEGGHLRVDRASKRELLSSPVGSSVGEGELRNFFEGEELRIMLFNYREMIIILKVEPM

SEQ ID NO: 50627 - protein, 75 aa, Zea mays
  Coding DNA Sequence Number=SeqID_7252
MRHYSLEDNGSWTKVDDNTVTKLYLCLGKGWFPNDAISNTGIREQTQPVRNYNYALSKGLQQRPKHLWTRGSFYF

SEQ ID NO: 50628 - protein, 227 aa, Zea mays
  Coding DNA Sequence Number=SeqID_7253
DYIKEYYHHTEEETKDYEPCTIVFNPRITKHCDLRGEGVENGVACDLAEGILSGATRQQVRHGEGAVLLAIMVMGFKGAKGSHLANKKTKGLHAELFTFGKIQRRSAIIHRTVRCTPDSVRCPREERPWNSLASGICSAIIHRTCPVYTGLSGEPAEQRLLRANGHLQAHLMRARSAQKSGTRETVHRTIYSTCPVYTGQPGGPRSQMLQRSNPNSLVTWLAHRTCP

SEQ ID NO: 50629 - protein, 40 aa, Zea mays
  Coding DNA Sequence Number=SeqID_7254
MTRGLSLLAKGKSASLLWELKLKVLVKLNLKNKLFRNRVR

SEQ ID NO: 50630 - protein, 231 aa, Zea mays
  Coding DNA Sequence Number=SeqID_7255
  Gene Ontology: Mol. function=transferase activity, transferring glycosyl groups; Cellular component=membrane; Biological process =cell wall biogenesis
  Homolog annotation: Hit_ID=A2YAL4; Match level="QueryCoverage=95%, HitCoverage=38%, E-value=7e-69, Identity=65%"; Hit description =Putative uncharacterized protein
  Pfam annotation: Domain name=XG_FTase; Domain location=46-231; Score=- 145.4; E_value=0.00033; Accession=PF03254.4; Description=Xyloglucan fucosyltransferase
MNRVLTADDDKRWNWGASALLTAFVMTVPTLVVILLGGSIAGTPLVWVRTAMAGFLASKRSVGPDDLSFPYTSTRTAHDRLHGGLLAAGFDQEACHNRYQSAMYRRNPGRRPSEHLVSKLRRHEALQRRCGPGTTAYSSALEQLKSGKNADASPVDPECRYLVSISYRGLGNRIIAAASVFLYALLTDRVLLVDSSNEMGELFCEPFPDTTWLLPWRSFPLWNFSFDTRPQ

SEQ ID NO: 50631 - protein, 345 aa, Zea mays
  Coding DNA Sequence Number=SeqID_7256
MDESGVKNEIRSQIEVRCQTSFCQNEDGFPKLLRACTVRLGIRSQPEYDGREFVEHGTEKCVVTVYIGSSPHHVEWSVTAAGHRFKDTYQVVARKALRALCQIYEEEVADTPLRFFPPFQRDRPVWMARMCALEGQQLLEDDPSVVYLTAYLLTLDAQYDFLARHHRQMIARAEDAEKRNRKLHVDLTIAQARVAALESREVIAVEALKQAREEHVQKMEAYLILEGHPVSIRGEKKTWELTEGAIILEGIPVFPQAMNKQEHPESAQDPPPELFEPLTMKKISAPSREIKEEAASTPPAPPPSEELQEIVQLEEEFDPMLPSQSPPEEVINISSLLTHPGDVSD

SEQ ID NO: 50632 - protein, 80 aa, Zea mays
  Coding DNA Sequence Number=SeqID_7257
MGRTGLEGSDKSEYSSDEENSSDSSEEGGDGDGGDSDDDGGDGDGGGGDGKSGDGGGKGGSGDGGGGSKGSSRGSNKASG

SEQ ID NO: 50633 - protein, 94 aa, Zea mays
  Coding DNA Sequence Number=SeqID_7258
MSDDLVVPVHFEVGQELCFRLLDHPLLVLLELELLVSRQGADGPGAGAGRFAAWREAAVLSGQARTVYGTGPDGAAEDRRRRLDLAPERDTVGE

SEQ ID NO: 50634 - protein, 137 aa, Zea mays
  Coding DNA Sequence Number=SeqID_7259
  Gene Ontology: Mol. function=ATP-dependent helicase activity; Cellular component=intracellular
  Homolog annotation: Hit_ID=A5C9V9; Match level="QueryCoverage=67%, HitCoverage=43%, E-value=1e-22, Identity=69%"; Hit description =Putative uncharacterized protein
MRLMVLVMIMVLVVSIATTAQEKMKLWKETSRSSKTTTSSRRGKIVLATNIAESSITIDDVVYVIDCGKAKETSYDALNKLACLLPSWISKASAHQCLDPVLTIAAALAYRNPFVLPIDRKEEPDAVKRSFAGDSCK

SEQ ID NO: 50635 - protein, 705 aa, Zea mays
  Coding DNA Sequence Number=SeqID_7260
  Gene Ontology: Mol. function=sequence-specific DNA binding; Cellular component=nucleus; Biological process=regulation of transcription, DNA-dependent
  Homolog annotation: Hit_ID=Q6IEK8; Match level="QueryCoverage=71%, HitCoverage=90%, E-value=1e-100, Identity=46%"; Hit description=WRKY transcription factor 73
  Pfam annotation: Domain name=WRKY; Domain location=339-399; Score =144.3; E_value=3.3e-40; Accession=PF03106.6; Description=WRKY DNA -binding domain
MDDEAIATELRLDVMTKTKYNDDQKRMLELALLGKHSSGHPSPVKDVYALKYPARVGANSDGADSWHVGATSALRSDTSVSSILASCNLGANSDGVEASSPCLREKSEMDEASNQTSTNLKAHNKVDKDNLASTRAEMGEVREENKRLKTMLSRIVEDYRSLQLQFHDVLQKGEPMEKKLADHRPSTITPPTGIEESEFVSLSLGTGTGTHKKEEKSVIISAAEGKWREDYLMMGVKEEEGLSLGLSSSARKDDDGAANNTGKVQPDVTTLSPEASSEDAKDDDTTEAADRQWLPSNTQKKSRNVGATEPEDDDDVGPLLPQTKKTRVSVRARCDAPTMNDGCQWRKYGQKVAKGNPCPRAYYRCTVAAGCPVRKQVQRCADDTSILITTYEGTHNHLLSASATAMASTTSAAASMLTSGSSSTSLGFFPAASPAAAHDASRHFFLPTGGAASVTSTPSYPTITLDLTSPAAATSQAFSLSNSRFSSGFGGPGGARYHHRPTSFSFSNSGPSALSAAAWPAATGGAGYLSYGSPAAASLFNGGGGAALMSSTNGRQGRQGGEVPALYQPQQKAAAASESAPAGVLTDTIAKVITSDPGFQTVLAAAITSYVGTQGGNKSSPSAGGEEGGSQLQLGLKWGQHLGLGPSPSSAGAACSSSALLARSSSTTAAAEQGSSGHRSSFLQPSLGLAGSHSASASPVENREH

SEQ ID NO: 50636 - protein, 231 aa, Zea mays
  Coding DNA Sequence Number=SeqID_7261
  Homolog annotation: Hit_ID=A2Y9A2; Match level="QueryCoverage=60%, HitCoverage=42%, E-value=2e-60, Identity=82%"; Hit description =Putative uncharacterized protein
  Pfam annotation: Domain name=DUF1995; Domain location=85-231; Score= -2.8; E_value=2e-06; Accession=PF09353.1; Description=Domain of unknown function (DUF1995)
  Subcellular localization annotation: CTP_CleavageSite=46; ConfidenceScore=5.24e-01
MATTAPLLSPQRACPTHLRRRLSPLHLVFPLDASARRLRLRRAPPPCSAKFGKFDASDAPAEAEEAGGATDGGLAQPVEEDDSCLPSDLEGAIRQSGKASADFVNSGGMRAIAELLIPQLEFLNEEGAQAELWALSKIFLDTLVQETGQKVTAIFPDAGAAALLKHQWKDAQFKCASLGDRKPVGPEDEVAVMIIPDHQMLEAVERITSQLSDDPVWNLCLIRLQISADPV

SEQ ID NO: 50637 - protein, 133 aa, Zea mays
  Coding DNA Sequence Number=SeqID_7262
MPRLLDCGTSAVTRGSPACDPTVPIECNDHGIKLSHDLPRVRPQAQQGAPPRPTSGLDLRPRPQPRPRKKISASPEPSLGLGRRSLPRPSPASASGEVSASPEPNLGLRRSLRLARPWPRTDYATGDTSLPYS

SEQ ID NO: 50638 - protein, 191 aa, Zea mays
  Coding DNA Sequence Number=SeqID_7263
MHQPCFLQYLLLILVPLLLSASAYDRSASITNDPLSLTSGQKELRGHLTEREVGCVSLADGGAEARGTRAASGESHPSLERGERGERVALQLDRTAVPPFPADGAHVPLQHQHLEPLPPGGEREGQARRCRRRPPGRAPWAPPGRAPRGQEEGRSYASVAAVAVARTGSKARREYGALDCRGRRGGASSPC

SEQ ID NO: 50639 - protein, 229 aa, Zea mays
  Coding DNA Sequence Number=SeqID_7264
  Pfam annotation: Domain name=zf-CCHC; Domain location=96-113; Score =14.6; E_value=0.0095; Accession=PF00098.14; Description=Zinc knuckle
MGRQEDPTSSRPYAFACDERKGKKKAPTPSSSSDEEEEEESDDEDNQPSTSSSEDEETIQRIGKVMGMIHKINLMGVPLQVENLLFNIDKKKQRKRGCFACGEKSHFRDSCPDMAEATKGRSKGKALTSVKTWDDSSSEDEPPRTHNHRSSSRSLRSSRMCLMARGKMSIPSSSDDSSSDDEDVDPRTIDLAMRIAERMFLKMKEDEAKNKIEEENDRWRPNDESTSSQ

SEQ ID NO: 50640 - protein, 304 aa, Zea mays
  Coding DNA Sequence Number=SeqID_7265
MTPQMTSDAASNGPQPFSHIHSTKINFWVNIFLGYYRDLQKWEALTTEYQAKLSALDQTLEAQRAQQVKDVERLQKWQQELEGKASDATLAEENLKAKEQSLDRRETDLARREMHLVFREEMLTRRGELLAEHELKAEEKERRLEDQIRQFNAAQAAPGPQAVEATKKALEDLQAEHHARVHHISAWAGEASTTLVPLGMSPIPVSELPASISDALPVLDSAADRLRRLDQILGACLEVEGSKLCRAVVDYVLTCFRGHDPAISLAPVIDGPVATKEDAARESVQDTVEMVGTRFQRILPMPNS

SEQ ID NO: 50641 - protein, 447 aa, Zea mays
  Coding DNA Sequence Number=SeqID_7266
MGRYVPKTEGLRSWDIHGSNDRLNRVFELNRLLYGGYPGEDATDRRGKKPMGVTEEGPSQEAAPATKKRKLGSGEGQLVVVPPSVATTSPSAVVRAKGAAQDPWAAFCVSSEILTAAAAKDVAGTMSQRLTQQLKQVADFADRVASGVLTADVAAEVESLRAQHADAVREKSAAESKNRRLAEKVAALEAEKTDLRRRLADERREANQAIAEAQAARAEAKVARAENRLASQRAEEWEARFNALRGRVDKAEASACSEVGRMHAQFVDAYRDLGARTVDFEVPDQEADLRFLEWLQEELLGTLNALSREGCRHYEVFDQSSENFEREVFKAEDPVVKQSAGALFDRMWGPHGQEAVKERSDRVIEQMACAEDVEVLGDLVGVPPEAEVDPVPPSSAGEGSSAAFVATVASEGPLPAPAPTVEEPPKVVAKPVTEDPTAAAGPSQVAQ

SEQ ID NO: 50642 - protein, 31 aa, Zea mays
  Coding DNA Sequence Number=SeqID_7267
MVNGSGASWVCAQSEREGKGARLGRNYAGEG

SEQ ID NO: 50643 - protein, 152 aa, Zea mays
  Coding DNA Sequence Number=SeqID_7268
MCDDVQLCNRYEVESERQPSPAPQLDVPPTPPQGIPTARGDPNRDRGDDVGGSLSHSTKLLEEQESEGWITRPITRDTARRCHFHDALDTLLRRAFDRHTWSIEYRCVVYQHRRGLYPDQWEATCLMSKNRRRGGRRAQQEQQAPQEEAAQQ

SEQ ID NO: 50644 - protein, 142 aa, Zea mays
  Coding DNA Sequence Number=SeqID_7269
MVGSSLVVAGAGLALCARERAHRQREAWPEHDGIARSSESGSSTEARSTCGGRRPKSGKDDLTVSAGQGLGSSLERLHVLSGKLSKGSDEVGGQWEWLAMEAGLQRRRRVTGRSSELRAGSGKLGGVRRSDREGARARWRAL

SEQ ID NO: 50645 - protein, 342 aa, Zea mays
  Coding DNA Sequence Number=SeqID_7270
AADFADRTASGALTAVVSAEVERLRTQHANAVREKSAADSKCRKLADKVVALEGEKTDLRRQLAGERRETNEALAKAQAAQAVANLARAEGNLARERAEQLQERLSALESRVERAEAVTRAEAERTRKQLMDSYHELGARTGDFEVPDREPGLRCLEWVQEELQALPTIVEGFMSYASLVTCEGAMNALSREGCRHFEVFDQADEDFERDIYKVEDPIVKESAGAIYDRMWGPHGREVVRERAETARAQAARGERVDDFGALNSALPDPSRSRRRPCPGPLWSRPRRLRKALRMPPQQLRPAETRPQRPPKRWRLHRTLRTQKMCLVRVPGAGGEGRLRSVE

SEQ ID NO: 50646 - protein, 129 aa, Zea mays
  Coding DNA Sequence Number=SeqID_7271
MAWVPGGCGVGFIPRRCPESERVRAARSAEVVELAPTESAATDSRTVRAMRGLLRGRRRPDDAGPARQPVRAESTAGFRGALDERLPTWGPRVRGCGSVIPSWAARELVYIIGLENMVKIGMDELDYMM

SEQ ID NO: 50647 - protein, 64 aa, Zea mays
  Coding DNA Sequence Number=SeqID_7272
MTVLADAGGSTRERNQWGAPDPCLFPLPRIPGWRIENCSSELLSGYLVRIALVGLKKGARGCGA

SEQ ID NO: 50648 - protein, 180 aa, Zea mays
  Coding DNA Sequence Number=SeqID_7273
MLLTVTQWFVLDAWEGDRKSLKILTDTPNGCAQVGVETSRAEPGPARLSDELEKLDRLDGGSRACYAHRIVAAVCRGRRSSVTRLPCRQDCRGQRPEVLGLGVGGPSRRRHRAVGGRPPPVGARRRGRRGRGWPRHVDGKRKHALSPPSEDLRDSEYSKEASSESDRSPAPASPPASSED

SEQ ID NO: 50649 - protein, 112 aa, Zea mays
  Coding DNA Sequence Number=SeqID_7274
MTPTSCTSVMLSTRTRAPLLRALYKAGSIIVLGKTDFLRPDMSVHRQVIDNGILPILVKIEKKKEKLLSEKMEVIKGLRERFSHCNSNMDANQGDADSSLDRLWQKKAEIKQ

SEQ ID NO: 50650 - protein, 326 aa, Zea mays
  Coding DNA Sequence Number=SeqID_7275
  Gene Ontology: Mol. function=structural molecule activity; Cellular component=protein complex; Biological process=microtubule-based movement
  Homolog annotation: Hit_ID=Q01G07; Match level="QueryCoverage=27%, HitCoverage=15%, E-value=2e-37, Identity=83%"; Hit description=TBB1 _VOLCA Tubulin beta chain
  Pfam annotation: Domain name=Tubulin; Domain location=122-301; Score=- 54.7; E_value=0.0027; Accession=PF00091.16; Description=TubulinFtsZ family, GTPase domain
MSPARFKQLRVRPWAEGVHRTDGARFCLPPRVCAPAPRNLAPRVQAPTPPPPPPPPPPPLPLTAPPPSRFRVSATPHSNRPSPGPLSLPHSPRIPPPRCLICDEHGIDHTGKYAGDSDLQLERISIYCNKASDDRFVPRAVLMDLEPGTMDSVRSGPFGQIFRPDNFVFQSGAGNNWAKGHYTEGANNNRNRTRHPRSKSRCSLSKRGEEAGQLSRSASESSSSAGSIGRTPSGRRAGRRGSDVDGDRSSRESFEAQDQKRSMHEISRGERRSWSGQKRKPEPLVEKKSVRAAAEEFFAKASQELIGHSDCRVKGPVILISDEDED

SEQ ID NO: 50651 - protein, 180 aa, Zea mays
  Coding DNA Sequence Number=SeqID_7276
  Homolog annotation: Hit_ID=A2Z0M6; Match level="QueryCoverage=89%, HitCoverage=94%, E-value=7e-27, Identity=46%"; Hit description =Putative uncharacterized protein
  Subcellular localization annotation: CTP_CleavageSite=74; ConfidenceScore=5.06e-01
MSMALSRFTQWLWPGSAAAPVAAHEHPNEGLTSSSFPDFPSGFREPDTVTFYTGRGAGGRRARPRRVRNRRRSRGEPRVDREYDMVIVPSDGGGCLSGSDSDDSDWSIGWLEPQAPELQTDGDPENCFAVLVPCYRHGRQEQQPGRHEGRFLGAGTLTNGGFSGERADLNVSMKEDMEKP

SEQ ID NO: 50652 - protein, 308 aa, Zea mays
  Coding DNA Sequence Number=SeqID_7277
  Homolog annotation: Hit_ID=A2XFR6; Match level="QueryCoverage=42%, HitCoverage=37%, E-value=2e-20, Identity=39%"; Hit description =Putative uncharacterized protein
MGTYSWLRIFGTHLLVRQMVCTIQTTRINTNYIPPPRQVPVYPVVVEEIPVDLPCIHVENGVILEDSSEEFLPTPTQLAESLAFATGSSASAPPAPVVQAPAPGGDDPDDSGDNDEDDDEEEDNSEQQDHFMRIGPVTEHYTSMFETGHFPNLLQDVLQALGTYVRPLYETRRVYEPPRACYYITRIHVRVMDARDRGFKTLSAHESLTPLSTYVASVSDATRQTMWSLSHTYRQQLHDTKYRHLPLCLCGESQTSIVPGGDGKDRLNTLAGVVAGLNTDLDSATLDLSRVHLELEDAHARIAALELS

SEQ ID NO: 50653 - protein, 56 aa, Zea mays
  Coding DNA Sequence Number=SeqID_7278
MKLLFRRKILNFNQWRRLKQVFNSVGASSEKFEPSVEDCQGPSNTLRAKVMLLTKL

SEQ ID NO: 50654 - protein, 207 aa, Zea mays
  Coding DNA Sequence Number=SeqID_7279
RPLHRRGMFPAVGGATGGDPDDDDSDHSTESSEPQEAEGWVARPITRDAARGCHFHDALDTLLRQAFDRHTWSIEYRCVVYQHSRGRYPDRWEATCLVRRPEDDLRGAEAVSEHYSISERDTAEAAMQDAARLNLVAVLNTELDHSLDELSRARTEIAELRAELAERHHQEGGSPAPVGTQHPYRSPPRGHHTYGSPVCKTRIDLDP

SEQ ID NO: 50655 - protein, 124 aa, Zea mays
  Coding DNA Sequence Number=SeqID_7280
MESHDLWAERESWLVGGNENDGFGIDSGDASPLQPNRTLAEYVDVYSPLLYTPNPPHPQVVCIATTAQEKMKPWKETSRSSKITMSSRRGLAATPSRLPVKAACIYVSFPHFDYYKDYVDVSDR

SEQ ID NO: 50656 - protein, 323 aa, Zea mays
  Coding DNA Sequence Number=SeqID_7281
  Gene Ontology: Mol. function=DNA binding; Cellular component =chromatin; Biological process=regulation of transcription, DNA -dependent
  Homolog annotation: Hit_ID=A2Y907; Match level="QueryCoverage=64%, HitCoverage=59%, E-value=2e-37, Identity=47%"; Hit description =Putative uncharacterized protein
  Pfam annotation: Domain name=DUF296; Domain location=133-247; Score =149.6; E_value=8.3e-42; Accession=PF03479.6; Description=Domain of unknown function (DUF296)
MCRRSGSNNGYQSQVGPVHSQTKSRLTICEGRLLGIVSHCVTGWTRGVCERPQRTRHVSAVRFHKHHHHQPRRKQRERWRRRPATATSRGGRRLAPVPGAGGPPPAGPPRGVQPSKNKPKPPVIITRDSASALRAHVLEVAAGCDVVGSVAAFARRRQVGVCVLSGAGSVANVRIRNQPGAVVTTTLAGRFEVLSLCGSFLPPLAATGLTVYLSAGQGQVVGGAVAGPLVASGPVVIVAACFGNAAFDRLPLEDDEPLPQPQQNQHLQPHPQQGPGCVLPGAAGGLQPSSPPLPLPGQHPLADQLPHTLMNGLPLPADAYGWC

SEQ ID NO: 50657 - protein, 76 aa, Zea mays
  Coding DNA Sequence Number=SeqID_7282
MNSRSKRESRDRKIGAPVGGTRKIRYDACVGRHVPLCQISNHGEQRWKAGGEISGMSVVRESTGRMALQDPAPTRK

SEQ ID NO: 50658 - protein, 513 aa, Zea mays
  Coding DNA Sequence Number=SeqID_7283
MERDLQDAAQKRRAVVRIADPMCEAKKARGSAKAAASGGSKPVVAAKPAAPGHSKAAVRVRGNLLLSRLRWRPLHQLRWGAKGAARDPWATFCVSGEILSAAAAKDVAGSMSQRLREASQQLSQQLKQVERLQAQHADAVQEKSVVESKNHRLSEKVAAMEAEKTDLRRQLAEERREANKAIADVQAAQAKAKVALAEGSLARQRAEELEARFNALRSRVDKAESSTRAEVERTHTQVVDAYRELGARTADFDVPGQEAGLRFLEWLQEELLVLPTIVTGFMSFASLVTYEGAMNALSREGCRHYEVFDQVDENFEREIFKVEDPVVKQLAGALFDRMWGPHGREAVKDRSDRAIEQMAHAEDVEDLVGLDGALPEATECFQSDDSRSSIAWTEESSDEDLDYFAALDVAAAEPSPRTEGSEELPGASNGYRQRRAVAKRRVSELSRIGRRYRSEAERGRLRVDGTGKRELLSSPIGVSVGEGELQNLFEGEELRIMLFNYREMGIIPKVEPM

SEQ ID NO: 50659 - protein, 98 aa, Zea mays
  Coding DNA Sequence Number=SeqID_7284
MSWGTCLLKFWSLFVIDPRGLSLRSLWRSGRESFGRQVLLNLLPLLPWKTESLQGVNREVCQVQRTPIPFQVSEAHTNYYLNSTTIGCLELGVKFGLK

SEQ ID NO: 50660 - protein, 54 aa, Zea mays
  Coding DNA Sequence Number=SeqID_7285
MELLSKSYPTKEKTLKDMLVIWESRVSRRVIKIKEGNAGIVFIKQLLSPNAASK

SEQ ID NO: 50661 - protein, 80 aa, Zea mays
  Coding DNA Sequence Number=SeqID_7286
MELLRKSFPTKEKTLKDMLVIWESRVSRRVIKIKEETPSNFYSFTRHDPDGVHARRGSGEVLNRPIRAMTGAETRTNPNS

SEQ ID NO: 50662 - protein, 23 aa, Zea mays
  Coding DNA Sequence Number=SeqID_7287
MAYAVGHRVAQPHFTRLSVTPGF

SEQ ID NO: 50663 - protein, 329 aa, Zea mays
  Coding DNA Sequence Number=SeqID_7288
MSSRSLMHRVFPPSEPPDGEHPQSFCLVVGGTQLRGSWYLSAIVRLQGFSSGSSAAPPRRWSPKTVTTSFWVGRSKPGCDLGPALSFKDPHHPCWGGGRAEPELYLPRRFMGQPLLQHSRERALTGLAGGADFDNAGLIGGECRQLQRVGLAGSGLAPGASSRRKGGCCAARTGGPPKTSRAARAAFVFWGCPAFAPVRRLYTEVGAPLVREDPSGDLPVGRRLLSSVLRWWWLEKSSSPAGSPPPSVLRASGSLYLSSPLERGCGRGHCCCGVRPEAIAAAVRPPGAEVVVAAAGAGDGGRPGALSPRGPSNVGRLFVPAGTEPEFRL

SEQ ID NO: 50664 - protein, 148 aa, Zea mays
  Coding DNA Sequence Number=SeqID_7289
MEREGGKKPEGDRRKGETRGLRGNDGASCDVVGPSPGLGEVEAPPRSRSSLSSKAEAKWSSSSSGAEPESEPWGRAMRSSSSSGAEPESEPWGRAMRSSSSSGAEPESKPWGRAKRSSSSSGAELESEPWGRVMRSSSSSGAEPESEP

SEQ ID NO: 50665 - protein, 314 aa, Zea mays
  Coding DNA Sequence Number=SeqID_7290
  Gene Ontology: Mol. function=adenosylmethionine decarboxylase activity; Cellular component=mitochondrial respiratory chain; Biological process=spermidine biosynthetic process
  Homolog annotation: Hit_ID=A4GXE9; Match level="QueryCoverage=33%, HitCoverage=35%, E-value=1e-39, Identity=62%"; Hit description=S -adenosylmethionine decarboxylase
  Pfam annotation: Domain name=Peptidase_M16; Domain location=1-92; Score=8.9; E_value=7.6e-05; Accession=PF00675.11; Description =Insulinase (Peptidase family M16)
  Pfam annotation: Domain name=SAM_decarbox; Domain location=119-311; Score=-51.5; E_value=6.6e-09; Accession=PF01536.7; Description =Adenosylmethionine decarboxylase
  Pfam module annotation: Pfam domain module=Peptidase_M16::SAM _decarbox; Domain location=1-92::119-311
MAFKSTVNRTHLRLVREVEAIGGNVSASASREQMSYTYDALKSYTPEMVEVLIDNVRNPAFLDWEVKEQIRSFVHMANDAFGRRVAKLLGDVLHVLLLVLLKTPLSVVLQVVAAPPTPASAIGFEGYEKHLEISFYEAPVFADPNGRGFLFVYPYKILIKTCGTTKLLLAIPRILELAKELSLPLVAAKYSRGTFIFPDAQPSPNKNFVDEVSFLITSLMASGLVFQDKEHIEEFDQNSSINHVEISVHDMVSSCLLSITVTSGIVKECIVTSGAGSKAMALRVHGSWVWLVQRLLFAGVGEVPAKLGGSGVQL

SEQ ID NO: 50666 - protein, 119 aa, Zea mays
  Coding DNA Sequence Number=SeqID_7291
MAYASHPSRIIPGNTLGGWVIVNTILEGQPSEKTVHVSVKLPERGIGLCFTGEAGPRSPDFNRPPATVDRGRSTRRRRARPPAHVDRAIPAIPDDEPYLDVIARPSPSQPYPSPDLPRR

SEQ ID NO: 50667 - protein, 533 aa, Zea mays
  Coding DNA Sequence Number=SeqID_7292
  Homolog annotation: Hit_ID=Q6J9V9; Match level="QueryCoverage=16%, HitCoverage=31%, E-value=1e-10, Identity=42%"; Hit description =Putative uncharacterized protein
  Subcellular localization annotation: CTP_CleavageSite=59; ConfidenceScore=5.37e-01
MQSACNHAKWAHPFYSNAGGSSGHVVSQAHVPSWDSERTLSHDVKTARPCSVPRTARARATAASRTTRPVALTPRRDRRHLWHEKRATLRLRHNDRVKKGTGKRDTPKGVLLREGNGPRAPLLIRGSKVGPSEGFNSRLRALGLRAHYWSEAGPRRVHSRLRHRARDDPGYVRYITKARATLPRVRLTAAKSGLRRHRKLHIARPQGSDSGSAPEDDELRFARPQGSDSGSAPEDDELRIARPQGSDSGSAPEDDELRFAQPQGSDSVSAPEDDELRFARPQGSDSGSALEDDELRIARPQGSGSAPEDDELRIARPQGSDSALASADGLRLARPRGSESTSALEDRLDLDLDLGGASTSPNLGLGPTTSQEAPSLPYPKLTQATGNKTGVPSGSPRLQRSSDDHDTTRTGCQNLSGCHDGIALLQRVGRAGKDGTALTKDDIAFLEFCIKCANYCSSKEVVFSLKLSLILRRVTRWKYPHLRLDCDSEGSALVSQMTRVSRVPNDRASPLLNLSRKEAEGEGSHGARQETGS

SEQ ID NO: 50668 - protein, 37 aa, Zea mays
  Coding DNA Sequence Number=SeqID_7293
MRLPGPKVFLRLSFSTVLPQAMFGYTLTEEDLGVFGF

SEQ ID NO: 50669 - protein, 44 aa, Zea mays
  Coding DNA Sequence Number=SeqID_7294
MGARYLWLPDLRWLLCVGKCQGVMGYIEQQQQQQQSLLVPSKLE

SEQ ID NO: 50670 - protein, 131 aa, Zea mays
  Coding DNA Sequence Number=SeqID_7295
MNAAARHGPLLHANSEPIDDRHRLGWPRGAAAAGQPPTTSSRCRPPLPLFPLFHPDAPPRSACRAASPASFAAARLRPDATLPLDRIRAVIPSRRRLDATLPLDRIRAVIPTRRRLQDCLARTVRSRAASS

SEQ ID NO: 50671 - protein, 86 aa, Zea mays
  Coding DNA Sequence Number=SeqID_7296
MESHGLRAERESQLVGGNENDGFGIDSGNASPLQPNMILAEYVDVYSPLLYTPNPPSPGCQHCNPCSGEDEAVEGDFQEFQDYDEF

SEQ ID NO: 50672 - protein, 26 aa, Zea mays
  Coding DNA Sequence Number=SeqID_7297
MPRNMVNRYILDLGDGVTWPPSLPPG

SEQ ID NO: 50673 - protein, 913 aa, Zea mays
  Coding DNA Sequence Number=SeqID_7298
  Gene Ontology: Mol. function=Ral GTPase binding; Cellular component =clathrin-coated vesicle; Biological process=protein transport
  Homolog annotation: Hit_ID=A7Q7C3; Match level="QueryCoverage=100%, HitCoverage=86%, E-value=0.0, Identity=60%"; Hit description =Chromosome chr18 scaffold_59, whole genome shotgun sequence
  Pfam annotation: Domain name=Vps51; Domain location=85-176; Score= -2.2; E_value=0.077; Accession=PF08700.2; Description=Vps51Vps67
MREAKVAPNIQELDQKAAAAAAAAARKALTSVQTLPKGVEVLDPLGLGVIDNKSLRLITDASVSSPISREKSQGLDPNMRDKVIYSSPNFDPKVFLSWVHKDTSAADLEAGALTLKTDLKGRTQQKKQLVKENFDCFVSCKTTIDDIESKLRQIEEDPEGAGTAHLYSVTQKISGVANRAFEPLFERQAQAEKIRSVQGMLQRFRTLFNLPSAIRGNIRKGEYDLAVREYQKAKSIVLPSHVGILKRVLEEVEKVMQEFRGMLYKSMEDPHLDLAEIENIVRLLLELEPETDPVWHYLNIQLEVDSTIGDSPRVDQLSTNFMAEEADSLRATYIRRLTSVLIQHVPAFWRLALSVFSGKFAKAASGNVVSDFDVNAKPTANKNDEKGGEVKYTNHTLDEVGSMVQATISAFDTKVQSTFRDFEECNILCPYMSDTIKEIAKACQTLEGKDSSPTAVKMLRTLHFEMTKLYILRLCSWMRATTKEISKDETWVTLSTLERNKSQYAISCLPLEFRDITVSAMDRIDTMILNLMSETAKSYDISQPLQEINESVRLAFLNSFLDFAGYLERFGGELTENRPNKENNYVSNGYINGTRETFVNTDGDLHKKLLVVLSNIGYCKAELSEELYSKYRHIWSPVRNNEERSSDMRDLRTSFSALEEKVLDQYTFAKSNLIRSAAQSYLLDSGIYWGAAPMVKGIRDATLDLLHILVAVHAEVYSGARPLLEKTMKILVEGLVDIFLSVFHENKTKDIRLLDANGFCQLMLELEYFETVLHTYFSPEAQQAMKSLQENLLEKACESVAEAMENPGHQRRPTRGSEDTASDDRQPSVSPDDLLVLAQQCSSDLLQGELERTRLNIACFMESTLQPTAAPAGPKPAAHSSYQAQHAPVQTSSPSFRRQQTGTSSPVVSRRRR

SEQ ID NO: 50674 - protein, 205 aa, Zea mays
  Coding DNA Sequence Number=SeqID_7299
  Gene Ontology: Mol. function=kinase activity; Cellular component =ornithine carbamoyltransferase complex; Biological process=amino acid metabolic process
  Homolog annotation: Hit_ID=Q6QP54; Match level="QueryCoverage=36%, HitCoverage=26%, E-value=5e-17, Identity=62%"; Hit description =Putative kinase
MAPPVDVVGPCPRLGEVEAPPRSRSSLSSKVEVESEPPGRTRRSPSAEARAESEPWGRAKRSSSSFGAEPESEPWGRAKRSSSSSVAEPESEPWGRAERSSSSSGAEPESEPWGRAKRSSSSSGAEPESEPWGRPHSVEWLSSRSGAGGAVLLSDRSVERRSDCGHFGSVDWRACVMIKVSDHLCIKCPCDLVGWRGDLANVASW

SEQ ID NO: 50675 - protein, 342 aa, Zea mays
  Coding DNA Sequence Number=SeqID_7300
  Subcellular localization annotation: CTP_CleavageSite=68; ConfidenceScore=5.06e-01
MSLRSLMHRVFPPSEPPDGGRPQSFRLVVGGTQLRGSWYLSAIVWLQGFSSCSPAASPHQRSPKTVTSSSMVGRSESGCGLCPSLSFKDVHHQCWGGDYRVLGSLSRVASEPLPAPPCATAAGRGFFADELAGAAHGLASNSTAFCPSLPLEPPIVWGCSYLRRWNRSSVCNGTLSADSPVDYLNRFTERESPRAKVTSELKGTPQPPFNEPKPEVAVSARAEAELARKEDLVGRSLAGSSTGGTDAGVELPRPQAGLMSSGDSWPRPRGGRPSRLLEPNSWRRPWWRWPRCGADVVLRGGDPPTASPSEARSDPAEGVVDAEGAAAPFNCRRPSLQDRVVL

SEQ ID NO: 50676 - protein, 131 aa, Zea mays
  Coding DNA Sequence Number=SeqID_7301
MEFARLTIFLNVVKSSPATAVSSCPSVFNFSDHYHLHLQHRRCLLGVRCRLRYLFEPEFIVILPMPWPQFPMSLVHVVVQFRLFLCRRRWSCRGRIKRSSMRCSLGVRQKAQIRDCYRIENIKPELVMVNR

SEQ ID NO: 50677 - protein, 209 aa, Zea mays
  Coding DNA Sequence Number=SeqID_7302
  Subcellular localization annotation: CTP_CleavageSite=62; ConfidenceScore=5.17e-01
MDVADLHGATVARAVDGQPHPDQAAGGSSPPPQGCLGLGRRSLPRPTPGLGLGRRSPPRPTSASASGRVTTSPDLGLGLGRSHNLARPWPRPQEKSPPRPTSASDRLRYRGYIITLPLASRLRLRRNKTGVTSRLLRQQAMMVPACVHDVDCSQLSTKAKKRQQDQGPHRQLHFYRAQALLRWPRTRSVKFTSRLRVLAGPKRQKIEMR

SEQ ID NO: 50678 - protein, 48 aa, Zea mays
  Coding DNA Sequence Number=SeqID_7303
  Homolog annotation: Hit_ID=Q5NKQ2; Match level="QueryCoverage=95%, HitCoverage=5%, E-value=2e-13, Identity=78%"; Hit description =Putative uncharacterized protein 9C20.3a
MDGSIKQYIQLDNPCDLRSLALYYLTFHSKNKCLPLPPEIQRFKFARK

SEQ ID NO: 50679 - protein, 317 aa, Zea mays
  Coding DNA Sequence Number=SeqID_7304
MGCARVAFVLLPLGECDLVEIGTFQPSFGFKDFRRAARLHSLTNEQFGGDKRAGLRPPPRPQLQGFSSSGLRRGSAPSGELPPRGSVTLFFPQRLGEKGILQPYGGFLQPCGGRRTAAGAVAGEPLGVRPPAGLLESLGSVGLATQGFSCPVKENPRPLCDEPEPEVAVSAWTEAELARKRGFVGLGRGGVAAVAGAWPGRLLAGPTPESGCRDPGGDGPGAVLTSSFEVEILHLCCRPRLGQIPPKVETIPRVLLLPLLMSEPVGTDLLVGSIIVNPSESYLSQKVMSEKVMSERGSPLLALEGGSGFAEARLTLP

SEQ ID NO: 50680 - protein, 149 aa, Zea mays
  Coding DNA Sequence Number=SeqID_7305
MCLIQWYLFLTYGGCETAKWTKGITCLALEIPVTRVILQILVTALLVVAIQTDMPTKGYGWQWTAGSDGDGLDHQLVQLPPYLGVGYVVMRLTRRVNVPEITGIMAVSGLAAVREIIPGGLSRRGLSPFRAQNPVDECEERERQTLHTP

SEQ ID NO: 50681 - protein, 534 aa, Zea mays
  Coding DNA Sequence Number=SeqID_7306
  Gene Ontology: Mol. function=cysteine-type peptidase activity; Biological process=proteolysis
  Homolog annotation: Hit_ID=Q5NKQ2; Match level="QueryCoverage=85%, HitCoverage=55%, E-value=2e-91, Identity=42%"; Hit description =Putative uncharacterized protein 9C20.3a
MPSTLIAATVDSIVEPLPLSILRAPRHIGSRPRSAAASIMRKVDRPPTNPKRLIIESSQECFSVDIPRSTDMADPTNTPSDSDPPQHRKRGVAAAAKNIAMPNVDDDDDFEPPKKKCNISMDAPNKTHRLNIRCNPGDVLASIQILNERQRQAIVRKGFSSILDMTIDAIGCRTLLCWLMQKLDPRDMTLRIGLDKELKITKQTVHQILGLPNLGGGKPLNIDEANDAATLRASLNISKDEFVISKLQDRLRLGQDDDLSIRCFFSFSSTVCYSQQLAGLFRSMSDLCEAAQRWHNRSINNVSATIYGCSIIVLLYYLDHLHHAAAPNNKNGTPRIKYFNKNIIRALSMADKRKPRQGGEPFGVCPFRSSSETCYVSKSPSTCQIEFPMRPETFDEDPNQHGRLPNIIIQLPLMQDLMANKIQMLPVHQRQKFQATLIDYDLEVGKIFASIKQCLNTISTKQSNLAATFGDLIDEQGQTVVGGTVDHDSGPVFDKTPIGSVSAPGLFLSELECARALRAYLCSRFIELDRFSLE

SEQ ID NO: 50682 - protein, 285 aa, Zea mays
  Coding DNA Sequence Number=SeqID_7307
WVERVGEREGGRGEAAGAERERGGSPAAFVFVPRPAGEIWAPCWRDVVAVGGAAEPDGGTAVGAVESLLTLSCFRRRGVSSEAEVESAFCCRGRARAKGSGEAEVVRPRPGWSPSPGVGRVGSRSAEARAESEPWGQARRSFVVFRVLARVRALGSGGAEFAVFRVLARVRALGSGGAEFAVFRVLARVRALGSGGAEFAVFRVLARVRALGSGGAEFAVFRVLARVRALGSGGAEFAVFRVLARVRALGSGGAEFAVAPLARPDCLPLQLYADGGYQLRIRRLE

SEQ ID NO: 50683 - protein, 223 aa, Zea mays
  Coding DNA Sequence Number=SeqID_7308
  Subcellular localization annotation: CTP_CleavageSite=28; ConfidenceScore=5.11e-01
MVRNLETVLSGLILRTVHSTNPKNHTVPAQTKFGTCRRSAHQGRKVLTIIQGLCREQPPLVRTADGLAPRPGRSVVQMNRTCLKWTDFGPHWRIADGPPSRLGRIFSKLLKTGKNKTYVIPLPSLDPQPMLINLQDFLFYVVQPCILISPRTVSPQTVVINYQNITRGLDDSHLAAGERDLGYQSPEQVLKDILTGDSDSGDDNDRRMKLYVMYGGSWGAHLS

SEQ ID NO: 50684 - protein, 111 aa, Zea mays
  Coding DNA Sequence Number=SeqID_7309
MAPKRASSKAAPSVDEAVKAALLAEKKGKAPADNTHQEACEDDALNKRQRNDQPTPEGSLRTCSSGGQPQEPPPGFAPPEGEDTTEDGEIIGIPAEEQLQLRALRIKNRNL

SEQ ID NO: 50685 - protein, 162 aa, Zea mays
  Coding DNA Sequence Number=SeqID_7310
  Subcellular localization annotation: CTP_CleavageSite=51; ConfidenceScore=5.71e-01
MAPKPSFFLPQLPWCSLSPARSLVLRVFSARRCSPRETALGRPTFLLLPAVVSLGAGRFFLLFHAAAIALLLQCAQPSDSLLCARCSINCVSHETLVDLAVLAIIEPGSVIASYFAIPVRELTTRCGEPELSRPQDGADERNWRWTDEASIWTKDGRQVIVV

SEQ ID NO: 50686 - protein, 51 aa, Zea mays
  Coding DNA Sequence Number=SeqID_7311
MAVSPDLLPGDRWGRLMFSGGHGCWSDLAVHLTTGWTVEWDPTSAEEEHEE

SEQ ID NO: 50687 - protein, 227 aa, Zea mays
  Coding DNA Sequence Number=SeqID_7312
MEDQAIPLARVPARTGQDQGLCYGWPDINARGRRSPEAPDRTAAEEAMPVLLDIPALCDDSGLRTAILTTLPTLDDIGVAVARLAVGTPSAGSGFLMHRLEVPSPPESAEGGADGPLPATARTVPAASHAPAGDPAAAAPVSGGVAVAVEEVPAGGSAPTPNTGDDTGGASSSNPLPAPEEMEVVFGRRLLSGAEQEATPVPLPRMLSCSHQVLSETKAAILRDYGC

SEQ ID NO: 50688 - protein, 407 aa, Zea mays
  Coding DNA Sequence Number=SeqID_7313
MEEHAVAWRRGDDESATRYQHCLKEKSEKGKEEEHAVLDKNSKIDLHINSKVWSIPFPCAYAVCARFFTLLMMRCWKRSPLGKPLRFHRCTRSLNAVCKCKMCTSALSMDGQRWFRCRWWSVDSPLQPRRHRCRWLTWDRLHPLLWTSIWRHHRRLDPLQRQLLAVLHLHRRQWSSGPSLPVVDSLLALLMPREAASFSLAIAPVEWPRLPPPTGGPNGPRFGRRVGRTGEGVGSGAASPGTGTLCGAGPALDAGHRQRSARATCSARRGPHEGARRGPPAALGTEPAGLFLQGAAGSLVEPRARRRGARRRLEQAAPFWRLLLEGALHPGARGSKARRRRAPGVARPGSHPAQATSARLRGPAAGGSPPGGRRCSGGPHVGALLSARRGGQAASGPGGGGLEATTW

SEQ ID NO: 50689 - protein, 53 aa, Zea mays
  Coding DNA Sequence Number=SeqID_7314
  Homolog annotation: Hit_ID=Q2QSG2; Match level="QueryCoverage=75%, HitCoverage=2%, E-value=1e-07, Identity=62%"; Hit description =Retrotransposon protein, putative, Ty1-copia subclass
MNPVLHGCIELHPEREFAMKDLRPLHHFLGITAERQPQGLFLHQRQFAIDILE

SEQ ID NO: 50690 - protein, 15 aa, Zea mays
  Coding DNA Sequence Number=SeqID_7315
MAMPWPVGGQTRALG

SEQ ID NO: 50691 - protein, 283 aa, Zea mays
  Coding DNA Sequence Number=SeqID_7316
MSGQSSHLERLHHRLREEQERQRQHREQQGSSSPPEQEVESVRRRSSVPQLEAPPAPPRDAPAVGGATGGGPGGDPDDDDSDHSTESSEPQEAEGWVARPITRDAARVYQHSRGRYPDRWEATCLVRRPEDDLRGAEAVSEHYSISERDTAEAAMQDAARRALSQYCSLFGGVADGLNLRYYPRRPTGSTESVVVSPVGEDNPRLSSTVNLVAVLNTELDHSLDELSRARTEIAELRAELAERRHQEGGSPAPAGTQHPYRSPPRGHHTYGSPACKTRIDLDP

SEQ ID NO: 50692 - protein, 130 aa, Zea mays
  Coding DNA Sequence Number=SeqID_7317
MPSRRSTSSHHYFMAPGEVVELGGWRNNSLAADSALGAVLDALDVCAGVCCRAECTAVVASGAGRLVACGVEEADASSIMKSSGKKSWCSTMWTMMLSRRTSKNLELKPPTWRAKCRRGNLRRGGGMHPP

SEQ ID NO: 50693 - protein, 244 aa, Zea mays
  Coding DNA Sequence Number=SeqID_7318
MSSSSSRAEPESEPWGQAKRSSSSSGAEPESEPWGRTRRSSSSSGAEPESEPWGRARWSSSSSGAEPESEPWGRARRSSSSSGVEPESEPWGRARRSSSSSGAEPESEPWGRARQSSSSSGAEPESEPWGRAKRSSSSSGAKPESEPWGRAKRSFLWRLRPDLAAVSITLSSGTAVGAAQAALSSCQATFALNAPAIRSVGEATWPRLLLGEDWASGEPKLCADGGYQLRFRSLEGTPNYGPRQ

SEQ ID NO: 50694 - protein, 84 aa, Zea mays
  Coding DNA Sequence Number=SeqID_7319
MAHEIIKKSEKDAHDARVEARQAEEAADREKRIAELSPPPEPFDPLADPQTKEALEIINMAESIVDEVVNKLLNEVAEKVLKEE

SEQ ID NO: 50695 - protein, 197 aa, Zea mays
  Coding DNA Sequence Number=SeqID_7320
MASGGGRWLLGWAAARWPLHCAAWVGLGSVAAWGSDNPSFENKSTTLAPIVGVLTSTTFGKALTFVMPPKKITAPGDALQPLDTNQETLSLSERLEARRERPLVQHSRRKSWTRRSGTWKSFTNMYKGKRRRWLGWPNFKGRSMKLLRKCVILLKMIKTEGPNPGSFVKRAYSTKMDGTITSWQNIKDMLVTSFQGF

SEQ ID NO: 50696 - protein, 396 aa, Zea mays
  Coding DNA Sequence Number=SeqID_7321
  Homolog annotation: Hit_ID=A2WQE8; Match level="QueryCoverage=68%, HitCoverage=71%, E-value=2e-73, Identity=50%"; Hit description =Putative uncharacterized protein
MPMLSAVLYERQSNDDLILSDEEIHGSSKPTANWPSHARRHRKRDPDVIGIYVDNDGVFKKEGRGTLKGIAAATKRIKNGDHKLKIEFSSKLGGPVGPNARTFVDEIVLFTKKKAPLIGVKKWKDIELNVRSSIASNVLRRWEFLTNEDVHEKIWSIAKERYKGWRSTLSSTYKAYNSYAERMKNKPEDVDIVEWHYMMLYFGFEKFQKISSRNSENRQKQRTKHIMGSRTFSQISFQQRDPETGIEPTDLSLWMITHCKNDEWSEEASRGIYEKAAEKIVEKIYQTERFKLTREEENAIFQTTFKETTGCKANRLHGHGYLSRYPTRSQVMESKFLEQARATVATNQKNIELESQVQLLNEKLACEVAEREEYYRKKCKHCKKKKKEKDKCLEKK

SEQ ID NO: 50697 - protein, 67 aa, Zea mays
  Coding DNA Sequence Number=SeqID_7322
MGPAHHRHWLLEGQQCVTIGGLPLPKVLKNSTNMFFSITKTVTGGFGFEMKVMQPAEERDINVAVSN

SEQ ID NO: 50698 - protein, 218 aa, Zea mays
  Coding DNA Sequence Number=SeqID_7323
  Homolog annotation: Hit_ID=A2XIQ6; Match level="QueryCoverage=75%, HitCoverage=30%, E-value=4e-32, Identity=41%"; Hit description =Putative uncharacterized protein
MLKGRKNKPEDVDIVEWHYMMLYFGSEKFQKISCRNSENRQKQRTKHIMGSRTFSQISFQQRDPETGIEPTDLSLWMITHCKNDEWSEEASRGIYEKAAEKIVEKIYQTERFKLTREEENAIFQTTFKETTGCKANRLHGHGYLSRYPTRSQVMESKFLEQARATVATNQKNIELESQVQLLNEKLACEVAEREEYYRKKCKHCKKKKKEKDKCLEKK

SEQ ID NO: 50699 - protein, 362 aa, Zea mays
  Coding DNA Sequence Number=SeqID_7324
MHCALPPSEPPDGERPRCFRLAAVGGAQLRGSWYLSAITRLQGFSSGSPAASPRRWSPKTVTTSLMVGRSKPGCGLCPALSFKDLHHPCWSGGRAEPELYLPYGPAGHLLLQHSGERALTGLAEGADFDNAGPIGRKRCQLQRAQFAGSAGSGAASGATSHRWAECDYLPAVQAVVAPRAPGDRPRRRALLGRRSCSWVVLPLLRYDASARRSVLARPGGPEWGSVGGQMAAVVGAEVVAVEEVLVADEIAATICAPGLRLFGFDSLSSPLEWGRGRGPYRSSVCPEVIAAAVWPPSAEVIVAAAGVGGSEPTGILSSRRPSNVGCCSYLREWNQSSVCNGTLSAGVCSLWLSGPEHLCIWA

SEQ ID NO: 50700 - protein, 71 aa, Zea mays
  Coding DNA Sequence Number=SeqID_7325
MRLGVPFIAPRQLGAVENTSGRLSLPSVVGRTGQSVAGEKPESGLFGRGSLAHRTLSGAPPDTVRCTTGQS

SEQ ID NO: 50701 - protein, 518 aa, Zea mays
  Coding DNA Sequence Number=SeqID_7326
  Gene Ontology: Mol. function=oxidoreductase activity; Cellular component=endoplasmic reticulum membrane; Biological process =electron transport
  Homolog annotation: Hit_ID=Q2R491; Match level="QueryCoverage=93%, HitCoverage=91%, E-value=0.0, Identity=69%"; Hit description =Cytochrome P450 family protein, expressed
  Pfam annotation: Domain name=p450; Domain location=31-496; Score =88.9; E_value=1.6e-23; Accession=PF00067.13; Description=Cytochrome P450
MICYVLWLAACCLLLLLYSVRFRSRISHGNGPRTYPLIGCLVSFYQNRWRLLDWYTEMLAASPTQTIVVDRLGARRTVVTANPVNVEHILKGNFGNYPKGKPFTDILGDLLGTGIFNVDGELWYAQRKLVSHEFSARALRDLEFAVLEDEARERLVPALGLAAARGDAVDMQDLLRRFSFDVICRVSLGVDPGCLDPALPAPRLAAAFDAAAGIIARRGAAPVAAVWKAKRALGVGSERMLREEIRVIHEAVMDLIRIRKKERGLQVNDADGRRSDLLSRMIECGYPDEMIRDMVISFIMAGRDTTSSALTWFFWLLTRHRDVEREVLREVTGGGGASHAAGGQGKMSVLHAALCETMRLYPPVAWDSKHAAAGDVLPDGTRVERGDRVTYFQYGMGRMESIWGANAADFSVQRWLSIGEDNAPPAAVAGVSPFKYPVFQAGPRTCLGKEMAFVQMKFVASTVLRRFEIVPVDEGRVPVFLPLMTAHMAGGLNVTVRRRGEPIAAAATPLDPSADPVL

SEQ ID NO: 50702 - protein, 57 aa, Zea mays
  Coding DNA Sequence Number=SeqID_7327
MRNQKQCQRRPYLRCRHLAPFHSAPRIRGWFSIVFAPGKKVGRSKELLKPDTNQADS

SEQ ID NO: 50703 - protein, 112 aa, Zea mays
  Coding DNA Sequence Number=SeqID_7328
  Gene Ontology: Mol. function=protein binding
MRTSKPTPAIWIWSSQKGLTPEGLSPEVLAQAYFLWWAPSLKSLHLCLCHYVTNQGFAEAVNCFPQLEELDITFCSLYGIVCETAGRACPTTSSSSSAGAGKDVYPLKCYAA

SEQ ID NO: 50704 - protein, 296 aa, Zea mays
  Coding DNA Sequence Number=SeqID_7329
MEVGQHAPEVEAAEASDEDVEAYIGKATGAPQEASSSSLLSCLGSSSSCSICGELMMSRAMEVGQHAPEVEAAEVSDEDVEAYIGKATAMQCSGEPWLLRRHGLLSGRRGGWERLGATGLGHGLAWSRRAGLAASADGADDGRTTIDAVRRRGNKNKASWEHRTLLPRDVARTPDILTDDGEHDMGVTRVRSKVEGREEERGRLGARGQRQSDGIKHKLKWRWMKQRREDELTAVSSAVEIYWGPEPVASSGFGLDLNAGFFVLRLESSWEAVDLSTGGSRASEIARLLGFLSERV

SEQ ID NO: 50705 - protein, 147 aa, Zea mays
  Coding DNA Sequence Number=SeqID_7330
MGKNNKRKREPTPPSEEFGDSEYSEEEFSSESEGSPAPVSPPASSDDSDDSQGIAAEVWTYIRAVERAGLEGSDESECSSDEEDSDGGDEGEDDDDDDDGDGGGSGSGRGGGDGSRDSTQGDNRGSTKGSSRGSTKGGGGGRGRASG

SEQ ID NO: 50706 - protein, 385 aa, Zea mays
  Coding DNA Sequence Number=SeqID_7331
  Homolog annotation: Hit_ID=A3BME0; Match level="QueryCoverage=70%, HitCoverage=20%, E-value=7e-96, Identity=67%"; Hit description =Putative uncharacterized protein
MGNTGGAAPGVRRDPERRDELGLGGGGAAHGDGDAGCQDVVTKVACDATHGDGDAGCQDGETKVTCGIAHGNTGCQDDETKVACGAVHGDGGAGCQDDAVKLAAEAMRSDQNPRYMLHFVNIAVRILSAPVLHVSGFKGSCSNIWQRSSYWSTRQSQSKVYPLFIPRKNACTGGEETSLSESGSSNFGVDSVDSVKKQSFGSTRSNSFNLSGASSHSMERHQYLQRGISLLKTSVTAITTYYYNSLGLDVPSNLSTFEAFSKLLHTLSSSKAFRTAFELNIASRSEKQAQQLNRSIWKSSSAVSSDSSFMDSMHTTIMPSTLDNLLLNSNQSFLYTAKLVKHGGVPDSIFNGWDLVEREVLPPPPSRFEDVAQWERAMYAGTKKK

SEQ ID NO: 50707 - protein, 342 aa, Zea mays
  Coding DNA Sequence Number=SeqID_7332
  Gene Ontology: Mol. function=uroporphyrinogen-III synthase activity; Biological process=tetrapyrrole biosynthetic process
  Homolog annotation: Hit_ID=A2X0R7; Match level="QueryCoverage=100%, HitCoverage=100%, E-value=1e-120, Identity=65%"; Hit description =Putative uncharacterized protein
MGQGKEVKTRPDPEVEIQEKGEIFFFYRPKVGKDEAHGPDDVQRMYIVLRPESAGGGGRTVEEKQAPDSGKEGRKRRRQGDGAQEESEEKGADGGHGKEEVNIEDQPLLRLVVMGRKSLPDPAKHSRPYWGYVELVTTKVDDIKDALKEEEYSTATRGKRHRAAARALGEGVYRIVKHESESGSGGRRRSPRPHTHLVYKLELPSTRGAMEPQEAMNVEPEASFLVQVKNPDPPSGGRDGGFRGLQSKRRAAFPAHLQDAFGGRRYAPADPPDLLNYEGCELLLIAASDDVEDELGLQLEGEVEDGEGEGVETPQGALGCSDLVKMFGEVADVKPLLSGSWD

SEQ ID NO: 50708 - protein, 198 aa, Zea mays
  Coding DNA Sequence Number=SeqID_7333
MAERYQLPRSCVPPTTRRKDGGYPPSGGLEGGKTRYIREREDMVAFQGGHPPFKGDSPYLRPQPSWAESSPTHSKVLPYGAGLGPTRHASRLRAEEAKPPRPGPGKGDTPKRILPREGTRLRASLLIRGSKAGPSEGFDSRLRSCGLYTHYWSEVRRSAPRKGSTAASGYSGSAPTTDQGFEGWPPKGSQPPHTQSEG

SEQ ID NO: 50709 - protein, 323 aa, Zea mays
  Coding DNA Sequence Number=SeqID_7334
MDTCLLGWSGARVATQPGSVPWACTLRHSATGPGPNRGYLLGAIAKSFLGMDYYAPAGSRWKLAPGSLTGGGDHLYSERPTKGGGHLCAVGSPPTAATFAPVACRQRWPPQRVRRGPRSRPHTRVRTRPSKNAAATPTAYDVFKYRDIPSKQAIYHFEHSLSLGALGMKSQGHAVRKANRCTRSVQPPRGYTPFHLRRNQRSRRRTTTLGAHNRLVVVRPLGFAAASRPTWGPGPHVMHLARRSLGAKKSHRRSRQYRVSSGPSQKTEKINFQNQCSDSRHPAHGPTKTLSAEVTGQSAAGTGVAVGVTMGGPAVIASTGAQV

SEQ ID NO: 50710 - protein, 137 aa, Zea mays
  Coding DNA Sequence Number=SeqID_7335
MESRGNDGGAGTRRTTVAELRLRENHSSERGPTEPGRERAHQRVSRAADSEAELTVALDGARTRQWSQNRRRAVVGFSARVGRARERASEYGRGRKWARGGGRVGRGAQKWLGRGRRTCGRGRIHGGEIVGERLETS

SEQ ID NO: 50711 - protein, 134 aa, Zea mays
  Coding DNA Sequence Number=SeqID_7336
  Homolog annotation: Hit_ID=Q8SA97; Match level="QueryCoverage=68%, HitCoverage=17%, E-value=1e-07, Identity=39%"; Hit description =Ornithine carbamoyltransferase
MAAGEVLAPGSCGVVAVGGALEPGGMTAVGVVESLLTSSCFRLGDVEAPPRSRSSLSSVAEVESEPLGRARRRPSAEAKVESEPWGRAKRSSSSSGAEPESEPWVGRSGVRRLPGLSPSPSPGSGGAEFAVFRG

SEQ ID NO: 50712 - protein, 85 aa, Zea mays
  Coding DNA Sequence Number=SeqID_7337
MGEVDVLLLLVWRWVWGRMSAGCARAILSPVAFVSGQSLVGNDNKLQMYLRLEGKQKYQREAKANAQCVITGERVNSTGVLFTYL

SEQ ID NO: 50713 - protein, 194 aa, Zea mays
  Coding DNA Sequence Number=SeqID_7338
  Subcellular localization annotation: CTP_CleavageSite=66; ConfidenceScore=5.28e-01
MRGHTKAGDEKCLKTTNSPSGSGTSSAPGTCPTPPPIYPNRCISCTRTNDIRETPNSTVSPGHNSAAATVPERSSEDASAVGVVATDEEEDVIATYRRRRRAVCFTRASSPMNRSKEGRRAGEQFGREARVFAARRKVNFNLRRPAPFIYTGRDASVSPQSNSAASINGHVKNPVEPLRARAASPPSSDAFDTR

SEQ ID NO: 50714 - protein, 286 aa, Zea mays
  Coding DNA Sequence Number=SeqID_7339
  Homolog annotation: Hit_ID=Q7XBD4; Match level="QueryCoverage=65%, HitCoverage=19%, E-value=7e-07, Identity=27%"; Hit description =Cinful1 polyprotein
MEVFAKQYCLRWQKRKNGHKIAQFGSCTFTPKSGKTSMEVVELVPCARNKWGNWWDYWFYVSEAEVEDHPGLPAAIMCSHYYVAYPPFEVAEDDENERALRIAARTSSGRDLVEEFIGYEVWPLAHGWALGEVCPREMPSLGGRKVRSSLFALDVRGRDPATVVREAEDGAVRIVGRYVPKTEAQRSWDIRGSNDRLNRVFELNCLPYGSYPGEDVVDRRGKKPAAVTEDDPAPEAAPATKKRKLGTAVGELGVSDSFAMELMGTCAAPGGRMSSPELRESSARML

SEQ ID NO: 50715 - protein, 267 aa, Zea mays
  Coding DNA Sequence Number=SeqID_7340
MARGLRVFPYGRNIAAVVSAVMNKDRQDAAQKRRAVIRLPDARPKRAQGTAKATVPSGSQPMLAAKPAAPGSSKVSESAKAVGAGGTKSAPDGAAKVRELPSPGKRVADFGTNISVDDYLVGSGEGQLVVVPPAVATTASTAVLGVKGGAFSAGGEISAASAVKDEAGTVSRRLRVASQQLAQQLSQAADFADRVASGALTADVVAEVKRLRAQHADAVREKSVAESKSRRLAEKVAALEGERTDLRRQLVEERREANQAIAKAQAA

SEQ ID NO: 50716 - protein, 318 aa, Zea mays
  Coding DNA Sequence Number=SeqID_7341
MERVEASTRSEVERTRKQLVDSYHEMGVRTADFEVPDREAGLRFLEWLQEELLALPTIVEGFMSFASLITCEGAMNALSREGCSHYEGFDRSDEDFGREIFKFEDPVVKDSAGALFDWMWMARAEDVEDFGHLNSAQPEAEVNPVVAEAEVDPAPPPETGEGSLAAPASTVSGGGSSPATVPMAEDPPKAATELAAEDPMAAAGSSQVQDFGPAHATATANFVAASIVVAGNESDESTSKFSEFDDSGSSVVWTEESSDEDLDYFAALDVAAAKASPRVMDAEVLPGPSAGRRRRRAVAKRRGWQAGIVVLAGWGKCR

SEQ ID NO: 50717 - protein, 550 aa, Zea mays
  Coding DNA Sequence Number=SeqID_7342
  Gene Ontology: Mol. function=phosphotransferase activity, alcohol group as acceptor; Cellular component=cytoplasm; Biological process =nucleoside metabolic process
  Homolog annotation: Hit_ID=Q53LT4; Match level="QueryCoverage=76%, HitCoverage=85%, E-value=0.0, Identity=90%"; Hit description=Uridine kinase, putative
  Pfam annotation: Domain name=PRK; Domain location=88-272; Score =191.3; E_value=2.4e-54; Accession=PF00485.9; Description =Phosphoribulokinase  Uridine kinase family
  Pfam annotation: Domain name=Pribosyltran; Domain location=317-464; Score=8.8; E_value=0.00043; Accession=PF00156.18; Description =Phosphoribosyl transferase domain
  Pfam module annotation: Pfam domain module=PRK::Pribosyltran; Domain location=88-272::317-464
  Subcellular localization annotation: CTP_CleavageSite=18; ConfidenceScore=5.01e-01
MVTGSVMRSMVGMLLHISASTSGDRPVSRLGSSPVARDGNVHILPACPRFNKYLFYDYARGCHKPAGSGFSLLALNAACPNVVVLGAGVAGGASSGKSTVCKMIIDQLRDQRVVVVTQESFYYGLTDEELVHVHNYNFDHPDAFHTELLLSCMQNLKCGKAVDIPNYNFKTYKSVPNARKVNPSDVIILEGILVFHDSRLRDLMNMKIFVDTDADVRLTRRIHRDTIDKGRDLKAVLEQFSKFVKPAFEDFILPTKKYADVIIPRGGDNDVAIDLIVQHIRTKLGQHDLRKIHPNLYVIQTTYQIRGMHTIIRDAATATHDFIFYADRLIRLVVEHGLGHLPFQEKQVITPTGSVYTGVEFSKRLCGISVIRSGESMENALRACCKGIKIGKILIHREGDNGQQLIYQNLPKDIANRHVLLLDPILGTGNSAVQAISLLLKKGVQEANIIFLNLISAPQGVHVVCKRFPRMKIVTSEIESGLNDDFRVVPGMGEFGDRYFGTDEYQSSTPFFCDDKNRVRWVSIQLFAGALALQGVDGYSTLWLKLRRLL

SEQ ID NO: 50718 - protein, 123 aa, Zea mays
  Coding DNA Sequence Number=SeqID_7343
  Homolog annotation: Hit_ID=Q2QMX3; Match level="QueryCoverage=93%, HitCoverage=27%, E-value=2e-08, Identity=33%"; Hit description =Expressed protein
MKINLYSFRTDVVVTIGERCLCWVDYYHGMLLIYVLTNSNNNNNRLRYIPLSSKALKTGLSDGDIIKLVYIITKEHPSPYPFTIETWTLVGIHQSRREKDVNLTMGASEFFNLFDNAAKSCLP

SEQ ID NO: 50719 - protein, 582 aa, Zea mays
  Coding DNA Sequence Number=SeqID_7344
  Subcellular localization annotation: CTP_CleavageSite=79; ConfidenceScore=5.60e-01
MVSNHSPFSLLPPPRLPLAVKAQQLASSPTPVASLPSWLPSRRLGNSLPHAGTRPQQDPFSSRASRCLSGARGFSPPLVASPPAPSSPLVSLPNAGVHPPLASPLLPLTTNSHSLSQEGSDCAAMILEALASKYGLEADALQIRRAASNSYLVFFPSVDHVVRALAGGNSISIPPPSGCILGGGHDRRRPLVEVPSPVLMDVELGGIPAHLWGIDTAEHLLGGHCIVQGLHPDTVDGTDLSVLKLKAWGFSMDCLPSRCDLHVEEPTSIGEDGSCFPRTLIYSISVKVTTPVALLVEEQPLFSSPDDDEDRDSKHQRQRQHIPDHQFSSVRTSVHARLGPRITPGGGGGTVDAAPLPNSSVDELQAPVPSFPGSPPSPALGAPIIANIGPLPASVGGSVVSTGGKTADMTLEPFSGNALVPLVSTFNLEEQSASRILVSSWDYKIRAKPPCFKIYVRKKIPVQLAQSEEIGTSTPLQKFKDGITKQINGILPAPIQPVKRKRKLIPSNFNLRRSRRVAKIPPELGSPSAAKVNSGGSQVFMGLIKITSNLPFFRSSVWSGMNKLDQFSGVKGNTAMWEEIHL

SEQ ID NO: 50720 - protein, 31 aa, Zea mays
  Coding DNA Sequence Number=SeqID_7345
MGLANYCVPAGEAYQKALDIAFEITQKCHFN

SEQ ID NO: 50721 - protein, 148 aa, Zea mays
  Coding DNA Sequence Number=SeqID_7346
MRFVGTQKQGYPLAQYEDTMPEERSLVVRGTVLCRTTSTAPGSPCGQEEGRTPRCAQWVRTYFLLQGKHRTPVLDERTSETGPRPFYVGSGLLTAGSRDSGAENAQALLRQESKGDMCLGPAWCEPVRGTLLFPAQMKTWCCQMAYSA

SEQ ID NO: 50722 - protein, 199 aa, Zea mays
  Coding DNA Sequence Number=SeqID_7347
  Gene Ontology: Mol. function=ubiquitin-protein ligase activity; Cellular component=intracellular; Biological process=protein modification process
  Homolog annotation: Hit_ID=Q6WWW4; Match level="QueryCoverage=65%, HitCoverage=7%, E-value=1e-28, Identity=55%"; Hit description=E3 ubiquitin-protein ligase UPL3
  Subcellular localization annotation: CTP_CleavageSite=51; ConfidenceScore=5.06e-01
QSSRIGNGGSRLTSGLSALAQPFKLRLSPAQGEKPLRDYSSNIVLINPFASLAAVEGFLWPRVQHSEVASKPIIPSGNNSESVVPGTIAGASLATAMDQSGRRPTTRSKSSAAWGGTSKKDSHDESTTTAKGKLGDSNECNIGSASFSQVQPSSGSGARNTSSRGPDSTEFQSTSTFGSFVAATMAGLASVGGRSVIGG

SEQ ID NO: 50723 - protein, 37 aa, Zea mays
  Coding DNA Sequence Number=SeqID_7348
MTGSFIIHTVDVTLCGATLPLRMKRTKQLNSVMVLSD

SEQ ID NO: 50724 - protein, 760 aa, Zea mays
  Coding DNA Sequence Number=SeqID_7349
  Homolog annotation: Hit_ID=A2YHZ9; Match level="QueryCoverage=91%, HitCoverage=62%, E-value=3e-43, Identity=37%"; Hit description =Putative uncharacterized protein
  Pfam annotation: Domain name=GYF; Domain location=59-114; Score=49.8; E_value=9.8e-12; Accession=PF02213.7; Description=GYF domain
ILGAADLREHLKSDKSPPKESESGGGGIHGPCAEFGHQRNALDQGTKVGDGENVNPENLSLYYKDPKGCIQGPFPGYDIIGWFEAGYFGIDLLVRVASAPCDSPFLLLGDVMPHLRAKVRVPPGFSNTKPRSMTDASHLGSVYLGTSDYGSINKNGCVTEAENYFLEAPVSSKIQNPRAATNVVTGGMNEWRFVSGEKVNSINHLEVQKVQLETENTFQIEDVTQEILNVHQNLHNSQQIGIDAQQHYVLTQNQPTLACLNSQITQPEKFLGGIYHDPQLNINQQQYLLSELHLQPLIPGVPEPQSSLLNNMLQLRQQEQQQQYISQSIPHDRSMQQLYDSSHGTIHTSLSSGDRMKLCLQRTEEILDLALKLPGHGKHNLQLHASVKLRDTGNIGLSESCATALPLPHEMMGHAAWKECSASLTQGSAVVDALSQKESIVDSPSKKTPSYGSNDYSKMTVFEVTGFPQPFQGLQKPKSVASHISNEVHEMDISSVHPHSWKPTPGVRAKSVLEIQAEERLETQREIALENTKSNRSHLHDLSAREELIKSNAKAGVIINSADDTSFPPLAPSITQSDAHIHDGADFIEFKGTRKISNRGKKPKGSAVKTPASHANVIPGPATDPAQVEEEQESANLQQLVPASSHAKGPMDQHIHGNNSSWQGSESPPSRGNEFLKMTSHVSSHSTPNSEEYLFWEPREHAKQDKPRLQSPPSSVVNTRSTALDIHKKGKKGTKLSTSALGFKVQSTRIMMGEIAHVDE

SEQ ID NO: 50725 - protein, 409 aa, Zea mays
  Coding DNA Sequence Number=SeqID_7350
MAAMEEDWIFIGDGAGGSSDTDSASDDDDSGFMIVRRGRKGGDHRFDAAAHPRVAAVAVAMPQPTPPGPGLSFRVVSSDGGGRREHPGCNDEPSESFHDDIDNDRSDTEDDFSGSDEEAENGNRDIFHMLFPRATGTACDANIDNYEDESEHGYIDDDEEDEDGSSFDIDSSDGEEEAATATAACDWYNAEDDDGIADVAENGNQDIFDMLLPRERTIDDAAMTTANIFRMLFPRAKACVANIIDGDSEDGSEHRYIDYEAEFGMLLPRECAIIDDYEDESEHVYIDYEAEFGMLLPRERALFTSAAQSGPAEALFTFTVRSRERALVAIEEVRRRREAAQQELDRALARQAAAAAEALESALRGGTTTAKRQATGVTQPAVADLDAPADFNFIIGVCMFVYLVVSLFL

SEQ ID NO: 50726 - protein, 396 aa, Zea mays
  Coding DNA Sequence Number=SeqID_7351
MEDEWIFLGDGIGGRSDTDSASSDDDSGFTIVLRRRRGGDRCSVVVSDADDAPAQPRVAPAAVPQPTPPGLSSHIFDMLLPRERTIDDAPAPQPRVAPVALPQPTPPGLSSHICDMLLPRERTIDDEEGACGADMDDYEDESEHGYMDYEAEIGMLLPRERAIDGSDGEEEAATAAACGYNAEPSDGTRQPEFAGRARGYDYDDVDTDSDKEDQGDDYEVAAHVNGTSLLYGWPRATSGVESQRWRIASQRQAERLALWEDFELWVLDDLLRQLTAEAFELCLHAAAHGGPAAERCACARTGEALLTLRHWERALAIEEVRRREAAQQELDRALARAAAAADMALELALHSCPTAKPVVDREESSVWSVIESPLVSDRSLGRPSRIQLIVGLKLLG

SEQ ID NO: 50727 - protein, 94 aa, Zea mays
  Coding DNA Sequence Number=SeqID_7352
MAIASRVSRLEADTARLRRDLADRDRAEADLRACLADSDMRLAAALDENAKERDSLAATVKKLTRNLAKGIFVPNMDRFNEESEHGLTVAKRSI

SEQ ID NO: 50728 - protein, 201 aa, Zea mays
  Coding DNA Sequence Number=SeqID_7353
MYRGGLDRFEKAQALEPFSVKSKTGTKKAPAAAGTTKALALLTLPQNSIFLPGPQQPSIRETPRKKIQLSTETIKKFSSRTAQSANGTSETDKGHERILETINTVGHDDLKVLPGLHFMPQSTTGPEISPAAIPELMSKPTEAVPPAGSMVRSGTEVISSRGGRRCAVRDAVPGFDGHSHALPAATSPVPQQDALRAFQLL

SEQ ID NO: 50729 - protein, 146 aa, Zea mays
  Coding DNA Sequence Number=SeqID_7354
  Homolog annotation: Hit_ID=A2Z518; Match level="QueryCoverage=45%, HitCoverage=9%, E-value=4e-17, Identity=62%"; Hit description =Putative uncharacterized protein
MWAEKLTEDSFVFDGATRNIIDGARREMEDDPQANNEDIGRCMFLEFLMFMTYEAMLNSRSSKATHMLTEKSFDPASSSLIRKEVKMKLAEIACLLLNQTFLIDPKYPSFCLINPCYERLINVPGPVTIAQGYTWKLERKGRCNSV

SEQ ID NO: 50730 - protein, 188 aa, Zea mays
  Coding DNA Sequence Number=SeqID_7355
MGRGKPGCDPDPALSVEGVRHPRRGGERGEPGLHLLRGSADHLFFQLLVVAIALWPYGGDVLQPCRGRRTVAAQLGCNIPPLFLAFAARTAARICRYAWGRPTFLKGKCALGPFLSILVIECQLKCLKCEFMQWMNKVQIKSKGRKRKGKRWLCTAKRLFRAGAPDCPVRQAAPAKVAALGNLLTAYG

SEQ ID NO: 50731 - protein, 174 aa, Zea mays
  Coding DNA Sequence Number=SeqID_7356
  Gene Ontology: Mol. function=protein transporter activity; Cellular component=clathrin coat of trans-Golgi network vesicle; Biological process=intracellular protein transport
  Homolog annotation: Hit_ID=A6N1I5; Match level="QueryCoverage=29%, HitCoverage=33%, E-value=9e-18, Identity=82%"; Hit description=1 -aminocyclopropane-1-carboxylate deaminase
MRMDIDDMSYEVYFLWAKGLVYAMNTAEELKFVKDIAASTGIVLDPVYSGKVVYGLLKDMAGNPAKWKEYRPFYAAITPLPKRLIKKGWVVLASPPELPDIKRAIVNTHVIEPQWALECMKDLLLVNLKGNLQIVVQAAKEHSEQLGVDGLMLASNYLSNSNLMRAFTFSWDPI

SEQ ID NO: 50732 - protein, 392 aa, Zea mays
  Coding DNA Sequence Number=SeqID_7357
  Subcellular localization annotation: CTP_CleavageSite=40; ConfidenceScore=5.52e-01
MSSSSLKRRVFPSSKPPDGGVSAAFPPPRWRNATPWELVPLSHRSASRIFITQPGRTPSPAVTRDGDLQLDGGGKRAGLRPLPLPQPQGFSSPRPGRGECRVGVGPCVGGGPLLHSVMGGEAGIARGVRQLQRAWSSAASGFGATCGVGVCHGSRKRFFRRRGDRDRPRADLQLLRPSARPCLTSFGTGGGLLAAASTLRPSPSEWGCSYLRRGNRSSVCNGTSNATGPTPKSISRGLGSGWRPWEPVDRGPRGNRLSRLLGPDSRRSPWAAAPPEAGSGFAEDVVDAEGATAPFGVKTRACRIRSSCSVCFLRPPRPEENTLAALAKLRLFSSCFEHLDFAGNRDVCVSKSCFSRKGRVRYLYPRGVGIPRLGRPCRLRVLSPVHEALSLT

SEQ ID NO: 50733 - protein, 574 aa, Zea mays
  Coding DNA Sequence Number=SeqID_7358
MAERYQLPRSHVPPTTRQKDGGFPPSGGLEGGKTRHIREEEDMVAFRKGPTGERGGQPCRWHATAPSGRTSPTPDTPAWGPRPTRRATGAPDAACKQLHHLRHHRTSSIAEPMPRLEATQRVTRQRQPDAAANAAKSGPAVMTVAGAREQRSRRQPSSRPIRGQQENPLSRREDDAPVIRSSNGSRTRNGCPANYSPRRINSAAGQAALLAGVGPGKGDTPKGILPREGTRLRASLLIRGSKAGPPKGSTAASDRVGPTPTTGQRLAPERFTVASDAERGMTRGDRVRQITRRYFWACLWAPSRPPTNGARTSTRITRLQLTGDTMFGAHRGLGGCSRKPGSGQTVDSVNIPARELGPRPYTRATASSHEGTTRPAEALRKALRPRRSETTPPRPRGLHPAGALARTHRNKMQPRKAGPLAKKCDESLQASANTPFEAQGLLSGTIIRGTLKTPNSQLGSDSGSAPEDGELRSARPRARTRAQPQKTTNSASPDPRARTPPWPLPTTSASPDPGLGLGLGHEGQTRPRLRRSLHVARPRAQARHVNRKRHHHPTPSRLGPQRTRPVSHLASSAR

SEQ ID NO: 50734 - protein, 240 aa, Zea mays
  Coding DNA Sequence Number=SeqID_7359
MGRREAEREGEKKPEGDGHERLGEVEAPPRSRSSLSSEAEVESEPLGRARQRPSAEARAESEPWGRAKRSSSSSGAEPESEPWGQAKRSSLSSGAEPESEPCGRAKRSSSSSGAEPESEPWGRAKRSSSSSGAEPESEPWGRAKRSSSSSGAEPESEPWGQAKRSSSSSGAEPESEPWGRAKRSFLWRLGLGLAAVSLTLSCGTAVGAVQAALSSCQAGQWSGEVTTVTSALSTGGRASG

SEQ ID NO: 50735 - protein, 106 aa, Zea mays
  Coding DNA Sequence Number=SeqID_7360
MELLLQGWITSAQRMSITPVREELGVDVDTLEGGRREVAVGSPIEDREEAAAFADPSIAREEGSWGAGGGVAGLAAPKCGFPGGDGAELEVAGAGIRAAVRGGGGW

SEQ ID NO: 50736 - protein, 299 aa, Zea mays
  Coding DNA Sequence Number=SeqID_7361
  Gene Ontology: Mol. function=binding
  Homolog annotation: Hit_ID=A2ZYZ0; Match level="QueryCoverage=63%, HitCoverage=11%, E-value=2e-67, Identity=61%"; Hit description =Putative uncharacterized protein
  Subcellular localization annotation: CTP_CleavageSite=79; ConfidenceScore=5.02e-01
MASSAGGASSSLVKNEPYMRAVKIYLKSLDIQMEKQLAKTWRSTTGRSTNCTSGVSRSSLRIMFANNSIKECRGCRFVEAQVLDGAGTSIAALETIWNALGFNVSGPELFSALRGRLYDSNKNLVMATLSTIGGLVSAMGPSVEKSSKGILADVLKCLGDNKKHMRECTLTALDSLVAAAQLEKMDKSSKVRKAAESFMNEILRICGQEMVGRKLKDLPSPTLAIVSERLKLSTLKDLPSPTLAIVSERLKLSTAHEGFSESVKVVSTSMSLPSKAGLKNNKHGPNDRGSNVGKPVSQV

SEQ ID NO: 50737 - protein, 483 aa, Zea mays
  Coding DNA Sequence Number=SeqID_7362
  Gene Ontology: Mol. function=ligase activity
  Homolog annotation: Hit_ID=Q6ZD68; Match level="QueryCoverage=100%, HitCoverage=84%, E-value=3e-87, Identity=42%"; Hit description=DNA ligase-like
  Pfam annotation: Domain name=DRMBL; Domain location=109-224; Score =19.8; E_value=1.6e-05; Accession=PF07522.5; Description=DNA repair metallo-beta-lactamase
MFLFEGPFGSVLHITDCLSALTPHLARRIDYLFLARCSLRFPATQDSIRQVIDCIWKHPSALVVYLVCDMLGQEDVLVGVSKAFGSKIYVDREKNSDCHQRLAHVTPEILAADDAAPSTRFHVLSFPRLSEQATEILAQARAARQLKPLIIRPSSQWYAYYDPPPPEEASTQQQQQKPVLTEAMCDELGVWHVCLSMHSSREELEQALGILKPQMGRLHHVVVHGGWTSAISAQAVLLTVEAVEKLEEVFSACAPSNDISQALEEGAEATVVDFEYESVEIIGDDELEAKDSANELEFCRHSKPIQVVGLTEAATREQNPVSDESELLNDIKSDGGVEVVDLTEGGKKEHNLGAETEHDRGNREAELGAQEQNLNARARLTVGVCRHKVIADEGTEATEGMVSAAHVPEDGTTVTLGTGRSTDHQYSERASDSSTVVGSSKGLNASLRRLYRSMNVLVSRPLPSLVQLTAASKRPRVSQTAQL

SEQ ID NO: 50738 - protein, 680 aa, Zea mays
  Coding DNA Sequence Number=SeqID_7363
MTEQVLMLGNSSAETIFRAFSTISIAESYGRVRVHVSGKADRAEELLRLRDTDTSLITFRENSTLDVNTTFGEVRPSLGRQHGRRISALKDDVRATPGLSPPGSPPGIRPEQTAWPAAPKPQPVVPRGHQPGSWPRQLDSDAGPASGRPGQAPADEVRTTPHVGGSTEQQNTDGWLADARSGSSDNDVRPGWPNSSSDDLRANAAATRPSPASLPKGRGHAKGHGVGGQSAGGAGYLVGGETSSGCLGGRWHRKQRRSRSGRRAGHAAAASATNGERPSPQSLREGAGRCPRGDRPQLGALPSPALMMNILEAEGGAEATARLASPHPATGGHRLGRWKDAMHEGSAKTWLPSKGVTLLLKATLPTCVLSCRGPSLLNMLQGPPPTTQGLGPTRHASWPRAEEAKPPRAVRVTAQRLQALLHFRPNQRVKERTAMQAACNRTKGAHPFDFDASSMEAQAHTSCNRRAGYYVRETAPPLALVSRLLDCRTSAATRGDPAHDPTVPTEHIGHGSVSRGRRRDDRYGQKWASSNGGGRRAEAAVKSSASSRTGKGDTPKGILLREGSGPRAPLLIRGSKAGPSEGFNSRLRALGLRAHYWSEVRRLAPRKGSTAASGNSGSAPTTDQGFVGWPPKGSTAASDAERRMTLESHQREASSPRTPSKGDRVRQITRKYFWSAPPGH

SEQ ID NO: 50739 - protein, 52 aa, Zea mays
  Coding DNA Sequence Number=SeqID_7364
MDRQGTDDVVVVHERGSGNNDTKNFCAERPHQYAEDGETSNQRSATVIDGKQ

SEQ ID NO: 50740 - protein, 85 aa, Zea mays
  Coding DNA Sequence Number=SeqID_7365
MAASGYSGSTPITDQGFEGWPPKGFTVASDTERGMTREARGLLSQKPAPAKSLTASTYQPESLGPDRAPGLRPVRMRERPDQPKR

SEQ ID NO: 50741 - protein, 175 aa, Zea mays
  Coding DNA Sequence Number=SeqID_7366
  Subcellular localization annotation: CTP_CleavageSite=48; ConfidenceScore=5.30e-01
MAPPVDVAGDVGFPPKPRLSLPSVAVAEPEPRGRARRKSFGRGQGGVRALGSGEAEFRRLPGLSPSPSPGVGRSGVRRLPGLSRVRALGSGGAEFAVFQVLARVRALGSGGAEFRRLPGLSPCPSPGVGRERTRVRALGSGGTEFAVFRVLTRVRALGRAEREFAVALLQGLDWP

SEQ ID NO: 50742 - protein, 51 aa, Zea mays
  Coding DNA Sequence Number=SeqID_7367
MPRVACTLHGKRLDGGVSVLSVDLVTDLFTDLVTELKGVIKDGWYRPKCLN

SEQ ID NO: 50743 - protein, 243 aa, Zea mays
  Coding DNA Sequence Number=SeqID_7368
  Gene Ontology: Mol. function=oxidoreductase activity; Cellular component=integral to membrane; Biological process=metabolic process
  Homolog annotation: Hit_ID=A2ZD72; Match level="QueryCoverage=100%, HitCoverage=78%, E-value=6e-96, Identity=69%"; Hit description =Putative uncharacterized protein
  Pfam annotation: Domain name=KR; Domain location=1-134; Score=-96.8; E_value=0.099; Accession=PF08659.1; Description=KR domain
  Pfam annotation: Domain name=adh_short; Domain location=1-117; Score=- 7.1; E_value=3.6e-05; Accession=PF00106.16; Description=short chain dehydrogenase
  Pfam module annotation: Pfam domain module=KR::adh_short; Domain location=1-134::1-117
MDLSAGEESLKEVVHVAESFFSNAGVDYMVHNAAFERPKRRALEESEEGLKATLNVNVFGTITLTRLLAPYMLDREMGHFVVMSSAAGKVPAPGQAIYSASKHALNGYFASLRSELCTKGIKVTVICPGPIETLQSSAAASSSQTHSAEKREKRVSVERCVELTIVAATHGLKEAWISYQPVLTVMYLVQYMPTIGYWLMDKAQPTRLASVVVEQVGAKRLDAAAKKGNTYSWSLIFSSKKSA

SEQ ID NO: 50744 - protein, 37 aa, Zea mays
  Coding DNA Sequence Number=SeqID_7369
MGRFQEEALWQTQLSALVAYLVGLTRSPLPLLVGTPT

SEQ ID NO: 50745 - protein, 231 aa, Zea mays
  Coding DNA Sequence Number=SeqID_7370
  Subcellular localization annotation: CTP_CleavageSite=19; ConfidenceScore=5.36e-01
MPTSSSSAAATPPADPSPPAAASSEETLSSSMTEELRAGDSVDFGVSRMSSVRVQDMQRLGYFGGGVARVPGTEEVPKPEGELVVFEAFFAAGSDEGQLAIVAPAAATTTAAVVPKAKGGALSAGGEVSALAAVRDEAGAASRRLKEVTEALSQVADFANRTASGALTATVSTEVERLQTQHADAVREKSATDSKCRKLTDKVAALEREKADLRRQLAGERRETNEALAKE

SEQ ID NO: 50746 - protein, 300 aa, Zea mays
  Coding DNA Sequence Number=SeqID_7371
MNALSREGCRHFEVFDQANEDFERDIYKVEDPVVKESARAIYDRMWGPHGREVVRERAETARAQRAVSGVALEPTPETAEDAPDAPASAAAGEDLPSEVAEGAPDAPAAAAPSAEDPAAVAAETTAEATAEPAAEAPATSGPSQVQDFGPAHATATTKFLAASTAEGGNECGGSASEFFDFADSGSSVEWTEESSEEDLDYFAALDVAAAEASPHAADAEDVPGPSTGRRRRRAVAKRRVSGAEGARLRVSRAGRQELLSLPSASSTGEGELRSLFAGEELRIMLFSYREMGIIPKVEPM

SEQ ID NO: 50747 - protein, 57 aa, Zea mays
  Coding DNA Sequence Number=SeqID_7372
MESHGLRAERESRLVGSYEIDGSGYDYGAGCQHCNHCSGEDEAVEGDFQEFQDYDEF

SEQ ID NO: 50748 - protein, 46 aa, Zea mays
  Coding DNA Sequence Number=SeqID_7373
MGKNNKRKREPTPPSEEFGDSEYSEEEFSSESEWSPTPIPLQIAAE

SEQ ID NO: 50749 - protein, 149 aa, Zea mays
  Coding DNA Sequence Number=SeqID_7374
MGKNNKRKRELTPPSEDFGDSEYSEEEFSSEFEGSPALVPLRESSDDSDDSQGLAAEVWTYIRAVERSGLAGSDESEYSSDEEDSSEEGGGGDGDDDDDGDDDDEGGGGDDDDGGGRGSSGGGKGDDGGSSRGGSGGGGSSKGSNKASG

SEQ ID NO: 50750 - protein, 270 aa, Zea mays
  Coding DNA Sequence Number=SeqID_7375
MAKPWGEASCGREDGCSAPLGTGALSANRLVRRAVCWTTLTPSADGLDKAYLMSRGLVACQRGGRRRVPSAINAEVERLHGPYVRLGPLAYVTGLKPSSSSGAPPGQEVPLRGGHVSAPDPYSCWGLPGPGALPGPSPYSEGPGAYPRDPTCPLGSFGPVSIGVRRPFGGPDLSMHLGKFYLSLPCGVPNPALAVGSGAASRATRGCRMGAVSSYCRRGYPCLKVPTPWFLNIREVRSWQRGVRVEEALQDLDWVLAMQEELNNFKRNKV

SEQ ID NO: 50751 - protein, 305 aa, Zea mays
  Coding DNA Sequence Number=SeqID_7376
MNALSREGCRHFEVFDQADEDFERDVYKVEDPVVKESVGALYDRMWGLHGCEVVRERAETARAQAERGERVDDFGALNSALPGPEPTLAEAVTGVALEPTPETAAIGTAAYTSAAAGEDLPPKVAEGAPDAPAAAVPSAEDPAKVAAETTAEAAAEATAEPTAEAPAASGPSQVQDFRPAHATATTEFLAASTAEGGNEYGGFTSEFFYFTDSGSSVEWTEESSEDLDYFAALDVAAAEASPHAADAPDVPGPSTGRHRRRAVAKRRVSAEEGARLRVSRAGRQELLSLPAAASTGEWELRSLFA

SEQ ID NO: 50752 - protein, 41 aa, Zea mays
  Coding DNA Sequence Number=SeqID_7377
MANFFRGFVYLPLQVFKTQKVEVSSPEVGANVGDLFSNDKS

SEQ ID NO: 50753 - protein, 51 aa, Zea mays
  Coding DNA Sequence Number=SeqID_7378
MQAACNRTKGAHPFDFDASKHGGPGPHVMRLSGEELDRGFGAQHKWHASGR

SEQ ID NO: 50754 - protein, 154 aa, Zea mays
  Coding DNA Sequence Number=SeqID_7379
AVAKKRAEGLTGGETVPVKWPRGGPRNTREAMSERNRAETHWIARSTRGGGRPKSGEVDLGPPVKSGRVRGLGELHGLLAELAEALVGLEGGWSGLATAAVALAAMAGGNELAGAKEKWLAGEGECGAKREIWSQEIWSVSLPKPEANPKFCRV

SEQ ID NO: 50755 - protein, 378 aa, Zea mays
  Coding DNA Sequence Number=SeqID_7380
  Gene Ontology: Mol. function=signal transducer activity; Cellular component=chloroplast envelope; Biological process=signal transduction
  Homolog annotation: Hit_ID=Q5JL23; Match level="QueryCoverage=94%, HitCoverage=94%, E-value=1e-146, Identity=76%"; Hit description=ABC -type transport system-like
  Pfam annotation: Domain name=MCE; Domain location=112-189; Score =71.3; E_value=3.2e-18; Accession=PF02470.11; Description=mce related protein
  Subcellular localization annotation: CTP_CleavageSite=37; ConfidenceScore=5.69e-01
MPSAMAKSLLLPHPFFSVSPRPHPHPRAGFPVLKPRRAALLAATPAPDANTSSNNNPLAALWRRTLQPLGDYGFGKRSVWEGGVGLFMVSGAALLALALAWLRGFQLRSRFRKYNTVFEFTQACGICVGTPVRIRGVTVGSVVRVDSSLRSIDATVEVEDDKIIIPRNSMVEVNQSGLLMETLIDITPKDPLPAPSVGPLDPDCTKEGLILCDKERMKGQQGVSLDALVGIFTRLGRDMEEIGVSKSYKLAEKVASIMEEAQPLLTRFLSISTAATVEQIEALAEEMQPLLSEVNDSDLLKDVETIAKGLADASGDLRRLKSSMLTPENTDLIKQSIFTLIFTLKNIESISSDISGFTGDETTRRNIKLLIKSLSRLL

SEQ ID NO: 50756 - protein, 167 aa, Zea mays
  Coding DNA Sequence Number=SeqID_7381
MGCRCYEEDENEIDEETARGDNGSESRRLRMFNGGLVFCSMRLGVPFIALRQLGAVGAPFGRQLLSSVRWRTGQSGAPPDMNSARFLSLFGEAERCTRGPLGTPDIVRCTLDSLVRLITVGTGHASPVDFVLIALPTVGADVVGSPNSPVNFSRSVLDDSREQRDRR

SEQ ID NO: 50757 - protein, 199 aa, Zea mays
  Coding DNA Sequence Number=SeqID_7382
MARLRHTARKSVIPFLPSRLAERPLRCPVTARDRVYEELLPCAPAGGASCTTTERPAAGVAAGGDPDDEAQSWGLPGPLGGDLLGAPSGEQSPGCGVLGGVADGINLKYYPRHPSGSTGGLVLRLPSRGLSVQSIITWRMAPPLPSGLSTRTAHLSVDTMLMMPENMHRGGRHAQQEQAAPQDEAPRQQLPPPPPMTIE

SEQ ID NO: 50758 - protein, 439 aa, Zea mays
  Coding DNA Sequence Number=SeqID_7383
MPSGIVVVRCRRRAPRPELAAITVRRHHDEPRYDLAISPTGTELRTSRIAFAQGTRRSAVAHENHSRGSPTMLPPRYSEPRPGLPVDLRPSPRYFGEAPRTPQEPRRRRAVGFPGQQAHVVSGPEDEFVPAVRMRRKSGQRAHTTVSRAHRGGRARRGAPRMGHAMVGRAGTGGGVAPRRDATPGSRHHAPWARRGGDERAWSRGRDRAQARGPRRADRGGQQRAGHAGPSRAGRASSRGQAAEPAAGQEEEGESGRREREASSPRGRRRRGRAGFGAAANDSEGRGANRTREKTAGVVGEMNRDGFGAYRRAPHRAAAAAGQPPSTHARGESGASCWGRLGRAGGGGSARPRHDAELDREPASRPRRGGGTRGPREKGGRARWAARGGNTPKREGRKRREKEKLRASHSTLMVALFSRAVIQRTGPYGEALEKQLESH

SEQ ID NO: 50759 - protein, 85 aa, Zea mays
  Coding DNA Sequence Number=SeqID_7384
MGTYSWLRGDDPDDSGDNDEDDDDDEDDEENINEEDNDVQHDYFMGFGPVTEHYTSMFETGHFPNLLQDMLHVLGTYVRPLYELK

SEQ ID NO: 50760 - protein, 315 aa, Zea mays
  Coding DNA Sequence Number=SeqID_7385
  Gene Ontology: Mol. function=ATPase activity, coupled to transmembrane movement of substances; Cellular component=integral to membrane; Biological process=transport
  Homolog annotation: Hit_ID=A2YA25; Match level="QueryCoverage=68%, HitCoverage=17%, E-value=4e-70, Identity=54%"; Hit description =Putative uncharacterized protein
  Pfam annotation: Domain name=ABC_tran; Domain location=173-304; Score= -7.4; E_value=3e-06; Accession=PF00005.18; Description=ABC transporter
MEGKIISGNVNVKNQISREDLKEAFKNFGTVRMRQQSETLGKHAMHFLAGYISMFSTQGPFQTGITRISCAGELLAHIRTVKMYSWEKLFTERLVERRESEVKHLAVFTCVALFNTLISPLNSFPWVINGMIDAVISSRRLSNYLSTPEHHSSELNASADLLNHHFKRYSKVGSGKSSLLNTIIGETRVISGFNCLCTTEVIEACALHVDILAMTRGDMSHIGEKGTNLSGGQRARLALARALYHNSDVYLFDDILSAVDSQVASCILEKAIMGAPTNAENKITKHTQSSVKRQSSDGSVMSDGPGQPSDITQYV

SEQ ID NO: 50761 - protein, 679 aa, Zea mays
  Coding DNA Sequence Number=SeqID_7386
  Gene Ontology: Mol. function=mismatched DNA binding; Cellular component=MutSalpha complex; Biological process=response to DNA damage stimulus
  Homolog annotation: Hit_ID=Q9XGC9; Match level="QueryCoverage=45%, HitCoverage=35%, E-value=1e-103, Identity=61%"; Hit description=DNA mismatch repair protein MSH2
  Pfam annotation: Domain name=MutS_I; Domain location=313-398; Score= -5.9; E_value=1e-04; Accession=PF01624.11; Description=MutS domain I
  Pfam annotation: Domain name=MutS_II; Domain location=401-526; Score =8.6; E_value=0.0042; Accession=PF05188.8; Description=MutS domain II
  Pfam annotation: Domain name=MutS_III; Domain location=533-678; Score= -60.8; E_value=0.00051; Accession=PF05192.9; Description=MutS domain III
  Pfam module annotation: Pfam domain module=MutS_I::MutS_II::MutS_III; Domain location=313-398::401-526::533-678
MACFWHGVTWPNPRPNSEDGYKSSIREMRKQRRKESDLIPFCRRLQARFSSPTLDGGPAVRSRPGGGSPEATAPSQMVFRAVPIPGEIFCHPTLPYFSLDSAQIRAVGRTIFDRELFHVDLDDAPVFDADTDNLSVEPIFDDVVFEDIEPNFDDLDDEPLFDTKFDELDKGSVFDTESIPDHVAVSVFEFVRPEYDAELTVFDTDSDSLNDLPVVDMGPVHDAELAVFNQGNDGSSTAHTGVLDGHPVFDVELVFDEEPLIEIDCSIFNTNAPFMCLTDCLSYVDDMVSATFKEGHIFDKETVVEAVQKESGRDYYTAHGENAMFIARTYYHTISALRHLGSNSGGISSVGVSEAMFETIVRKILLDRTDCTLDFYEGSSSDWRLSKSGKPGNIGGFEDILFINNDMQESPVMTNRKLGLAEFREDSRFTNVGSALLALCLTADCEKSINSHSLQDAITKCSILLTERKKSNFKSKDLVQDLEKIRSSVKLVHDLISQFDYSLGALGALLSYAELLANDTNYGNYTIEKYNLDCYMRLDSAAVRALTIHEEKTDVNKNFYLFGLVNRTCTVEMGKILLNQWLKQPLLDVNEITSRLYMVQAAISTFDTKTTIRTVVQIHMCEPAGASRNVEHMSQLQKPWDPGGFHIGLVSRAQRVGFNFREYIELLERYNKAPFSLKT

SEQ ID NO: 50762 - protein, 234 aa, Zea mays
  Coding DNA Sequence Number=SeqID_7387
  Gene Ontology: Mol. function=kinase activity; Biological process =protein amino acid phosphorylation
  Homolog annotation: Hit_ID=Q653F8; Match level="QueryCoverage=86%, HitCoverage=59%, E-value=2e-70, Identity=64%"; Hit description=Cdc2 protein kinases-like
  Pfam annotation: Domain name=DUF579; Domain location=1-215; Score =245.3; E_value=1.3e-70; Accession=PF04669.4; Description=Protein of unknown function (DUF579)
MPLRGRQKHSRPNGSYMIQSCFRACVLLVFGLGAESPLWLALNHGGRTVFLEENEFYVKYLEPRHPGMEAYDVSYTTKVRDFRDLLEAAGAARAKECRPVQNLLFSECRLAINDLPNDLYDVAWDVVLIDGPSGWNPNSPGRMPSIFTTAVLARSGATAAKGPTDVLVHDFQFEVEQVLSREFLCDENRVTGSGTPSLGHFVIRGGRAGAGDAFCSAQEDGSSGEKTCRRRSHK

SEQ ID NO: 50763 - protein, 121 aa, Zea mays
  Coding DNA Sequence Number=SeqID_7388
MAHRRTRSTGRGGRPKSGEGDLRLPVKFCRVRRLGKLHGPMAELPQALARLGGDWSGLATVAEALAAMAGGKSSPELRRGVWPAVRFGAQKSGLSPYSNPRQIQGFVVSRARVPMPSSGMR

SEQ ID NO: 50764 - protein, 362 aa, Zea mays
  Coding DNA Sequence Number=SeqID_7389
MAVAGGQEQRSRRQPSLRPTQGQREKPLSRREEGTPVFRSSNGSCTRNGHPANHLPRRINSTAGQAAPLGPGKGDTLKRILLREGNRLRASLLIRGSKAGPSEGFNSRLRARGLHTHYWSEVRRPAPQKGSTAASGYSGSAPTTDQGGNDLVTESHQREASSPRTPSTGDRVRQITSSSPETPCSAPSEGNMALSPLLLAERRRRGGSDSGSAPEDGELHSARPRARTRAQPLKMTNSAPPDPGLGLGLSPGRRRTPLRPIQGSDSGSAPEDDELRFARPQGSDSALASANDLRLARPRGSDSTSASEDRLDLGLGGASTSPNLEHGPTTSTAGAIITLPQADSGYGKQDRRPVWLAPPDKQ

SEQ ID NO: 50765 - protein, 151 aa, Zea mays
  Coding DNA Sequence Number=SeqID_7390
MGKSKKGDSSSHHSGDKRKRELTPPSEDFGDSEYSEEEFSSESEGSLAPASPPASSDDSDDSQGIAAEVWTYIRVIERAGLEGSDESEYSSDEEDSSDSSEEGSGGDSGDDDDDGGDDGDDDGGDGDGGSGSGKGGSGIKGSSKGSNKASG

SEQ ID NO: 50766 - protein, 212 aa, Zea mays
  Coding DNA Sequence Number=SeqID_7391
MAEALAAMVGGIKLVGAKGKWLAGEGTGSCSVTKVPVSECLVPRLSCAKTVSNEFGLSSNFPRMCSRDTTGNSQHIDCLRGKTSSASTRFCPRKPIPPPTSGPARREVDGYTRAATGAEGDVHGTSLKRGTPRSREPKYQATVDRDQRINEQHQGTTSTAPHHHHREQQIADDTDETRHPESSRSKDFSLEQWIGWNRRVQGKGIHFPYVGS

SEQ ID NO: 50767 - protein, 141 aa, Zea mays
  Coding DNA Sequence Number=SeqID_7392
  Gene Ontology: Mol. function=protein transporter activity; Cellular component=cytoplasmic vesicle; Biological process=retrograde vesicle- mediated transport, Golgi to ER
  Homolog annotation: Hit_ID=Q9MAX6; Match level="QueryCoverage=56%, HitCoverage=27%, E-value=5e-31, Identity=87%"; Hit description =Coatomer subunit epsilon-1
MSFIQAEKGIAVAKVPRSTLAAISLCQPGGGGEGDWDGACADVAACVPGSAHLCQHMVISEIDSSIATSLQAVKLLALYLTGDKEGAISSLKEWLSDSATGSNLVLRLIAGIIFMREQDYNEALKHTHSGGTLDLYVYLFP

SEQ ID NO: 50768 - protein, 86 aa, Zea mays
  Coding DNA Sequence Number=SeqID_7393
  Gene Ontology: Mol. function=N-acetyltransferase activity; Cellular component=intracellular; Biological process=metabolic process
  Homolog annotation: Hit_ID=Q6AUP5; Match level="QueryCoverage=88%, HitCoverage=13%, E-value=7e-22, Identity=62%"; Hit description =Putative uncharacterized protein OSJNBa0007A06.10
MEEGCDVTSDWIISPNWLKESVREGQFVEEAQYVLEDEEYRMQYKSELRDAVMRAKERHNSLFAGYKHIQPSFDVLLAIIKSTGGK

SEQ ID NO: 50769 - protein, 125 aa, Zea mays
  Coding DNA Sequence Number=SeqID_7394
MAARSGCTELSGGAPDSVRCQRFIYNYTNSTVRNTVDYSGQEKLFGKTGQARTVRALAADRPRHEDVTRPEPMQKSKSVLWTVRRKSKDRPSPCADRPASSADRPGRTVRTRRADRPRSAEWPNG

SEQ ID NO: 50770 - protein, 567 aa, Zea mays
  Coding DNA Sequence Number=SeqID_7395
  Homolog annotation: Hit_ID=Q7XBD4; Match level="QueryCoverage=61%, HitCoverage=35%, E-value=4e-08, Identity=22%"; Hit description =Cinful1 polyprotein
MSSSSSSTANTPPADSSSEDTLSDLVAAELQPGHIVEFGVSRISSYVWAATSYGGQPSVEVFAKNYCLHWQKRKIGNTIAQFGSCTFTPRTEKTSAEVVGLVPCARNKVGNWWDYWFYVLGSKVEDLPGLPATVMCYHYYVAFPQFEVAEDDEDEGALRCAARMSSGRDLVEEFIGYGVWPLAHGWVLGKVCPRQMPTLGQQLVRSPTFSLDLCDRDPVAFVREVEDRAVRIVGRYAPRTESMRSWDIRGSHVRLNRVFKLNRLPYGGYPGDDAAAAVDRRGKKPVVVAEEGPSREAAPATKKRKIGTVVGGLGVSDRFAVELMGTCAALGGRLSSPELRESSARMLKMAHDEEVEDLGDLDSTLPEALGVELALPSDAGEGPSATPALTGAGEDPLPTFGPAQATAADYTDFVVASTIVPADDSLFGSVSECFESDGESGSLFPWTEESSDEGLDYFVALDVAAAETSPRVEGARDLASVSTGYRRRRVVGKHSVGEFSRSGRHRRMGMERGRLRVDRVGKRELLSSLIGASIGEGDLWNLFEGEELRIMLFNYREMGIIPKVEPM

SEQ ID NO: 50771 - protein, 87 aa, Zea mays
  Coding DNA Sequence Number=SeqID_7396
MVSHSGYGGYKCGHCTTAVGVSEALYAKAVSPDLLTGNRWGRLILACGIIFTGSLEDMVAGVTWPAILPPGWTIEWDPASVEEEHEE

SEQ ID NO: 50772 - protein, 637 aa, Zea mays
  Coding DNA Sequence Number=SeqID_7397
  Gene Ontology: Mol. function=zinc ion binding
  Homolog annotation: Hit_ID=A2YZN8; Match level="QueryCoverage=99%, HitCoverage=98%, E-value=0.0, Identity=79%"; Hit description =Putative uncharacterized protein
  Pfam annotation: Domain name=SWIM; Domain location=487-523; Score =14.2; E_value=0.015; Accession=PF04434.8; Description=SWIM zinc finger
MGQETEVVQSVSDLPVQDPPGEEFSAADLAWVKYATSEHHRDDVALIPYDRMEAFIAGESNNPECPTRFHIERGRKRERGSLREYRSDEYLLYRMYWCSFGPENYGEGGTILPSRKYRLNTRNRAARPQSMRGCTCHFTIKRLYARPSLLLIIYHERRHVNKSGFICHGPLDRDAIGPGARKMPYIGSEIQQQTMSLIYLGVPEENILQTHIEGIQRYCSKDAKVDNLASQYVQKLGMIIKRSTHELDLDDQASIRMWVDRNRKSVFFYQDSTEADAFILGIQTQWQLQQMMRFGHQSLLASHSSFGVSKLKYPLHTLLAFDSRQHALPVAWVITRSVTKKDTLKWMSTLTDRIHSIDSTWGIGGFIIDDPASELGPIREVFACPVLFSMWHIRRTWLKNVIKKCSNVELDALQRVDWLVHKLTTELHSSYWINLFADESGSFPEVKADYIASTSWQRALQIPDDAVTFDDKDPLVARVVSQKETSQTRTVWSPGSEFSLCNCSWSMQGNLCKHVLKVNMVCGARKDFQPSLSFQSFQHVLLDLWQKPLDDSFSLDLSVARVMQMQEKIKHVAELATSSGIAQVAGKLPMQWTKKRGRRVGVKPTSALLLPRSKGSLQKDLTPKNSRKRKRLSRFKG

SEQ ID NO: 50773 - protein, 667 aa, Zea mays
  Coding DNA Sequence Number=SeqID_7398
  Gene Ontology: Mol. function=receptor activity; Cellular component =membrane; Biological process=Golgi organization and biogenesis
  Homolog annotation: Hit_ID=A2XP25; Match level="QueryCoverage=95%, HitCoverage=68%, E-value=0.0, Identity=75%"; Hit description =Putative uncharacterized protein
  Pfam annotation: Domain name=COG2; Domain location=1-667; Score =441.1; E_value=1.5e-129; Accession=PF06148.2; Description=COG (conserved oligomeric Golgi) complex component, COG2
MTVHLIYFPNSRLFLNEFTVEKLIKELPTAPSDLSNAEVPNSDTGTPNGVAGTGVSETQSILLERIASEMNRLKFYISHAQNLPFIENMEKRVQGATKLLDGSLERCFVDGLEHRDAKVIYNCLRAYAAIDNTSSAEELFRTAVVSPLIQKIIPQNYARAVAGASSDELEEDYQQIKECVQKDCKFILEISSSENSGLHVFDFLGNSILKEVLSTIQKGKPGAFSPGKPKEFLRNYKASLGFLDFLEGILRLRLDYFAANYVEPEPGSTISFFHPFVPQAPQSNISSFFNGYCISKSAVTKFRSELAYTDFMRQWNVGVYFSLRFQEIAGGLDSTLTNTFSPTGLNEAQGKPLLLKQSIKLLESLDSCWSDEVLVFSHCDKFLRLSLQLISRYTTWLSSGLTARKASDGSPNSPADAEWALSIPIEDFIYIMHDVHAVIGELSESGSFIGHVNQLLGSCPIEVFNLVKQSILQAVEPLKERLPAIINVMIGIIVKKSNEDLKHLKGITATYRMTSKLPVRHSPYVSGILHPLKVFLEGDRIRYLSEDDKTKLCRGSTDKITAIYYDLVSEVVTVLLRSIYFNSLKARKTESSLQRLRQGAQRRVGASTDASDNIISDTDKICMQLFLDIQEYARNLRAIGIDAREIDSYRALWQCVAPKDRQENIQF

SEQ ID NO: 50774 - protein, 353 aa, Zea mays
  Coding DNA Sequence Number=SeqID_7399
MSSCSLMHRVFPPSEPPDGGCPQPFRLVVGGTQLHGSWYLSAIVRLQGFSSCSPAAPLHRRSPKMVTSSPWMGRGKPGCDLGPALSFKDVHHPCWGGERGEPGLYLLRGPAGHLFFQLLVVETFLQLCGGGVLQPCPGRRTVAAQLGCNIPPSSSLSWRGRKRGPTGALWSGPLFGFDGWFASLEREREREPSSGRVRPGTMAAAAEVAGESSGTRRPAGSPPRPGVAVSAWTEAELARKEDLVGRSLAGSSVSGTDAGVDLPRPRAGLMSSGDSWPRPRGDQPSRLLGLDSRRRPWRRWPRRGDDVVLQSGGPRTASLSEARSNLAEGVVDAEGAAAPFNCPDPSLQDRIIL

SEQ ID NO: 50775 - protein, 237 aa, Zea mays
  Coding DNA Sequence Number=SeqID_7400
  Subcellular localization annotation: CTP_CleavageSite=69; ConfidenceScore=5.46e-01
MQAACNRAKWAHFSDFQHAQHGGPGPRVKQPARRMLRASNCTATHATAMPPRLRNQYRDSRQPYARPSSASLARRGSERRFAFAIMTASKRLRASLLIRGSKAGPSEGFNSRLRARGSTPTTSQRFEGRPLGRVQRPPQATRAPRPLLIRGSKAGPRRVHSRLRHRARDDHGYVRYITKARAVLPRGSGAALANPAPAKPLTASTYQPENLEPDRAPGLRPARMRERPDQPKHYARH

SEQ ID NO: 50776 - protein, 90 aa, Zea mays
  Coding DNA Sequence Number=SeqID_7401
  Subcellular localization annotation: CTP_CleavageSite=47; ConfidenceScore=5.47e-01
MAPEAGPDCLSASLCLVALQPVRRRRRCPSVRSRFGQGCFLVKTEPRASRKYVRRWRGASGETEILRGRLPLPEARLGRGVIESLEWTDP

SEQ ID NO: 50777 - protein, 573 aa, Zea mays
  Coding DNA Sequence Number=SeqID_7402
  Subcellular localization annotation: CTP_CleavageSite=48; ConfidenceScore=5.16e-01
MELDGKLFVNTQQAPTWRANCRRFDPGGSLDRRVNCRRVPQPRWVGARRSAKGGNQRETGVKGKPTAFVLSRAQVGCACSEAEFVVFRGRCRVRALGSGEAEFVVFRGRGRVRALGSGEAEFVVFRGRGRVRALGSGEAELPMASEAGLDCCQPHSVEWHSSRSGAGGAVLSSGRSVERRSDCGHFGSVDWRARVRIRCQAILALNASTARSVGVAIWPRLLLGEDWASGEPKLCVDGGYQLRLGVLGGDEMALALASCPLGFASRPLPSRPLTSSPSGASSHATNRPPVVTLTPATTSPPRILSRKALTSTSSLSPVAWPALTAGRSKFHRWQEVSPASNEGPYLPFPASASPTVVAIPGSMDGRMSFRDVMLTASQAPPPVVLLKDPTPPVKVVRVAAAHHIHSPKHVVPDVDGVVALVDCPIRSSMWDRLSLPCEAAKDRAAGVIRRTSVWRRITPASSSDGDIGAAVSAPVHGAAPNNEDGAPVVEGSQSRMGRKRRRGPRRRPEASRGPPPPLSPPAFVSGVLESQRAGRTAAVRDVPALRPICVMEFSTGFAREEIDLRRALFVSIT

SEQ ID NO: 50778 - protein, 175 aa, Zea mays
  Coding DNA Sequence Number=SeqID_7403
  Homolog annotation: Hit_ID=A3BI20; Match level="QueryCoverage=77%, HitCoverage=18%, E-value=9e-13, Identity=33%"; Hit description =Putative uncharacterized protein
MEAGVDTLPAEAHLDTNVGLGSASLVASDPCMGKDENSKEEESQEKGAMCSAACKVNAEAKQGAKDCHLPNDEDSTVKAMKRASHCNLDDDLGGLKSAEQVLQPVTTSPSSQLPSENGSRQDENNMTNPYTVSEDEVDELNNDLLAHLIKDVSEVDFDDVDLGTKLCDLMTPSRK

SEQ ID NO: 50779 - protein, 102 aa, Zea mays
  Coding DNA Sequence Number=SeqID_7404
MGESKKGGSSSHHYGDKRKQVWTYIRAVEHAGLEGSDDSEYSSDEENSSDSSEEGGGGDGSDCDDDGGDGDGGDGGGKGGSGDGGDGSSRGSNKGSSNRASG

SEQ ID NO: 50780 - protein, 46 aa, Zea mays
  Coding DNA Sequence Number=SeqID_7405
MSRCRGVDSSHRVLLELVDGVTWPSSLPPGQMVEWVTASAGEDQEE

SEQ ID NO: 50781 - protein, 58 aa, Zea mays
  Coding DNA Sequence Number=SeqID_7406
MGDLVSGRVRGYVCGQVHSGFNNIMLKEEKTKLVGNLGFLGYTWLLVVYAYHSRFRFW

SEQ ID NO: 50782 - protein, 173 aa, Zea mays
  Coding DNA Sequence Number=SeqID_7407
MGEPVPSLLMLLLSRGRVPLNSPTRWQGGRPSYPSNHLLQRTCKNYATSKAEYTNTQLDLPGYNGSSSLISCEKQTIRIEFLSLQGLTALAYNAPLTPTGRRAVAALVPTITGMGDLVSGRVRGKVCGQVHSGTRLTDLPYFSGFNNFQKFCKNYSGLSLAILACSKNLRLKV

SEQ ID NO: 50783 - protein, 26 aa, Zea mays
  Coding DNA Sequence Number=SeqID_7408
MAADADVVHSIPWPATDSLECPLRLI

SEQ ID NO: 50784 - protein, 185 aa, Zea mays
  Coding DNA Sequence Number=SeqID_7409
MAVMGSTSEKMYLCQLTPRHEESSSGSNDPIRELEAQVEQLQTELRHRNWVWVEDGQRINELRADVRHLQDELTERDLAIDWVVNSRSIAWDREAEARAHVEELTTAIDNLQVYCNTLHEEVHELYSRLHPDVPADRVGMGARPSGTACEALGGELELLKPPASMNLADKRSPTTDSEATKDDKY

SEQ ID NO: 50785 - protein, 84 aa, Zea mays
  Coding DNA Sequence Number=SeqID_7410
MAADADVVHSIPWPATDSLECPLRLIRNSGVVRFVVVPLMGLGVCDSLCQDDDEDNAGFYYDYGKEEGVEVDLQEFQDFDEFED

SEQ ID NO: 50786 - protein, 95 aa, Zea mays
  Coding DNA Sequence Number=SeqID_7411
MKMLPTLILTDLEELEVAKWIGARGKNSEKRQSLQGIKEGEAINGEVGEALSSNSDEKEEALKGRFKVSMWARPWVSREFKGDKGQGCRRGGKCA

SEQ ID NO: 50787 - protein, 52 aa, Zea mays
  Coding DNA Sequence Number=SeqID_7412
MGLGVCGSLCQGGDEDDGFGYDYGAGYQLCNHCSGEDEVVEDFQEFQDYDEF

SEQ ID NO: 50788 - protein, 650 aa, Zea mays
  Coding DNA Sequence Number=SeqID_7413
  Gene Ontology: Mol. function=binding
  Homolog annotation: Hit_ID=Q2QQT3; Match level="QueryCoverage=74%, HitCoverage=79%, E-value=0.0, Identity=73%"; Hit description=Nodulin family protein, putative, expressed
  Pfam annotation: Domain name=MFS_1; Domain location=96-457; Score= -19.2; E_value=0.082; Accession=PF07690.7; Description=Major Facilitator Superfamily
  Pfam annotation: Domain name=Nodulin-like; Domain location=50-245; Score=120.8; E_value=4e-33; Accession=PF06813.4; Description=Nodulin- like
  Pfam module annotation: Pfam domain module=MFS_1::Nodulin-like; Domain location=96-457::50-245
MARGEVSIVRVDLHLRALLQGAPLQAGLQPGDAQQALLLQGPRHQRGHHIWAGAAGSPDVAGAAHRRRHEPGRLPHDLPGADTGRTAPPPVWLMCFYICFGANALTFSNTGALVACVKNFPESRGIVIGLLKSFVGLSGAIYTQLYLAIYGDDAASLVLLVAWLPAAFNIFTVYTIRVLPYARRRDGGKPYNTPFYHFLYLSLALASYLLVMIVVEKQVQFSHAAYVVTSTALLIVLFSPVGVVVKEEYKAVSQLEESLQQPPAIAVEEPKAGTAGKGDDESSSPPLCGGGGMACLTNMFKPPALGEDYSIMQALVSVEMLVLFVISVFGIGGTLTAIDNMAQIGQSLGYPAKSINTFVSLISIWNYAGRAGAGYISEFLLARYRLPRPLVLTAVLLVSCIGHLFIAFGVPQSLYAASVIIGFCFGAQWPLLFAIISEVFGLKYYSSLFNFGSAASPAGAYVLNVIITGRMYDAEATRQHGGVAAVGDKICKGVVCFKRPFIIITGVTFAGALVSLVLVWRTRNFYRGDIYAKFKVTPAAASESESLDGKNVEMAEETEGKRKKQVNNPRVVDVGDNHEASLLNDGQRGAAALDRVQVVASRELVIHSGACDHVGLLLEVELTVAKLLLVIDERRQRECLLLMVFVRGFK

SEQ ID NO: 50789 - protein, 64 aa, Zea mays
  Coding DNA Sequence Number=SeqID_7414
MALGGGMELRWAGVGLPGEAPGPAWADLSTAVRGITGRTIDDGVGARRRLGRGGSTSAVGGLAR

SEQ ID NO: 50790 - protein, 94 aa, Zea mays
  Coding DNA Sequence Number=SeqID_7415
MTSLMVGSAMAKGLAVGGCDGGGLEWVAAAVDDWVERIVVALQAFTERESPCRWLERVEGERAATNGGAILCSALSCASDVTTAPILAPVHDRK

SEQ ID NO: 50791 - protein, 161 aa, Zea mays
  Coding DNA Sequence Number=SeqID_7416
MKMRAPVVAFAALLMPLLVATRAHEGAVVIVIIGVEPGRNGGRVRPSPLWPGAASAAAVVVGGWGGGAEAEGEVVRAPSAETEEGRRPSADPSADPEGGAGQGGVGDVVRGVELHEAGVAVDGGEREGGWGSAGRLRQNRAPLQADGPQADGPPALSTNTS

SEQ ID NO: 50792 - protein, 100 aa, Zea mays
  Coding DNA Sequence Number=SeqID_7417
MKNQELAGSRKMTIKKDESKRQMRCKDKHHICYNCREKGHLFKGIRINLYGNQAKDLQPSDIQRMPHRKNEALENELKIFYLVLEKFQSYGRLQVYIFIL

SEQ ID NO: 50793 - protein, 211 aa, Zea mays
  Coding DNA Sequence Number=SeqID_7418
  Gene Ontology: Mol. function=molecular_function; Cellular component =integral to membrane; Biological process=retrograde vesicle-mediated transport, Golgi to ER
  Homolog annotation: Hit_ID=Q657Y8; Match level="QueryCoverage=83%, HitCoverage=90%, E-value=3e-77, Identity=78%"; Hit description =Putative uncharacterized protein P0005A05.16
  Pfam annotation: Domain name=Rer1; Domain location=4-188; Score =449.7; E_value=3.9e-132; Accession=PF03248.4; Description=Rer1 family
MEGGDSSGAGAGGAVAAAAKWRSDASRAFQYYLDRSTPHATGRWLGTLAAAAIYALRVYMVQGFYIVTYGLGIYLLNLLIGFLSPMVDPELDPSAASEGPALPTRGSDEFKPFIRRLPEFKFWYAITKAFVIAFVMTFFSVFDVPVFWPILLCYWIVLFVLTMKRQIVHMIKYKYVPFSIGKQKLAKNVSVWQSATAFGGQKLPEAETNGA

SEQ ID NO: 50794 - protein, 418 aa, Zea mays
  Coding DNA Sequence Number=SeqID_7419
  Gene Ontology: Mol. function=kinase activity; Cellular component =intracellular; Biological process=D-ribose metabolic process
  Homolog annotation: Hit_ID=Q6S563; Match level="QueryCoverage=100%, HitCoverage=100%, E-value=1e-174, Identity=75%"; Hit description =Putative ribokinase
  Pfam annotation: Domain name=PfkB; Domain location=109-398; Score =113.3; E_value=7.3e-31; Accession=PF00294.15; Description=pfkB family carbohydrate kinase
MGAEAAHPQQQPPSSVRPCREAAAPAVLGLQLSALIDHVARVDWSLLDRVPGDRGGSQQDESLAIMSCGCLFEPLRFLVIKSSVAFTEKGPACWLACSALHTSGKVSIVELNHILNEVNTHILPSHNDLTPITTIAGGSVANTIRGLSAGFGISTGIIGACGDDNQGLLFVNNMSFSGVDLTRLRAKKGHTAQCVCLVDASGNRTMRPCLSSAVKIQANEFRKEDFKGSKWLIVRYAQQNMEQIIEAIRIAKQEGLSVSLDLASFEMVRDSRSKLINLLETGNIDLCFANEDEAREVIGGGLESDPEEALAFLGKYCKWAVVTLASKGCMAKHGKQVVQVPAIGESNAVDTTGAGDLFASGFLYGLVKGLPLEECCMVGACSGGSVTRALGGEVRPENWQWMYKQMHARGMLLPELKN

SEQ ID NO: 50795 - protein, 37 aa, Zea mays
  Coding DNA Sequence Number=SeqID_7420
MAMMGSTSEKMYLCQVRKQRSFAASVQMWVPKEEPQK

SEQ ID NO: 50796 - protein, 223 aa, Zea mays
  Coding DNA Sequence Number=SeqID_7421
MARTEKEEGDVLLLGAGKGKLQGWRPWDLLPLRQGGDGSRELGRHGCWAKLGLGLQQWGSAMGKKLSAGNSGRHGARSRGSRDQGERRGRCAQGVGGGACWLEEEEGEEGAMDQRSPTPWTAEGNVGGARLLADHGEDDSLLQPLARRRSREGRRGRCLLLARRGRRPWRGKEPCSLLLLPWDACCAMEKKTGRLLWRLEKNEGWECKIAQVQGERAAIYREP

SEQ ID NO: 50797 - protein, 205 aa, Zea mays
  Coding DNA Sequence Number=SeqID_7422
  Subcellular localization annotation: CTP_CleavageSite=46; ConfidenceScore=5.14e-01
MGLVLARRESSAPWLLAGAGARQQQRGGWPWRNGAAASPWTRTSPRSAQGATARREERLPAAVRRRKQGRPWRLQDVGLGAARHGRVASAMGGGEQSCCVPGRRTRARRGLAAMAAGGQGESRGTGVLPGSSCSCGKKQREEEQPPWEGACCRRRGAPCCSRGEEGRAAVAVGGLLREVEEGRGNRLEKGEGEWRLKIFRGGIAK

SEQ ID NO: 50798 - protein, 41 aa, Zea mays
  Coding DNA Sequence Number=SeqID_7423
MVGRSAVTARRQPGSVGHCMPRQYFLDLVDGVTWPSSLPPG

SEQ ID NO: 50799 - protein, 66 aa, Zea mays
  Coding DNA Sequence Number=SeqID_7424
  Subcellular localization annotation: CTP_CleavageSite=52; ConfidenceScore=5.45e-01
RHSSLPVFFSIAQQASHGSSNREHGSFPLHGRRPLLASSKHLPRRPSLLLLLASGYSRESSSPWSA

SEQ ID NO: 50800 - protein, 171 aa, Zea mays
  Coding DNA Sequence Number=SeqID_7425
IDSEWPDLAGATQRGVHRCCYGFGILSNTTQARQRREYTVVAWRVEEYGVALGRELLAAGMHGRGTPALGEGAGWERGSAMARTEKEEGDVLLLGAGKGKLQGWRPWDLLPLRQGGDGSRELGRHGCWAKLGLGLQQWGSAMGKKLSAGNSGRHGARSRGSRDQGEKKGGP

SEQ ID NO: 50801 - protein, 29 aa, Zea mays
  Coding DNA Sequence Number=SeqID_7426
MQLSFRFMPSKSAKPSDNVKRRFRKAMFT

SEQ ID NO: 50802 - protein, 259 aa, Zea mays
  Coding DNA Sequence Number=SeqID_7427
MNTGIRSAITNGTPVPPPQVRTTPLNGGPAEQQKTDERRAVARSSSGDDDDFCSGGPNSGSADLRADAAAKRPPPMPKLVRQGRAEGRRVGGPPLRRGGWVPHVMQAGSEQKKPNRRARCVQPPQRYKRLSTFAQTNGRKGGQPCRRHATAPSGRNSPTPNTPSMEAQAHASCNRRAECFVHATAPPLAPLPHLLDCGTNTMTRGDPARNPVVPAWRDGQCGQKWAGSNGGGRRAGAAAPSSAKLTSHPGAAREPSLTA

SEQ ID NO: 50803 - protein, 141 aa, Zea mays
  Coding DNA Sequence Number=SeqID_7428
KVNCCWLVAKQAKSHSGTLPMDDLELAPRPKDILLLKDTLKPSTAGLPCPIGDEADGSQRAASPLAAPTPRPIRLGGGPLADIPWGQRAGARVGLASWRSVDGGVADGCFNNGSTDVRRQLPFMILRPKFKNQDTYYHLCA

SEQ ID NO: 50804 - protein, 361 aa, Zea mays
  Coding DNA Sequence Number=SeqID_7429
  Homolog annotation: Hit_ID=A9PCP9; Match level="QueryCoverage=90%, HitCoverage=93%, E-value=2e-31, Identity=31%"; Hit description =Putative uncharacterized protein
MELPVSFLRDQGGGGGAEEQSGTQLEHEEDVPCVLDIFVHEARGTHKTIRVYGDHQDVYARLALTSAPEAGASARLGERLPPLRVARGRLAVDVLKCELWMRSGGVPDDQLLGFALVPLAAVAAADGARVIAADFELSSTDLLHSPAGAVRLSLALRPGHADACEPSEAAVLGLGPAPMAVDLDHSRIEFTDLRVRVEQEKSASSDGDGSTSRNAAASTASTVSEEDRAFSSSAEAAQQPPDVEEATTASAPVSRRSPDTPTSRGGKAKAKADVDVLPSPAGDIVDVEAEQSAMQRQIMEMYVKSMQQFSESLAKMQLPVALGGGGGVVEKEETPDDKKVIERQQGKKDGARVFYGSRAFF

SEQ ID NO: 50805 - protein, 77 aa, Zea mays
  Coding DNA Sequence Number=SeqID_7430
MPGKANCCCPARMQHFVLLLAFVARTGVRTCRCALPTISVGGEADAAVCAEVGATGGSFPPSRSSAPPTERLPALWL

SEQ ID NO: 50806 - protein, 107 aa, Zea mays
  Coding DNA Sequence Number=SeqID_7431
MAPRAGLGCCQPHSVEWLNSRSGAGDAVLLSDRLVERRSDCGHFGSVNWRATFALNAPAIWSVGVAIWPRLLLGEDWASGEPKLCADGGYQLRFRSLEGTPNYGPRQ

SEQ ID NO: 50807 - protein, 134 aa, Zea mays
  Coding DNA Sequence Number=SeqID_7432
MPMGPWCGWLLSYAFSCRHAYRQVTAGAANELERGLGSGKHLDECGGGAALVRRGLPVLRCIISVPVGTLSVLIVVHRGLVLGLSAARCSSSRAGAVDVSLGSGSGSSISVNLPPCRPGRGRRNWFSGTELRVR

SEQ ID NO: 50808 - protein, 263 aa, Zea mays
  Coding DNA Sequence Number=SeqID_7433
  Gene Ontology: Mol. function=kinase activity; Cellular component =ornithine carbamoyltransferase complex; Biological process=amino acid metabolic process
  Homolog annotation: Hit_ID=Q6QP54; Match level="QueryCoverage=28%, HitCoverage=26%, E-value=6e-18, Identity=65%"; Hit description =Putative kinase
MAPLVDVVGPCPRLGKVEAPPRLRLSPSSKVEVESEPPGRTRRRPSAKARAESEPWGRTKWSSSSFGAEPESEPWGRAERSSSSSGAEPESEPWGRAKRSSSSSGAEPESEPWGRAERSSSSSGAEPESEPWGRAERSSSSSGAVPESEPLGRAERSLPWRLGPDLAAVSLTLSSGSAVGAAQAALSSCQTGQWSGEATFALNAPAIWSVGVAIWPRLLLGEDWASGEPKLCADGGYQLRFRSLEGEKRVSMKNLDAIDEIEF

SEQ ID NO: 50809 - protein, 319 aa, Zea mays
  Coding DNA Sequence Number=SeqID_7434
  Gene Ontology: Mol. function=helicase activity
  Homolog annotation: Hit_ID=Q5JMT3; Match level="QueryCoverage=87%, HitCoverage=55%, E-value=6e-44, Identity=31%"; Hit description=DNA binding protein-like
MITFTNWTKLEDVVEVPPAFPVLTYSLTPIDQLHLCVDNREYYTDAIGIVTSISAVAPHRSRGQHTTSSKRTISLCNVSWDLMPFVLDGLCLSGGSPCKWYINPDVPEAGALMASARKAHSPIKWNEVLSSNQPMPHVPEEQKIAYIRDLHPFENKIGDRWWYSACKKCTGTTVAHGDSYKCGDQVCATIGTPNQRYKLLLTAGDETGDTDFILFGQMAQRIIKKPCDMLITNNPIGFIPDPITDLLEKTYIWNVNAVVAEIDTAKDSIQASSSGPKQSQTVLLQGAPSGIEDTPTKASSLVMPSTLLTPQSSRNQCAR

SEQ ID NO: 50810 - protein, 563 aa, Zea mays
  Coding DNA Sequence Number=SeqID_7435
  Gene Ontology: Mol. function=helicase activity; Cellular component =chromatin; Biological process=protein amino acid phosphorylation
  Homolog annotation: Hit_ID=Q53R78; Match level="QueryCoverage=98%, HitCoverage=31%, E-value=0.0, Identity=65%"; Hit description =Putative uncharacterized protein
  Pfam annotation: Domain name=DUF889; Domain location=230-474; Score =279.3; E_value=7.8e-81; Accession=PF05970.5; Description=Eukaryotic protein of unknown function (DUF889)
DIGRQLRDTLGNPNYNIPQEQLMSLLIRKLSDAFANSDGNINDYGLPKIDVQCAFVDDNRLINDEIDHEPLMLSMHADSLVTQLNADQRTVYDAILGRVYSNSPGFFFVCGHGGTGKTFLWNTIIARLHSEKKIVLAVASSGVASLLLPKGRTAHSRFKIPFNVNDASTCNVNRGTMLAELIQVSSLIIWDEAPMTHRWCFEALDKTMRDILSEHTPSNALLPFGGKPVVLGGDFRQILPIVRKGSRSSIVNASITNSNLWRHVVLLRLHTNMRLFDPSLQVDARNELDMFAKWVLSVGDGTLPAERRASEREATWITVPEDLLLRVEGDKVAALVSKVYPDFLLNYIDPTYLSSRAIVCPNNATVDDVNNYILSLVPGDTIQYLSCDVIAKSSENIPDFDVLYPTEFLNSIDANNFPTHKLELKKGAIVYNGTRLLVTQLGQRILHCVALTGSNVGEEVLIPRIALNTTDVKWPFTLQRRQFPVRLCYAMTINKSQGQTLSRVGIYLKGPVFTHGQLYVAVSRSTSRNGLIILIENEDGSCGSQTRNVVYKEVLAAADAAAT

SEQ ID NO: 50811 - protein, 126 aa, Zea mays
  Coding DNA Sequence Number=SeqID_7436
MARAKYLTNCAIKLGKMVRVDPISCPPLGEPSRCPSRPVQKLVGAQPRASAVGDLEHEEEEVTEDRTPPPSDPQAGNCFYFDICGSEQDSPVNKGKPRIHFSKHLCKTESLIIEKPYLDSLKPAYP

SEQ ID NO: 50812 - protein, 382 aa, Zea mays
  Coding DNA Sequence Number=SeqID_7437
  Gene Ontology: Mol. function=aspartic-type endopeptidase activity; Cellular component=lysosome; Biological process=sphingolipid metabolic process
  Homolog annotation: Hit_ID=P42211; Match level="QueryCoverage=18%, HitCoverage=14%, E-value=3e-31, Identity=88%"; Hit description =Aspartic proteinase precursor
MGHHHISRSYFRQTDIKQSGNASIDIMSKFFKLMVVLQLMNDLNRSVQDAAISCIEAYTVLEVLRPLYNSPNILEQKFSKIFTNHYIVQHWAVNIFCTMCHKHEMLPVEYQCFIAVFLLVRPNVGKSALFNRIIASLRANQFCERLPSPNGESTVDCHQISKMPNLAFTIANNTFTLTPEQYIVKLEQAGQTICISGFMAFDVAPPRGPLCYAEHICTTLKCATRASTEGITVPPLAPSTPAPVCVCPLRLPATAASPPQISALVRAAQRLLPWSPLYPRPYPRPPDTNPTHTFASPTHICDPRPAAPAPAQKRHKDDGGEGDPADPRRRHLWGLHGGRHRNDGGEEADLTKPIQFISTSKFTLQISISNTSAKKKLYGLEE

SEQ ID NO: 50813 - protein, 135 aa, Zea mays
  Coding DNA Sequence Number=SeqID_7438
MTAAAPAPAWHHAPSQWMVHTFTADMSGYVTGLVPKVHNKPKKDQEKGFKLKSKGTTEGTLVWRTGLSEALRYNSPDCPVHHRTVSGAPEESYSGLASFGNPLRYNSPDMSEEQSTRGWHTGQPTGYVRCTTGQP

SEQ ID NO: 50814 - protein, 103 aa, Zea mays
  Coding DNA Sequence Number=SeqID_7439
MQEELLVLPTIVEDFMSFASLVTCEGAMNALSREGCRHYEVFDQSDENFEREIFKVDDPMMERAEDVEDFGALAGVPLEVAEVKPVLPSDAGSGFWACARNRY

SEQ ID NO: 50815 - protein, 88 aa, Zea mays
  Coding DNA Sequence Number=SeqID_7440
  Subcellular localization annotation: CTP_CleavageSite=50; ConfidenceScore=5.04e-01
MESTSQQGKGLTSVLSVEHVLNAKLIRFNTSKQTTDQTKVGSKKSFEVPSAREKVKETRNPKAGVKKETCGIKVDQVKKSYGASRNTT

SEQ ID NO: 50816 - protein, 266 aa, Zea mays
  Coding DNA Sequence Number=SeqID_7441
  Gene Ontology: Cellular component=membrane; Biological process =transport
  Homolog annotation: Hit_ID=A7NXR3; Match level="QueryCoverage=92%, HitCoverage=50%, E-value=6e-41, Identity=41%"; Hit description =Chromosome chr5 scaffold_2, whole genome shotgun sequence
MTVIKAAGAEPCGDGGAYGARRRQSLRARYAYGFVFFATKPAGLVRQGLRGKGAPRLASCAGLRSRGLQVLPVRRSASSKLGLLRILHLTSTNVKIFFWVMFATTFGTRKLHEARNSWHSGCWILKSLVYAMSIGIPFIIPNIFIQFYGEVARLGAGIFLLLQLISMLHFISWCNKRWMPDPGSNQCYFSLQVLKLELTMACHPYVILSGLFGLFLSTISYIASFVGIGVLYVLYVPNSSCAFNIFTITWTAILVTIMMAVSLHSK

SEQ ID NO: 50817 - protein, 100 aa, Zea mays
  Coding DNA Sequence Number=SeqID_7442
MARRWPGATVADLRGCTGNGDEGGRGSTGAQMGEGERASGARGSSGQGQVSCELHARRGRGEGGRAQLGGGYAGTTGLTARAREQREREERRRVREKRLR

SEQ ID NO: 50818 - protein, 304 aa, Zea mays
  Coding DNA Sequence Number=SeqID_7443
HTARKSVIPFLPSRLAERPLHRTVSGQSSHLERLHHRLREEQERRRQHREQQGSSSPPQQEVESVRPRSSVAQLEAPPAPPRDVPAVGGATGGDPGGDPDDDDSDHSTESSEPQEAEGWVARPITRDAARGCHFHDALDTLLCQAFDRHTWSIEYRCVVYQHSRGRYPDRWEATCLVRRPEDDLRGAEAVSEHYSISVRDTAEAAMQDAARQSVVVSPVGEANPRLSSTVNLVAVLNTELDHSLDELSRARTEIAELRAELAERHHQEGGSPAPVGTQHPYRSPPRGHHTYGSPVCKTRIDLDP

SEQ ID NO: 50819 - protein, 376 aa, Zea mays
  Coding DNA Sequence Number=SeqID_7444
  Gene Ontology: Mol. function=hydrolase activity; Cellular component =nucleus; Biological process=metabolic process
  Homolog annotation: Hit_ID=A2YP97; Match level="QueryCoverage=88%, HitCoverage=97%, E-value=1e-128, Identity=71%"; Hit description =Putative uncharacterized protein
  Pfam annotation: Domain name=Abhydrolase_3; Domain location=94-313; Score=273.9; E_value=3.2e-79; Accession=PF07859.4; Description =alphabeta hydrolase fold
  Subcellular localization annotation: CTP_CleavageSite=54; ConfidenceScore=5.13e-01
MGGSDDHARRKPSLPWTVRVQLAALALVHRRDGSVRRLLFSLGDLKSGTTSRPGASGVRSADVTIDASRGLWARVFSPSSGADADAAAAPVPVVVYFHGGGFVLFSAASRPYDAFCRRLCRGLRAVVVSVNYRLAPGHRFPAAYDDGVAALRYLDANADSLPAHVPVDLSSCFLAGDSAGGNITHHVAQRWAVAAVSPTNLRVAGAVLIQPFFGGEERTAAEVALDGASALSVAATDHFWKEFLPEGATRDHEAARVCGEGVKLADAFPPAMVVVGGFDLLKDWQARYVEALRGKGKPVWVVEYPDAVHGFHVFPELTDSGKFVEEMKLFVQEHKSTNTKRAVYQGQRSLGASDCPVVHRTVSANGSQAPTVGFAK

SEQ ID NO: 50820 - protein, 21 aa, Zea mays
  Coding DNA Sequence Number=SeqID_7445
MGVVANDVVGVRGGASEGAII

SEQ ID NO: 50821 - protein, 98 aa, Zea mays
  Coding DNA Sequence Number=SeqID_7446
MATKFHTKSWQHTRFKGLFSIAYCSYIFTVIRISHGAAAYNREAARKSLLRKKGITSDNLSVYRLLATHKLLAQEYVDKNLSDGKDRSVGNNINIVDI

SEQ ID NO: 50822 - protein, 312 aa, Zea mays
  Coding DNA Sequence Number=SeqID_7447
  Gene Ontology: Mol. function=transporter activity; Cellular component= integral to membrane; Biological process=transport
  Homolog annotation: Hit_ID=Q7XBW4; Match level="QueryCoverage=74%, HitCoverage=18%, E-value=6e-58, Identity=51%"; Hit description =Expressed protein
MTMRHRRSSRSHFCCPLPTPVNFVCLHAVKPHLRPLAMAVSTVSIHIFGDVPSSPLVGLLQDKINNWRETSLILTSILFAAVVFWFIGVSEAAQDALDHLFNQGHNLVTENEISDTFTRLVERLPQVVLGSEETTTLSHARMLLALTFYAGHSSQFSGSMDKLIVSKPLSIGYLYSVAELKSGAYSKDTTNISLHATSTFAASKISVIHDNALPNSLLGTVEYELPHVPPWFIHAGIQKLYGVLAGIIRLVGLSTVSVGWCGLLSSRSYIHDDDPLACVHSVADSYTGMAFRCFRALLSSRSMKKTKVEDHA

SEQ ID NO: 50823 - protein, 134 aa, Zea mays
  Coding DNA Sequence Number=SeqID_7448
MTEDKQRQKLKQKPSRKISNTYIKKVDKKAATPYLIKKKKNGKVIAIKADKQANKGKGAKRIWVPKEIISTMKSTKKAFVKVPRPAKGVPARFVPVGPAAAAKASSEGWRLCLRPNICPPRDQFDKVTWCRRRR

SEQ ID NO: 50824 - protein, 97 aa, Zea mays
  Coding DNA Sequence Number=SeqID_7449
MASMTITKFVEDRLMNVLTCGLTREPSRERPDGIAAARRGFAANPLNRSVDMHLVKMSPTLILTNLEELEVAKWTCARGKNSEKRGNYSMAIERQGE

SEQ ID NO: 50825 - protein, 39 aa, Zea mays
  Coding DNA Sequence Number=SeqID_7450
MYGLQVVTRMMVMIMLMVLVAFGAIYAQFDLYYVNGSSL

SEQ ID NO: 50826 - protein, 164 aa, Zea mays
  Coding DNA Sequence Number=SeqID_7451
MTDASVPGDQYQHPTQDFPIYLAKGIQYQPRGCTVFPGCHSTNRLLGTFGIRRYLRTQVGITVNQNNTKVGAAPKYLRTSPQHWRPPPVNSLHSEFFETLRAIINLRYAPKKASASGAAASATTGHNQDEDGGGGGGSPVTGTGRGGRRQGRPRATVGQGAAAA

SEQ ID NO: 50827 - protein, 182 aa, Zea mays
  Coding DNA Sequence Number=SeqID_7452
MWHGALGDLRKKMTRGLLNFALTTRIRSIDGMHGSSDSDGRSRLKRCIPLRRLKPGPPDVYPWALVRSWHGALWPADPRSGSPHCAPQRGYESSEDHRGTWNLKSQASCALDHFYLPNDVPVNHYDLHSLLFVVHDKIIMLIGTWSDHPGKQCYHKGECKTGISAVLMVMSGSDPHMSNLWN

SEQ ID NO: 50828 - protein, 79 aa, Zea mays
  Coding DNA Sequence Number=SeqID_7453
MAGPAPLEGPTRHHHGEAKDARVLLDEGSPEQRLYVSELSKVVSTTQPSVIMRVKVDVLLLPTSLDEQQAPALSNARVR

SEQ ID NO: 50829 - protein, 138 aa, Zea mays
  Coding DNA Sequence Number=SeqID_7454
MKKTLEDLRAEHRIGVQRIAAWVDEANSALVPLGVSPIPVSKQSVSISDVLPVLDSAADRLRCLDQILGARLEAEGSRLCRAVIEYVLTCFRSYDPAISLGLVIAGPVADTEDAPPGSVQDTVDVVAKRFQRDPADDE

SEQ ID NO: 50830 - protein, 116 aa, Zea mays
  Coding DNA Sequence Number=SeqID_7455
  Subcellular localization annotation: CTP_CleavageSite=8; ConfidenceScore=5.07e-01
MAALAGPPAPTGASSSTCPPWIGLEPCFATPFVSCTRPCWRLGWPADPKTQGWIVQLHAGKTRFCHKAADRPHRRREPAKWNNPKDNSDISPGNIIEPTMEGLSTEEFQKLEDIRK

SEQ ID NO: 50831 - protein, 126 aa, Zea mays
  Coding DNA Sequence Number=SeqID_7456
  Gene Ontology: Mol. function=transferase activity
  Homolog annotation: Hit_ID=A7P2T8; Match level="QueryCoverage=41%, HitCoverage=16%, E-value=1e-10, Identity=59%"; Hit description =Chromosome chr1 scaffold_5, whole genome shotgun sequence
MVVKNESSEIIQMLNAKFNDIATNLGLDLYLVHLRASIDKVNELVYDAISNSVLTSYTSTLGRSSTSMTGLNMNYRAGNMFKLHACAVCQLDMKPGESISVQVCIFCDDWALGLFWLTIAAVQIKS

SEQ ID NO: 50832 - protein, 151 aa, Zea mays
  Coding DNA Sequence Number=SeqID_7457
  Gene Ontology: Mol. function=carboxyl- or carbamoyltransferase activity; Cellular component=ornithine carbamoyltransferase complex; Biological process=amino acid metabolic process
  Homolog annotation: Hit_ID=Q8SA97; Match level="QueryCoverage=100%, HitCoverage=24%, E-value=2e-11, Identity=37%"; Hit description =Ornithine carbamoyltransferase
MAPPVDVVGPCPRLGDVEAPPRSRSSLSSEAEVESEPLGRARRRPSAEARAESEPWGRAKRSSSSSGAEPESEPWGRAEWSSSSSGAEPDSRSGAGGTVLLSGRSVERRSDCGHFGFVDWRTCVRIKLCADGGYQLRIRNLEGTPNYGPRQ

SEQ ID NO: 50833 - protein, 349 aa, Zea mays
  Coding DNA Sequence Number=SeqID_7458
  Gene Ontology: Mol. function=pyridoxal phosphate binding; Cellular component=ribonucleoprotein complex; Biological process=amino acid metabolic process
  Homolog annotation: Hit_ID=Q9M835; Match level="QueryCoverage=34%, HitCoverage=28%, E-value=1e-27, Identity=58%"; Hit description=L -allo-threonine aldolase, putative
  Pfam annotation: Domain name=Beta_elim_lyase; Domain location=52-278; Score=-41.0; E_value=7.2e-08; Accession=PF01212.12; Description=Beta -eliminating lyase
  Pfam annotation: Domain name=Ribosomal_S4e; Domain location=246-322; Score=66.8; E_value=7.2e-17; Accession=PF00900.11; Description =Ribosomal family S4e
  Pfam module annotation: Pfam domain module=Beta_elim_lyase::Ribosomal_ S4e; Domain location=52-278::246-322
  Subcellular localization annotation: CTP_CleavageSite=28; ConfidenceScore=5.04e-01
MLAVLPSLVLTSAPCVGWPVAPALGLSSANSAPSIPARILLIGPAQIILMPDRGTTATAMKPHRVAPALDVFDGISQHVPTRSAALLPSTLCLALHQCDEMSERIDDMRPEFDSARLFDVYFTHCDLVDDVFTVSYMAERIVGQGSFGIVFHALGVLVDRLVKAADSVLVCLSKGLGAPVGSVIVGLKAFIDKARILRKTLGGGMRQVGVLCAAAHVAVRDTVGKLADDHKNAKALAVWVLKLLCLVGFIFLEGLKKIEQITVDSASVETNMFKLCKVRSVLFGQKGIPYLNTYDGRTMRYPDPLIKANDTIKIDLETNKIMDFIKLYLPFHGLHQVIYLVRLNVSTNS

SEQ ID NO: 50834 - protein, 72 aa, Zea mays
  Coding DNA Sequence Number=SeqID_7459
MDVLMIRNLGEDQQGLAKGLGVEEEQQGRHNRKEIKSDSAATPSRELALVARSITQHTIDNQRRSGAAIAGF

SEQ ID NO: 50835 - protein, 101 aa, Zea mays
  Coding DNA Sequence Number=SeqID_7460
MRRSANLLPMCVGGCHCPRSCSSAGKVSHVGVMILLVETSELSFEPAIEGRFDRSICVFPSGVAKKYVDAFFGRQALNKNQWQCSLHRRGRSRPGAEWSAA

SEQ ID NO: 50836 - protein, 202 aa, Zea mays
  Coding DNA Sequence Number=SeqID_7461
  Gene Ontology: Mol. function=cysteine-type peptidase activity; Biological process=proteolysis
  Homolog annotation: Hit_ID=A2ZTT4; Match level="QueryCoverage=52%, HitCoverage=25%, E-value=9e-11, Identity=34%"; Hit description =Putative uncharacterized protein
MELLEIRSKEPSLHVLLLARNPDKGRLQFHCVEKHIHNCQHSHGATGQLDTPKKRSAGPARVLSAYIHSIRDEEYILHREGGKVFLESTFISSLLKRDGDPKILLNFKEDTLENRVDNYLQADIVFIPINIENFHWYLAIVNAKKMRVSCGLWMVNYMEYWTGSSLSNNITQNDITKFRFKLPTILWNSRLHTKKGHQETDH

SEQ ID NO: 50837 - protein, 102 aa, Zea mays
  Coding DNA Sequence Number=SeqID_7462
  Gene Ontology: Mol. function=carboxyl- or carbamoyltransferase activity; Cellular component=ornithine carbamoyltransferase complex; Biological process=amino acid metabolic process
  Homolog annotation: Hit_ID=Q8SA97; Match level="QueryCoverage=79%, HitCoverage=19%, E-value=9e-09, Identity=39%"; Hit description =Ornithine carbamoyltransferase
MALPVEVAGLCPRSGDVEAPPKPRSKTWAESKPWGRAKRSSSSSGAEPESEPWVGRSGVRRLPGLSPSPSPGSGGAEFAVFRGLARVRALGRAERSSPSSGA

SEQ ID NO: 50838 - protein, 238 aa, Zea mays
  Coding DNA Sequence Number=SeqID_7463
  Homolog annotation: Hit_ID=A3AQ03; Match level="QueryCoverage=28%, HitCoverage=42%, E-value=1e-07, Identity=46%"; Hit description =Putative uncharacterized protein
MEGRSAKIHRTVWCTPDCPVRQQSNGYFAPTVDSDSVQYTQQESEQRIRGAPGLSGATPDCPVPHEDKASNGRPAPTPTDRMTWLAHQTLSGTNDDSYQKLKEENERLKMSLTQLKGKCIAQPSQDNRDHMVKKLEMGTTVACTKTLEENVKDLRIAKRKKQKMKFNTSSKSLNHASTKAPSSINTEVGLPEPRQLLGSLLPDGVPPGSEIQAPPATFATPCSRADRPAIRQETLALR

SEQ ID NO: 50839 - protein, 99 aa, Zea mays
  Coding DNA Sequence Number=SeqID_7464
MVQCSIVDQIGRGRKISPPVTPRRDSCHWRQDSNSWWMDNVARKRISAAENEEEIEVTEEKTPPPSESEAGNCFYFDICGSELDSPTNEGKPRCICHLP

SEQ ID NO: 50840 - protein, 261 aa, Zea mays
  Coding DNA Sequence Number=SeqID_7465
  Subcellular localization annotation: CTP_CleavageSite=27; ConfidenceScore=5.02e-01
MMENFGSKTVQIAMNAVVTSQLLVSLYSAAVDRKDQTVTLQGGTDTRSEVGSFLRNELREGVFWTFGFPKLKRLFSRVKLVTKNDLAPRKGLLLGSCFGAPKVSHEEAASAEVVSKRWPKMAHLRHTARKSVIPFLPSRLAERPLRRPVTAGDRVYEELLPCAPLEAPPAPPLSAPTARVAAGGDPDNGGGDDSSSHVSDFSADQEPEGWVARPITRDAARGCHFHDALDTLLHRKLDRRTWSIEYRCVVFQHSRGVYPNH

SEQ ID NO: 50841 - protein, 105 aa, Zea mays
  Coding DNA Sequence Number=SeqID_7466
MSGSRWRRSSRCPAVTPESPVNYSGAAVANSRGCQVPEPRPLGAPDTVRCTPDSPVNYSAPALKIPEAEEFSAKSPGAPDTVRWHTGQSGAPYQGAFREAFSSLL

SEQ ID NO: 50842 - protein, 262 aa, Zea mays
  Coding DNA Sequence Number=SeqID_7467
  Gene Ontology: Mol. function=nucleotide binding; Cellular component =plasma membrane; Biological process=small GTPase mediated signal transduction
  Homolog annotation: Hit_ID=Q9XEN4; Match level="QueryCoverage=74%, HitCoverage=93%, E-value=2e-92, Identity=87%"; Hit description=Small GTP-binding protein
  Pfam annotation: Domain name=Arf; Domain location=1-173; Score=-60.7; E_value=6.6e-05; Accession=PF00025.12; Description=ADP-ribosylation factor family
  Pfam annotation: Domain name=GTP_EFTU; Domain location=8-175; Score= -68.4; E_value=0.0047; Accession=PF00009.18; Description=Elongation factor Tu GTP binding domain
  Pfam annotation: Domain name=MMR_HSR1; Domain location=13-128; Score=- 10.7; E_value=0.01; Accession=PF01926.14; Description=GTPase of unknown function
  Pfam annotation: Domain name=Miro; Domain location=14-128; Score =81.9; E_value=2.1e-21; Accession=PF08477.4; Description=Miro-like protein
  Pfam annotation: Domain name=Ras; Domain location=14-175; Score =318.1; E_value=1.6e-92; Accession=PF00071.13; Description=Ras family
  Pfam annotation: Domain name=cobW; Domain location=13-153; Score= -79.8; E_value=0.1; Accession=PF02492.10; Description=Cobalamin synthesis proteinP47K
  Pfam module annotation: Pfam domain module=Arf::GTP_EFTU::MMR _HSR1::Miro::Ras::cobW; Domain location=1-173::8-175::13-128::14 -128::14-175::13-153
MAATAGGNKIRNAKLVLLGDVGAGKSSLVLRFVKGQFVEFQESTIGAAFFSQTLAVNDETVKFEIWDTAGQERYHSLAPMYYRGAAAAIVVYDITNAASFTRAKKWVQELQAQGNSNTIVALAGNKADLLDTRQVSADEAKAYAQENGLFFMETSAKTATNVNDVFYEIAKKLLQGQQVQNPQGGMVLNQRPPERMVSRCNSFISLMISGVNPNDNVQMCISLMYRIWIHIWLYPKSVMRMRYINGGIIQAVAHAADLIQNE

SEQ ID NO: 50843 - protein, 222 aa, Zea mays
  Coding DNA Sequence Number=SeqID_7468
  Subcellular localization annotation: CTP_CleavageSite=73; ConfidenceScore=5.78e-01
MAPAPPGSAASAQSAARALAMACSRSAPSSPVLSSCPHGPRPGARPACLVRGRGDPARRAPAPGVARPLPSSRGAARHVRLGPACVHGARREACPARMPFARCDPYAMWGAPGVLARPQLTCGSPCDLLVAACVARGSPSAACLQQWLARVRSSGQLARVRSSGQLARVRSGGPLPRPARSRSLFVRARSSARRDLGHTRGSFNLPDYARHAIDVVQILILV

SEQ ID NO: 50844 - protein, 138 aa, Zea mays
  Coding DNA Sequence Number=SeqID_7469
MGTHIQETTLGARRRPAPDFCQDSYACDLGELLNKGRRTLPRVRRALSAPEHAQRPTPRAPRRAEPRSCLLLALAPIKPTEASTVLPRVLSTSPEPEITDVCPANGVPAATRSLATVDRPAEPFPATPDPRKRPCMPR

SEQ ID NO: 50845 - protein, 242 aa, Zea mays
  Coding DNA Sequence Number=SeqID_7470
MTKVMLAESVQDSKNGSEFTGGMAPPVFDEMPPTTVRMSLPFQGALEVLRLAHGVGNQMPNDCKQNVVPDAPWLFVEMSQQVSTYSMSSEMGLTVAWDGEMQAETHTHEGLLQQLAQGEEALKESSKKEGDVEDEASRPDPPSEATAVVMNGGNRDEFIPASVVSVLEDDPKEQDAKNVDATSADGILSQELAPKSINETNGAGEIVGVARVDDHEEEVVGSDILEAMTDEVDEEEGCFEGC

SEQ ID NO: 50846 - protein, 108 aa, Zea mays
  Coding DNA Sequence Number=SeqID_7471
MGRRDHEALYLFSGAQVVADTAAKTPPEHHGPGELAKSVEPRRFCWERIADRRDPQRSEEERGERFTERGQASPGKWVPRRSGSARRGARETDRWVVRFSNVSIGIQR

SEQ ID NO: 50847 - protein, 24 aa, Zea mays
  Coding DNA Sequence Number=SeqID_7472
EEFPEMPAQPGLQYVAFMHQILTN

SEQ ID NO: 50848 - protein, 138 aa, Zea mays
  Coding DNA Sequence Number=SeqID_7473
  Homolog annotation: Hit_ID=Q6QP51; Match level="QueryCoverage=60%, HitCoverage=37%, E-value=3e-32, Identity=84%"; Hit description =Putative growth-regulating factor 1
MTAPRIARPVALTPRQGKRHLWQAKRASFRLHHDDCVKKATPEHSGSKPITDQGFEGWPLGRVRQLPQSTRAPRPLLIRGSKAGPSEGFDSIPRARRARDDSGYVRYMAEARAMLPRLGGCSRNPATAKTVDSVNKPA

SEQ ID NO: 50849 - protein, 401 aa, Zea mays
  Coding DNA Sequence Number=SeqID_7474
MGSTRLAFILLPLEERGLAGIGALQPSLGFKDFHHAARLHSLTNASRMFIIQAREGGAPRWGLPPRGPATRFFLQHSGERGILQLCGGGILQPCEGKANCCFLDRVQLFVLHPGDGRRPHWGVAQHVVRREGGTRVPGRSRSRSCGESGSEDLPVRFGAAATRWYGVGGQVAADVGAEVVVAIGEAASAEAVASADDTVSVTYAPGLWLFGFNGWFSSPVRGCERGPFSSSVSPEAIAAAVLPPEMEVVAALLVQRSPASHPKFVIPQALWCGGYSYPREWNQSPNIRSLCDELEPEAAVLAWIEAESARKEASSAQEQVASQAKEVQQRRLELGRSSASGTNPGVTLPRPRAGLRSSGDSWLRLWSGQPRIAYPSESYFSWKVMSEDSVIDIVEKTRKSF

SEQ ID NO: 50850 - protein, 184 aa, Zea mays
  Coding DNA Sequence Number=SeqID_7475
MAGKRLGVYFQKDQGLNQSFLQDTDHSYVDCGLFSGKHKGSLIKMRREGVSCAPDRPISNGALRLVLTYTEPVYCPRQTMEQRRAGDTSTTHDDGARHGIPGLQQGGCCNAALVGTQWLIHRSQGLREEGEVHGQGAMRKGNGGAVSAQQRSAGGGGASRSGFGFIVWRRDNLDRLNSGLRRDF

SEQ ID NO: 50851 - protein, 31 aa, Zea mays
  Coding DNA Sequence Number=SeqID_7476
MENHPRKQCYHKGGEEQVVEEEPHNEEFDLI

SEQ ID NO: 50852 - protein, 41 aa, Zea mays
  Coding DNA Sequence Number=SeqID_7477
MAFSKWEQYQASLRCQWGQPDECGVSVESPVERTELGVVLL

SEQ ID NO: 50853 - protein, 125 aa, Zea mays
  Coding DNA Sequence Number=SeqID_7478
MKDANITDGDALIDEMEVDLDMICPLVLDEIGGEKNYNDIVAETTCCRFDDQETRTSSSINGDAFADEMEVDLDMLCLLVLDEGEGGRGGCDGQQTRARAGRVAGIEDEGQDSHPGPNGGWTGYG

SEQ ID NO: 50854 - protein, 481 aa, Zea mays
  Coding DNA Sequence Number=SeqID_7479
MGGTRVAFVLLLLEDRDLAGAGPFSHRSASRIFIMQPGCIPSPMVIQDDDHQFGGGEKQAGLRPLPRPQLQGSSSSVLGRRAGQVGLSVLHPGDGRRLHQGVAQHVVCREGGTRVPGRSRSRSCGERGSEDLPVRFGAAAIRWCSAGAQVAAVVGAEVVVARGGFSADETVGATRGQTSGSLALMACPRPSSGGVGEGLLTAVFALRSSLLLFSRPRRRSLSLLVRWSSASHLEFVVPQNLRLLCDKLEPEAAVSAWTEAELARKETSSAQEQVASQAEEVQRRWLGLGQVIRERDQPRSHAAEAVSRAEVLGGQLAEATERPMETRAVRAQARCWRPPSRWRSFRPCCRPRPGQIPPKVETTPRVLLLPLPMSEPAGTVCLKIAYPSESYFSRKVMSEDSVIDIVVKARKSFWQKSFRALGLVLQQNPSFEHELLFAEDLALIVGQLVCSGLQNLGDDERPFPGRSKLVAPSGVLPQPKY

SEQ ID NO: 50855 - protein, 159 aa, Zea mays
  Coding DNA Sequence Number=SeqID_7480
  Pfam annotation: Domain name=IQ; Domain location=48-68; Score=27.3; E_ value=5.6e-05; Accession=PF00612.18; Description=IQ calmodulin -binding motif
MGDLWTNVRADLAKMQATLQKVEQGLLQIKVAVQHEQHRLALSARLQTSAAVGIQAAARGFLARRRAREMRRQMLEAALVTVDLGTRGRDLTLSDGHQQRHRAAISKCEHGQVDSVFEHSSCCSSRTSCLSRRGVVSGPKEAHGGAAVAAAMDPLRRIR

SEQ ID NO: 50856 - protein, 49 aa, Zea mays
  Coding DNA Sequence Number=SeqID_7481
MAQAEAAFSADDTKDPSAEATLMGGKFYNDVWVTVVVAVEAEAKKPVNG

SEQ ID NO: 50857 - protein, 583 aa, Zea mays
  Coding DNA Sequence Number=SeqID_7482
  Gene Ontology: Mol. function=hydrolase activity
  Homolog annotation: Hit_ID=Q8S9P9; Match level="QueryCoverage=9%, HitCoverage=14%, E-value=6e-15, Identity=77%"; Hit description =Purple acid phosphatase-like
MGGGGGRLLGRGGFSLCGGGGGTSRVGATRVPWMEYARWGRRGFEDGKERGGRDVRESLQPGCEETAVEDGKERHRRKPQLLDLRMGRSAAGGRDVKEPLRAGCEETAVERRRWGGGWQNCAPLVVDAYSVHSQPWCTFCRIQSVQPASNAPAASRVPPALVPAAAPAIPFPRMAFLPQPPQPRDPACQAWRRHDRCPRRLSRPAGVPLYMEGEPPAPKSTESQPVHPHLSRSTWKARPRQSRSICSLKAGAPLSPTLALYMEGVAGVQIDGITARGRRPRSTLSPALVVYIEGGVHIVHHVLPPSPVNQARPRRESRRECRPPPSDSKREASPDQERAKPDAPRTTPSKPSSESAMRKSWRSLAFALLAATLAITVAALRPVTEHADAKGRPPLCVQSGPVRGPAYAWTDWGPAQDAASDRVMAAVLDAENPDLVVYLGDLVTAYNLLVPNASPRPGRAVGDGDSPDGPRGGGDRRESVAVLLVQRAQGVVALRGASRRRTDHASCRSVGRTAFSGRMTAPGRTRSTWLSSRISAGFSSASMMASTAPEAPDFLVANLYRFLLRELRGIFYKEADPKSKRLC

SEQ ID NO: 50858 - protein, 371 aa, Zea mays
  Coding DNA Sequence Number=SeqID_7483
  Gene Ontology: Mol. function=aspartic-type endopeptidase activity; Biological process=DNA integration
  Homolog annotation: Hit_ID=Q94GR9; Match level="QueryCoverage=85%, HitCoverage=16%, E-value=4e-10, Identity=24%"; Hit description =Putative gag-pol polyprotein
  Pfam annotation: Domain name=zf-CCHC; Domain location=286-303; Score =28.0; E_value=3.4e-05; Accession=PF00098.14; Description=Zinc knuckle
MAKGERKVQIDNDIIDDSDSDSDDEFASPSYDELADLLKEYTQIIRKSKAKCDKLKDENEFLNAKYDIVVKASDEMKEENKTMSSTVNELKSSLKDAKDKCYKLNEANRELKDRLIKIKEGYTKIKIDHDNLLVANELLSCNTHEAIIPVVKIDVATSCDDLSQDDQTSLHDELTEKVEALTLDNQKLKRYLTDATTRGKVAIENNDFNNELAVDNERLRNEVKKLKSENEHLPTSAQKFNKGQYLQNELLMNNVMKNNKSGIGYNSFVQKKATNQYKPKQTHKPIKCFECGKEGHFAHNCKAKPPTPLPKHSRPFAFNAHYFLIKLANGKVKVTFLGPPSKSRPRQIWVAKSLIEKVTGPMQNRALKIQA

SEQ ID NO: 50859 - protein, 255 aa, Zea mays
  Coding DNA Sequence Number=SeqID_7484
MVMILVILKARGLLHIHHLHDWSIKEGTIHVHLKRLKRMTWHQALDFISLEVVELFLHDHHPIRILQCLFYPKKLNRRDKGLVLTKISNTRSSRYYLADVTKDLVHRMISLYGGTNFGWRCLWYLFFLLVFLFMCSFLIHVKASRPLRQMTAWWRLELGDHLGDLVGDLARDCPRKNDLTIYWALGPFVRSFTLPVDPGDICPPQAPDLWVDFEVISPKIPGPACRTLNFIGCTGGAPEVHPMGVAPELRVDFGK

SEQ ID NO: 50860 - protein, 146 aa, Zea mays
  Coding DNA Sequence Number=SeqID_7485
MGKNNKRKREPTPPSEGFGDSEYSEEEFSSEFEGSPAPIPLRESFDDSDDSQGLAAEGWTYIRAVERSGLEGSDESEYSSDEEDSSEEDGGGDGGDDDDDDEGGGGGDGDGGGRCSNGGGKGDDGGSSRGGSGGGGSSKGSNKASG

SEQ ID NO: 50861 - protein, 163 aa, Zea mays
  Coding DNA Sequence Number=SeqID_7486
  Subcellular localization annotation: CTP_CleavageSite=38; ConfidenceScore=5.54e-01
MARTRAYKAHSGVDHTSPRTLKPHRSSTHRRLPVHGVSAGHPSPCRRRPASPAFPNPVQPSETSEHTSVKLPEQGIEVCFAGEASPRSPEFTTPPECVDRVKKNRKDCNLADGEYILVPEQGAAQEVAPDPAPEPAPEDLPATALEGKPRFMHNLLFMLFYYT

SEQ ID NO: 50862 - protein, 193 aa, Zea mays
  Coding DNA Sequence Number=SeqID_7487
MNKTPALKVPLQMELRFHLRRYEQPHTIGGPAEQQKADGWLAAARSNSDGDDFCSEGPNSSSDDLRADAAAIRPSPTPSLERQGRAEGRRVGGQSAGGTDYLVGRETSSGYRGGRWHRKRRRRHPDRRAGHAAGASATNGERPPPRSLREGADRCPRGDRPQLGALPSPALMMNILEAEGGAETAAQLASPHP

SEQ ID NO: 50863 - protein, 67 aa, Zea mays
  Coding DNA Sequence Number=SeqID_7488
MTKVKACRRWSSEFTGAELSPPPEPHDLETDPSVKEALDMIKIANEAMDEAVDKLLNEVADKVLKQD

SEQ ID NO: 50864 - protein, 42 aa, Zea mays
  Coding DNA Sequence Number=SeqID_7489
MSGNMVTGPLHDMVDGVTWPSTLPPGWTVEWDAASTGEDQEE

SEQ ID NO: 50865 - protein, 355 aa, Zea mays
  Coding DNA Sequence Number=SeqID_7490
  Homolog annotation: Hit_ID=Q6QP51; Match level="QueryCoverage=50%, HitCoverage=79%, E-value=7e-07, Identity=32%"; Hit description =Putative growth-regulating factor 1
MQSACNRAKWAHPFDSNALSMEAQSHTSCNRRADCYMRATAPPLAPLPRLLDCGTSTVTRGNPAYDPKVLARRIGHRPGPGKGIPQKGSFSAKETGPEPPLLIRGSKAGPSEGFNSRLRALGLRAHYWSEVRGPAPRKGSTAASGHSGSAPTTDQGFIGWPSKDSGSAPEDDELCIDRPQGSDSGSAPEDDELRFARAQGSNSGSAPEDDKLRFARPQGSDSALASADGLRLARPRGSDSTSALEDRLDLDLGGASTSPNPGLGPTTSQEAPSLPYPKQTQVTGNKTGVPSGWAPRSSDGHDTTRTGCQNLSGCHDGMALLQKVGRAGKDGTALADPPGSKRRQIRNQFSREVIR

SEQ ID NO: 50866 - protein, 101 aa, Zea mays
  Coding DNA Sequence Number=SeqID_7491
MRNRARPSPLLLLLLSCWSSIPLDRPTRWQGGRPSHTINHILKRTCKNYATSKAEYTNTHLDLPGYKGSSSLISCEKQTIRIEFLNLASLKIYASSRGHPQ

SEQ ID NO: 50867 - protein, 140 aa, Zea mays
  Coding DNA Sequence Number=SeqID_7492
  Subcellular localization annotation: CTP_CleavageSite=68; ConfidenceScore=5.22e-01
MAGVGLATCAGGRARRRLVLRPTHDDRVQLNSTRSFTRGQGCCRRKESTNGLQCSSVYVRRRPVEVRRCQSGVSGEVLFGLGASGGVCVAEPPKLFGPHAPDLVSKTSDGYARAPDKITGSVRVSQGPRINHLQSRRKIK

SEQ ID NO: 50868 - protein, 38 aa, Zea mays
  Coding DNA Sequence Number=SeqID_7493
MAWVRREIHRNRVMKKDSCNVCQVFDGLLDLGFIVIRV

SEQ ID NO: 50869 - protein, 214 aa, Zea mays
  Coding DNA Sequence Number=SeqID_7494
MGYSRNCGGINTIEEQSHRRDIATMVPQRNHGSSENPDDNHVGKEVILYSMMRSEVPVAIENIISTDPTTKVGDIPLGREEQVTLRFHSTRCSCSRSTGADDTIESTALHVLMTFFGFHPLELSTHPIGLFPAEKEDDPMWKDRVEHAKDVWALYPGNTAHLTVRCMSALYRLQALRGEVMSKLMGLVESTKITLDNREDLVVDLSTELVEKDV

SEQ ID NO: 50870 - protein, 78 aa, Zea mays
  Coding DNA Sequence Number=SeqID_7495
KHLRLRSRTRPTLTIPDGDPHIAHDPRDLPYVLDHLTRSSLAAGALQDMVDGVTWPTTLPPGWTVEWDAAPAGEEQEE

SEQ ID NO: 50871 - protein, 75 aa, Zea mays
  Coding DNA Sequence Number=SeqID_7496
MDGARHATQEKQRPSLARLERRAKKAPAMAREKLGAAGLGAVLEMAEKECLCAMGGRGGSWEATRKIRTTSGKLA

SEQ ID NO: 50872 - protein, 36 aa, Zea mays
  Coding DNA Sequence Number=SeqID_7497
MGSRDPRAERESRLMGKEEGVEADLQGFQDFDEFED

SEQ ID NO: 50873 - protein, 248 aa, Zea mays
  Coding DNA Sequence Number=SeqID_7498
AAEEERGGGAYRQRGCSGEVVEDVGEVLRITAMCGSPSGMVGVGWTTCTGGDARRRRGVWPNQGAIGQLNGSESFTRCWGRRGCKTLEDDLLKLHGFTGKRSRGWGKAGVQQKGLATTVVIEKIPLPVPLFLARPVGAEPRQLSTHALASSPAAPRRARACPCSLTHSALSPSLVPGTASRLALAAASPTARHGPLHCCLPHAPCSCGSANATTIARAGRSATEPLELDSPAPWPAWRALVPAGRGLT

SEQ ID NO: 50874 - protein, 129 aa, Zea mays
  Coding DNA Sequence Number=SeqID_7499
MAGLFYRIARVYLQKAHGEGVSWIQGHWINIRGHRLDRISAEPISGGTGTEQTRSRPRRGEEGPARGGLRAMVNRGRIKTTTAVATSVALSHGGMSTGPHRRRRADQRRPGVQSYSPEAVRIQGHDVEE

SEQ ID NO: 50875 - protein, 67 aa, Zea mays
  Coding DNA Sequence Number=SeqID_7500
MQESLAGPPSQQNPPEGLPTLTTPLLPLPLSENTGAILEDSPDSVDPKLDGGFILQNSKGLFAKSAR

SEQ ID NO: 50876 - protein, 24 aa, Zea mays
  Coding DNA Sequence Number=SeqID_7501
MAHHGRMDEGEVDFIPRISGLGNL

SEQ ID NO: 50877 - protein, 239 aa, Zea mays
  Coding DNA Sequence Number=SeqID_7502
STNGPISRWRGEAARHSEALCTRASATRTTTAAAALRAGRGSDDGDGEAEGEVEARRGGVGEKLGEKHGFDRFWRRRERLLHWELAQAVQGRCTVGDLAPWHAGPSEQAAVDAEPPMRGARDRARWAHHSWATRAGAGWGRGGRALGRHERAFAGWAGQAAGLGAGPHSRGPRKGGGGAGSSGGEREKGTGIIFSFLGCFFLRVVTLSDFAHSDGVPPDTSSIATRGTRCALPTDFLVG

SEQ ID NO: 50878 - protein, 207 aa, Zea mays
  Coding DNA Sequence Number=SeqID_7503
MTLPPRLRRRWSLGGSPPLHLSQRCPPTPTQGIPAAGGDPDRDGDDDDGGSSSHNKELSEEQEPEGWIARPITRDAAHGCHFHDALDTLLRQAFNLHTWPIKVADGLDLKYYPRRSTGSAGGLIVSLFGEGNHKLGSMVNLVVVLNTKLDHALDELDKAQVEIVELRVERAARHHQEGGSPASIEIHHPYHSPPRGRYAYGTPDCRT

SEQ ID NO: 50879 - protein, 327 aa, Zea mays
  Coding DNA Sequence Number=SeqID_7504
MAPPNSVAKFHRRRGHDHSEGLGHWERAQASTGHDIGPEAPEGTAYDGGARRRRSSTPASDCADNRAANGKLREWGVCSPREGTLERLSNDEDAGRPWVDGGEAPAARCGFGECEPRELGELGANQRVSRVAEKGSGAWRSGQETSVMGASTAESASGRLRKGRWLTGTKGSYLANEKNKNWVQQRSKGITKRRSAIIHRTVRCSKVERLWNSPASGICSAIIHRTCPVYTGLSGEPAEQRLLRANGHLQAHLMRARSAQKSGTRETVHRTIYSTCPVYTGQPGGPRSQKLQRSNPNSMVTWLAHRTCLVCTELSGAPYDSQPPPNG

SEQ ID NO: 50880 - protein, 259 aa, Zea mays
  Coding DNA Sequence Number=SeqID_7505
MESHDLRAERESRLVGGYEIDGFGHDYGAGKWYSFRLERMARLRHTARKSVIPFLPSRLAERPLRRPVAGQSSHLERLHHRLHEEQERRRQEQQGSSFSLQQEIESVRSCSPVLPLEAPPAPPLGAPASGVASGGDPDDGDGDDSSSHDTDLSANHEPEGWVARPTTPTSMMRSTPCYVGHLTGILGPSSIAVWSTSTVAGSTRTAGRQPAWCATRRIVSRVRRPAQSTILSLSGTQLRQPCKMLHGVRFRTTARFSVG

SEQ ID NO: 50881 - protein, 191 aa, Zea mays
  Coding DNA Sequence Number=SeqID_7506
  Homolog annotation: Hit_ID=Q8W1D4; Match level="QueryCoverage=18%, HitCoverage=9%, E-value=4e-08, Identity=85%"; Hit description =Cinful1 polyprotein
MAPPRVEDSMAQLVAKIDDGNKDMSRRMEAIQATMEKMESTVQGLVVDRKEGGRDGGRAESDAAPDEQDNIEGYHDSTIYNVGRGTRGMVASTTSTTNMAYMETATGPTLHHTADPFRRPIHEPEIHHNSFLMGAFENKSPTLVPTSSELTSTFELMASFNNQDEVASATKLVLPITGGSCSEPANKKQKK

SEQ ID NO: 50882 - protein, 202 aa, Zea mays
  Coding DNA Sequence Number=SeqID_7507
MHQPCFLQYLLLILVPLLLSASAYDRSGEFTFDGFSGNGLITMDVAASVTNGLLSLTSGQKELRGHLAEREVGCVSLADGGAEARGARAASGEAHPSLERDERGERVALQLDRAAVPPFPADGAHVPLQHQHLEPLPPGGEREGQAADAAAGHQDMRLGLHQDEPHAGGREASPTPQLRPRPRREDGALGCRGRQGGAGSSC

SEQ ID NO: 50883 - protein, 350 aa, Zea mays
  Coding DNA Sequence Number=SeqID_7508
  Gene Ontology: Mol. function=ATP-dependent helicase activity; Cellular component=intracellular; Biological process=dosage compensation complex assembly during dosage compensation by hyperactivation of X chromosome
  Homolog annotation: Hit_ID=Q9FW67; Match level="QueryCoverage=58%, HitCoverage=26%, E-value=3e-69, Identity=64%"; Hit description =Putative ATP-dependent RNA helicase
  Pfam annotation: Domain name=Helicase_C; Domain location=182-250; Score=12.4; E_value=0.0037; Accession=PF00271.22; Description =Helicase conserved C-terminal domain
MVGMDRHQVKLCISCQFNAIAARTSRLVFSKCSSLCISVYKLQVQEPDLIGVSHLLVDEIHERGMNEDFLIIISRDLLPRRPDLRLVLMSATINAELFFKYFGDAPVMHIPDIDITKEYGNYSSSTRQSLEAWSAAELDLSLVESTIEYICRYEAEGAILVFLTGWDEISKLLDKIKGNNFLGSPNRFLVLPLHGSMPIVNQREFFDRPPANMRKIVLATNIAESSITIDDVVYVIDCALADPRRTHKFDGHVAPSNLTVRTWVPSNLGEKIRRAPSNLKTHILTVKFDGTHVLNVKFDGTHVLNVKFDGTHVLTSLSSSKNRHRLYSLVNPRSYGYDQRQWGLKWAAVS

SEQ ID NO: 50884 - protein, 337 aa, Zea mays
  Coding DNA Sequence Number=SeqID_7509
  Gene Ontology: Mol. function=carboxyl- or carbamoyltransferase activity; Cellular component=ornithine carbamoyltransferase complex; Biological process=amino acid metabolic process
  Homolog annotation: Hit_ID=Q8SA97; Match level="QueryCoverage=23%, HitCoverage=21%, E-value=2e-17, Identity=51%"; Hit description =Ornithine carbamoyltransferase
MAPPVDVAGLRPRLGDVEAPPKPRSSLSSVAEVGAEPESELWVGQSGVRRLPGLSPSPSPGSGGAEFAVFRDLARVRALGRGGAEFAVFRDLARVRALGRAEFAVFRDLARVRALGRAEFAVFRDLARVRALGRAEFAVFRDLARVRALGRAKRSFLWYLWPGPDCLSVSLCQVAPQSEWRRRRCPSVRPLCADGGYQLRIRSLEGTPNYGPRQIQNDESYVNVYIVVLGNRTYASVVLDRHTSYVTHVSMAEDHRQMYEGWKKREDLFSELVAKTNGFSTLLLTICSDILSKVKLLFALVVLASNNKKAKIEREMGLKPFLYVFLCLMTTTMYIMN

SEQ ID NO: 50885 - protein, 324 aa, Zea mays
  Coding DNA Sequence Number=SeqID_7510
  Gene Ontology: Mol. function=protein serine/threonine kinase activity; Cellular component=cytoplasm; Biological process=protein amino acid phosphorylation
  Homolog annotation: Hit_ID=Q7XDE4; Match level="QueryCoverage=84%, HitCoverage=64%, E-value=1e-131, Identity=75%"; Hit description =Casein kinase I, epsilon isoform, putative, expressed
  Pfam annotation: Domain name=Pkinase; Domain location=9-267; Score =105.5; E_value=1.6e-28; Accession=PF00069.16; Description=Protein kinase domain
  Pfam annotation: Domain name=Pkinase_Tyr; Domain location=9-267; Score=-141.6; E_value=0.00096; Accession=PF07714.8; Description =Protein tyrosine kinase
  Pfam module annotation: Pfam domain module=Pkinase::Pkinase_Tyr; Domain location=9-267::9-267
MERVIGGKYKLGRKIGSGSFGELYLGVNIQNGEEVGIKLEPVKTKHPQLHYESKVYMLLQGGITHFGNIDGIPHLKWYGVEGEYNVMVIDLLGPSLEDLFNSCHRNFSMKTVLMLADQLINRVEYMHSKGFIHRDIKPDNFLMGLGRKANQVYIIDYGLAKKYKDLHTHKHIPYRENKNLTGTARYASVNTHLGIEQSRRDDLESAGYLLLYFLRGSLPWQGLKAGTKKQKYDKISEKKMLTSAEINTVGYQFDYVFDWTVLKHPQIGSNNKLVQWDKRPGTDSRVLLRHSPEEIQALVAMEIIPGTKALQIPLAHPTKQSVLR

SEQ ID NO: 50886 - protein, 227 aa, Zea mays
  Coding DNA Sequence Number=SeqID_7511
MPLMKVYNIDSDLYGLKVVFPLVGWGKRYTLRFGESIFMAVLVKEAILEVIALQSRPSICRFASAAESNDPAKDVGLVTAFHSQKSSAWSSAAHFLLLVVMERRSRLRNVVLSREPEPPLSAAFRATGERVDDLLFSAPAEWWCLCTVDGRPLPPLLPETHRWFWSLQSPEEVGRLDEAAGIFDELPPQDKMCVFSESATWCMHTVTCPFSNIMHTDTTMVVSMVRS

SEQ ID NO: 50887 - protein, 188 aa, Zea mays
  Coding DNA Sequence Number=SeqID_7512
MVAATSRPKLVDMGMGQVGLAPDLSLCVQPRRTWWRLPRLGYLGNEESSGILLMSPLDAYVFIVSFSGNEQENNTIHPVPTTVPTTRVRLTTVSHDLSRVQPRAQQGASPRPTPGLGLGRRSPPRSTPGLGLSLGLGRRSPPRPTSASASGGVTTLPDLSLGLRRSHRLARPRPQTDYATRDTSLPYP

SEQ ID NO: 50888 - protein, 140 aa, Zea mays
  Coding DNA Sequence Number=SeqID_7513
  Subcellular localization annotation: CTP_CleavageSite=37; ConfidenceScore=5.32e-01
MAQPTVGSLRAVGAPDMSGAHRTVRCPLLAVGSTTCPAQIVRPTVGPADRWLTGQSGAHRTVRCTPDSPVNYSRTSPVNSREQPLRSSQPGAPDTVRCTTGQSGAPRLSKVLAVRAKAFSIGFFLFPALRHNTLVHKTMY

SEQ ID NO: 50889 - protein, 191 aa, Zea mays
  Coding DNA Sequence Number=SeqID_7514
MELIPRLLLPLIVKDEEGFRGIVGPKPERLSTPLIGIAPRGDEVAAPQDESRFCTPSSKASGPPAVDASGTPSAEEAGFQSPTSSSGTSAISASAVMGGSTGRTATASTEAGAGAGSTSGGLKAAAAPAVSPDTTTALIEGSAWGARPMATRAAWAPRLGASYAEVSQPAWHGAALAAEAGTILRAFLGAR

SEQ ID NO: 50890 - protein, 42 aa, Zea mays
  Coding DNA Sequence Number=SeqID_7515
MAGEIIRRSEKGIHDAREVAEAAEKSVEAEGFKICLRFVIAM

SEQ ID NO: 50891 - protein, 76 aa, Zea mays
  Coding DNA Sequence Number=SeqID_7516
MEEMTMKESQEVGTLGLVESQEVGTLWEMLAGLDHPKQRAQGNYISTWIYKTFMGTGHYKQAIKSWYRTSGDDDQR

SEQ ID NO: 50892 - protein, 42 aa, Zea mays
  Coding DNA Sequence Number=SeqID_7517
MVNGAVTGGEADACWRIPGVVNVAVSGGGVSYKSTRVGDRMV

SEQ ID NO: 50893 - protein, 128 aa, Zea mays
  Coding DNA Sequence Number=SeqID_7518
  Homolog annotation: Hit_ID=A2Y2W4; Match level="QueryCoverage=40%, HitCoverage=9%, E-value=4e-11, Identity=63%"; Hit description =Putative uncharacterized protein
MENMRYAEELVREFLVFRGFTSIEESTFSLEHPYKGATPLGPCKKSALYELVLRRSASSAAAASSLHSGKMSTLSEEDQQVLVTEEEFPEVKVDFQETFLGHNSPISRCRFSASGSNIASSSIDGTVR

SEQ ID NO: 50894 - protein, 232 aa, Zea mays
  Coding DNA Sequence Number=SeqID_7519
MTVGGGCLSYGAPDSPVYTGHVRGAAAANSRGCQVPESRPLGAPDTVRCTPDSPVNYSAPALENPEAEEFYARSPGAPDTVRWWCGPFALGSYFLPLWHESPKTESLEPFELLSPPLVINKWVKIIPKMKSFCFELSQKDGEMRGVMAKDELRSGRLCLRRRLQFPFNTPMTWFEIDLKNTLVIAYARDMFKGIQMSYVCNLAKEIARIKNIELMPKFVKSLFIKRLGKDIG

SEQ ID NO: 50895 - protein, 752 aa, Zea mays
  Coding DNA Sequence Number=SeqID_7520
  Gene Ontology: Cellular component=microtubule organizing center; Biological process=microtubule cytoskeleton organization and biogenesis
  Homolog annotation: Hit_ID=A5BDW9; Match level="QueryCoverage=43%, HitCoverage=31%, E-value=1e-62, Identity=39%"; Hit description =Putative uncharacterized protein
  Pfam annotation: Domain name=Spc97_Spc98; Domain location=62-672; Score=-202.1; E_value=0.012; Accession=PF04130.4; Description=Spc97 Spc98 family
MEAAASSLSTLLSTLRVNGPWTPPGTWESVIPESGAARVSHLGGRPRLQPIYELASVTDDALIHLALHALYGVKTSLDEIEELSALSSSNPADRTSNRVPNVWLRSSSTTSMGSILKSFRSTGLAVFFLCKFVHFYLFQSREMNCASREVHEHEDSGDKDTKQHQPYTLVNQAFAAAVNKVLEGYFCSLNTLLASIRLRRSVGQSGIASKISNGMSCDPTSEVTLLEVYLHTEELRRHVKSLGNICFPKFAGLTLCQEGLNTDANVEFENFPRGTDLLSYLYVHIRDADPVHYGLLKYLFIRSCEPYFNFIKSWIYRASVDDPYEEFLITQTENKGAQGISSDITDDFILFPLKVIAFDTASNFLHKRTDLVDASVSDAELFYGDSDAVLPCNMAADEKDDSSSNSQESSDKEDPLESSECSSYTSMDDTEVESSTACENLSSSMFSLYCTSTGEAKGSLVTSKLLSSQSSSVDHGINCAIPIECEKDDRLSCKHVLVHPQNTKHTAVPDGSELDYQYSQFSPFDRFMKRASCSFESMNSVGEFLYSDHKRSVGNAVYPLHSESGSTKLSNSKNYEKFVTINQPWNTSIPYNLSLNPILKNAACYHTESDMQQKSKNQSLASFDFESVMDPCEVYCARSPSLLVESVNGAATAGQPSTQPYEQPDCSTKLLQAQTRSQSSLTSSGEMSTGDSLQKNASGGAFWEISLLYNDKSKEKPAMDFSSQFDMPLDIVIDKCIIQEILLQYPFSFPNQ

SEQ ID NO: 50896 - protein, 329 aa, Zea mays
  Coding DNA Sequence Number=SeqID_7521
MDISLLGWSGARAAAQPGPVPWACTLHRPETNPDLGEFASRGLLTIFSDALVSNLDTLSMNYLHTSKGRGIAGSERLASGGDYISTDGGGHLCTNNSPAAAITSACTPLRKGPRPCIPTGGDNEAIKAKEPRVWWQVALTVSPAEATTSAVGSLTSGGDHISPTSGSDHLCTDGRRLPQHVRRAGGGTKATQAEEPDTRQLMAPQTAGPVYPEFAFFTGLANDLLPQMLEEEAGRQPTRKAEPPLGLPSSPARMMNILEAEGRGEAAARLASLHHKAGTQEQQSNRQSDSGPTCMLASSPEAGPGGTVDTLNQGYPLLQYEGAALVRHL

SEQ ID NO: 50897 - protein, 147 aa, Zea mays
  Coding DNA Sequence Number=SeqID_7522
MTHALATAPSSLVCAPPEFEQCLGRDPGRGSPIQRWYGKRERDLGRSNLGASFQIGRIMSLGFTCAKPPAVSDEQATVDPEVQQIEVAEQELIEGKLAYAWAMDVLMIRYLGEDQQGLGKGQGVEEEQQGWPQHEGDQVRLGCDFIS

SEQ ID NO: 50898 - protein, 18 aa, Zea mays
  Coding DNA Sequence Number=SeqID_7523
VKNRYRRMWHMEDAATSS

SEQ ID NO: 50899 - protein, 335 aa, Zea mays
  Coding DNA Sequence Number=SeqID_7524
MGRLEPRAEWESRLMGKVYNLCRVLETGISVVLTMARIRCTACKSVILFLPSRLAEHPLRRTVSGQSSHLERLHRRLHEEQERRRQEQEQEQQDSSPSPQQKVESERPPSPAPQPEMPPAPPQGIPAAGGDPDGDGDDDDAGGILSHGTELSEEPEPDGWIARPITHDTARGCHFHDALDTLLRRAFDRQTWSIEYRCVVYQHHRRLYPDQWEATCLYCSLFSGVADGLDLKYYPRRSTSSAGGVIVSPVGEGNPRLSSKVNLVVMLNTELDHALDELGKVRAEVAELRAECAARHYLDGGSPALVGIQHPYRSPPRGRFDYGTPDCRTRIDLDP

SEQ ID NO: 50900 - protein, 57 aa, Zea mays
  Coding DNA Sequence Number=SeqID_7525
MGSSSLRAEWESRLVGGYEIDGFGYDYGAGCQHCNHCSGEDEAVEGDFQEFQDYDEF

SEQ ID NO: 50901 - protein, 172 aa, Zea mays
  Coding DNA Sequence Number=SeqID_7526
MPSMGLGVCGSLCQVWFAPWGEVRDQWRVMISEQKGNHSLWVKCATSAECLKTDISAVLAVMSGQGSSSDQWYLIRDVRITGGNENDGFGIYSGDGKWYSFRLERVVRIATTAQEKIKSWKETCRSSKITTSSRCGLVATPSRLPVKATCIYVSFPHFDYCKDYVDVSDNMM

SEQ ID NO: 50902 - protein, 235 aa, Zea mays
  Coding DNA Sequence Number=SeqID_7527
FVDVYRELGARTAAFDALGQEVGLRFLEWLQEELGVLPMIMTGLMSFASLVTCEGAVNALSCEGCGHVEVFDQSNEGYKHEILQVEDPVLKRSAGALFDRMWGPHGRETMAHDQEVEDLGDLDSTLPEGTLPEASGVELAPPSDAGKSPSEIPAPTGASEDLPSAPAPMGEDALKAVVEPAVKDPAAVVGPSQESLDEGLDYFVALDVAGVETSLHVEGAIVWGWSVVVSEWSGM

SEQ ID NO: 50903 - protein, 71 aa, Zea mays
  Coding DNA Sequence Number=SeqID_7528
MALGPHAVHVVFYKEHETTKHLGAHGRSWPYQGHLHRAHHGVVGTLTFIQFRSGFELHGVGDLSEDATAAL

SEQ ID NO: 50904 - protein, 107 aa, Zea mays
  Coding DNA Sequence Number=SeqID_7529
  Subcellular localization annotation: CTP_CleavageSite=63; ConfidenceScore=5.04e-01
MGATGHCPVRQPRHPTARVLPVLTIGALSSCGIGQSGATPDRALCSLPLRQRVVSPLVDQTVRCHTGQSGKGLNPISLSDMEDDFGVGTKDVVDLLPLRTLSMVPSS

SEQ ID NO: 50905 - protein, 883 aa, Zea mays
  Coding DNA Sequence Number=SeqID_7530
MEVVELVPCARNKWGNWHEFWFYVAEGTVEDHPGLPVAEMCSHYYSAYLQFEVAEEDADEGALRCAADLSSGRDLVEEFVAYGVWPLAHGWALGEVCPRQMPSRGGMLVRSPAFALDLHSRDSAAFVHEAEDGAVRIVGRYVPKTEGQRSWDIRGSNDRLNRVFELNRLPYGGYPRQDDVDRRGKKPAAETRDNPAPAAAPSSKKRKLGIATGGLGVSDGFARELMRTCAAPGGRMSLPELQESSARMLKVTGGWWPKNVRIPRAAGEDFFTSRMVRDWRVFPYGRNIAAVVSAVMNKDRQGAAQKRQTVVRLPEARLKRSRGTAKAAAPSGSQPTLAAKSAAPGSSRVPEAVKTASAGGTKPAPAGAAKARELPPPGKRLADFAIEISLEDYLVGSGEGQLVAVPPAVATAAAAVVPRARGSAVSAGGEIPALTAVKDEAGAVSHRLKEALSQAADFADRMASGALTAVVSAEVERLRAQHADAVREKQRAEEWEERFNALQTRVERAEASTRTEAERTRKQLMDSYHELGARTADFEVPEQEPGLRCLEWLQEELLALPAIVEGFMSYASLVTCEGAMNALSREGCRHYEVFDQSDEDFEREIYKVEDPVVKESAGALFDRMWGPHGREVVRERSDTARGQAARNEKVEDFGALNSAQPDSESNPVAAVSEVGPAPPPETVEGAPDAPAATATGGGSSPTAAPRAEDPVKMAAESAAEDPATAGSSQILGLRTQPLLLIFLAASTVDDGNESDESASKFSDFGDSGSSVEWTEESSDEDLDYFAALDVAAAEASPRAVDAEVVPGPSVGRRRRRAVAKRRVSEADDGRLRVGRAGRKELLSLPTAASVGEGELRGLFAGEELRIMLFNYREMGIIPKVEPM

SEQ ID NO: 50906 - protein, 878 aa, Zea mays
  Coding DNA Sequence Number=SeqID_7531
  Gene Ontology: Mol. function=catalytic activity; Cellular component =nucleus; Biological process=metabolic process
  Homolog annotation: Hit_ID=A2ZN87; Match level="QueryCoverage=53%, HitCoverage=51%, E-value=0.0, Identity=47%"; Hit description =Putative uncharacterized protein
  Pfam annotation: Domain name=PPR; Domain location=186-220; Score =42.4; E_value=1.6e-09; Accession=PF01535.11; Description=PPR repeat
  Pfam annotation: Domain name=PPR; Domain location=221-255; Score =17.9; E_value=0.037; Accession=PF01535.11; Description=PPR repeat
  Pfam annotation: Domain name=PPR; Domain location=257-291; Score =12.5; E_value=0.25; Accession=PF01535.11; Description=PPR repeat
  Pfam annotation: Domain name=PPR; Domain location=323-357; Score =17.0; E_value=0.069; Accession=PF01535.11; Description=PPR repeat
  Pfam annotation: Domain name=PPR; Domain location=85-119; Score=48.9; E_value=1.8e-11; Accession=PF01535.11; Description=PPR repeat
  Pfam module annotation: Pfam domain module=PPR::PPR::PPR::PPR::PPR; Domain location=186-220::221-255::257-291::323-357::85-119
MALQLFREMQTLSFDRHTLPFASLLSVAGALPDIKIGRQIHAQLILLGLTLEDFMGNALIDMYSKCGMLDAAKTIFANKSDKTAISWTALITGCVQNGQHEEALQLFCNMRRAGLSPDRATCSSIIKSSSSLGVIGIGRQLHAYLTTSGHMSSVFSGSALLDMYAKCGCLDEAIRTFNEMPEKNSITWNAVISAYAQYGQAKNAIRMFDSMLHCGFCPDPVTFLSVLAACSHNGLAEECMKYFDLMRYYNSMSPWKEHYSCVIDALGRAGCFDKIQKVLDEMPFEADPVIWSSILHSCRIYGNQDLATVAAENLFTMVPTDATAYVILSNIYAKAGNWEGAARVKKIMRDRGVRKESGNSWVEIKQKIYMFSSNDHTNPMIDEIKEELERLYEEMDKQGYEPDTSCALHMVDNKQKLESLKYHSERLAIAFALINTPPGTPITVMKNLSACLDCHAAIKMISKIVNRDIILGASDFGSFPHTLVFPITVRVCRSDAILDRRPSPPPPPPFSGDDREQNHGKRRRDQHSIPTVPGRRPVHARLGPCVRADSAPGGTCETIALPVPLGAESTASASPPPVRLGPCGGAGSAPGWTVGTISAPGPLSAEVAVGAEEAASGSTIPTPAPSVSPPTALVTSVIAPRAANALTTGSLSEDPGPASIIGAISSGLLDSERPILHDTSFNVAAFEEAGGYQRLGQGPESLCADASGRASVPFSHVPHVPDVPADNAAQVRNPWDIIKYSLQAKPPCFKVYSRRRDTVPVQSQEVSSPSPTPLQEFSQHISKAINGLLSPPPIPKRRKKTLLRNFRPRRSRRVAKFPPELGSEAAASVCKKLGFCDDHGIITLEDASKYVVLFNSPLSREHIAALAALFGWDTSELA

SEQ ID NO: 50907 - protein, 552 aa, Zea mays
  Coding DNA Sequence Number=SeqID_7532
  Gene Ontology: Mol. function=metalloendopeptidase activity; Cellular component=membrane; Biological process=proteolysis
  Homolog annotation: Hit_ID=Q94DI2; Match level="QueryCoverage=55%, HitCoverage=79%, E-value=1e-117, Identity=76%"; Hit description =Peptidase M48-like
  Pfam annotation: Domain name=Peptidase_M48; Domain location=147-365; Score=47.7; E_value=4e-11; Accession=PF01435.9; Description =Peptidase family M48
  Pfam annotation: Domain name=Peptidase_M56; Domain location=176-269; Score=-30.2; E_value=0.016; Accession=PF05569.2; Description=BlaR1 peptidase M56
  Pfam module annotation: Pfam domain module=Peptidase_M48::Peptidase _M56; Domain location=147-365::176-269
  Subcellular localization annotation: CTP_CleavageSite=58; ConfidenceScore=5.62e-01
MAASPACAPGLISGPTLPPLPVAFRCYWAQKPSSASTSSRRPCRRRFVPVAAASTRTSSAAARGLDADDFRHPLDKQASFLRFNTLFFFLSTVASPSQRSILNDSFLPSFATAGPVSEQVMVLQNIGTSVLVSPNQLPDLHQLLVEAAKLLNTEAPDLYIRQNPVPNAYTLAINGKKPFIVVHTSLVELLTPRELQAVLAHELGHLKCDHGVWLTFANILTMGAYTVPGFGMVAGFLEEQLYRWLRAAELTCDRAALLVVQDPKKEQLFSNFEELELQLVVLTYNGYMLTLQVEVVISVLMKLAGGCPSLADKLNVDAFLEQARSYDKAASNPVGWNAQTRELSHPLPVMRAREIDEWSRSQEYKTVASTALCRGGRKRTDKDGDGIAIAAGVTGRRMSFLASPPLSLKAAGGISIPCPWRLDGRRPRAAPASVPRLASVRSVVLDIEGTTSPISFVTDVLFPYARDNVRTHLDATYSTRETKDDIALLRAQVEQDLAEGVPGAVPVPPDGAGKDRVVDALVANVEAMIAADRKITSLKQLQVIERKNLATP

SEQ ID NO: 50908 - protein, 176 aa, Zea mays
  Coding DNA Sequence Number=SeqID_7533
  Subcellular localization annotation: CTP_CleavageSite=51; ConfidenceScore=5.85e-01
MKTSDWKGRQQMSHSSASFSTDSVTVASSSSSNPASSSSSTTTLALFGVPPSEEVVVFFPVMVYHLEREKGTRLKMYLVPLLESPGLCRLPSGSPFHTGHEAAHSCCLLVALHSASLGHWELATAELLSLGNDSLNGLVPHSGNTHDFLLALAMLGCSGWLLGQEDGLPGCSDAGY

SEQ ID NO: 50909 - protein, 238 aa, Zea mays
  Coding DNA Sequence Number=SeqID_7534
  Gene Ontology: Mol. function=structural constituent of ribosome; Cellular component=ribonucleoprotein complex; Biological process =translation
  Homolog annotation: Hit_ID=O22424; Match level="QueryCoverage=68%, HitCoverage=69%, E-value=8e-71, Identity=78%"; Hit description=40S ribosomal protein S4
  Pfam annotation: Domain name=Ribosomal_S4e; Domain location=125-190; Score=87.7; E_value=3.6e-23; Accession=PF00900.11; Description =Ribosomal family S4e
MGVLYFLHFTKWVEAPPPVGGSGGPNWCENHIKAVMNIGGSFLGVPKAVAGLFSSEAKDVAVARYKAPKPSSGPHKSRECLPLILIIRNRLKYAPTYREVISILMQHHVLVDGKMSFPSLRQTRTTGCFRLHPIRDEDAKFKLYKVRSVQFGQKDIPYLNTYDDRTIRYPDPLIKANDTIKIDLETNKIMDFIMFDVGNVVMVIGRRNTGRVGVIKIREKHKGNFETIHVLLGAFCYV

SEQ ID NO: 50910 - protein, 154 aa, Zea mays
  Coding DNA Sequence Number=SeqID_7535
METRTSVGRTVRTVNRGENFPNMPVVIFAKCCTLFLRSWDSGGLVGQSPAKALSSARCATAAERHEEVVRSRELEDQVGTWNLESKASCALDHFSLPNNVPVNHFDMLSATTRVEWDALGQVIRKAMERLPYSKGASGETPLLEYREVLGSNYM

SEQ ID NO: 50911 - protein, 132 aa, Zea mays
  Coding DNA Sequence Number=SeqID_7536
AIVRYHVSGPWGEGEQAASRTMSLTRDQYLQSASHGGRPCSTFLVYAMAHKGKATSDVRARSMSSSPAIRPRHDSSQHRIQQLETQLEEERRERQEMEARIMAEREAEREARLAADQRMAEMFQYMQSLGAA

SEQ ID NO: 50912 - protein, 120 aa, Zea mays
  Coding DNA Sequence Number=SeqID_7537
  Subcellular localization annotation: CTP_CleavageSite=33; ConfidenceScore=5.31e-01
MEQRLPARQRSSNTMNSATTEVRARKSEVIGLSGAAKRQTAPTATFNRDTVLVALMGRRRRRYPSLQPSSIPLHQRKQKDRRGPPFVFYTTRRRPTTTSPRPTSSLDLEAHEYSGDSPGA

SEQ ID NO: 50913 - protein, 342 aa, Zea mays
  Coding DNA Sequence Number=SeqID_7538
  Subcellular localization annotation: CTP_CleavageSite=37; ConfidenceScore=5.05e-01
MSGAPGDSNSKLLTFGNFQRPLRYNSPDCPVYTGHVRCSKEGRPQELASLGFSLQPLRYNSPDMSGSGEGQLAVVPPPVVTTSPTAVVGAKGATRDPWATFCTNSEILSSTATKDVAGSMSQRLREASQQLSQQLKQAADFADLVASGALTADVAAVVERLREQHADAVREKSAAESKKRRLSEKVAAMEAEKTNLRRQLAAQAEAKVARAEGSLARQRAEELEARLNALRSCVDKAETSTRVEVERTHAQFVDAYHELGARTADFEVPGQEAGLRFLEWLQEELLVLPTIVTGFMSFASLVTCEGAMNALSREGCRHYEVFDQADDNFECEIFKVEDPMVK

SEQ ID NO: 50914 - protein, 893 aa, Zea mays
  Coding DNA Sequence Number=SeqID_7539
  Subcellular localization annotation: CTP_CleavageSite=41; ConfidenceScore=5.54e-01
MAVGTRSQQQEGQQGTSPQAFVKAPSPAKGVPARFVPVGPAAAAKASSEGWRLCPLCLCLRLVGRYVPRTEGQRSFDIRGSNERLNRVFELNQLPYDGYPGQDEADRRGKKPAVETGGDPALVAAASSKKRKLGTAMGRLGVSDSFARDLMRTCAAPGERMSSPELRESSARMLRVTGGCWPKNIPIPCAAEEDCFTSRMVHRWKVFPYGRNIGHVVWAVMDKDRQGAARKRQATVRVHEARPKRHRGTAKAEASGGGKPPLPTKVGASAPGKAPETTVGAGGPKLSKVVPSVSGVAEAAKAARSLPPPGKRVADFGTEIDVEDYLGGSDEGPLALVVPGAAIATAAPAPKAGGETLDAGGEVSALALVRDEAGVATRRLKGATEALTRATEALSQVADFTSRTASGALTAALSAEVERLRTQHADAVREKSASDSKCRKLAEKVAALEKKADLRRQLAGERREANEAIAKEQAAQAEARLARAEGNIAKELAGELQRRLTAQESRAEGAEAAMRAEAERTRMQLMTSYRELGVRTGDFEVPEREAGLRCLEWVQEELQELPTVLAGLMAFTSLVTCEAAMNALSREGCRHFEALDQVDEDFGRDIFEVEDPVVKESAGALYDRMWGSYGREVVRARAEAARAQAERGERVDDFGALNSALPEPETTPAEAATGVAPGPTPETAEDAPGAPASAAAGEDLPPKVAEGAPDAPAAAVPSAEDPAEAAAEGPAAAGPSQVQDFGPAHATATTEFLAASTAEDGNECGGSVSEFFDVTDSGSSVEWTEESSEEDLDYFAALDVAAAEAAPHAADAPGVPGPSTGHRRRRAVAKRRISAEEGARLRVSRAGRQELLSLPAASGVGEGELRSLFAGEELRIMLFNYREMGIIPKVEPM

SEQ ID NO: 50915 - protein, 224 aa, Zea mays
  Coding DNA Sequence Number=SeqID_7540
  Homolog annotation: Hit_ID=Q10GK2; Match level="QueryCoverage=68%, HitCoverage=30%, E-value=6e-07, Identity=25%"; Hit description =Transposon protein, putative, unclassified
MSKKVKQFTKGLAKRASYVMRKEDLVFKGTSSSSSRCRALLEHVPELQGQTVGVQRNEVAYGEAMSSQHRLDYDWRTSPIDPQAVYASGGKAHGRYTMFANVIDSSQVRVQCGGSSRSAAHSSRCSTQDPAEVEQLREELRRHQDYLKQQATQHEYYATQIQQQQTLIQQLAQAQGIHVPVPPTTSRSLSLVFTSTYTYISIYRTSVLDDEMCLIMTMDETFVM

SEQ ID NO: 50916 - protein, 345 aa, Zea mays
  Coding DNA Sequence Number=SeqID_7541
MEAEKVDLWRQLAEERREANKAIADAQAAQAEAKLAGAEGNLARQLAEELEARLAALRSRVDKAEASTRAEIERTHAQFVDAYRELGAQTAAFEAPSQEAGLRFLEWMQEELGVLPTIVTGLMSFASLVTCEGTVNALSREGCRHYEVFDQSDENFEREIFKVEDPVLKQSAGAFFDRMWGLHGQETMVHVEGVEDLGGLDDALPEAAEVDPAPPSDAGEGPSSTPAPTVAGEEPAPAPAPTCEDTSKAVVEPATEDPAAAAEPSQVPTFGPAQATTTDNTDFAAETSVVVPADDSVPGSMYECFESDGESGSSFPSDEGLDYFVALDVAAVETLPRVEGAEDLP

SEQ ID NO: 50917 - protein, 74 aa, Zea mays
  Coding DNA Sequence Number=SeqID_7542
  Subcellular localization annotation: CTP_CleavageSite=57; ConfidenceScore=5.45e-01
MKNVVYYETDSSSPSTSSVQSTSSKRKERKKPLQLKIFQAPSNTLKAKLRRLMKMVVAKIDSTKHIPKAAEAIF

SEQ ID NO: 50918 - protein, 142 aa, Zea mays
  Coding DNA Sequence Number=SeqID_7543
MGKNNKRKREPTPPSEDFGDSEYSEEEFSSESEGSPAPIPLRESSDDSDDSQGLAAEVWTYIRAVERSGLEGSDESEYSSDEEDSSEGSGGDGDDDDDDDDGGGGGNDGDGGGRGGSKDGDSGSSRGSNRGDNGRDSNRASG

SEQ ID NO: 50919 - protein, 269 aa, Zea mays
  Coding DNA Sequence Number=SeqID_7544
  Subcellular localization annotation: CTP_CleavageSite=28; ConfidenceScore=5.45e-01
MQSACNRAKWAHPFDSNAPSMEAQAHASCNRRSGRRFAFAITIASKKAGPSEGFNNRLRALGLRAHYWSEVRRPAPQKGSTAASGHSGSAPTTDQGGNDLVTESHQREALSPWTPSKGDRVRQIARSSLETPCSAPSEGNMALYPPLLLAERQRRGVCKKVESVLDRPLALCGGSGAALANPAPAKPLTASTYQPENFGHTFGSPEAQSSPRSNLGQVATPTDRIAGAFNAKGSDSGSAPEDDELRIARPQGSDSDSAPEDDELRFAQP

SEQ ID NO: 50920 - protein, 94 aa, Zea mays
  Coding DNA Sequence Number=SeqID_7545
MARVACTLRGKRLDGGVSVLSVYCNTLHEEVHELYSRLHPDVPVDSIGMGAGPSGTAGEALGGELDLFKPPPSMNLANERSPTTDSEATKDDKY

SEQ ID NO: 50921 - protein, 246 aa, Zea mays
  Coding DNA Sequence Number=SeqID_7546
MRYNVDEEPPVSDLNIFQWRGTITSKGTFYHLSMDERMSALLYMYSNMEEMEPYFINNGIRQSQYGITEVKHKEQLCGHDNFILAHQCEHVYYMSYRNPKFKAWWVVHKEEEDEEEEVQHHEEEEEVQAHQEEVAGIDAEADDNTTEAPAIRRRGTRKGHFVLPPSAPAQSEARVLIIPVGDSQYDDTSFDGGGIVTDPKGVVVPCTSWSHFALAPHATYGTTQDTIKHDVWRRYRAMKCATQHVI

SEQ ID NO: 50922 - protein, 57 aa, Zea mays
  Coding DNA Sequence Number=SeqID_7547
RAHGYERPRELQRLVILDQRYLGTGGYENDGFDYDYGIGEDEAVEGDFQEFQDYDEF

SEQ ID NO: 50923 - protein, 221 aa, Zea mays
  Coding DNA Sequence Number=SeqID_7548
  Gene Ontology: Mol. function=hydrolase activity, hydrolyzing O -glycosyl compounds; Biological process=carbohydrate metabolic process
  Homolog annotation: Hit_ID=Q2MV13; Match level="QueryCoverage=20%, HitCoverage=9%, E-value=1e-11, Identity=68%"; Hit description=Beta -mannosidase 4
MARLFLLLLFSLLHSSVTGLRRSDFPPSFLFGAGSSSYQIEGAYLEDNKGLSNWDVFTHIKGASKGLSHAYGDLSHLSNSIRACSVTYHPWIDHWSLTLEMRPICSYLVSLAQGALRIVRAWIQIYMQATKHRARTRIVWLTATKQQLPASCDASMRRYRQPNRLLMTSQKKQTSFLTGKGKKTSMETTDGAQRCFGRFHASWCESRLRFSGEKPVPSLSQ

SEQ ID NO: 50924 - protein, 74 aa, Zea mays
  Coding DNA Sequence Number=SeqID_7549
MASSGRNRLAGVRRGLFLVVDFALRKAKTIIENDRKMNVKKKWKSLKKGHHHPRILRQETASTLIFVDPSQTHL

SEQ ID NO: 50925 - protein, 75 aa, Zea mays
  Coding DNA Sequence Number=SeqID_7550
MGGQISFLLNQGALFIGLQKYCAVDKDLDLAGDKDATTNVKKKWKSLKKGHHHPRILRQETASTLIFVDPSKTHL

SEQ ID NO: 50926 - protein, 1102 aa, Zea mays
  Coding DNA Sequence Number=SeqID_7551
  Gene Ontology: Mol. function=binding; Cellular component=nucleus; Biological process=protein amino acid phosphorylation
  Homolog annotation: Hit_ID=A3AVJ5; Match level="QueryCoverage=84%, HitCoverage=46%, E-value=0.0, Identity=53%"; Hit description =Putative uncharacterized protein
  Pfam annotation: Domain name=PPR; Domain location=224-258; Score =39.7; E_value=1.1e-08; Accession=PF01535.11; Description=PPR repeat
  Pfam annotation: Domain name=PPR; Domain location=290-324; Score =36.1; E_value=1.2e-07; Accession=PF01535.11; Description=PPR repeat
  Pfam annotation: Domain name=PPR; Domain location=391-425; Score =21.4; E_value=0.0034; Accession=PF01535.11; Description=PPR repeat
  Pfam annotation: Domain name=PPR; Domain location=492-526; Score =32.1; E_value=2e-06; Accession=PF01535.11; Description=PPR repeat
  Pfam annotation: Domain name=PPR; Domain location=593-627; Score =30.3; E_value=6.9e-06; Accession=PF01535.11; Description=PPR repeat
  Pfam annotation: Domain name=PPR; Domain location=696-730; Score =12.9; E_value=0.23; Accession=PF01535.11; Description=PPR repeat
  Pfam annotation: Domain name=PPR; Domain location=731-765; Score=1.3; E_value=5.4; Accession=PF01535.11; Description=PPR repeat
  Pfam annotation: Domain name=PPR; Domain location=798-832; Score =42.3; E_value=1.8e-09; Accession=PF01535.11; Description=PPR repeat
  Pfam annotation: Domain name=PPR; Domain location=833-867; Score=2.7; E_value=3.7; Accession=PF01535.11; Description=PPR repeat
  Pfam annotation: Domain name=PPR; Domain location=869-903; Score=0.8; E_value=6.3; Accession=PF01535.11; Description=PPR repeat
  Pfam module annotation: Pfam domain module=PPR::PPR::PPR::PPR::PPR::PP R::PPR::PPR::PPR::PPR; Domain location=224-258::290-324::391-425::492- 526::593-627::696-730::731-765::798-832::833-867::869-903
MHSASAALVRAAPKPWPEQHPLRFFPATSKAAGELHPTTYYTTLLASLSRECRHAHHPFDAGLHRTHQARACGVLHARILRLGLPLRGRLGDALVDLYGRSGRVGYAWRALACCTGAPASSAAASSVLSCHARSGSPRDVLDAFQRIRCSIGSTPDQFGIAVVLSACSRLGALEHGRQVHCDVLKSGFCSSVFCQAGLVDMYAKCGEVDDARRMFDGIACPDTICWTSMIAGYHRVGRYQQALALFSRMEKMGSVPDQVTCVTIISTLASMGRLGDARTLLKRIRMTSTVAWNAVIASYSQSGLDSEVFGLYKDMKKQGLMPTRSTFASILSAAANMTAFDEGRQIHATAVKHGLDANVFVGSSLINLYVKHGCISDAKKVFDFSTEKNIVMWNAILYGFVQNELQEETIQMFQYMRRADLEADDFTFVSVLGACINLYSLDLGRQVHCITIKNGMDADLFVANAMLDMYSKLGAIDVAKALFSLIPVKDSVSWNALIVGLAHNEEEGEAINMLKRMKFYGIALDEVSFATAINACSNIWAIETGKQIHSASIKYNVCSNHAVGSSLIDLYSKFGDVESSRKVLAHVDASSIVPINALITGLVQNNREDEAIELFQQVLKDGFKPSNFTFTSILSGCTRPVSSVIGKQVHCYTLKSAILNQDTSLGISLVGIYLKCKLLEDANKLLEEVPDHKNLVEWTATISGYAQNGYSVQSLVMFWRMRSYDVRSDEATFTSVLKACSEMAALTDGKEIHGLIVKSGFVSYETATSALMDMYSKCGDVISSFEIFKELKNRQNIMPWNSMIVGFAKNGYANEALLLFQKMQESQIKPDDVTLLGVLIACSHAGLISEGLHFFDSMSQVYGIVPRVDHYACLIDLLGRGGHLQKAQEVIDQLPFRADGVIWATYLAACQMHKDEERGKVAAKKLVEMEPQSSSTLAQQGFGRSLRLIGLLGKGPGHPLRLTGLLGKGPGRPLLGAGLLDKWAGRRSWVYFGAGIPRLTAIAAKSTQGPPYTDHSPTALAPFGYQDDSSNPRDFTASRSNTSKHGNNIVAREVVLTEGEGGFEDGPRRERHYGGKKVDDEKFRSPEPPIQSRKPKETLPAS

SEQ ID NO: 50927 - protein, 923 aa, Zea mays
  Coding DNA Sequence Number=SeqID_7552
  Gene Ontology: Mol. function=protein binding; Cellular component =cytoplasm; Biological process=defense response
  Homolog annotation: Hit_ID=A3AVJ5; Match level="QueryCoverage=97%, HitCoverage=44%, E-value=0.0, Identity=64%"; Hit description =Putative uncharacterized protein
  Pfam annotation: Domain name=LRR_1; Domain location=536-559; Score =11.4; E_value=2.3; Accession=PF00560.24; Description=Leucine Rich Repeat
  Pfam annotation: Domain name=LRR_1; Domain location=561-581; Score =14.8; E_value=0.33; Accession=PF00560.24; Description=Leucine Rich Repeat
  Pfam annotation: Domain name=LRR_1; Domain location=583-604; Score =11.9; E_value=1.9; Accession=PF00560.24; Description=Leucine Rich Repeat
  Pfam annotation: Domain name=LRR_1; Domain location=606-628; Score =4.9; E_value=38; Accession=PF00560.24; Description=Leucine Rich Repeat
  Pfam annotation: Domain name=LRR_1; Domain location=630-654; Score =3.4; E_value=73; Accession=PF00560.24; Description=Leucine Rich Repeat
  Pfam annotation: Domain name=LRR_1; Domain location=682-705; Score =1.0; E_value=2e+02; Accession=PF00560.24; Description=Leucine Rich Repeat
  Pfam annotation: Domain name=LRR_1; Domain location=707-731; Score =4.0; E_value=56; Accession=PF00560.24; Description=Leucine Rich Repeat
  Pfam annotation: Domain name=LRR_1; Domain location=760-781; Score =6.7; E_value=18; Accession=PF00560.24; Description=Leucine Rich Repeat
  Pfam annotation: Domain name=LRR_1; Domain location=845-866; Score =0.7; E_value=2.3e+02; Accession=PF00560.24; Description=Leucine Rich Repeat
  Pfam annotation: Domain name=LRR_1; Domain location=868-891; Score =11.3; E_value=2.5; Accession=PF00560.24; Description=Leucine Rich Repeat
  Pfam annotation: Domain name=NACHT; Domain location=179-332; Score= -7.8; E_value=0.00024; Accession=PF05729.3; Description=NACHT domain
  Pfam annotation: Domain name=NB-ARC; Domain location=143-449; Score =229.2; E_value=9.5e-66; Accession=PF00931.13; Description=NB-ARC domain
  Pfam module annotation: Pfam domain module=LRR_1::LRR_1::LRR_1::LRR _1::LRR_1::LRR_1::LRR_1::LRR_1::LRR_1::LRR_1::NACHT::NB-ARC; Domain location=536-559::561-581::583-604::606-628::630-654::682-705::707 -731::760-781::...
  Pfam module annotation: Domain location=845-866::868-891::179 -332::143-449
MAEAISATSSCLEPLCGCLESTGVFEAVGREVAAFLRIKSNCGDLEKARDSLRAVETTVRARVTAEEDKLNVCDPQVQAWLKRVDELRLDTIDEDYSSLSGFSCLCQCTVHARRRASIGKRVVDALEEVNKLTEEGRRFRTFGFKPPPRAVSQLPQTETVGLEPMLARVHDLLEKGESSIIGVWGQGGIGKTTLLHAFNNDLEMKDHHYQVVIFIEVSNSETLNTVEMQQTISDRLNLPWNESETVEKRARFLLKALARKRFLLLLDDVRKRFRLEDVGIPTPDTKSKSKLILTSRFQEVCFQMGAQRSRIEMKVLDDNAAWNLFLSKLSNEAFAAVESPNFNKVVRDQARKIFSSCGGLPLALNVIGTAVAGLEGPREWISAANDINMFSNEDVDEMFYRLKYSYDRLKPTQQQCFLYCTLFPEYGSISKEPLVDYWLAEGLLLNDRQKGDQIIQSLISACLLQTGSSLSSKVKMHHVIRHMGIWLVNKTDQKFLVQAGMALDSAPPAEEWKESTRISIMSNDIKELPFSPECENLTTLLIQNNPNLNKLSSGFFKFMPSLKVLDLSHTAITTLPECETLVALQHLNLSHTRIRLLPERLWLLKELRHLDLSVTAELEDTLNNCSRLLNLRVLNLFRSHYGISDVNDLNLDSLKALMFLGITIYTEKVLKKLNKTSPLAKSTYRLHLKYCREMQSIKISDLDHLVQLEELYVESCYNLNTLVADTELTASDSGLQLLTLSVLPVLENVIVAPTPHHFQHIRKLTISSCPKLKNITWVLKLEMLERLVITHCDGLLKIVEEDSGDEAETTMLGQGHPSEEQEDKRIDGGQSVCKSDDNAHAELLNLRSIVLTDVKSLRSICKPRNFPSLETIRVEDCPNLRSIPLSSTYNCGKLKQVCGSVEWWEKLEWEDKEGKESKFFIPI

SEQ ID NO: 50928 - protein, 129 aa, Zea mays
  Coding DNA Sequence Number=SeqID_7553
MKALHPYDASRSHEEWHLTPPRPELPRGHAGPPGGSQVPPSEVRALARSRGGEDLGTGKGGVRVTQQTARLTSLLVNNIPDSIEGDSGSIVSSQGVVATTSKLHGLTRGHEAVAGRRRPTTRYGTFYPV

SEQ ID NO: 50929 - protein, 231 aa, Zea mays
  Coding DNA Sequence Number=SeqID_7554
  Homolog annotation: Hit_ID=Q6J9V9; Match level="QueryCoverage=36%, HitCoverage=30%, E-value=7e-19, Identity=59%"; Hit description =Putative uncharacterized protein
MQVACNRTTGTHPFDFDASSMEAQAHTSWTGKGDISKGILLREGSGPRALLLIRGSKAGPRKAASEQSGSAPTTDQGFEGWPPKGFDSHPRARRARDDSGYVRYMAEARATLPRRMQCKDRLASYPDTRATVGKVEAQQEAPPRPTLGLGLNLDLGRWSPPRPTPELGLNLDLKRWSLPRPTPGLGLNLDLGRLRGNKTGVPSRLAPVTSYDGPPRLQRSSDGHDTAYTGL

SEQ ID NO: 50930 - protein, 232 aa, Zea mays
  Coding DNA Sequence Number=SeqID_7555
  Gene Ontology: Cellular component=ribosome
  Homolog annotation: Hit_ID=Q5NBK8; Match level="QueryCoverage=61%, HitCoverage=100%, E-value=8e-26, Identity=51%"; Hit description =Ribosomal protein, chloroplast-like
  Subcellular localization annotation: CTP_CleavageSite=66; ConfidenceScore=5.78e-01
MALLLSPTVSFLVSPSAPRPRALSAAANVSYPASRLQCKNLSSQQSPLNVTATCASFAEKRLVLVHATAEGSEAGAEQPEEPKPATKIEEMPLESKQKMIMEQRARMKLAKKLRQRRKRLLRKRKLRKKGRWPPSKMKKLKNVPAGNGEEKCFVAEGATTCLPCEAIVAVVEVSSPEVGANVGHLFSNIVDQEQVNTIVNYYGPSSSEALSPHGFNAHQTKVKKNIPSSFNM

SEQ ID NO: 50931 - protein, 422 aa, Zea mays
  Coding DNA Sequence Number=SeqID_7556
  Gene Ontology: Mol. function=transporter activity; Cellular component= integral to membrane; Biological process=transport
  Homolog annotation: Hit_ID=Q8H6D6; Match level="QueryCoverage=90%, HitCoverage=84%, E-value=1e-156, Identity=67%"; Hit description =Major facilitator superfamily antiporter
  Pfam annotation: Domain name=MFS_1; Domain location=47-414; Score =40.8; E_value=5e-09; Accession=PF07690.7; Description=Major Facilitator Superfamily
  Pfam annotation: Domain name=Sugar_tr; Domain location=50-392; Score=- 137.2; E_value=0.0013; Accession=PF00083.15; Description=Sugar (and other) transporter
  Pfam module annotation: Pfam domain module=MFS_1::Sugar_tr; Domain location=47-414::50-392
MASVGDDAPLLGGGGKAAVWRERCPGCRQQRRVQASDGIPYADFLYVWIACLCASLPVQSLFPYVYFMIRDLKVAKEEQDIGFYAGFVGATYFLGRTISAVPWGMFADKYGRKPCIVISILSVIVFNTLFGLSTTYWMAIVTRGLLGLLCGILGPIKVTSSRAIALVIGPALGGFLAQPAQKYPNLFSEESIFGRFPYFLPCFIISLLAAGSCIACIWLPETLHFHDDDKVEVFEELEAQVGGSESTTNLLKNWQLMSAMILYCIFSLHDTAYMEIFSLWAVSSTKFRGLSLTSQDVGTVLSFSGFGVLVYQLAIYPSLAKYFGPIKTFRPAAILSIILLATYPFMANLHGLELKILINMASVLKNMFAVLMGSEAHKRTVLTRFEREKNIYQGHCLGFERQEFMYCVGPYFSPYDELSRYI

SEQ ID NO: 50932 - protein, 132 aa, Zea mays
  Coding DNA Sequence Number=SeqID_7557
MDKNNKRKREPTPPSEEFGDSEYSEEEFSSESEGSPAPIPLRESSDDSDDSQGLAAEVWTYIRAVERSGLEGSDESEYSSDEEDSDGGGEDEDDDDDDDDDGGDGDGDGSGKGGGGGSSRGGSGGGSNRASG

SEQ ID NO: 50933 - protein, 525 aa, Zea mays
  Coding DNA Sequence Number=SeqID_7558
  Subcellular localization annotation: CTP_CleavageSite=78; ConfidenceScore=5.40e-01
MSSCSLMHRVFPPSEPPGGGCPQSFRLVVGGTQLRGSWYLSAIVRLQGFSSVSPAAPLRRRSPETVTTSPWVGRSKPGCDLGPTLSFKDVHHPRWGGGRAEPELYLPRGFVGRPLLRRSRERALTGPAGGSDFDNAGLVDGGRRQPQRVGLVGLAPGAPSCRKAVAASCAREDRPRYRALPGRRSCSGAVLPLHRSRSPRCRRDHRHHPRFGPPALCTCPRPSSVGVGEGKVAAASALRPSLLQFGHPERGSLSLLPERATTSRPLVFCCSPGPPIGWGCSYLRRWNRSSVCNGTLNADSPVGCLNRITKRESPRAKVTSEAELARKEDLVGRSLAGSSVSGTDVGVDLPRPRAGLMSSGDSWPRPRDDQPSRLLGPDSRRRPWRRWPGRDDDVVLQSGDPRTASPSEARSNLAEGVVDAEVEKARRIASAEELSSVKTCSVRGIAYPNASYLSQKVMSEPKSAESGSTGQCPVCQAGSSELAALGNPPATYGYNSPDCPVCTGLSGEPTVGRAICAGHAARANG

SEQ ID NO: 50934 - protein, 293 aa, Zea mays
  Coding DNA Sequence Number=SeqID_7559
MTPTSCTSVATLPTRTRAPPSRALYKSGSIIVLGKTDFLRPDIDPIPRWTATKKRHMTSSPCSTEPQHAVADQDDAQDGRALLHRHVVPISASTVSVAFSDGSGRACGHRMNQIVDKLIDFEVDGLMSNQGAIGSSASPDPRARTQPRPRTTDSASPDPRARTQPRPTLGLGLNLDLRRRTPPRPTPGLGLHLNLGRRSPPCPTPGLGLHLNLGRRTPPRPTPGLGPNLDSGRRSPPLPTPGLGLNLDFGRRSPPCPTPGLGLSLDLGGVTASPDLGLGPTTSQGGHHYPTPS

SEQ ID NO: 50935 - protein, 295 aa, Zea mays
  Coding DNA Sequence Number=SeqID_7560
  Homolog annotation: Hit_ID=Q6QP51; Match level="QueryCoverage=16%, HitCoverage=22%, E-value=4e-16, Identity=83%"; Hit description =Putative growth-regulating factor 1
MDGGDHPHGGKPSVSQLLQGLQKGLEILLSIARGPIAPVAVSGGHHSLRKRWEPPIVVPKDAATGPHRHANSPFPRRQGKRLRREEMGPQIPVGVNPQKPFANRHEDGCLRDGVGVEIMQLLPVEMQNRPHETTCWHSEPPLVERDETQHIPRRRGRGGSAQGSNPFRLRVTGEGTKQAIGNKGLQIIRHDDGERPRVARQNDGYPIGHHQAKEVAAERTRDRERGYSERDPSPRRKRAPSPPTDQRFEGWPLGRVRQPPQSTQAPRPLLVRGSKAGPSEGFDSRLRPLGLRAHY

SEQ ID NO: 50936 - protein, 64 aa, Zea mays
  Coding DNA Sequence Number=SeqID_7561
  Homolog annotation: Hit_ID=A7PEY1; Match level="QueryCoverage=65%, HitCoverage=12%, E-value=7e-14, Identity=80%"; Hit description =Chromosome chr11 scaffold_13, whole genome shotgun sequence
MEKKKVAIPLVCHGHSQPVVDLFYSPVTPDGYFFISASKGMSFITFVRKSLHPKGDNASEDEGH

SEQ ID NO: 50937 - protein, 36 aa, Zea mays
  Coding DNA Sequence Number=SeqID_7562
MGLGDNEDDGFDYDYGKEEGVEADLQEFQDFDEFED

SEQ ID NO: 50938 - protein, 142 aa, Zea mays
  Coding DNA Sequence Number=SeqID_7563
MARVACTLRGKRLDSGVIVLSVGVNPVPKVHTKPIKRPRKGFNKKSKGLPKCALVWRTGLSGVSPDSVRCTTGQCPVHQGTPSQTSHLREFSEALRYNSPDCPVHHRTVSGAPEESDSELASFGNPLRYNSPDMSGAHRTVR

SEQ ID NO: 50939 - protein, 315 aa, Zea mays
  Coding DNA Sequence Number=SeqID_7564
  Homolog annotation: Hit_ID=Q6QP51; Match level="QueryCoverage=72%, HitCoverage=83%, E-value=1e-13, Identity=33%"; Hit description =Putative growth-regulating factor 1
MNPSRAAAGKAVVVEGGKVREAHVRYRCASSRARSGWAHGTLLAATSLRSWYHPSAQSCKGLMGATQVKAPSTQGTRSRLVRAQPRAKTDDPGGFMSRPRVPSSNGHTLDSPETQLGQASRSSNFGQIACPTDPDRRSIQCKGSPDTASRRALFSRQGRSDRSHFAPPLADLTGKQRRLPCSDCCATGQGIGLNLDLGRRAPPRPTPGLELSLDLGRRSPPRPTPGLGLELNLDLGRRTPPRPTPGLGLNLDLGRRSPPHPTPGLGLSIDLGGITASPDLGLGPTILQGGGASLPYPWLAQATGNRTGVPSGSPR

SEQ ID NO: 50940 - protein, 233 aa, Zea mays
  Coding DNA Sequence Number=SeqID_7565
  Gene Ontology: Mol. function=kinase activity; Cellular component =ornithine carbamoyltransferase complex; Biological process=amino acid metabolic process
  Homolog annotation: Hit_ID=Q6QP54; Match level="QueryCoverage=30%, HitCoverage=25%, E-value=1e-14, Identity=63%"; Hit description =Putative kinase
MAPPVDVVGPCPGLGEVEAPPRSSLSPKAEVESEPLGRARRRPSADARAESEPWGQAKRSSSSSGAEPESEPWGRAKRSSSSSGAEPESEPWGRTKRSSSSSGAEPKSEPWGRAKRSSSSSGAEPESEPWGRAKRSFPWRLGPYLAAVSLTLSSGTTVRAAQAALSSCQAGQWSGEATFALNAPAIWSVGVAIWPRLFLGEDWASGEPKLCADGGYQLRFRSLEGTPNYGPRQ

SEQ ID NO: 50941 - protein, 117 aa, Zea mays
  Coding DNA Sequence Number=SeqID_7566
MAPHTLYDDDGPQPLTEARGRQQGLDSPDSCPSARLRRSSDGHDITRTGCQNLSGCHDGIRAHGYERPRELQRLVILDQRHCGTGGNEIDGSGYDYGIGEDEAVEGDFQEFQDYDEF

SEQ ID NO: 50942 - protein, 389 aa, Zea mays
  Coding DNA Sequence Number=SeqID_7567
  Homolog annotation: Hit_ID=Q6ETD9; Match level="QueryCoverage=90%, HitCoverage=94%, E-value=1e-103, Identity=55%"; Hit description =Calmodulin-binding protein-like
MSRDRYFHRLLDLHLHANDDLFFPFPTPASSCPYITASSAHHRFLLDDHPFYPTSCPLGITSRSPIDDTFDLDLLLPLPLHAAVSAPPCAAFDFDPFLLDTLGHRISVLERALALAPPRRKYTYAAEANGRKLKWTAEDRPAGGRNLKWEAELRTPHTDGFDRKWKWESKESATGSTKVKWAKEIKGKGCLEPWSNSYSVEETYGEDDHADDDREKKKPTGVQKKVKGENKQQQKKQGNVEIVEIEDNTAGCVAIRKDAALLIQMNYRAHLAHRSQVLRCLRDLAVAKAKLKEIRSFFYNITYRRRIAYDNEERQRFAEKIIVLLLTVDALEGPDYMVRNARRSMLEELEGMLEIVEPQPPGKPRTLSRRRFDLPEGGAIEKETREEGK

SEQ ID NO: 50943 - protein, 187 aa, Zea mays
  Coding DNA Sequence Number=SeqID_7568
  Subcellular localization annotation: CTP_CleavageSite=46; ConfidenceScore=5.03e-01
MAPPVDVAGPHPRLRDVEAPPRSRSSLSSVAVVESEPLGRARRRPSAEARAESEPWGRAKRSSSSSGAEPKSEPWVGRSGVRRLPGLSPSPSPGSDGAELPMAPAAGPDCLSASLCQVAPQSERRRRHCLSVRPGCFLAKIWPRASRKYVRRWRGASGKAEILRGRLPLSEARLGRGVIESLEWTDP

SEQ ID NO: 50944 - protein, 78 aa, Zea mays
  Coding DNA Sequence Number=SeqID_7569
MAVPAPQVKAACPRPSPLLVCALGQGRAADIRALSLEPGTGQQQLRKSSKIVAQTNEPSELLWKGIVKILVSFRLYYY

SEQ ID NO: 50945 - protein, 276 aa, Zea mays
  Coding DNA Sequence Number=SeqID_7570
MHCALPPSEPPDGERTRCFRLAAVGGAQLRGSWYLSAIARLQGFSSGSPAASPRRWSPKTVTTSLMVGRSKPGCGLCPALSFKDLHHPCWGGGRAEPELYLPYGPAGHLLLQHSGERALTGLGGGRTSTTQGRSAASVVSSSVPASGATSHHWAECGYLPAIRAVVAPCAPGDCPRRRALLGRRSCSWAVLPLLRYDASARRLVLARPGGPEWGSAGRQMAAVVGAELVAAKEVLVADEIVATICAPGLRLFGFDSLSSPLKWGTWVRALSQQRLP

SEQ ID NO: 50946 - protein, 122 aa, Zea mays
  Coding DNA Sequence Number=SeqID_7571
  Homolog annotation: Hit_ID=Q53MN9; Match level="QueryCoverage=75%, HitCoverage=16%, E-value=2e-07, Identity=36%"; Hit description =Transposable element protein, putative
MSLTQLKGKCIAQPSQDNRDHMVKKLETGTTVACTKSLEESVKDLRIAKRREQKKKINTSFKSLNHVSIEGNIQGNPKLQLVLEKGKKRQLQREDTQMKKEDIKSNNTKLDNETFKTIMVWL

SEQ ID NO: 50947 - protein, 418 aa, Zea mays
  Coding DNA Sequence Number=SeqID_7572
  Gene Ontology: Mol. function=protein prenyltransferase activity; Biological process=protein amino acid prenylation
  Homolog annotation: Hit_ID=A2WTV2; Match level="QueryCoverage=91%, HitCoverage=73%, E-value=2e-86, Identity=48%"; Hit description =Putative uncharacterized protein
  Pfam annotation: Domain name=PPTA; Domain location=115-145; Score =23.7; E_value=0.00067; Accession=PF01239.13; Description=Protein prenyltransferase alpha subunit repeat
  Pfam annotation: Domain name=PPTA; Domain location=247-274; Score =13.1; E_value=0.15; Accession=PF01239.13; Description=Protein prenyltransferase alpha subunit repeat
  Pfam annotation: Domain name=PPTA; Domain location=78-108; Score=3.4; E_value=2.7; Accession=PF01239.13; Description=Protein prenyltransfera se alpha subunit repeat
  Pfam module annotation: Pfam domain module=PPTA::PPTA::PPTA; Domain location=115-145::247-274::78-108
MHSILSDEVGFLHPTQFCSLDCARDGDSASQSTEFHCARYFWCRDHKLAISAEILPELYHAARDAYYNARDAPLSRTNLMRHTKALLILCPDLLTAWNSRKMVLSALYDFTKLKDELQLCALILSYSPKNESTWSHRYTTTPHLALVKPSCLLTSFFQTIPIYLDFGADFDIIKLNCMEFEITVCHRRWVIKQVAEQHQDMLELIGNESILVKEIAESLLLALLDNFFGNEEDSLSWESDICLLWKEELRWDEMLIKRYQGRESLWNHRRFLSHLWIQHLLTVEGNWPATTSQMDMFVIQEIQLLSECLHDPVDEFEESRVQAELSALYIMWITKAISSWFYPASCLSQVPDVKGKLEERLHFASMGRLKDVLAGACRPEKRFWMNLLNLADQSSDKCDSKMPYVRSRQAGRDDAENN

SEQ ID NO: 50948 - protein, 45 aa, Zea mays
  Coding DNA Sequence Number=SeqID_7573
  Gene Ontology: Mol. function=zinc ion binding; Biological process =intracellular protein transport
  Homolog annotation: Hit_ID=A3ARB4; Match level="QueryCoverage=84%, HitCoverage=4%, E-value=5e-12, Identity=87%"; Hit description =Putative uncharacterized protein
MDEEDISVIVFYCCHAYHLSCLEGGLDSMRSNSGQDSDGGMYDED

SEQ ID NO: 50949 - protein, 219 aa, Zea mays
  Coding DNA Sequence Number=SeqID_7574
  Gene Ontology: Mol. function=kinase activity; Cellular component =ornithine carbamoyltransferase complex; Biological process=amino acid metabolic process
  Homolog annotation: Hit_ID=Q6QP54; Match level="QueryCoverage=38%, HitCoverage=29%, E-value=9e-29, Identity=79%"; Hit description =Putative kinase
MEHRPGPERLLETAHLELDGKLFVSTQQTPTWRANCRRFETGVGGYKRPRGRKERIQVYNGGVAECYVSSGGRASALSTCQCGSRRDLGTLLLRAAVVTGHVGRHHCLSGGASQMGHRSCSLRPESARGRVMMALPVDVAGSRPRPGDVGAPPKLGSSLSSVAEAEPEPLGRARRRSFGRGQGGVRALGSGGAEFAVFRVLARVRALGRAERSSPSSGS

SEQ ID NO: 50950 - protein, 1433 aa, Zea mays
  Coding DNA Sequence Number=SeqID_7575
  Gene Ontology: Mol. function=helicase activity; Cellular component =nucleus; Biological process=viral genome replication
  Homolog annotation: Hit_ID=Q1EPC6; Match level="QueryCoverage=96%, HitCoverage=87%, E-value=0.0, Identity=68%"; Hit description=DNA helicase homolog, putative
  Pfam annotation: Domain name=DUF889; Domain location=1100-1336; Score= 442.2; E_value=6.9e-130; Accession=PF05970.5; Description=Eukaryotic protein of unknown function (DUF889)
MTEGVDVGKQHLTSSTITTNEDADETVLFKEDDDDDEEGYLFAGQDGESGEDIEIDETQDAFTVNPDVPDLYDKVYSNIPEETHLLSTVADCDYCKAKKFQYEPPGFCCRNGQINLAAFETPLQLRRLWESADADARHFRDNIRFFNGHFSFTSLYCCLDSMTTNMDCGIYTFRAHGMMYHNVRSFGREVGAEHKHLELYFYDDDPSLEHRYRKCHQQQFEKDKSVIKQLVEILKGNPYSEHLRSMGHVDNIEDYHIALNLDQTLNQKLYNSPITSEVAVIWIEGSECRGQFSNSVMLHGKDRSSHGIRSYHGCYDALSYPLFFPKGELGWHANIPKSNVSMDEVDAYRDQHRRKRPSHLCVSVRDYYCYRFQIRPSIFNPILHGKRLFQQFAVDTYIKIESSRLDFICKNQDRLRADLYKGLVDSLHEGENKADKIGKRTVLSTSFIGGPRDMRRQYMDVMALVRKFGKPDIFLIMTCNPNWDEITRELLPMQSPQDRPDLVKRGLPHVHFLLIMQRKYKLTCPDQYDHLISAEIPDKKKYPELYKMVIKHMMHGPCGLLNPKCPCTKGRASCKNHYPRAFSNATSQGKDSYPIYRRRDDGRKKTVRGCELDNRWVVPYNPYLLWLFNCHINVEACGSIKAVKYLFKYIYKGHDRVSVAVTDANKADGDVDEIKQYRDARWVTPPEALWRIFSFDLSQNSPPVMQLQLHLENMHMVSFHERAKVNHVVQRLGADRSMLTTYFEANRLHEEARGILYRDFSEWYTLQQGKVWQRRKRNTGGQVGRIVSAHPAEGERFYLRLLLNHVTGATSYADLRTVDGDTLPTFREAAQRRGLLEADDTIDECLNEAAIYQMPSALRRLFATILVYCEPNDVAELWQRHLDSMSEDYHRSTQSKIHVQQMVLIDIRNILQSMGKDIKTFPLPAIIDRYDDSHGTDREIYEEESIEPTTEDVALKETLNEEQRSAYDKILSVVDTNNSGVFFVDGPGGTGKTYLYKALLAALRSHDKIAVATATSGVAASILPRGRTAHSRFKIPLTIDDGVVCSFTKQSGTAKLLQKASLIIWDEASMTKRQAIEALDNSMRDIMGRSRLPFGGKTVVFGVDFRQVLPVVRKGSRAQIVAASLRSSYLWESMCHLKLFQNMRAQSDPWFVEYLLRVGGGTEEANNDGDVRLPDEVCVPYTGNDRDLDRLIDDIYPNLNENMSNTSYITSRAILSTRNDWVDMINMRMIDRFQGEQMMYHSFDTAVDDPNNYYPSEFLNTLTPNGLPPHVLKLKVGCPIMLLRNIDPANGLCNGTRLVVRGFQKNSIDAEIVLGQHAGMRIFLPRIPLCPSDDEMFPFQFKRKQFPIRLSFAMTVNKAQGQTIPNVGVYLPEPVFSHGQLYVALSRATARSKVKILAIPVHDEKKKKGVERNSAINGATYTNNIVYKEVLTP

SEQ ID NO: 50951 - protein, 206 aa, Zea mays
  Coding DNA Sequence Number=SeqID_7576
  Homolog annotation: Hit_ID=A2Y1Q2; Match level="QueryCoverage=50%, HitCoverage=43%, E-value=5e-44, Identity=87%"; Hit description =Putative uncharacterized protein
MVKNFGSKTVQIAMNAVVRRRVARIFTPGEQLVPTEHWATEPEKHCSLSPLPAYEPAFDWENESGLKITVKIRTCQEWRNKTMKTTTESRSWPSRLSRTCLFNTVKVRTIKVEKRINEIVNRLNKTKVERKPDLKAEREAISAAEKAERKAQLRDKKRREEMERLDKEKQADIRSYKGLMVQEKMTSNKQIASGSKTLQELEEDFM

SEQ ID NO: 50952 - protein, 518 aa, Zea mays
  Coding DNA Sequence Number=SeqID_7577
  Homolog annotation: Hit_ID=Q6QP51; Match level="QueryCoverage=37%, HitCoverage=80%, E-value=7e-10, Identity=32%"; Hit description =Putative growth-regulating factor 1
MKTSALGGRTAAVITSGRVLLPGGPAHALKLERQGRAEGRIFGGRSVANLGYHAGGRTSSSCRDRRRRRERLRSHSRPKARHAADASATDDNRSSLRSLSEGAGCRPRGGRPQLDTLPSPALVMKILEAEGGAEAAARLAFPLHQSRRPTGERGGKPCRRHATGPSGRTSPTPDTPAWRPRPTRRATGTPDAACKQLPRLRHHRASSIAEPTPRLEATQRATQRRQPDAAANVAKGGPAVMTAAGAREQRSRRQPSSRPIRGQRESPLSRREDNAPVIRSSNGPRTRNGSPASYSPHRINSAAGQATLLAGKADDASPSPKQPRQKKAPSLLTDQGFEGWPPEGFNSRLRSRGPYTHYWSEVRRPAPRRVPRPPQATQAPCPLLIRGSKAGPRRVHSRPRRRARDDQGYVRYITKARAALPSSPETPCSVPIEGSMALSPLLLAERRRRGVRKKAESVPDRPLTLCRGSGAALADPAPAKSLTASTYQPENLGPDRAPGLRPVRMREQPDLLKRYARH

SEQ ID NO: 50953 - protein, 33 aa, Zea mays
  Coding DNA Sequence Number=SeqID_7578
MDSGDNPRSGIGKGGYSGKGSFSAKETGPEPSY

SEQ ID NO: 50954 - protein, 445 aa, Zea mays
  Coding DNA Sequence Number=SeqID_7579
  Gene Ontology: Mol. function=sugar:hydrogen symporter activity; Cellular component=integral to membrane; Biological process =carbohydrate transport
  Homolog annotation: Hit_ID=Q8S2F4; Match level="QueryCoverage=76%, HitCoverage=94%, E-value=1e-150, Identity=79%"; Hit description =Phosphate/phosphoenolpyruvate translocator protein-like
  Pfam annotation: Domain name=TPT; Domain location=264-404; Score =184.7; E_value=2.3e-52; Accession=PF03151.7; Description=Triose -phosphate Transporter family
  Pfam annotation: Domain name=UAA; Domain location=116-410; Score= -161.6; E_value=0.026; Accession=PF08449.2; Description=UAA transporter family
  Pfam module annotation: Pfam domain module=TPT::UAA; Domain location =264-404::116-410
  Subcellular localization annotation: CTP_CleavageSite=43; ConfidenceScore=5.29e-01
MRTRNDSPRGHRAQSTLPQPAHLNPRPIPTSSSNPQIRPLLHPCAALSQLSRLRIQIRRHQRLLLPLPLHHHHQEVQQGGSGSGGGGDMGRDGGGGVAGGMSDSVLRKVLLSYFYVAVWIFLSFSVIVYNKYILDPKMYNWPFPISLTMVHMGFCSSLAVALVRVLRVVDLPTSPSMTPQFYTSSVVPIGALYAMSLWFSNSAYIYLSVSFIQMLKALMPVAVYSIGVLFKKETFRSSSMLNMLSISFGVAIAAYGEARFDVRGVALQLAAVAFEATRLVLIQILLTSKGISLNPITSLYYVAPCCFCFLLVPWAFVELPRLRAVGTFQPDFFVFGTNSLCAFALNLAVFLLVGKTSALTMNVAGVVKDWLLIAFSWSVIRDTVTPINLFGYGIAFLGVGYYNHVKLQALKAKEAQKKATQADEEAGSLLQERDGHSDRKSDNQA

SEQ ID NO: 50955 - protein, 157 aa, Zea mays
  Coding DNA Sequence Number=SeqID_7580
  Subcellular localization annotation: CTP_CleavageSite=66; ConfidenceScore=5.61e-01
MSGAPEDSNSNSSPSGNSRGNSAIIHRTCPVLQGRAASQNSPSLGNSFQVLRYNSPDMSGVHRTVRCNCGATATSGANGYLQLNKGASALAESGRPYWRPDTIQYMSGWLSYGAPDSPVHTGQSGAPATSPKPLGSDRWSSDFWARLDVRWRTEHVL

SEQ ID NO: 50956 - protein, 389 aa, Zea mays
  Coding DNA Sequence Number=SeqID_7581
MTCGTQPPCRRGRTLERAGAKPHGGWHPSAVARLQGFSSGSPAAFPHQWSRRTVTTGSMVGKSKPGCDLCPALSFKDLHHPCWGGGRGEPEPAFAWAGVPLLPPASGGGNHPPALRRRRPPAMRGKANCCCLARVQHSVLSPGDCGRLHQRVTQHVVRHEGGTRVLGRSCSCFRGEDGSEDLPVCFGAADARRCGVGGQVDAVVGAEVVAVGEGFSADDTVNATHSPGLQLFGFNGWFSSPARDVNEGLPASKNPQLLCDEPEPEATVSAWTEVESVQEEASSAREHVASLAEEVQQRQLELGQVLPPASPSEAGPDPAEGGNNAEGAAAPSVDDLFVGSRIVYPSESYLSRKVMSEDPAIEAVEKRERCSGRKTFAEENFDAEGVPPF

SEQ ID NO: 50957 - protein, 42 aa, Zea mays
  Coding DNA Sequence Number=SeqID_7582
MKRAFLCKGTKRCQRFIYNYSKSTVRNTVDYSGQEKLFGKTD

SEQ ID NO: 50958 - protein, 100 aa, Zea mays
  Coding DNA Sequence Number=SeqID_7583
  Gene Ontology: Mol. function=aspartic-type endopeptidase activity; Biological process=DNA integration
  Homolog annotation: Hit_ID=Q2R7E0; Match level="QueryCoverage=40%, HitCoverage=4%, E-value=2e-08, Identity=67%"; Hit description =Retrotransposon protein, putative, unclassified
  Pfam annotation: Domain name=RVT_2; Domain location=1-90; Score= -144.8; E_value=2.5e-05; Accession=PF07727.5; Description=Reverse transcriptase (RNA-dependent DNA pol
MMTEMNSIQSNKTWVLSVLPAGHKAIGLKWVFKVKKDPYGPSSANIEAFKKEMMKSFSMSDLGLLEREIRCQRFIYNYSKSTVRNTVDYSGQEKLFGKTD

SEQ ID NO: 50959 - protein, 191 aa, Zea mays
  Coding DNA Sequence Number=SeqID_7584
  Subcellular localization annotation: CTP_CleavageSite=43; ConfidenceScore=5.42e-01
MATDNGHLSNISAHQSSHYVRHMLTRASGTSIRTSSMCLQISRQAQLSEVQHFALFTPPPLGDFNYCSVLGGVADGLNLKYYPRRPSGSTGGVIVSPVGEDNSRLSSTVNLAAVLNTELDHMSENRCRGGRRAQQKQAAQQDEVTQQQQLPPPPPMSIEQMFLMQTQAVQAIGQTLAAIQQQQQQQAPPQP

SEQ ID NO: 50960 - protein, 613 aa, Zea mays
  Coding DNA Sequence Number=SeqID_7585
  Pfam annotation: Domain name=HR1; Domain location=508-578; Score=3.5; E_value=0.096; Accession=PF02185.7; Description=Hr1 repeat
  Pfam annotation: Domain name=MAP7; Domain location=451-608; Score= -84.5; E_value=0.1; Accession=PF05672.2; Description=MAP7 (E-MAP-115) family
  Pfam module annotation: Pfam domain module=HR1::MAP7; Domain location= 508-578::451-608
MEVVELVPCARNKWGNWHEFWFYVAEGTVEDHPGLPVAEMCSHYYSAYPQFEVAEEDADEGALRCAASLSSGRDLVEDFMAYGVWPLAHGWALGEVCPRQMPSHGGMLVRSPAFALDLHSRDPATFVREAEDGAVRIVGRYVPKTEVQRSWDICGSNDRLNRVFELNRLPYGGYPGQDDVDRRGKKPAAETEDDPVSAAAPSSKKRKLGIATGGLGVSDGFARELMRTCAAPGGRMSSPDLRESSARMLRVTGGWWPKNVPIPRAAGEDFFTSRMVHDWIVFPYGQNIAAVVSAVMDKDRQGATQKRQAVVRLHEARLKRSRGTAKAAAPGGSQPTLAAKSAAPGSSRVPEAVKAAAAGGTKSVPASAAKARELPPPGKRVADFATDISVDDYLVGSGEGQLVVVPPVVATAAAAVVPRAKGSALSAGGEIPALTAVRDEAGAVSHRLKEALSQAADFADRAASGALTTVVSAEVERLRAQHADAVREKSAADSKCRKLADKVAALEGERNDLRRQLAEERKEANEALAKAQSAQAKANLAQAEGSLARQRAEELEERFNALQTRVERVEASTRSEAERTRKQLMDSYHELGARTADFEVPDREPRLRCLEWL

SEQ ID NO: 50961 - protein, 521 aa, Zea mays
  Coding DNA Sequence Number=SeqID_7586
  Gene Ontology: Mol. function=hydrolase activity
  Homolog annotation: Hit_ID=Q8S9P9; Match level="QueryCoverage=10%, HitCoverage=14%, E-value=2e-16, Identity=76%"; Hit description =Purple acid phosphatase-like
MEGLHAQSAACHRQRAILSIRARNARPCAKSSLDAPRRLAQPVEQIRVDPVSISRQPGESRRECRPPPFDSDAPRTTPPKPSSKSALCKWWRSLAPALLAAALAITVAALRPATEHADAKGRPPLWFWPGGVFKVALFADLHYGEDAWTDWGPAQDAASDRVMAAVLDAENPGACLRTLSFCFPGPFPFSSERIKELKRNSLSTSWSLRRRNPIHASSLRLGGVRAAIDVQTSLLEEDPNKNYQEDKRHGVLPVMVPEIGMKFQDEVEAWKFWNTYGVHTRSVLPAALFCLPRAIRRPRNPPARRPFHPRTRQIRCPCAKSTATPLLADGRSAACRSILHVQSASAQTFPSAPAPNPPPLRQICRHAPTHRWKVSTRNPLPAIASAQSFPSAPATPRPCAKSSLDAPRWLAQPVEQIHVDPVSISRQPGESHSECRPPPFDSDAPRTTPPKPSSKSALCKWWRSLAPALLAAALAITVAALRPATEHADAKGRPPLWFGPGGVFKVALFTDLHYGEDAWTD

SEQ ID NO: 50962 - protein, 340 aa, Zea mays
  Coding DNA Sequence Number=SeqID_7587
  Homolog annotation: Hit_ID=Q6JAD6; Match level="QueryCoverage=100%, HitCoverage=64%, E-value=1e-122, Identity=73%"; Hit description =Putative uncharacterized protein
MSRTKNVSAPGGGDDEDPRRPFRQVKGKTFYLEQQESRKKRPPPIPPPRFRERDETEVRPLAADPRLFDLQRATAARVRRFRYVPVESWLPAQRDPATVDLFSTRIQESFFRAQMSAQIALRVHRLLDLPAFLLAAGADSEAHLTYLPGLLTLLTTSGRFVSSLDFPSRRLDFSLCYGTSDPPRRPHGSVAPGTAHVAALFRPPFSDGSRRSPADFTTAAKYLFELIRRTLLPRMGYREATTHIQLWLLGALVSHSEFDVVDFLICEIEDTVLDGIRARRQLPYAHYLCHIFAQLIRPPQFQGTLEASRLVFGSYGPAPEAPVPASAPIFDSQAEDAALR

SEQ ID NO: 50963 - protein, 86 aa, Zea mays
  Coding DNA Sequence Number=SeqID_7588
  Subcellular localization annotation: CTP_CleavageSite=69; ConfidenceScore=5.62e-01
MASQWGALRRSTSRASKVNGMWDHFVCTTGPVTATWLMLRRRRRPPPPVLVARVTPTTSDTDPHTGVTVATSRTSLTTPPELYCRR

SEQ ID NO: 50964 - protein, 65 aa, Zea mays
  Coding DNA Sequence Number=SeqID_7589
  Subcellular localization annotation: CTP_CleavageSite=24; ConfidenceScore=5.07e-01
MVLLAVLAVGVLQRGYGAVVVRMEAGTRARGHGLFQASRVSFPVSSWGFNSNGFTTFQGSYTGLC

SEQ ID NO: 50965 - protein, 369 aa, Zea mays
  Coding DNA Sequence Number=SeqID_7590
MAAAVVPKAKGGALGAGGEMSALAAVRDEAGAASRRLKEVTEALSQVADFANRTASGALTAVVSAEVERLRTQHADAVREKSAADSKCRKLADKVAALEGEKADLRRQLAGERRETNEALAKAQAAQGEANLARAEGNLARERAEQLQERLIALESRVERAEAATRAEAERTRKQLMDSYHKLGARTGDFEVPDPRVPGFAVWSGEGAMNALSREGCRHFEVFDQADEDFERDIYKVEDPVVKESAGAVYDRMWGPHGCEVVRERVETARAQAARGERVDDFGALNSVLPDPEPTPTEAVSGAALEPPPETAEGAPDTSTSAAAGEDLPPETAEGAPDAPAAAAPSAEDPATVAVEATAEATAEAPQVA

SEQ ID NO: 50966 - protein, 1288 aa, Zea mays
  Coding DNA Sequence Number=SeqID_7591
  Gene Ontology: Mol. function=nucleic acid binding; Cellular component= nucleus; Biological process=intracellular signaling cascade
  Homolog annotation: Hit_ID=A2WLD4; Match level="QueryCoverage=89%, HitCoverage=99%, E-value=0.0, Identity=62%"; Hit description =Putative uncharacterized protein
MSCRAHPHRPSRELAPGSPRAPATRRTDSTEEGGEREGEEEKGKAHPRAPTMADEASTTSDDTRGPRARRKGGKGLLAQVGAPLSSDSIPLLNLPPIRGSDLLAARRLSRHFFSRSVCETLSASPTVDPADATGARWLVAYSDGEDTLSERESVGAKDGPALPNGSGKEAHASSPSAANKRKHNDLGSNQMELNEPGTPSSSSGDSTWSINGLDDCHQLSLSRNKNDDSEHSVTSAGVTVIRQPRGVLRLRKLAQNVSTESWTGGHNTSQANGVPRSSQHPRRNNKRESIPSQENRVSGDEPVSCLRTENGTCDQDTGTKFCSKTEFLAEKQSHLSGEPPKAVHVDKGVYDYVKDDDGDSLEENAAWMLCSLSDNKCAGSPRKGTDRLSKRSFSQNSNHFKNSYEKIKDICSPARLLRKRDGKVPFLKRRQRRHFYEVSPSDVDPFCIVKERIRVFWPLDETWYFGMVKEYNPVTRLHHVRYDGKDEEWINLQNERIKLLFLPAEAPNKSKCTNSRSAFESKHEQGDREDMHRSGSNTESFESGPISSWLARSNQAKSAALCDINKQDHSHSNTVPVSFDQKQCRASDAKESIDSAPCSSLANGGVEVLKDRTIPEDGSFVGVEKWKWEHLQGKLQYQCSKRELSKDSTKCTGRRALPSMGLFSKKFAEDRISINIPQDKAIDATNDKPLDKDEKEKHPISNLVQELNEHPIGRVTPTAPRTTSHRNRFTSISRAFGDGSKLLPEDHMLTGFASGSKKPRSQVSYSGSPRSEELGLKNKDHFRKIQSHVSVKTSDAKKLPDSSRSGHSSPELLTCIANVLVTVGDRGWREYDTQITMDSDVHSEQRICVKLAEGTKYAHKVCQVLQPGATNRYTHAMMWKGGAEWCLEFPDRSQWLIFKQMHDECYSHNIRAASVRNIPTPGVHLVGIHDDNDMVSFVRSEDYLVHIGTDVEIALDEARVLYNMDSDDEEWISSRQKFLVRDNNATLELAEDLFERVMDKLEKFAYSHDSNELSIVQMKELETDDLPLDIIEVIHAYWQAKRQKKGMPLIRHFQFAMWKVYEQQLHEWESKVCRMQGSSNGYQGKKMPPKPALFAFCLRPRGLDVPYKGPKQRSHKKLMSTGCHSFSRQHDGFYRQGYSPRFSTRTGSLRAFESSESSTPRFFRTNIVKRSATVAFSDDHQPSPSFRPQRVKRSASDHWNTVIHDWQNSKHLFPGSPPVDIEELKLRDAASAAQHAAAMAKLKREKAHCLMQKADLALHKATVALMIADAIKSSSRNKSRDCRRGFDE

SEQ ID NO: 50967 - protein, 34 aa, Zea mays
  Coding DNA Sequence Number=SeqID_7592
MAAAHEISTKQSNPGGGRCNRRRRTRRSRLGHSN

SEQ ID NO: 50968 - protein, 222 aa, Zea mays
  Coding DNA Sequence Number=SeqID_7593
MCRHSATAAKEDGAEEQTRFIHGMAMGRTVSITFPTTQEAGVQENNAACPAPTPVPLARVRPTTAKSSLGRHRKLRLARPQGSESTSTPEDGLRLARPQGSDSTSTPEDSLRLARPQGSDSTSTPKRRSPPRPTPGLGLNLDAGRRSPPRPTLGLGLSLDLGRRSPPRPTPGLGLSLDSGRRSPPRPTRGLGLSLDLGGVTTSLDLGLEPTTSQEGPSLPYP

SEQ ID NO: 50969 - protein, 300 aa, Zea mays
  Coding DNA Sequence Number=SeqID_7594
MHRVLPPSEPPDGERPRCFRLAVVGGTQLRGSWYLSAIARLQGFSSGGPAASPCRWSPKTVTTSLMVGRSKPGCGLCPALSFKDLHHPCWGGGRAEPELYLPHGFVGHLLLQHSGEKALTGLAEGADFDNAGLLALARLPVPPPAVGRSVAIRPLYGVAPRAPGDRPRRRALLGRRSCSWAVLPLAPVRRLRAEVGAEVAAAGEVLVTDEIAATIRAPGLQLFGFGCLSSPLDWGRGRGPRRNSVCPEVIAAAVWPPGAEVVVATAGAGVSEPPGVLLPPQALQCGGLFIPAGAETEFRM

SEQ ID NO: 50970 - protein, 415 aa, Zea mays
  Coding DNA Sequence Number=SeqID_7595
MQAACNRTKGAHPFDFDASSMEAQAHTSCNRRAGYYVRETAPSLAPVPRLLDCGTGAATRGDPAHGPTVPTKHIGHGSVSCGRRRDGRYGQKWADSNGGTRRAEAAIKSTACSRPLLEQQESPLPWREDDAPVFRSSNGSRTGKKGILRKGILLREGSGPRALLLIRGSKAGPSEWFDNRLRALGLRAHYWSEVRRLAPRKGSTAASSHSGSAPTTDQGFVGWPPKGSTAASEHAERGMTLGLGLNLDAGRRSPPRPTPGLGLNLDAGRRSPPRPTPGLGLNLDVGRRSTPRPTPGLGLSLDSGRRSPPRPTLGLGLSLDLRGVTTSPDLELGPTTSQGGPIITLPLASSGYGEQDRRPIWLAPVKQVMMAPRVLHDDGGSQPLTEARRRQQGSDSPDSCASTGLKCSSDGHDIT

SEQ ID NO: 50971 - protein, 298 aa, Zea mays
  Coding DNA Sequence Number=SeqID_7596
  Pfam annotation: Domain name=zf-CCHC; Domain location=87-104; Score =27.0; E_value=7e-05; Accession=PF00098.14; Description=Zinc knuckle
MYMHINDKDGSSSKRKDLALNTSQEKKGKAKMQVEEEFSSDDDLDANIALMLRKTTKMLNKLNRECIKFDSRKKKFLSSKIKPTSEMDCYNCGELGHLAHQCNKPKKNKFKGKKDDDRDDEKKEKKFFKRKEGKHKRFHKNKNGKAYIVGDWLTDIESSSGSSSSEEENDEKVAAIARDFSSPPPSPSSTSHLCLMAKGEQKVQLENDIIDDCDNDSDDEYASPSYDELADLLKEYTQIIRKSKDKCDKLKDENEFLTGKYDIDVKTSEEMKEENKTMPSTKNSSKPPLKMPKINVKN

SEQ ID NO: 50972 - protein, 257 aa, Zea mays
  Coding DNA Sequence Number=SeqID_7597
  Homolog annotation: Hit_ID=Q6QP51; Match level="QueryCoverage=36%, HitCoverage=41%, E-value=1e-15, Identity=50%"; Hit description =Putative growth-regulating factor 1
MTLGTSDTWPRLGLCSRGTLGHFRDQQEQFCNGVPSEGGIEPLDPIEKGPGPANHLQENSATRPSPTAVPSARVRLTAAESSLRRHRKLRLAQPWASASGEVSASPDPRARPPPRPRKVVSASPDPRARPQPRPGAESRPRPTPASASGGVSASPDLGLGPTTPQGVHHYPTPSQLKLRGNKTSVPSRLAPVTSNDGSPRASMTTVALSPLRKQGDVSKVPTAPTVVLLQGSNASPTATTPRTQGSSTSPTATLACT

SEQ ID NO: 50973 - protein, 43 aa, Zea mays
  Coding DNA Sequence Number=SeqID_7598
MTTDRPLELLHMDPFGPIAYISIGGRKISNPRDLIGILETGSK

SEQ ID NO: 50974 - protein, 178 aa, Zea mays
  Coding DNA Sequence Number=SeqID_7599
MNALSREGCRHFEALDQVDEDFGRDIFEVEDPVVKESAGALYDRMWGSYGREVVRARAEAARAQAERGERVDDFGALNSALPEPETTPAEAATGVAPGPTPETAEDAPGAPAPAAAGEDLPPKVAEGAPDAPAAAVPSAEDPVEVGAEAAAEAAAEAPRSGRAFAGSRFWACARNRYY

SEQ ID NO: 50975 - protein, 264 aa, Zea mays
  Coding DNA Sequence Number=SeqID_7600
  Gene Ontology: Mol. function=protein binding; Biological process =retrograde transport, endosome to Golgi
  Homolog annotation: Hit_ID=A3AR53; Match level="QueryCoverage=50%, HitCoverage=12%, E-value=2e-60, Identity=93%"; Hit description =Putative uncharacterized protein
  Subcellular localization annotation: CTP_CleavageSite=85; ConfidenceScore=5.80e-01
MASRPPLRTTSVASVFSSTDSSTSTGPPGGVPQSITALLNNPLPSSAASSYSWLSWPPTTITLPDAAPPPPSHPCEITRADFAPYLAAVSDPFARFADIRLHAHAELAASSDAEGAPAASSGLAACLREVPALFFKEDFALEDGPTFQAACPLDDDALQERLGQHLDVVEAHLVREIALRSESFYEAQGRLRGLDGEIVTAVGRIRELREVVQVLTGDLVGAARQVQELNATRGNLVALQQKLTVILYVSQALTALKLSDMELH

SEQ ID NO: 50976 - protein, 107 aa, Zea mays
  Coding DNA Sequence Number=SeqID_7601
  Gene Ontology: Mol. function=DNA binding
  Homolog annotation: Hit_ID=Q10T05; Match level="QueryCoverage=85%, HitCoverage=30%, E-value=2e-18, Identity=55%"; Hit description=DNA -binding family protein, putative, expressed
  Pfam annotation: Domain name=DUF296; Domain location=5-107; Score =8.7; E_value=0.0001; Accession=PF03479.6; Description=Domain of unknown function (DUF296)
MPTLLLPLLILLPFDIVSKIVQVPKITRKAVCVLSVFGAVQDCYLLHSAVILNHKGPLEIIRVFGSILTSDSPGFGCLSATLACGDCSLVGGIAVGPLIATTPVQGE

SEQ ID NO: 50977 - protein, 101 aa, Zea mays
  Coding DNA Sequence Number=SeqID_7602
  Homolog annotation: Hit_ID=Q53P77; Match level="QueryCoverage=44%, HitCoverage=3%, E-value=2e-07, Identity=62%"; Hit description =Retrotransposon protein, putative, unclassified
MGGEGAHAAGGAGGGGEAGGRVGRHGDLGERGSTTESDSDHAGDVDADKSTSGTLFFLGDNRITGQSKKQKVILMKALARERFCELRDKLELVKIKQRCKA

SEQ ID NO: 50978 - protein, 72 aa, Zea mays
  Coding DNA Sequence Number=SeqID_7603
MCVYQELRRRAVPGPGHTRPYFYSPGPGWQLDPWVWIPAGFVPTGYGYGYKNSPVGPIGSDTRNTSGRSTVM

SEQ ID NO: 50979 - protein, 146 aa, Zea mays
  Coding DNA Sequence Number=SeqID_7604
MGKNNKRKREPTPPSEEFGDSEYSEEEFSSESEGSPAPVSPLASSDDSDDSQGIAAEVWTYIRAVERAGLEGSDESEYSSDEEDSDGGDEGEDDDDDDDDGGDGSGGGGGDGSRDSTKGDSSRGSTKGSSRGSTKGGGGGRGRASG

SEQ ID NO: 50980 - protein, 415 aa, Zea mays
  Coding DNA Sequence Number=SeqID_7605
  Homolog annotation: Hit_ID=Q5GAQ4; Match level="QueryCoverage=100%, HitCoverage=100%, E-value=0.0, Identity=81%"; Hit description=F-box protein
  Pfam annotation: Domain name=F-box; Domain location=19-66; Score =41.8; E_value=2.5e-09; Accession=PF00646.24; Description=F-box domain
MAATLDGAAGCRKRKRAAPGLADLHDDMLERVLARLPPASYFRLRGVSRRWRAAAESRSFRAACARVTARDPWFLMLEDSDHQDQDQDERRPRPAAVFDSAERALARWRGAPVPLQPVAAASGLVLYRDPSTGGLTVVNPLTGASRALPPPARVAGALQAVAMYGSPYRVVLILGELPELSTVAYDSSTNAWSEQAALSRKPEVEGAPSRERVAEVGDGDGDDTVYFLSKSGDVVASTMQRSASRQYSSAVACGGCGGGDAVAYFLSRSGTVVACDLARRAFAELPRILPAYHEHSIDVVACGGAAYAVVLSEFLDAASLRVWEFAGGAWRQVAAMPPAMAHGFRGAKADVNCVGHGGRLMVCVSSSSAGAGGCFLCDVGTNRWEELPRRAAGDGDATTGFVSALSFEPRIEAAV

SEQ ID NO: 50981 - protein, 277 aa, Zea mays
  Coding DNA Sequence Number=SeqID_7606
  Gene Ontology: Mol. function=transcription factor activity; Cellular component=nucleus; Biological process=regulation of transcription, DNA-dependent
  Homolog annotation: Hit_ID=Q5GAQ0; Match level="QueryCoverage=100%, HitCoverage=100%, E-value=1e-153, Identity=93%"; Hit description =Putative uncharacterized protein
  Pfam annotation: Domain name=AP2; Domain location=166-217; Score =54.7; E_value=3.2e-13; Accession=PF00847.11; Description=AP2 domain
  Subcellular localization annotation: CTP_CleavageSite=61; ConfidenceScore=5.14e-01
MGPDLGPNPARYIGPCRPGTKIFRAVPCLGRAFFTVLRAGPSGPAQMYTYSFGSEHLALACSAASWVVPCWPGTSLSCFGSQLVGPSQHEIESGRALPGLANRSKAQHGPKARRASVGSCWPKHGTPQFLISAHLGLSVAVALDPSVLRLWARSLVAQPQADANTTRYLGVRRWPWGRYAAEIREPATKERHWLGTFDTAEEGAVAYDRAVRSLRRGLRPRRALPSTQPRCFVPHREWARPLVAAWGWTTGVLGPYSPLLGGGMVGTGVREDRMDQL

SEQ ID NO: 50982 - protein, 209 aa, Zea mays
  Coding DNA Sequence Number=SeqID_7607
MCGSSPLVVGPRAQVGELVGGKGSGLTWVSTRGCGQPKFDDNDLVVPVRQGLDSCLEKLHDSSGKLSKGSVEAEGLWKWLATVGDARVARAGGTELAGAKGGAWPARASTPIWFCRSAPAVRSRSRSRARSPLPLPRPQSPTNSPPVNPPLPSPAVRSRGRAPIPNSPPVNPPLPSPAVRSRGRAPLPNSPPVNPPLTNEWKVGEPLSA

SEQ ID NO: 50983 - protein, 60 aa, Zea mays
  Coding DNA Sequence Number=SeqID_7608
MVQEDMTPTSKKIVETIISPLAKELDEGDVDKIVPQNVDVNIKKEPKPQPPNVAVGRLSA

SEQ ID NO: 50984 - protein, 77 aa, Zea mays
  Coding DNA Sequence Number=SeqID_7609
METATLGLGDGDGDGGVGLGDDGVGLGDGAAWRAPSSETVALGLGLGDGVAGAHGSETGTGTAAQQPGGVVSAPGET

SEQ ID NO: 50985 - protein, 201 aa, Zea mays
  Coding DNA Sequence Number=SeqID_7610
  Homolog annotation: Hit_ID=Q6Z6B1; Match level="QueryCoverage=19%, HitCoverage=31%, E-value=6e-12, Identity=79%"; Hit description =Putative uncharacterized protein P0622F08.29
MAVDTTQPEYWLNWRFLLCALWVYSCMALAFFLIKKSDGAEPHLMNIQFQKKMQLQVPTSVGMLFPLACDATRPARSPSGPVMASTTSSSWYSGVSKWPSSKDGRERSGVVGQQVQVQGGDLDPDAVPEGSCIVEPEEDVVAVFVCLKAEVTDGVGNHTFLDQAYFVLDFALIEEPHKELQPFHTKSGSSRLGADRDWIIV

SEQ ID NO: 50986 - protein, 38 aa, Zea mays
  Coding DNA Sequence Number=SeqID_7611
MGTHNAATSSRVMRMSRSTTLNVLLLLKEERIERANTH

SEQ ID NO: 50987 - protein, 79 aa, Zea mays
  Coding DNA Sequence Number=SeqID_7612
MKLPKKGDIFLQLSKATKESLPEVQLRFPAELDFSCDELLQLQLSFSAESASQTGSQVARGVRGRFNRPRGQFNRSWPV

SEQ ID NO: 50988 - protein, 151 aa, Zea mays
  Coding DNA Sequence Number=SeqID_7613
MGKSKKGGGSSHHSGDKRKREPTPPSEDFGDSEYLEEEFLSEFEGSPAPASPPVLSDDSDDSQGIAAEVWTYIRAVERAGLEGSDELEYSSDEENSYDPSDEGSGGDGGDGGDDQGDGDGGGDSGKGGDDSGKGGSGDGGDGGKGSNKASG

SEQ ID NO: 50989 - protein, 135 aa, Zea mays
  Coding DNA Sequence Number=SeqID_7614
MTISVSASQDNNSFDLEFVVPGDESAGPTPKRIAWSARGSQRCGHGCVGSGGQGWSVATDVAVPLGHQVLRLASQADESQDLSSGRGRGYASAEDMLEFGSGCMMPTRCPSQVDHVICLGPLRFSGFQPIVHSTV

SEQ ID NO: 50990 - protein, 148 aa, Zea mays
  Coding DNA Sequence Number=SeqID_7615
MGKSNKRKREPTPPSEDFGDSKYSEEEFSSESEGSPAPVSPPASSDDSDDSQGIAAEVWTYIWVVERSGLEGSDESEYSSDEEDSSDSSEEGGGGDGGDDDDDDGGDGDDDDDGGDGGSRGGNGGSEGGSSRGSNGGGSSKGSNKASG

SEQ ID NO: 50991 - protein, 65 aa, Zea mays
  Coding DNA Sequence Number=SeqID_7616
MRLLDPCRAQETSGNVLTWQKKLIAKCLIPCSLEDMVAGVTWPSILPPGWTVEWDPTSAEEEHEE

SEQ ID NO: 50992 - protein, 271 aa, Zea mays
  Coding DNA Sequence Number=SeqID_7617
MEGGYSSKVTAQKFPVTARCGIGAACDRHRGISCPQGRSNLHQCHGYFRRALSSCGLCVPRLWEVSPVQCTTTQWWWRRRTHNSTEARKDSDGIPRKVVSTAEFGPAEEDRPVQGVPLAAGVAELKRGESRVVDLVRGSREAVRQHGRECRTAWWVHQVGVELWNGTWDARLTRGPRIAEVREVMLPARPRVGHIFYLGMSFTQLWKFHHELPYAWGEKGLNELCGMLKTSEGDINKNAGSSGHGTTVKSKPNFKKGKSQEKGKAKDMIFK

SEQ ID NO: 50993 - protein, 22 aa, Zea mays
  Coding DNA Sequence Number=SeqID_7618
MRMEHIVKSAAKSVFLHCERDI

SEQ ID NO: 50994 - protein, 265 aa, Zea mays
  Coding DNA Sequence Number=SeqID_7619
MLSSSSSAANTLPADASSEDTLSNVAAEELHLGDTVEFGVSRISSVRVQDMQQFGYFGSGVGRVLGAEEVPEPEGELVVFEAFFTAGLHLPAHRFVAEVLQRFEIQLALNKCEVPTSVFEALGLVDITWMVISLQEQGYWGPPVFGHDEVDNAMALGVGGYLQTLWAADGWCASDVVEHVGGQGFASSCCFGQRVGFFVFSTVHMLQGETLELLFKTANGRGHAECFQLAKAQDNDFVFCYVIRASVGFQSEAEACCVSVLDTGG

SEQ ID NO: 50995 - protein, 29 aa, Zea mays
  Coding DNA Sequence Number=SeqID_7620
MAGTQGSLGSTVADSTAWGRLWVFNSNSN

SEQ ID NO: 50996 - protein, 211 aa, Zea mays
  Coding DNA Sequence Number=SeqID_7621
  Subcellular localization annotation: CTP_CleavageSite=78; ConfidenceScore=5.64e-01
MSSRSLMHRVFPPSKPPDGGCPQSFRLVVGGTQLRGSWHLSAIVRLQGFSSVSPAAPLRRRSPETVTTSPWVGRSEPGCDLGPTLSFKDVHHPRWGGDRAEPELYLPRGFVGRPLLRRSRERALTGPAGGSDFDNTGLVDGGRRQPQRVGLVGLAPGAPSCRKAVAVPCAREDCPRYRALPGRRSCSRAVLPLHRYGASTWRSVPHSTGRI

SEQ ID NO: 50997 - protein, 186 aa, Zea mays
  Coding DNA Sequence Number=SeqID_7622
  Subcellular localization annotation: CTP_CleavageSite=59; ConfidenceScore=5.16e-01
MARARAYKAPRDFDCTPPHALDLTGAQSHRRLPVHGVSAAARSPCHRRPANRTLPNPVQPSEKSVHTSVKLLSEESEFASPEKPVHGRRTPPDRRSPWFGRNTRRRREHPPARVDWTIPATPVAEPYTVVTAKTSRSQPRPSPDPSRHRKQGKLRKNPYKNNPKAKNTPNPLGIINVFVMKNIGKI

SEQ ID NO: 50998 - protein, 274 aa, Zea mays
  Coding DNA Sequence Number=SeqID_7623
  Homolog annotation: Hit_ID=A2XFR6; Match level="QueryCoverage=35%, HitCoverage=27%, E-value=6e-13, Identity=37%"; Hit description =Putative uncharacterized protein
MVRTIQTTQINTNYIPPPWKVPIYLVVVEEIPVDLPRIRVENGVILEDSSEEFRTTPTSLAESLAFVAGSSDLAPPTPAVQAPAPIGDDPDDSGDDDEDDEEEEEEEEEEENVNEKANDEQQDHYVGLWPITEHYTSMFEIGHFPNLLQDVLHALGTYVRPLYETRRVYKPPWACYYNTRIHVKVMDAGDRGFRTLSAHESLTPLSTYAASVSDAARQTLWSLSHTYQQQLHNMKYRHLPLHICGESQTIIVLGGAGEDRLNTLAGVVAILTPT

SEQ ID NO: 50999 - protein, 161 aa, Zea mays
  Coding DNA Sequence Number=SeqID_7624
MELTGAPKSATQSSKPNRIGLHDANAIANLGGGYSPEIKGRTRNCCGLHHGVAARRRGIAVAPRPLPSIAATGGTPKCQRPTLALHRGQTAHGDGIRRRRTGFHSASPLRLWKGGGKAQGKGKGEWNESATEAFMHQRGPRGPVLAGEVRRRYRRSPRGVC

SEQ ID NO: 51000 - protein, 143 aa, Zea mays
  Coding DNA Sequence Number=SeqID_7625
MGKNNKRKREPTPPSEDFGDSEYSEEEFSSKSEGSPAPIPLCESSDDSDDSQGLAAEVWTYIRAVERSGLEGSDESEYSSDEDSSEEDGGGDGEDDDDDDDEGGGDGDGGGRGGSSGSKDGDGGSSRGGSGGGGSRGSNRASG

SEQ ID NO: 51001 - protein, 568 aa, Zea mays
  Coding DNA Sequence Number=SeqID_7626
  Gene Ontology: Mol. function=carboxyl- or carbamoyltransferase activity; Cellular component=ornithine carbamoyltransferase complex; Biological process=amino acid metabolic process
  Homolog annotation: Hit_ID=Q8SA97; Match level="QueryCoverage=54%, HitCoverage=64%, E-value=1e-124, Identity=69%"; Hit description =Ornithine carbamoyltransferase
  Pfam annotation: Domain name=OTCace; Domain location=101-238; Score =42.7; E_value=1.3e-09; Accession=PF00185.15; Description =Aspartateornithine carbamoyltransferase, AspOrn binding domain
  Pfam annotation: Domain name=OTCace_N; Domain location=15-97; Score= -62.3; E_value=0.0032; Accession=PF02729.12; Description =Aspartateornithine carbamoyltransferase, carbamoyl-P binding domain
  Pfam annotation: Domain name=Peptidase_S28; Domain location=282-565; Score=-180.6; E_value=0.0033; Accession=PF05577.3; Description =Serine carboxypeptidase S28
  Pfam module annotation: Pfam domain module=OTCace::OTCace _N::Peptidase_S28; Domain location=101-238::15-97::282-565
MALLLTWLVCALGWAMWKLSEAELCADGGYQLRIRSLEGTPNYGPRQTDIIILAVFFSVFLDILDLAKYAYVPVINGLTDYNHPCQIMADALTMLEQIGRIENTKVVYVGDGNNIVHSWLLLADVLPFHFVCACPKGFEPDAHIVEMARGAGISKIEITNSPREAVKGADVVYTDVWASMGQKEEVDYRKQKFQGFTFNSTPGWRHSILVSRDKKRCYCRRTQSFGARFCRYAINVHVAVKEGCRAANPPPPPPLLPAINVHASHRAADPPPSSPSARRPWLDHFSFPGVEDEDEAVVFFQQRYLVGRDSGWAGPGGPIFFYCGNEGDIAWFAANSGLIWDAAPRFAARGNRSSAASLVSYSYLFFVLKTFRLKRYIVYGASDGRSLAYSDSKFPTYLTAEQALADFVVLLTDLKRNLSAEGSPVVLFGGSYGGMLAAWMRLKYPHIAIGVLHHQLRSCSLRTLFLLLYSMISYLMILGTLKTSGDLSDWLSSAYSYLAMVDYPLPSEFLRPLPANPIKEVCGNIDSQPKGIGTLERIYAGVNVYYNYTDIVDCFDLNDDPHGMGGWD

SEQ ID NO: 51002 - protein, 154 aa, Zea mays
  Coding DNA Sequence Number=SeqID_7627
MLVDYTMVLDGPSVSVEGPTQQGIESVVEVTPASSVTSDGSCDPSLRLRLLRELRAMARTATSVVIVSVSVKGASLAEVKGKAASQTPPPTEARGKSPATPALAPTPGVGAPAPHAGDDAVSPVDWTILTLCDAVNAPPGEKAKRGSQTYVQCT

SEQ ID NO: 51003 - protein, 148 aa, Zea mays
  Coding DNA Sequence Number=SeqID_7628
MAEASFHVFDASWHPGARSEHAPQACPPEFKNPPAHVDREPPTTPAACARGQGSSDHLRHRPAHRRDRRDLPDVTDHPAGALLPPFYPLFYDMLKDKENRKDCNLADGEYILVPEQGAAQEVAPDPAPEPAPEDLPATALEGKPRFYA

SEQ ID NO: 51004 - protein, 117 aa, Zea mays
  Coding DNA Sequence Number=SeqID_7629
MGKNNKRKREPTPPSEDFGDSEYSEEEFSSETEGSGLTSGPSSALGSDESEYSSDEEDSPEEDGEGDDDDDNGGDGGDDGDGGGRGGNGGSRGGNGGSRGGDGGSSRGSKGSNKASG

SEQ ID NO: 51005 - protein, 107 aa, Zea mays
  Coding DNA Sequence Number=SeqID_7630
MRSQKKALLQYQIRHLQNGHRELATAELLSLGNDSPNDLVPHSGNMHDFLLELALLGWSGWLLGQEDGLPGCSDAGIDFLLAGCFDGTAAAGSDADVGAGAGAGDLA

SEQ ID NO: 51006 - protein, 177 aa, Zea mays
  Coding DNA Sequence Number=SeqID_7631
  Subcellular localization annotation: CTP_CleavageSite=30; ConfidenceScore=5.04e-01
MRRMVMIMLMVMMAHLRHTARKSVMPFLPSCLAKRPLRRPVTGQSSHFERLYHRLHEEQKRRRQELEQHGSSFSLQQEIESVRSCSPVLPLEAPPTPPLSAPATGVAIGGDPDDGGGDNSLSFSTNLLADQEPEGWVVRPITRDAARGCHFHDALDTLLFQALDRRTWSIEYHCVVF

SEQ ID NO: 51007 - protein, 44 aa, Zea mays
  Coding DNA Sequence Number=SeqID_7632
MAPKWKRQSTTTAIIPSIDPNNLCSGGEVGNMDDFEEFQEYDEF

SEQ ID NO: 51008 - protein, 104 aa, Zea mays
  Coding DNA Sequence Number=SeqID_7633
MGVPKGCLDSFDSSEEWSRGDGDDEGDDSGDDSGEGGGSDDNSKGDSEGNDGSEGGGSNGGDDGSKGNGGDGSSKGDSGDGGSKGDGGDGDSSDGKASGIAPLI

SEQ ID NO: 51009 - protein, 360 aa, Zea mays
  Coding DNA Sequence Number=SeqID_7634
  Homolog annotation: Hit_ID=Q6J9V9; Match level="QueryCoverage=18%, HitCoverage=33%, E-value=1e-06, Identity=43%"; Hit description =Putative uncharacterized protein
  Subcellular localization annotation: CTP_CleavageSite=87; ConfidenceScore=5.55e-01
MQAACNRAKWAHFSDSQHAQHGGPGPRVMQPARRMLRACNYTATCATTAPPRLRNQYRDSRRPSARPSGASLARRRSERRFAFAIMTASKKGPGKGDTPKRILPREGTRLQASLLIRGSKAGPSEGFNSRLRARGLHTHYWSEVRRPAPRKGSTATSGYSGSAPTTDQGGNDLVTESHQREASSPRTPSPGDRVRQITRSSPETPCSAPAEGNMALSPPPSSLRKGDAGAQTVDSVNILVRELGTRPYTRATASSHEGTTRPAEALRKALRPRRSQTTPLRPRGLHPAGALARTHRNKTQPRKAGPLAKKCDESLQASANTPFEARGLLSGTIIRGTLKAPNSQLVTPISIKLQRPDGCD

SEQ ID NO: 51010 - protein, 520 aa, Zea mays
  Coding DNA Sequence Number=SeqID_7635
  Gene Ontology: Mol. function=ATPase activity, coupled to transmembrane movement of substances; Cellular component=integral to membrane; Biological process=transport
  Homolog annotation: Hit_ID=A2WY74; Match level="QueryCoverage=85%, HitCoverage=78%, E-value=1e-179, Identity=73%"; Hit description =Putative uncharacterized protein
  Pfam annotation: Domain name=ABC_tran; Domain location=303-490; Score= 202.1; E_value=1.4e-57; Accession=PF00005.18; Description=ABC transporter
  Pfam annotation: Domain name=SMC_N; Domain location=233-494; Score= -123.2; E_value=0.014; Accession=PF02463.10; Description=RecFRecNSMC N terminal domain
  Pfam module annotation: Pfam domain module=ABC_tran::SMC_N; Domain location=303-490::233-494
  Subcellular localization annotation: CTP_CleavageSite=47; ConfidenceScore=5.68e-01
MPPPAAMLLLTAASGPPTLSLTLAARRAPLRAPSRRRLRALRPARIRAAAAIGGEFGGLGRRRVVVGEFIERLRNVLPGGSWWRLEDGDEAGDGAGRAEGSGTTAVSALRRMWALVAGDRLVIYVGFASLVGAALSEIAIPHLLAASIFSAQNGGAVFYRNAKLLVVLCLVSGVFRFQKRAAKFAQEFTANANNTVAYGGWSLSLNYLYHSTQVIGVVIGGLAIMSGKLTAEQLTKFTLYAEWLILSTWWIGDNWSSLMQSVGASLKLEKLKGQIQYADVSFSYPSRPTVPILGGLNLTLNPNEVVAIVGLSGSGKSTIINLLLRLYEPTNGQILIDGVPLTELDIRWFRERIGFVGQEPRLFRMDISSNIKYGCPRDVSHEEVIWAAKQAYAHDFIMALPDGYNTIVDDALLSGGQKQRVAIARALLRDPSILLLDEATSALDAESEHYVKSVITKVSRDSKAKRTVVIIAHRLSTIQTADRIIVMENGNIVEDGKHIDLIEKGGLYSRLARRQNDDLK

SEQ ID NO: 51011 - protein, 229 aa, Zea mays
  Coding DNA Sequence Number=SeqID_7636
  Gene Ontology: Mol. function=catalytic activity
  Homolog annotation: Hit_ID=A2Y3P0; Match level="QueryCoverage=53%, HitCoverage=38%, E-value=9e-21, Identity=47%"; Hit description =Putative uncharacterized protein
MYDKLRRSRRLDAVQSGCSALSIVKQGDLMVVANVGDSWVVLGTAFDDDAITSSSSSSTSSPTCHGYYLADEPGMHFVLQPSQESSVLGMSRTFDDYYIEDCGVILAPEARQYDHTQVQYQDKWLGAKSLQRNRNREHGRGEPDGAGPGQAIPRPVTVRTRFSSTSLWIAAVHEGDRSIRNLLSPAGTKTQDATKAGTACCMPAAMQNARRPSVRPQSVLPAHASSAVR

SEQ ID NO: 51012 - protein, 61 aa, Zea mays
  Coding DNA Sequence Number=SeqID_7637
MEGDGVAGGNGGGCTAKGGRGVVVGGGARVWGHEGSALILTLVPCFKGKLPGIFLGKALFS

SEQ ID NO: 51013 - protein, 279 aa, Zea mays
  Coding DNA Sequence Number=SeqID_7638
MEQRPGLERLLETTHLELDGKLFVNTQQAPTWRANCRRFDPRGPWTDEGLRTSVVMGERGVPSLLVYRGEPDGTPPKVGRGGDSSEVEAESEPWGRARRRSSSEGEAESEPWGRARRRPSSEVEAESEPWGRARRRSSSEVEAGAEPWGRARQSFLWRMRLDSATVSLTLAGGTAVGAGQAVLFSCQAFAACADGGYQPSLGVLGVPLIMVPDNAQLWLDDHGRQTVSTGHAKNMQLSDDGSTQGELSDKTRVLHSNHMTQPSSYDTNTASCCQGAVNA

SEQ ID NO: 51014 - protein, 171 aa, Zea mays
  Coding DNA Sequence Number=SeqID_7639
  Gene Ontology: Mol. function=UDP-glucuronate decarboxylase activity; Cellular component=Golgi apparatus; Biological process=cellular metabolic process
  Homolog annotation: Hit_ID=Q8W3J0; Match level="QueryCoverage=66%, HitCoverage=40%, E-value=3e-54, Identity=79%"; Hit description=UDP -glucuronic acid decarboxylase
  Pfam annotation: Domain name=Epimerase; Domain location=8-171; Score=- 53.2; E_value=0.0034; Accession=PF01370.12; Description=NAD dependent epimerasedehydratase family
MSSRNVSASQAGAPRQQRPEGGEDRATVARVRVKEERRHAAEEVRGGGGLAGAAERGDVIEPLLVEVDQIYHLACPASPIFYKHNPVKTIKTNVIGTLNMLGLAKRVRARILLTSTSEVYGDPLEHPQTEAYWGNVNPIEIRIARIFNTYGPRMNIDDGRVVSNFIAQAVR

SEQ ID NO: 51015 - protein, 100 aa, Zea mays
  Coding DNA Sequence Number=SeqID_7640
  Subcellular localization annotation: CTP_CleavageSite=28; ConfidenceScore=5.07e-01
MQAACNCTTGMHPFDFDASSVAAQAHTSCNRRVGYYGRKTAPPLAPVPRFLDCGTGAATRGNPAHSPIMLTKRIGHGDRERGYSERDPSPRRKRAPSPHY

SEQ ID NO: 51016 - protein, 172 aa, Zea mays
  Coding DNA Sequence Number=SeqID_7641
MGSGCTSAREEVFAPVLTTGVRIRPSKNAASTRTAYDVLYDLPVRLVVREKPWVWPTRTRRDHRPCGGRAATLRPSGRRQHQRRHQSSPGQGARHVAPDDATDGRPHWSERRTVAQGACNCPTVRRPFVFAAPNGQRGEPPRKERTTVLRLCAPSSPPQLAVQRGGPGPHDM

SEQ ID NO: 51017 - protein, 91 aa, Zea mays
  Coding DNA Sequence Number=SeqID_7642
MGSARVAFVSLWEERNLVEVGTFQPSLGFKDFHQAARLHPLTNGDRALTGLAEGADFDNAGPIGRKRRQLQHAWFAGSASSGTASGATSHR

SEQ ID NO: 51018 - protein, 388 aa, Zea mays
  Coding DNA Sequence Number=SeqID_7643
  Gene Ontology: Mol. function=protein binding; Cellular component =nucleus; Biological process=cell division
  Homolog annotation: Hit_ID=Q8S522; Match level="QueryCoverage=100%, HitCoverage=100%, E-value=1e-156, Identity=74%"; Hit description=D -type cyclin
  Pfam annotation: Domain name=Cyclin_C; Domain location=195-331; Score= 0.3; E_value=0.038; Accession=PF02984.10; Description=Cyclin, C -terminal domain
  Pfam annotation: Domain name=Cyclin_N; Domain location=60-193; Score =131.4; E_value=2.6e-36; Accession=PF00134.14; Description=Cyclin, N -terminal domain
  Pfam module annotation: Pfam domain module=Cyclin_C::Cyclin_N; Domain location=195-331::60-193
MAPSCYDAAASMLLCAEEHSSILWYDEEEEELEAVGRRRGRSPGYGDDFGADLFPPQSEECVAGLVERERDHMPGPCYGDRLRGGGGCLCVRREAVDWIWKAYTHHRFRPLTAYLAVNYLDRFLSLSEVPDCKDWMTQLLAVACVSLAAKMEETAVPQCLDLQEVGDARYVFEAKTVQRMELLVLTTLNWRMHAVTPFSYVDYFLNKLNNGGSTAPRSCWLLQSAELILRAARGTGCVGFRPSEIAAAVAAAVAGDVDDADGVENACCAHVDKERVLRCQEAIGSMASSAAIDDATVPPKSARRRSSPVPVPQSPVGVLDAAPCLSYRSEEAATATATATSAASHGAPGSSSSSSTSPVTSKRRKLASRCDGSCSDRSKRAPAQWTKE

SEQ ID NO: 51019 - protein, 730 aa, Zea mays
  Coding DNA Sequence Number=SeqID_7644
  Gene Ontology: Mol. function=oxidoreductase activity, acting on the CH-OH group of donors, NAD or NADP as acceptor; Cellular component =nucleus; Biological process=metabolic process
  Homolog annotation: Hit_ID=A7PZI9; Match level="QueryCoverage=85%, HitCoverage=89%, E-value=1e-137, Identity=47%"; Hit description =Chromosome chr15 scaffold_40, whole genome shotgun sequence
  Pfam annotation: Domain name=2-Hacid_dh_C; Domain location=120-372; Score=48.1; E_value=1.2e-13; Accession=PF02826.10; Description=D -isomer specific 2-hydroxyacid dehyd
MAHSPAPSGGGGGGPLPLLVSLNCLDDLSLEQEGLAGVAAVEHVPLSAVACGRIEAASAVLLPSLAFLPRAAQRRLRPWQLLLCLGSADRAADAAAAADLGLRLVHVDANRAEEVADTVMALILGLLRRTHLLSCHASSVPAAGWLGSVQPMCRGMRRCRGLVLGIIGRSAAARCLATRSLAFRMSVLYFDPRYVGLLYRLSNFSTTITTKGVFGNTVFQNHGISNTTVYKCHDMISVFNTTVLEYHGFEYMEVFGNKASGKTKRPSIVFPSAARRMDTLNDLLAASDLISLHCGLTNETMHILNADCLQHIKPGAFIVNTGSCQLIDDCALKQLLIDGTIAGCALDGAEGPQWMEAWVREMPNVLILPRSADYSEEVWMEIREKAITMLQSFFFDGVLPSSAISDEDEEISEAKNEDDYLGPQAKDSQSQIFDTEIDESHITLESEKKRAISHHKEPQASGKSVNIGSRSEGRRSRSGKKGKKRPAHRRPQQKPDDLSAVESDSNYSSRRDDDTAMSSRDQVVSSSSRFASPEDPKYKHKSLSESPMEITSEKKVPVLLSRKYPDKLKDGFIVALRARDNSGYHVARQRVVGGGGWILDVVSNATNRDPAAQFLVTFKNKINRKMEFVFASHSFDVWESWMLDGSLLEVMVVEVVLAGGGGSMLVRLEVKVSTCSRGWPHLEEARGVIIGAERGKHGKRSTVTDSPSEDVRSHEMRKISLFHGWKEIGD

SEQ ID NO: 51020 - protein, 98 aa, Zea mays
  Coding DNA Sequence Number=SeqID_7645
  Subcellular localization annotation: CTP_CleavageSite=37; ConfidenceScore=5.21e-01
MAQPTVADAGAVGAPDMSGAHRTVRCPLPTVGSATCPAQIARPTVGPADRWLTGQSGAHQTVRFTFKHLCWHSITKILRNGPRAHFPFSDAFPLAPFE

SEQ ID NO: 51021 - protein, 250 aa, Zea mays
  Coding DNA Sequence Number=SeqID_7646
MWRPPRVRYPRYSSTSRREETSGSSYLALATASTRPEPSIRRASPPASRQVGEKRPCGGGSGGVELAALATDDARPTAIEVPSEVPLARRRRVAIGKRLCRPPTSSKVAGKRKRSSSLPSSSSSIRSTEPDPRRPRVVQKRSCDIVDVVKSAFQPFNSPLLDELNRALVEIDDLAKDLEDVAVQTQWEVENMANCQVNDNRRQEEAVEELLIEDGSEDELLIDEESPINYEELVGYNDGRDYSTDDTYPY

SEQ ID NO: 51022 - protein, 307 aa, Zea mays
  Coding DNA Sequence Number=SeqID_7647
  Homolog annotation: Hit_ID=Q8H6I5; Match level="QueryCoverage=20%, HitCoverage=6%, E-value=1e-07, Identity=57%"; Hit description =Putative RIRE2 orf3
MVTTSLMVGRSKPGCGLCPALSFKDLHHPCCGGGQAESGFYLPHGPVGRHFLQHSGERALTGLAEEANFDNAGPVGRKRRQLQRAWLAGSAGSVAASDAASYRLIRAWSSVHRTGGRCACAPGDRPRRRTLLGRRSCSWIVLSSLWHDASTRSGRRRATWSLLSRRPSGVEVTNEVSVFRRRRSPSARSALPLKASLAQFENLLPLCDELEPEAAVSAWTKAESAQKEASSAQERVASQAEELQQRRLELGQVIRERDQPRSHATEAVSRADVLGGQLAEATKRPVEVSARAGTLAETLATMAQARC

SEQ ID NO: 51023 - protein, 401 aa, Zea mays
  Coding DNA Sequence Number=SeqID_7648
  Homolog annotation: Hit_ID=Q6QP51; Match level="QueryCoverage=80%, HitCoverage=93%, E-value=9e-23, Identity=55%"; Hit description =Putative growth-regulating factor 1
MQVVYNHTAGAHPFGFVASSMEAQAHTSSAPEHSGFRLITDQGFEGWPLRRVRQPPQSTRAPRPLLIRGSKVGPSEGFDSRPRARRARDDSRYVCYMVEARATLPRKATKGRMIKVETVLDRPLTPCRGSRAALANPATAKPLTASTNQHENSEPDHAPGLQSGQGFVCSRNAISPHPSPASGGNSSPRQILASPEGFFKQWMLSRLARTPARAGFVVKQPWPNRLTHRPYRRRIQCEDRLTPYPDTRALVGKVEPSSASCAIGSSASPDPRARPPLRPRKVVSASPDPWVRPQPRPRKEDSTSPDPRARPQPRPQEESRPRPTPASASGGVSALPDLGLGPTTPRGYIITLPLASSGYGGTRPPPTEARRRQQDPSSPDSCASTGLKRSSDGHDTAHTGL

SEQ ID NO: 51024 - protein, 156 aa, Zea mays
  Coding DNA Sequence Number=SeqID_7649
  Subcellular localization annotation: CTP_CleavageSite=28; ConfidenceScore=5.24e-01
MKKVAVVATILSGIWKHKSNCFNQNSVTGMIYGSRMQPSATCKTNSQNEILDWAINSRPFAWAKEAKARAHVEELSLAMDNLQVYYNTLHEEVHVLYSQLHPNVPVDLVGMEAGPSHVAGEALDGEPDLFRPPPSMKLVDEWSSTPDSKATKSKKK

SEQ ID NO: 51025 - protein, 151 aa, Zea mays
  Coding DNA Sequence Number=SeqID_7650
MGDGGSPARARTREGPCAMAGAEGLAWLSSARGKKGCPRPWKKKAQGAWNDYAGEGRCPWEGLLLGGMELGGHGVSAPAHAQETERRGCCAEEADQGVEKGAEHMGSGCHGRGCWLSREEQGEGWASMAGASARGGRGLLAERVAARRVDE

SEQ ID NO: 51026 - protein, 146 aa, Zea mays
  Coding DNA Sequence Number=SeqID_7651
MDRDSRAAAGRHGRRAEPPACCTPGIVEGGRSGWSRLAQRREEGREAAGEGACPRLGEEEAPWGAAASPGYGPRRGRSKKLQRAGEKGSLLQPLSRRRSREDARPATEGLRVGYRQLELSHGKGASAPWLEMELPWGRIGWRGGDG

SEQ ID NO: 51027 - protein, 60 aa, Zea mays
  Coding DNA Sequence Number=SeqID_7652
MSLPRSLLLGVFFSTEGPQDKDTIGKVILKTFFFSAEGPQEEDLVWKQRWQVPKLPPALA

SEQ ID NO: 51028 - protein, 131 aa, Zea mays
  Coding DNA Sequence Number=SeqID_7653
AERIISVKCRSKFMIETGPIKAFVEDEPNRKAWRKDNVRLAAVVNEDFVQVPACHTAVDYHGVDVGCAAQINISGVKGLVDAEAGVGVVRLVPSSGADMRGWVDAGRGRGFFVVKQAVISARLLRLSLAPA

SEQ ID NO: 51029 - protein, 96 aa, Zea mays
  Coding DNA Sequence Number=SeqID_7654
MAPKRASSKAAPSVDEAAKAALLAVKKGKALADNTHQEAYKDDALCKRQRNDQPTPEGTLRTCSFGGQPQEPPPGFSPLEGEDATEESEVIGVLAD

SEQ ID NO: 51030 - protein, 135 aa, Zea mays
  Coding DNA Sequence Number=SeqID_7655
  Subcellular localization annotation: CTP_CleavageSite=30; ConfidenceScore=5.11e-01
MSGAPGRIAFELFTFGFLRRSPTIIHRTVRCTTGQCPVLQREAAPNFSFGKTGGRSAKIHRTVRCAPDCPVRQRSNGYLAPTVDSDSEQCETVHAAEVRAENQRDTGLSGVHRTVRWHMRTKPPTVDQLQPQQIG

SEQ ID NO: 51031 - protein, 62 aa, Zea mays
  Coding DNA Sequence Number=SeqID_7656
  Subcellular localization annotation: CTP_CleavageSite=53; ConfidenceScore=5.16e-01
MKLWKETSRSSKTTTSSRRGLAATPSRLPVKAAVIYVSFSHFDLFSFSGHDLLASGITSYPV

SEQ ID NO: 51032 - protein, 47 aa, Zea mays
  Coding DNA Sequence Number=SeqID_7657
MATIHADVDMAGVDGASGEEGELTGGTRWSADPRPRTRASEAPRRVI

SEQ ID NO: 51033 - protein, 152 aa, Zea mays
  Coding DNA Sequence Number=SeqID_7658
MGKSKKGSGSSPRSGDKRKCEPTPPSEDFGDSEYSEEEFSSESEGSPAPVSPPASSDDSDDSQGIAAEVWTYIRAVERSGLEGSDESEYSSDEEDSSDSSEESSGGDGGDDGDDGGDGGGGGDSSRGSDDGSKGGNGSGSKGSSKGSNKASG

SEQ ID NO: 51034 - protein, 699 aa, Zea mays
  Coding DNA Sequence Number=SeqID_7659
MPSLGGQRVRSPAFTLDLHGRDLAAFVHEAKDGAARIVGRYVPRTEGLRSWDIRGSNEAAPTTKKRKLGIVVGVGVSESFAVDLMGTCAALGGRMSSPELRESSARMLENIAAVVSAVMERDRQDAAQKRRAVVRIMDPMREAKKARGSAKVAASGGSKPVAAAKPAAPGHSKAAASAKAAAPGGSKPPPGGLGKGRRPLSPARCIADFGTDISIEDYLVGKVFNKYHGVGSGEGQLTVVLPPVATTSPTAVVGAKCAARDPWATFCASGEILSAAAAKDMAGSMSQRLREASQQLPQQLKQAADFADLVASAALTADVLLRSSVSGHSMRDAVREKSAAESKNRRLSEKAEAKVARAEGSLACQRAEELEARFNALRSRVDKAESSTRAEVERTHAQFVDAYRELGARTADFEVPGQEAGLCFLEWLQEELLVLPTIVTGFMSFASLVTCEGAMNALSHEGCRHYEVFDQANENFEHEIFKVEDPVVKQSAGALFDRMWGPHGQEAVRDRSDRAIEQMVHAEDVEDLVGLDDALPEATEVNPVPSSDAGEGTSAILVPTAAGEGPAPAPAPTSEGALKVVAEPTAEPATEGPTATAGPSQVLGFVPAHATATDNAIFVAASTVAADDDSFGYVSKCFESDDSGSSIVWTEESSDEDLDYFAALDVATAETSPRVVGAEAPPGVIVVRWRVFVFVWTGL

SEQ ID NO: 51035 - protein, 107 aa, Zea mays
  Coding DNA Sequence Number=SeqID_7660
MAMMGSTSEKMYLCQDRVDVGLMTEDPLTGHMPRHGIHFSKHFCKTESLIIEKPYLDSLNQHTLESLFFSRVRKRQIFVASAPRWFPRKKNKSEAAGGLGPPLGLLF

SEQ ID NO: 51036 - protein, 70 aa, Zea mays
  Coding DNA Sequence Number=SeqID_7661
MRIRLKKKRMKIKMMSYLKRRTLIKGEKKIIKTTKMIKKFRIKDRHTHESTKQFKEITLSTPFLVTFTRG

SEQ ID NO: 51037 - protein, 349 aa, Zea mays
  Coding DNA Sequence Number=SeqID_7662
MGDTRHLSALSLGERNSAGVGTFQPSFGFKDFHQPARLYPYAGASRMFIILAGVEAGLSRSSTSSAGSWVGLSFGVRGRGRSLALRAGRTSTTRGRSTADVVSLSASGSSAWLPVPPPAGRRLPRRVHGRTTQDIARCQGGVRVLGRSCLRTGMAPPCGGRCPTCLGGSEWGSAGGLTAPVVGAEVEATREDSLGSVSLVVRGFPCLVRGTPRPLFDEPRPGVAVSARTEAELARKEDLVDRSLAGSSVSGTDTGIDLPRPRAGLMSLEDSWSRPRGDQPSLLLGPDSRRRPWRRWPGLGDDVVLQSRDPWTVSPSEARSGLTEGVVDAEGAAAPFSRQDLSLQDRIIL

SEQ ID NO: 51038 - protein, 181 aa, Zea mays
  Coding DNA Sequence Number=SeqID_7663
MALLDPPECLQAKVALNLVRNLLGWGALAFARRICVGASPLGDLAAGEFVFFVSNLPCGLALPISSFFVLLLEELGLQLSALHALLHPPGSHLRLPLRYVRGGDASSVSARTKGLEVSRLDSSISKKELMSWPPGEVLYVPEVGKRHSFSCGKVDAPGSAYFRHLEGSFPAGGEFEEPFLV

SEQ ID NO: 51039 - protein, 24 aa, Zea mays
  Coding DNA Sequence Number=SeqID_7664
MSPDAHRSNLAYDTRARAHKSFSW

SEQ ID NO: 51040 - protein, 159 aa, Zea mays
  Coding DNA Sequence Number=SeqID_7665
  Subcellular localization annotation: CTP_CleavageSite=65; ConfidenceScore=5.62e-01
MGSGEAEVVRPRPGRSPSPVPRVPSPGGRGGAGVFVVFPGLSPSPSSGGRAERSFAVFGVLARVRALGSGGAEFAVFRVLARVRALGSGGAEFAVFRVLARVRALGSGGAEFAVAALSFCQTGQWSGGVTVVTSALPGARVRMKLYADGGYQLRIRRLE

SEQ ID NO: 51041 - protein, 148 aa, Zea mays
  Coding DNA Sequence Number=SeqID_7666
MAAVEVMGSEVSCGTVKKVHTQPIKRPSFGFNKGAKGQPRAPLVWRTGLSGVPPDSKQYLSGAPGDSDSNSSPSGILGSRRAIIHRTVRCAPDMSGAPRKLGLLNSPASGSRGSRSAIIHRTVRCAPDCPVCQRSNGSLRRQRLPAVH

SEQ ID NO: 51042 - protein, 198 aa, Zea mays
  Coding DNA Sequence Number=SeqID_7667
  Gene Ontology: Mol. function=galacturan 1,4-alpha-galacturonidase activity; Cellular component=extracellular region; Biological process=cell wall organization and biogenesis
  Homolog annotation: Hit_ID=P26216; Match level="QueryCoverage=94%, HitCoverage=45%, E-value=5e-98, Identity=91%"; Hit description =Exopolygalacturonase precursor
  Pfam annotation: Domain name=Glyco_hydro_28; Domain location=68-198; Score=-128.6; E_value=0.0096; Accession=PF00295.8; Description =Glycosyl hydrolases family 28
MACTDNVMRALFLLALFCVMHGEKEESKRIDAKASGPGGSFDITKLGASGNGKIDNTKAVQEAWASACGDTGKQTILIPKGDFLVGQLNFTGPCKGDVTIHVDGNLLSTMDLSQYKEHGNWIEILRVDNLVITGKGNLDGLGPAVWSKNSCAKKYDCKILPNSLVMDFVNNGEVSGVTLLNSKFFHMKALTSRGRVKA

SEQ ID NO: 51043 - protein, 51 aa, Zea mays
  Coding DNA Sequence Number=SeqID_7668
MEEDRRWMYEGWKKRGALSRTMSIDLCKNGYMPGYEVWVHHGEDPPPRIVL

SEQ ID NO: 51044 - protein, 44 aa, Zea mays
  Coding DNA Sequence Number=SeqID_7669
MAMMGSASKKMYLCQRSSAEYNRFGSPYLRGYEDLVTDLYVELQ

SEQ ID NO: 51045 - protein, 82 aa, Zea mays
  Coding DNA Sequence Number=SeqID_7670
MSEKKCKVCGERRFVEVENDDGLTVKTEIARGGLPLSFMPFSKGTWETVVLSRSTTTTALYGQEMVQRHGQDYDWRNQPIDP

SEQ ID NO: 51046 - protein, 62 aa, Zea mays
  Coding DNA Sequence Number=SeqID_7671
MEYQRQQAEYQKKKDEYYSNLQAHNQALLSQLAQQAGVSMPTYGMPPLDFALPANVVASTPP

SEQ ID NO: 51047 - protein, 46 aa, Zea mays
  Coding DNA Sequence Number=SeqID_7672
MAMMGSASEKMYLCQVRKQQTFVVSVPRWSQKKNTKSKAAGGKDPP

SEQ ID NO: 51048 - protein, 158 aa, Zea mays
  Coding DNA Sequence Number=SeqID_7673
  Gene Ontology: Mol. function=cysteine-type peptidase activity; Biological process=proteolysis
  Homolog annotation: Hit_ID=Q5NKP7; Match level="QueryCoverage=58%, HitCoverage=10%, E-value=2e-14, Identity=40%"; Hit description =Putative uncharacterized protein 9C20.3c
MLYHGLLAREATQDEEFEVMYGEDDDEDKDDEDDDDYDTKATLELVARNISTKSAVAEPPHVSREECARQLFKFICSQQLDPSMSIIDFGGYGGSVLDVVQSFGPNKCQELFMQGFIDCIRDDDILYNPDTMINTLILNVNVGVGEEILRPGGGMHPP

SEQ ID NO: 51049 - protein, 218 aa, Zea mays
  Coding DNA Sequence Number=SeqID_7674
MITSAGARKRCTNRQSSFGPTCRLISSPEVGPGATVDTLKQGYPLLLCKDAVPTRLSLSCMEEVVHVGPSHDTLESQAAILGPQQRPTPPRGWLRGRRIAREDDILQDVNSGSRPHEKVPNPYTYRPDPGERTTTPTGATWTPGTGSGPLCVGSGPPTAGSQGSGTENSQALLKVRRYALAAACTMLIITRTLPGKLPLHAKAMQTADTRTQEDCTGD

SEQ ID NO: 51050 - protein, 149 aa, Zea mays
  Coding DNA Sequence Number=SeqID_7675
MGKGTKRKREPTPPSEDFGDSEYSEEEFSSESEGSPAPVSPPASSDDSDDSQGIAAEVWTYIRAVERSGLEGSDESEFSSDEEDSDGGEDEDDDDDDGDDDDGGDGDGDGSGDKGSTRGGSSTGSTRGGSSKGSTRGSGGKGSSSKASG

SEQ ID NO: 51051 - protein, 101 aa, Zea mays
  Coding DNA Sequence Number=SeqID_7676
  Homolog annotation: Hit_ID=Q8SA97; Match level="QueryCoverage=32%, HitCoverage=6%, E-value=1e-07, Identity=84%"; Hit description =Ornithine carbamoyltransferase
MAPEVGPDCLSASLCQMPLQSVRRRRRCPSVRSLYADGGYQLRIRSLEGTPNYGPRQVDGIYLNVFQESYKGKMLSYRTSSEEYTYMSQTAGHSIWDLGNP

SEQ ID NO: 51052 - protein, 273 aa, Zea mays
  Coding DNA Sequence Number=SeqID_7677
MGVPALYARWRALNAQQPKRIPEAGEFLRPLFLGAPDTVRPMPKENDSWARAAVSRAEPLPSAGMRRRGDSLLAWRFAFCAPGDKRTSRMTCGAGPSRHRLGTPVCIGGDFRWRFGAGAGESIFKKGVIPRVAAVPSLFSHSLCPFASELSAPLRLQGLCFAPLDGAPWRSVEGSTPAPSPSERDLMGVGALPPVLSFKDVHQPRGGGKRVGLRGGERAELRFCLPHELVTRLFLQHSEERTFVIIVKEANFGYVAPARPQAPSVVVHSTLWL

SEQ ID NO: 51053 - protein, 194 aa, Zea mays
  Coding DNA Sequence Number=SeqID_7678
MATLEPSTWWSWVLFTTRLETVAWAPYLHAIVRGTPDPGYRQWPPGLPQGRIRACRWGQSLFLALTWHDRCLGRHLCARRINSVRSRCQPAIGHINYRACSRDLTDPWSLHLMALLGHVRGASIPLHLVLKIHLLCLLRQPRGGTVLARAAVRLLCTQKLAPKEDDSWARAPTSETGLLVSVEVKRCTTTDGGV

SEQ ID NO: 51054 - protein, 428 aa, Zea mays
  Coding DNA Sequence Number=SeqID_7679
  Gene Ontology: Mol. function=RNA-directed DNA polymerase activity; Biological process=RNA-dependent DNA replication
  Homolog annotation: Hit_ID=O48967; Match level="QueryCoverage=56%, HitCoverage=85%, E-value=7e-63, Identity=42%"; Hit description =Putative uncharacterized protein
MGEYRTPVHCRPDLRNKVQAPCECNPGLRVGSRDSGAENAQALLRQGSGANMAGAFRHPAGDFLSDIWHTRASRAAPGALSAARELLCHPPSSTASLGAMKQWQDSVDPPTEDLRAELNRRRAAEDAPVSRERSNDLRVELNRRRAGDDARVSLERARERRQNIEGHNLDQDFAAVTPQTSVGAQIRAGVPLAGVGCAALADHLYVASWLSKFRPHLPEKYDANFASAYQQHDVEAHLHAVRQEPGETLRTFISRFTKKLATHDVETVSTLFALADNCDWGQGDRNKRPRPQRGNSGSCPVHPNGRHSAAECREIIDLAKRVNTRREQSSGDGTPPRRRPGKERVDDDEVAATEPDLGYHSLEGVLKDVFPGGSNSGDNKGGYSARTWTPSANSDVKRQPEMHFVTSWEEPFKVTEICQPGECPPCYN

SEQ ID NO: 51055 - protein, 85 aa, Zea mays
  Coding DNA Sequence Number=SeqID_7680
MGDHKDEGFEDLQLGMVLGAMDVLLIRNFIEDSKDLGKAKVWRRRSKCVHNRKEIKSDSVAIPSRVRGPVCTKIDVQDASRLRLQ

SEQ ID NO: 51056 - protein, 140 aa, Zea mays
  Coding DNA Sequence Number=SeqID_7681
MGHGRPVGLPASSSPETPCSAPIEGNMALSPLLLAERRHWKLRSARPRARTWAQPLKTANSAPPDPGLGLGLSPGRRRTPLRPTQGSDLGSAPEDGELRSAQPWPQPTVSTSLDPGARTRPWPRKTDSTSTSEEPPHRPT

SEQ ID NO: 51057 - protein, 155 aa, Zea mays
  Coding DNA Sequence Number=SeqID_7682
MGKSKKGGSSSHHFGDKRKREPIPPSEDFGDSEYSEEEFSSESEGSPAPASPPASSDDSDDSQGIAAEVWTYIRAVERAELESSDESEYFSDEENFSDSSEEDGGGDGGDGDDDGGDGDGGGGGDKSGDGGGKGGSGDGDGGSKGSSRGSNKASG

SEQ ID NO: 51058 - protein, 70 aa, Zea mays
  Coding DNA Sequence Number=SeqID_7683
  Homolog annotation: Hit_ID=Q6J9V9; Match level="QueryCoverage=57%, HitCoverage=13%, E-value=1e-10, Identity=82%"; Hit description =Putative uncharacterized protein
MRENGITNLELRYSKQPLNPGHVFQLASKKDAKILRINFVISLLNYEDNSYRYVIPANIQHRLIDIAKKD

SEQ ID NO: 51059 - protein, 135 aa, Zea mays
  Coding DNA Sequence Number=SeqID_7684
MCGPVDSSRAMCGPVDHACATRDLVDTSQAMRGPPMSVARFADPAPVYHRRGRATPSKPTDSGPSTGVAHFAEPAVYHCHKPATPADLDVPAALSKTPVYHPIAIHRDHRHIQLQIIDQRMKVINNALMRYVQSL

SEQ ID NO: 51060 - protein, 280 aa, Zea mays
  Coding DNA Sequence Number=SeqID_7685
  Homolog annotation: Hit_ID=A9NV46; Match level="QueryCoverage=25%, HitCoverage=54%, E-value=5e-17, Identity=52%"; Hit description =Putative uncharacterized protein
  Pfam annotation: Domain name=DUF1754; Domain location=171-280; Score =154.6; E_value=2.6e-43; Accession=PF08555.1; Description=Eukaryotic family of unknown function (DUF17
MTWNSSSRTTALCECSTVRRPVADFLEREEEGIPHGRRRREQMGEGRDIGVPVEPNPTEGTTSLATAAASQMRRLNGECSAQRPKTAWNRSSDSDTNTHTAWNRSSDSDSDTDTLNDVIPFASVIYISPAIPFGSAVSLQISRFHLSCSTAVSSSLSTILLKFFCYIKMLEYQNVVGGRLQLKGKALDVKDGGVKKKKKKYQREESSQTESDKNGDEKNSHSNYDHLTRAERRYMEQKQKIDIKKMAKVANKSYKDRMQDFNQYLANLSEHYDIPKVGPG

SEQ ID NO: 51061 - protein, 1013 aa, Zea mays
  Coding DNA Sequence Number=SeqID_7686
  Homolog annotation: Hit_ID=Q7XHQ4; Match level="QueryCoverage=53%, HitCoverage=58%, E-value=1e-147, Identity=49%"; Hit description =Putative uncharacterized protein P0565A07.109
  Pfam annotation: Domain name=DUF1723; Domain location=265-314; Score =6.9; E_value=0.08; Accession=PF08330.1; Description=Protein of unknown function (DUF1723)
MPESAIHGQSHGACVVGRRFQGTLVTIDSAARGSGKVDAPTVMKNMSPGERTFYTLFSGPAEQAPLEEEEEIYLWRKDFDFFADANSVMHHAGNIDDAKAENPDDFMTLVANCLGLGRGYQLVTEPAHEIIGKERKNRKRCRVPTSSRTLSTTTPDNIPFGIQKNPQEPHVSDYAGRAHILHPVLDSSKRSLDIPSSTSTLAQKMVKHPSSRWFNDCRPQLRLDVPVCRKMLIWARMMLVNHEDRSMLQKSNIYRGVLASLYCFQADPSLVAAFLTYWNVDGHTLVTSQGEMGYPLHTISDAMGIPISGRLYEEFIPPCSDVHGHLETLYAIYANLCPSELQPGPGLVSLTAWLDHFFDDKADSFGSSLLDGFADPKDPLLQKLRFHVAVQGDRLAAILGAETLSYRSIYPSTVYRAAFIAAWLCTYCIPVEAGQYIRPEVFHMVVQISEGVRRAIGVTSLAFLYNCLDNIHDNIISGTRSANECSLFLPGHFIMGWFASFWKQARKSTTLHCPVKFPPFVIDLTKLEQPMPITEAHHIFWDFDGDGRGLRSLDFLGRSSLRFPGGHRPVFIRDGRTKNEKQPFAISVSAMELLMSSLFGGITHRRGERSDNLVYCPHRFAHMFNYDQLIPYFDYRAADNVTDSLNFRSYSPSSRKETLQICVRRHLSYYDQPEGHALVVQPSNLGTRRSYNYIIWCNNAFRFLRDPSFFCDRIFMSAVIETTVAAPAEGDIDQPAKETAVIKYSLLPGDSEHDREDTTPTTVSRLGQGKNIGIIQARLQDKASALTSSSELPLLVDSGQSTHTSKGSRANTDLLDDTLSDGGLACPPDDPDFLNDFVFTGALEPFTDLFTDLPNEVMEMQASHTQVPTSGNLEQTDMVHVSQPVSSTGLMSSLDQDVPSTQPGSNQASVHKVNTPKRKAYDTDNLAASDPKSKKTSKDKHRDLELVVESEQLWNEVEQAISLFRAQASATDVIGEKPNYSEFDARQPVHIFEPTDVPAPRFMQYAHGDLDRF

SEQ ID NO: 51062 - protein, 45 aa, Zea mays
  Coding DNA Sequence Number=SeqID_7687
MGETFLKTWMLEVVVVGGVFIAPKAPTTKVAVGEAADDGRTGQVR

SEQ ID NO: 51063 - protein, 338 aa, Zea mays
  Coding DNA Sequence Number=SeqID_7688
  Homolog annotation: Hit_ID=A9NV46; Match level="QueryCoverage=21%, HitCoverage=54%, E-value=4e-16, Identity=52%"; Hit description =Putative uncharacterized protein
  Pfam annotation: Domain name=DUF1754; Domain location=240-338; Score =122.0; E_value=1.7e-33; Accession=PF08555.1; Description=Eukaryotic family of unknown function (DUF17
  Subcellular localization annotation: CTP_CleavageSite=70; ConfidenceScore=5.43e-01
MAASSTIMPLVLSLSPTVSSLDASARASSHLTCGPIDPACATRGLVDHTSTTCNPVDTTCATRGPVDSSRAMRGPVDSSRAMCSPVDHAYATHDLVDTSQAMRGPPTSVARFADPTLVYHRRGRATPSKPTDSCPSTGAAHFAEPVVYHCHKPATPADLDVPAARSKTPVYHPVAIHRDHRHIQLQIIDQRMKVLQYSMPGCRWSSDSDTDTNTDTAWNRRSDTDTDTDSLNDAIPFALLKGKALDVKDGGVKKKKKKYQRKESSQTESDKNEDEKNQHSDYDHLTRAERRYMEQKQKIDMKKMAKVANKSYKDRMQDFNQYLANLSEHYDIPKVGPG

SEQ ID NO: 51064 - protein, 178 aa, Zea mays
  Coding DNA Sequence Number=SeqID_7689
MVDEAACGAGRVNGAAREMGRGASRGIEAARGAGNDARWGAWGGGVIGLDSRRESRSVVVGGVVPYRAKWGVGWLTAFEGRRLRRSWVAKTMMPSDGGGGGDQGGRWRRASGGRPERVEGLSAVTARERVPGGQILHRKTRGVKFNVTRIVGGEPTNRKEIIGDVWGYENVVEIERPR

SEQ ID NO: 51065 - protein, 66 aa, Zea mays
  Coding DNA Sequence Number=SeqID_7690
MGMADFDTHGYFIGSFVMPIGYGGHGGYGYGFVCPLGSLPTAIPTIVIPIHNFERYTIISYGKKLP

SEQ ID NO: 51066 - protein, 362 aa, Zea mays
  Coding DNA Sequence Number=SeqID_7691
MDNEVLRVSEFSAPGLQEVVFARGAGGCAISCSVLAFSEIFEEGFFSGGSVIRCIIPSSSAMDEMVPKQNMDPGRRAILCWKTMAIELAWISDTPPTWRASSRCLGPDCTPRVTPQGGFSSMEDAREWTRWLMNDLPLDGTFEQWKKHTSTCSTLSARARARPRAPPHAQRRARAKPAPWAHARAYKALPGFDCTFPRTLKPHRSLARRRLPVRSVSAAAQSLCHRRPANRAIPNPVQPSEKTVHTSVKLPERGIGVCFTGEASPRSLELSTPPEYVDRVIHSTILRFLVHTVTTLPREAHRALGLNQFAVVWPIHSPPTRTPACARGLSDSGHPRRQAVPRRDRQSLPEPTPPFAGPPSPP

SEQ ID NO: 51067 - protein, 99 aa, Zea mays
  Coding DNA Sequence Number=SeqID_7692
MTKASVQNFSINDDGEEEILQRETKWVELNRAKIVTSKFANGYEITNKFGNRKNVVKNKRTARGCVEEEPRKLPTNPRWCPYTKGKPHARAKHLGRVTP

SEQ ID NO: 51068 - protein, 143 aa, Zea mays
  Coding DNA Sequence Number=SeqID_7693
MEDLSRMTPTIVIEKIAAFEMSRKWVDKRIQLLLDHMLLHVMKEKEKAKKGRMLCMRGEGHFKDSCPNMAEPTKGRSKGKALTSVKTWDYSSSEDEPPRTRNHRSSSRSSWSSRKCLIARVKCAFHPLVMIAVVMMTMSEIPP

SEQ ID NO: 51069 - protein, 26 aa, Zea mays
  Coding DNA Sequence Number=SeqID_7694
MAMMGSTSEKMYLCQPYLDSLKPAYP

SEQ ID NO: 51070 - protein, 815 aa, Zea mays
  Coding DNA Sequence Number=SeqID_7695
  Pfam annotation: Domain name=HR1; Domain location=378-448; Score=6.1; E_value=0.057; Accession=PF02185.7; Description=Hr1 repeat
MPSHGGKLVRSPSFALDLSNRDPAAFVREAEDGAVRIVGRYVLKTEGQRSWDIRGSNDRLNRVFELNRLPYGGYLGQDDVDRRGKKPAVETGDDPAPAAAPSSKKRKLGIATGGLGVSDGFARELMRTCTTPGGRMSSPELRESSARMLRVTGGWWPKNVPIPRAAGEDFFTSRMKRQAVVRLHEARPKRPRGTAKAAAPGGSQPPLAAKSAAPGSSRVPEAAKAAAAGGTKSVPAGAVKGRELPPPGKRVADFATDISVEDYFVGSGEGQLVVVPPAVSTVAAAVVPRAKGSALSAGGEIPALTAVRDEAGAVSRRLKEALSQAADFADRAASGALTAVVSAEVERLRAQHADAVLEKSAADSKCRKLADKVSALEGEKADLRRQLAEERKEANEALAKAQSAQAEANLARAEGSLARQRAEELEERLNALQTRVERTEASTCSEVERTRKQLMDSYHELGARTAYFEVPDREPGLRCLEWLQEELMALPAIMEGFMSYASLVTCEGAMNALSREGCRHYEVFDQADEDFERDIYKVEDPVVKESAGALYDRMWGPHSREVVRERTETARGQAARGEKVEDFGALNSAQPDSESNPVAAVSEAAPEPPPETVEGVPNAPTATATGGGPSPTAALRAEDPVKMAAEPAAEDPATAGSSQVQDFGPAHATATANFLAASTVDDGNKSDESASKFSDFGDSASSVEWTEESSDEDLDYFAALDVAAAEASPHAADAEVVPGPSAGRRLRRAVAKRRVSEADGGRLRVSRAGRRELLSLPAAVSAGEGELRSLFAGEELRIMLFNYREMGIIPKAEPM

SEQ ID NO: 51071 - protein, 160 aa, Zea mays
  Coding DNA Sequence Number=SeqID_7696
MVVETINVTPQRLHTRNSLAPSHHCSQGQRTHLMQMYGCEWWNPNSHYSMELAQRSQKSDTDEKKRDRFRRGLSTKLRDRLNTVRANSYNELVNMAISQEDCITARQTEKKRKTPVVGPSAQPQRFRIVSDTQGRGPQQQQGRWVIRPQQQQQQQAPNRT

SEQ ID NO: 51072 - protein, 363 aa, Zea mays
  Coding DNA Sequence Number=SeqID_7697
  Subcellular localization annotation: CTP_CleavageSite=50; ConfidenceScore=5.15e-01
MNVCELTLAVSHSPTGQGQPIRRVVLTGGPNGAVAVVANKAPLSLVDGPRCQSRLQHRKPRRELARADSILYTRRPDLPVPHCRFCWDLGLYGGKDRGGPATPQKHRRAIPLFTTSSHQQKNRATEGWRRTWSLLAPAIGGHYVMGACAGSPRASLARLVARGSGISRRWGNFAADPPSSVGSDPGAINPGMKDLFRLTLVSYVRRSKLISGLGRVGGNRMGAGELPPWVHHLRRSGGREVEDLPWSLDSDRRWILYMGIPVGRTEREPFDLDRGSDSASAPEDDELHLARPQGSDSASAPEDDELRLARPQGSDSASLRKTMDSASPDPRARTQPRPRRSLRLARPRARTDHVTGGPSLPYP

SEQ ID NO: 51073 - protein, 157 aa, Zea mays
  Coding DNA Sequence Number=SeqID_7698
  Subcellular localization annotation: CTP_CleavageSite=48; ConfidenceScore=5.38e-01
MASGRTLLQQGPGPRPHSRGEDKLSKPKSRRPGERMVAVIPSATRTSSAATTSAPMTEAICPLADPHSDPPRWASTDLRAEAPYRGKGRTAQEHQRRPSSARHLGRSSGARGATTALTAGGGTGSRARASRASEPNALKLTTLATGQPHVVEVRPSR

SEQ ID NO: 51074 - protein, 137 aa, Zea mays
  Coding DNA Sequence Number=SeqID_7699
MGLGRTAQDVRVTASGLLGAAPTVLVWGRAQLRWPGAVQGRASGLGGCAPGSTGLGGKGREEREARWGRFAREETDGEKTKSGGGGLEEPGEGATGLLGPLVGLRLMVFIVLQTYPSSKNLVLEIKELPRITGGILP

SEQ ID NO: 51075 - protein, 258 aa, Zea mays
  Coding DNA Sequence Number=SeqID_7700
MTTTRQMTMIETTTICASVCCVEVFLKRKISGELSVEYLDNISGIEGITGEISGQYFWEEFEGGHWGNIWASEFEKISRFEFLGCYTSPPSEDFGDSEYLEDASSEYDRSLAPASPVASSEDWDDSMGLSNADRAYWRSIERARLGGSDESEEVSSEEVDSSDSSEEWSSDDGDGEGDGSSGDDDDSKGDNDMGDGDGSTGDGSKSDGDGEGDGSKGDDDGSPGEDDGIKGDGDGEGDDDDSKGDGASGKASGIMPLV

SEQ ID NO: 51076 - protein, 153 aa, Zea mays
  Coding DNA Sequence Number=SeqID_7701
MEVRCQTSFCHTEDGFPKLLRACTVRLGIRSQQEYDGREFVEHGTEKCVVTVYIGSSLHHVEWSVTAAGHRFKDTCQVVARKALRALCQIYEEMIARAEDAEKRNRKLHVDLTTAQARATALESREVIVVEALKQAKDEHVQKLMEAYLITHN

SEQ ID NO: 51077 - protein, 40 aa, Zea mays
  Coding DNA Sequence Number=SeqID_7702
MGSGHSTCSAEAGCRGGDKDDGYDYGNGKEEGVEADLQEF

SEQ ID NO: 51078 - protein, 120 aa, Zea mays
  Coding DNA Sequence Number=SeqID_7703
MAHRSFSGPPEATSPPLSPLCPWIHGLFPAIELAVAPSSPLPNSSDPGATLAHACLNYDDLTTAERSGTARSHLFSLDLISPPSNSDRTARTAGYCFTHACLTRPVPHVSATRSRSSFPV

SEQ ID NO: 51079 - protein, 279 aa, Zea mays
  Coding DNA Sequence Number=SeqID_7704
MGGTRVAFVLLLLEERDLAGVGTLQPSLGFKDFHHAARLHSLTNGRGRTELGSAPAWADGPLLPPAFEGKDILQLCGGGILQPCGGRRTAAAWPGCSISSSVRATVAGCTGGSHNTSYTARAVLVFWDGPVLVLVAITGVRTCRCALGRLPLAGAVLVGRWPLSLVLTWWLPLERVPTAAVAASAGETVSATCAPGLRLFGFDGLSSPLEWGRGRGPSYSSVCPENLRPLCDELESEAATLAWTEAKSTRKEASSALEHVASLAEEVQRRWLELGQVVR

SEQ ID NO: 51080 - protein, 361 aa, Zea mays
  Coding DNA Sequence Number=SeqID_7705
  Homolog annotation: Hit_ID=Q6QP51; Match level="QueryCoverage=43%, HitCoverage=56%, E-value=1e-32, Identity=54%"; Hit description =Putative growth-regulating factor 1
MQEACNCTTVVHPFGFIASDGLAPRKGSTATPEHSGFKPITDQGFEGWPLGRVRQSPQSTRAPRPLLIRGLKAGPSEGFDNRPEHAERGMTLGTSVTWPRLGLRSRGTLGHFRDQQERFCNGIPPERGIEPSDPIERVRVRQITCSHFTLSLTDLTGKQRRSLRSDCCATHQGEADNSQVQPQAQQEAPPRPNLGLGLGRRSPPRPTPGLGLNLGLERWSLPRPTPGLDLNLGLRRNRVLARPRPRPQEESPPRPTLGSDQPRHGRYIITLPLASSGYGGTRPASYLAHPGLKHFSDGHVIAYAGLKHFSDSHVGMYTGPSCKRVARENGLTNRLTLSRARTLGPPGSKHRQILFKILKSG

SEQ ID NO: 51081 - protein, 284 aa, Zea mays
  Coding DNA Sequence Number=SeqID_7706
MKGAHYRGAVARAFFALEGQHARCMTCGTEPPCHGMDTPVCIGGGFSRRFEARAGESAYKEGFIPRVVVMPCFSPTRGVLSPPSFLRPFAFKVSASRCRSLPWPCDFILSAPKQSECSKWYTACLDGMRRRSAEGFAPTSSTPMNLPLETLFHRFLASRMFISLAVVESELSRGFASHMGWWPASSSSIRRKRMITSLVKETNFGYAISARPQAPPSAVLPASWLGWSCPHPQVVTSAGEPSGASFPRGPTGVEDPPSDTSHPLIHARDLQGLVWEAKLCIRTP

SEQ ID NO: 51082 - protein, 140 aa, Zea mays
  Coding DNA Sequence Number=SeqID_7707
MPGGIFSRPKLEDNDVNLEDASPKRFAYKATIYVRSCAFGWDSSFCGQNPPKSVDACGWRLERKDHTWASEPNEAAQRVGSAAGLRLVPNGAKGVPARFVSVRPATSAKASSEGWRLCLRPNICPPRDQFDKVTWCRRRR

SEQ ID NO: 51083 - protein, 471 aa, Zea mays
  Coding DNA Sequence Number=SeqID_7708
MQVVELVPCARNKWGNWNEFWFYVAEATVEGHEGLPVSEMCSHYYSAYPPFEVAEEDADEGALRCAAGQSSGRDLVEEFVAYGVWPLRMAGRWAKVNEDVCGPGGKDVFARAPGDFGSDAEVMDKDRQGAAQKRQATVRLHEARPKRQRGAAKAAASGGGKPPLSAKAGASAPSKAPEATAGAGGSKSTKVVPPASGVAEASKAARALPLSGKRVADFGTDITVDDYIGGSDEGQLAMVAPGAEIATAAIVPRARGEALGAGGEVSALAVVRDEAGAATRRLKGVTEALSQATEALSQVADFASRTASGALTAAVSAEVERLRTQHADAVREKSASDSKCRKLTDRVAALEKEKADLRRQLAAERREANEAIAKEQAAQAEAKLARAEGNLAKELAEHLQERLTALESRAKGAEAAMRAEAERTRAQLMDTYRELGARTGDFEVPDREPGLRYLQWVQEELQELPTVVGGG

SEQ ID NO: 51084 - protein, 105 aa, Zea mays
  Coding DNA Sequence Number=SeqID_7709
MANKVEGLLPTISARRGSGDDEGGSAADDEVRRAIRRSRDEDEPRQTPHRLQGVPEMDPAHQIEDESTASESWRAADLSSNLAAALSGSKGWIGGRGGTDGFQGR

SEQ ID NO: 51085 - protein, 67 aa, Zea mays
  Coding DNA Sequence Number=SeqID_7710
MAGVRCVWGSRTPMPSPSFGCAPTRGGGVAQALPGHGSPEDAVDRAARRVAAEEKKKKKDAENARFR

SEQ ID NO: 51086 - protein, 131 aa, Zea mays
  Coding DNA Sequence Number=SeqID_7711
MAATTRLSTGFCYEEEIELTNGAHRSATRHARVNESAAPSTRPRGRGVGQYLSATKRLALASAGPRWWGVDWVVVMHKTGACLPKQWQAGPLVQALVLDLGLPPEQLLALARGRTLRQQGYSLSKCNEHGF

SEQ ID NO: 51087 - protein, 112 aa, Zea mays
  Coding DNA Sequence Number=SeqID_7712
  Subcellular localization annotation: CTP_CleavageSite=26; ConfidenceScore=5.53e-01
MGRITRGPPCWTRPHGGMTSSQVFVRCRMGQRVSLPVVLSPLDQRLRRMPRAKGGVFAFALTENEEEVEVTEEKTPPPSESQAGNCFYFDICGSEPDSPINEGKPRCICHPP

SEQ ID NO: 51088 - protein, 665 aa, Zea mays
  Coding DNA Sequence Number=SeqID_7713
MTSPELRESSARMLRVTGGWWPRNVPIPRAAGEDFFTSRMVREWKVFPYGRNIAVVVSAVMDKDRQGAAQKRQAVVRLHEARPKRQRGAAKAAAPDGSQPSLEAKSTVPASIRAPEAAAAAGGSKSGKTAPASSRVPEAAKAGRGLLPPGKRVADFATDISVEDYLVGSDEGQLVVVPPAAATMAAAVVPKAKGGALSAGGEIPALTAVRDEAGAVSRRLEEMKEALSQAADFAGRAASGALTAVVSAEVERLRTQHADAVREKSAADSKCRKLADKVAALEGEKTDLRHQLAEERKEANEALAKAQAAQAEANLARVEGGHARERAEQLEERLHALQSRVERAEAATRTEAERTRKQLMDSYHELGARIAEFEVPDREPGLRCLEWVQEELQALPHYRGGVYVLCFPGHCEGAMNALSREGCRHYEVFDQADEDFERDIYKVEDSIVKESAGALYDRMWGPHGREVVRERAETARGQAARGERVDDFGALNSVLPDPESNPAEAVLEPLPETAGGAPDAPAAAAAGGGPPPETAEGVPDAPAAAAAGEGPPPTAAPRAEDPVTVAESTAEAPATAGSSQVQDFGPAHATAATNFLAASTVDDGNKSDGSASKFSDFGDSGSSVEWTDESSDEDLDYFAALDVEAVEASPHAAKCRRCAWSEYWA

SEQ ID NO: 51089 - protein, 135 aa, Zea mays
  Coding DNA Sequence Number=SeqID_7714
MKRAKIYITIGVALTWPRLGLRPRGTLGHFRDQQERFCNGIPSEGGIEPSNPIERVRVRQITCRVRLTTAKFSLRGNRKLRLARPWASDSGGGLRLARPQGSAPASASEGSLRLARPQGSPSTSASEGGLRLARP

SEQ ID NO: 51090 - protein, 237 aa, Zea mays
  Coding DNA Sequence Number=SeqID_7715
MGQTRMLLFRHGGKTSSSSLPPGELTTVVVALRGKEYHVVAAVEEHELETPETEQRLGLKRLLETTHLELNGKLFVNTQQAPTWRANCRRFDPGGVPGPTSRARQRLLLRPRPGSGEDAIPPEVEVEAEPWGRARRRPPSEAEVEAEPWGRARRRPPYEAEAGAEPWGRARRRPPPEAEAQGWARQSFLLRLRLNLAFVSLTLAGGTTVGEGRAALFSCQVGQWKGEVTVVTSTFAD

SEQ ID NO: 51091 - protein, 262 aa, Zea mays
  Coding DNA Sequence Number=SeqID_7716
  Gene Ontology: Mol. function=oxidoreductase activity; Cellular component=integral to membrane; Biological process=electron transport
  Homolog annotation: Hit_ID=Q94EV6; Match level="QueryCoverage=52%, HitCoverage=25%, E-value=4e-61, Identity=88%"; Hit description =Cytochrome P450
MVLYETLRLYSAVPLIARWATTGADLCGVKVPKGTLLLTPIAMLHRDEEVWGADASAFNPFRFQDDMGRVVTHPNALLSFSLGPRSCIRQDFAMLEAKVTHALILWCFAFRVAPEYVHALADFLTLQPSKGLPVVLKFRYHHISKGLPTPLWFVGPTFAVLIGLVFKEGKASCIRDGEHSAPYGMGTLFDNRLDMRAVCRKTLDTVCQRSGHDALHAKRAHRLSAWWQAARPLRNKCRDREALESSRQAPPVGLCHGPQATR

SEQ ID NO: 51092 - protein, 667 aa, Zea mays
  Coding DNA Sequence Number=SeqID_7717
  Gene Ontology: Mol. function=binding; Cellular component=cytosol; Biological process=protein folding
  Homolog annotation: Hit_ID=Q5QNE5; Match level="QueryCoverage=100%, HitCoverage=98%, E-value=0.0, Identity=76%"; Hit description =Tetratricopeptide repeat protein-like
  Pfam annotation: Domain name=TPR_1; Domain location=195-228; Score =28.3; E_value=2.9e-05; Accession=PF00515.19; Description =Tetratricopeptide repeat
  Pfam annotation: Domain name=TPR_1; Domain location=229-262; Score =23.8; E_value=0.00062; Accession=PF00515.19; Description =Tetratricopeptide repeat
  Pfam annotation: Domain name=TPR_1; Domain location=263-295; Score =1.5; E_value=3.6; Accession=PF00515.19; Description=Tetratricopeptide repeat
  Pfam annotation: Domain name=TPR_1; Domain location=339-372; Score =1.8; E_value=3.2; Accession=PF00515.19; Description=Tetratricopeptide repeat
  Pfam annotation: Domain name=TPR_1; Domain location=387-420; Score =6.8; E_value=0.81; Accession=PF00515.19; Description=Tetratricopeptid e repeat
  Pfam annotation: Domain name=TPR_1; Domain location=433-466; Score =5.2; E_value=1.3; Accession=PF00515.19; Description=Tetratricopeptide repeat
  Pfam annotation: Domain name=TPR_1; Domain location=467-500; Score =37.3; E_value=5.6e-08; Accession=PF00515.19; Description =Tetratricopeptide repeat
  Pfam annotation: Domain name=TPR_1; Domain location=501-534; Score =12.3; E_value=0.18; Accession=PF00515.19; Description=Tetratricopepti de repeat
  Pfam annotation: Domain name=TPR_2; Domain location=195-228; Score =34.4; E_value=4.1e-07; Accession=PF07719.8; Description =Tetratricopeptide repeat
  Pfam annotation: Domain name=TPR_2; Domain location=229-262; Score =23.6; E_value=0.00076; Accession=PF07719.8; Description =Tetratricopeptide repeat
  Pfam annotation: Domain name=TPR_2; Domain location=263-293; Score =5.9; E_value=5.5; Accession=PF07719.8; Description=Tetratricopeptide repeat
  Pfam annotation: Domain name=TPR_2; Domain location=339-372; Score =9.4; E_value=2; Accession=PF07719.8; Description=Tetratricopeptide repeat
  Pfam annotation: Domain name=TPR_2; Domain location=387-420; Score =15.5; E_value=0.2; Accession=PF07719.8; Description=Tetratricopeptide repeat
  Pfam annotation: Domain name=TPR_2; Domain location=433-466; Score =9.6; E_value=1.9; Accession=PF07719.8; Description=Tetratricopeptide repeat
  Pfam annotation: Domain name=TPR_2; Domain location=467-500; Score =26.3; E_value=0.00011; Accession=PF07719.8; Description =Tetratricopeptide repeat
  Pfam annotation: Domain name=TPR_2; Domain location=501-534; Score =14.3; E_value=0.45; Accession=PF07719.8; Description=Tetratricopeptid e repeat
  Pfam annotation: Domain name=TPR_4; Domain location=229-254; Score =5.8; E_value=8; Accession=PF07721.5; Description=Tetratricopeptide repeat
  Pfam annotation: Domain name=TPR_4; Domain location=263-288; Score =9.0; E_value=3.3; Accession=PF07721.5; Description=Tetratricopeptide repeat
  Pfam annotation: Domain name=TPR_4; Domain location=339-364; Score =4.9; E_value=10; Accession=PF07721.5; Description=Tetratricopeptide repeat
  Pfam annotation: Domain name=TPR_4; Domain location=387-412; Score =5.5; E_value=8.5; Accession=PF07721.5; Description=Tetratricopeptide repeat
  Pfam annotation: Domain name=Thioredoxin; Domain location=584-664; Score=6.1; E_value=6.6e-05; Accession=PF00085.11; Description =Thioredoxin
  Pfam module annotation: Pfam domain module=TPR_1::TPR_1::TPR_1::TPR _1::TPR_1::TPR_1::TPR_1::TPR_1::TPR_2::TPR_2::TPR_2::TPR_2::TPR _2::TPR_2::TPR_2::TPR_2::TPR_4::TPR_4::TPR_4::TPR_4::Thioredoxin; Domain location=195-228:...
  Pfam module annotation: Domain location=:229-262::263-295::339 -372::387-420::433-466::467-500::501-534::195-228::229-262::263 -293::339-372::387-420::433-466::467-500::501-534::229-254::263 -288::339-364::387-412::584-664
  Subcellular localization annotation: CTP_CleavageSite=15; ConfidenceScore=5.26e-01
MPDTLSDAFAAAVLLSSTDKPDTLPPGRLSPVSPLPHSSSKHGHQHPHPTPSSSSGSSGSVSRSLLAPASSLASRRSHSGEIPLPSDAPPRGTARPGHRRTGSGPLIFTSGACSSSATSPLTNALPAGNICPSGRLAKPLPSSCSAATPPPPPRASRHDVLGSGTANYGHGSIVRSRAATDDDAVLRRAMSAADPEELKRAGNDQYRKGCFEEALRLYDRALALCPDNAACRGNRAAALIGLHRLGEAVKECEEALRIDPSYGRAHHRLASLHIRLGHIEDALKHLSLAIPQPDLLELHKLQTVEKHFGRCLDARKAGDWKSVLRESDAAIAAGADSSALLLAARAEALFRLNLLDEADVAISSASKLNYTSSCSPDTKFCGFIANAYLFYVHAQVDMALGRFDHAVSSIDKARIIDPGNTEVITMHNKVKSVARARSLGNELFNSGKFSEACVAYGEGLKQHPVNKVLYCNRAACRFKLEQWEKSIEDCNEALKIQPNYTKALLRRAASYGKMERWAESVKDYEILRKELPSDTEVAEAYFHAQIALKSSRGEEVSNMKFGGEVEAIIGMEQFQLATSLSGVSVIHFMAASNQQCCKISPFVNTLCTRYPSVNFLKVDVNESPAVARAENVRTVPTFKIYKNGIRVKEMICPSQQLLEYSVRHYGI

SEQ ID NO: 51093 - protein, 206 aa, Zea mays
  Coding DNA Sequence Number=SeqID_7718
MAEALAAMTGGIELAGAKGKWLAGEGIGSCSVTKVPVLECLVPRSNCAKTVSNEFGLSSNFSRMCSREFGTTLIFGSPGFEFRKTENADDLWEELTGRRHLDQVESLGARRLLFDHLFFSCGGCETARALDGTPNFRKARGSGAKDPKTQTTLQVDCGLKPKYHGGSFAKCVREGVWSNRGRPIRNERPDLLQVLNELVQHHALWI

SEQ ID NO: 51094 - protein, 423 aa, Zea mays
  Coding DNA Sequence Number=SeqID_7719
  Gene Ontology: Mol. function=hydrolase activity, acting on ester bonds; Cellular component=cellular_component; Biological process =lipid metabolic process
  Homolog annotation: Hit_ID=A2ZQN3; Match level="QueryCoverage=76%, HitCoverage=79%, E-value=1e-98, Identity=53%"; Hit description =Putative uncharacterized protein
  Pfam annotation: Domain name=Lipase_GDSL; Domain location=102-409; Score=149.0; E_value=1.3e-41; Accession=PF00657.13; Description=GDSL- like LipaseAcylhydrolase
MEFTGSFREANPLDRISNCQYSPPPRLPPPPPLNHPPPLPPLEPDDMNASRTRVQLQQTLARAIFRGTRNFAHALSIGEEELIKKYRKQSFVVRQEKEQCSTFGDSYTDTGNKVILYGPAAADLWINKPPFGMTFFGHPAGRLSDGRLVIDFIAQALGLPLLPPSLAKDQSFKQGANFAVAGATALKTSTTRPALYPQLAVAGGAVPPPNNISLADELGWFDAMKPALCGSPQACKDYFTKALFVVGELGWNDYGVMVKLINDGATAVVVSGISPMGCAPGNLVLLASQDPADYEPDTGCLKGMNELSRDHNAQLSQALTTLGGRYPGARVTYADLYGPVIAFAAAPTRFGFDSALRDCCGGGGGKYNFNLSAACGMPGVAACPNPSAYVNWDGVHLTEAAYHRVADGWLRGPYANPPILDTA

SEQ ID NO: 51095 - protein, 121 aa, Zea mays
  Coding DNA Sequence Number=SeqID_7720
MNRHRQSRCHYKRNSDSTSAATNNPPRWRACGAIEHRRDSRWLTAARSGSSDNDFRPGRPNSSSDDLKTDTAATRPLPASPPKGRGHAEGRRVGGQSAGGAGYLIGRETSSGCIGGRWHRK

SEQ ID NO: 51096 - protein, 316 aa, Zea mays
  Coding DNA Sequence Number=SeqID_7721
  Homolog annotation: Hit_ID=Q6J9V9; Match level="QueryCoverage=26%, HitCoverage=30%, E-value=4e-12, Identity=57%"; Hit description =Putative uncharacterized protein
MQAACNRTKGAHPFDFDASSMEAQAHASWIGKGDTPKGILLREGSGPRAPLLIRGSKAGPSEGFNSCLRALGLRAHYWSEAGPEGFDSRLRRRARDDPGYVRYITKARATLLRLGGCSRKPGSGQTVDSVNIPAQELGTRLCTRATATQSCKGLMGAIKVKAQSTQRTRSHLARAQPRARAADPRGFTSRPRAPSSNGHTFGSPEAQSSPRSNLGQIATPTDPSAPEDDELRLARPQGSDSASAPKDDELRLARPQGSNSASAPEDDGLCLARAQGSDSALTSEDRLDLDLGGASASPDPGLGPTTSQGGPSLPYP

SEQ ID NO: 51097 - protein, 47 aa, Zea mays
  Coding DNA Sequence Number=SeqID_7722
MFGLQLTMRLMVLGFVSGNGCPHCNHCSGEDEAVEGDFQEFQDYDEF

SEQ ID NO: 51098 - protein, 53 aa, Zea mays
  Coding DNA Sequence Number=SeqID_7723
MADIPEGAPVMTVLSVPNLVPNASCPFTTPMGALQFQHQEAGLPPIKSTDTCP

SEQ ID NO: 51099 - protein, 138 aa, Zea mays
  Coding DNA Sequence Number=SeqID_7724
MLQLLNVGWRRSDRMGCRGSSARHRHSMTCNKEIQRARERTGGVSTKRKSHLVEDNMTGNDNPSSGEVKTAITLMGRGVSEKYTICGTWCQLVFGGGCEVGIAKATENTKNGVVRGLLVELLKGILWPMAEQGHLFRR

SEQ ID NO: 51100 - protein, 154 aa, Zea mays
  Coding DNA Sequence Number=SeqID_7725
MGKSKKGGSSSHHYGDKRKREPTPPSEDFGDSEYSEEEFSSESEGSPAPASPPASSDDSDDSQGIVAEVWTYIRAVERAGLEGSDESEYSSDEENSSDSSKEGGGDGGDGDDDGGDGDGGGGDGKSGDGGGKGGSGNGGGGSKGSSRGSNKTSG

SEQ ID NO: 51101 - protein, 186 aa, Zea mays
  Coding DNA Sequence Number=SeqID_7726
MGGADGLNEGGAFSGCHHISTDGDVHLSTNKARRQVPTLVLAAKARRRTECCILAGQQQFAFPGMAGGRLLRKAGGWFPPPEAGRGGDQPARAGDSPPTGVGAGSHTSCKPVPGEKKPNRHACVVHATTRRLQALLHFRPDQRVKGRTAMQAACNRAKWARPLDSNAPSMEVQAHASCNRHAGCYV

SEQ ID NO: 51102 - protein, 72 aa, Zea mays
  Coding DNA Sequence Number=SeqID_7727
MKSTKKVWIPKGNLIVRKMKSPEKDNKLPLQIYMNSYVSQVYHLSSNGPPLVSIGNFETTFNIIYMSSLAFG

SEQ ID NO: 51103 - protein, 284 aa, Zea mays
  Coding DNA Sequence Number=SeqID_7728
  Gene Ontology: Mol. function=oxidoreductase activity; Cellular component=integral to membrane; Biological process=metabolic process
  Homolog annotation: Hit_ID=O81739; Match level="QueryCoverage=84%, HitCoverage=98%, E-value=5e-44, Identity=38%"; Hit description =Putative uncharacterized protein F16G20.130
  Pfam annotation: Domain name=adh_short; Domain location=30-168; Score= -28.8; E_value=0.00097; Accession=PF00106.16; Description=short chain dehydrogenase
MRWFYRKGSSGFSSASTAEDVTAGVDGQGLVAVITGASSGIGLETARVLALRGVHVVMAVRNVSAGLKAREAIVAKIPVARIDVLELDLSSIASVRRFASNFDSLNLPLSILILNDFVAYGQSKLANILHSNELSRILKEDGVNISANAVHPGVIMTNLFRNRTIVSALLNSIGRIICRTVEQGAATTCYVAMHPQVRGISGKYFTNCDVANPSSQASDAELAKKLWQFSLQILGAQADQAPRRRGAKSFVLPRLPRPKLSVKERKELASYAHGLGKKLKSQQV

SEQ ID NO: 51104 - protein, 124 aa, Zea mays
  Coding DNA Sequence Number=SeqID_7729
MPRKFGAHSWRRHGRSSSSTLAGGWPRWRCRALLGLDGVSIWAALPCSASSEKGGGTVGPDNRLPRRLRRSNGKEDCGEKRLGDLIIVGYGVVAVGGGEDVVGVPNFLPHRAHVVPQRYHGSGE

SEQ ID NO: 51105 - protein, 345 aa, Zea mays
  Coding DNA Sequence Number=SeqID_7730
  Homolog annotation: Hit_ID=A2Z9Y9; Match level="QueryCoverage=71%, HitCoverage=90%, E-value=2e-50, Identity=47%"; Hit description =Putative uncharacterized protein
MARLSQAPKLNEDTKHANLVSNGPGRALGQTTKHIRSLRFICDGVEHPAKPASRTPLLLPLPLRAPQAMSGGVGPTAGGGITLPSMGAPPPPLHPTPTSPTTRPHHHYYLFSIKQLNTLGAAAVLAFSTTVPLSEIAFAVLLPPYLLVLAWLAFPQRPGKPNPAAPVFPGVGGRLRLALHTAVGFVVGAALPALYILDGLRAGDTAGVAAAAPHAFLLSAQVFTEGIAAAWPGTFSLPVRAAVPVMYSARRMFAASEWLRQELQERDDLGRGPPVPPRRVVAGRALAAANLAFWGLNLFAFLLPFYLPRALRRYYLGNDHEDDGGARAHSKQQQQQQQGEAKKDS

SEQ ID NO: 51106 - protein, 160 aa, Zea mays
  Coding DNA Sequence Number=SeqID_7731
MAPPVDVVGPCPRLGEVEAPPRSRSSLSSKVERSSSSSGVEPESEPWGRAKRSSSSSGAEPESEPWGRAERSSSSSEAEPESEPWGQAKRSSSSSRAEPESEPWGRAERSSSSSGAEPESEPWGRAKRSSSSSGAEPESEPWGRAKRSSSSSGAEPESEP

SEQ ID NO: 51107 - protein, 171 aa, Zea mays
  Coding DNA Sequence Number=SeqID_7732
MAERYQLPRSCVPPTARRKDCGRPPSGGSEGGKTWCIREREDMAAFQGGHPPFKGDSPYSCPQPSRAESSPTRSKGPGKGDTPKRILLREGNRPRASLLIRGSKASPSEGFNGRLRALGFCAHYWLEVRWSAPRKGSTAASCHSGSAPTTDKGFVGWPSKGSQSPQTQSEG

SEQ ID NO: 51108 - protein, 176 aa, Zea mays
  Coding DNA Sequence Number=SeqID_7733
MSSFHHVGKASSISPPAGGLSTAIVAVARWGKEYHVVAAVEGHELKTPETEHRPGPERLLETAHLELDGKLFVNTQQAPTWRANCRRFETRGSLDRRVNCCRVPQPRWVGARQNAKGGEAAGGRQAWEVEPAAFVLASRPGRVGRGGGSSEVEVESVFQGRGRVRAPGSDKAETVG

SEQ ID NO: 51109 - protein, 386 aa, Zea mays
  Coding DNA Sequence Number=SeqID_7734
MTTAALSPLTEARGRQQGLDSPDSCPSARLQHSSDGHDTTRTGCQNLSGCHDGMALLQRVGRAGKDGTVLAQGRSLPPAWTLVTPYCKRTQPGRGANTKAAGSTSHAYLPPAASPPFAFRLTPTHLGWGTRQQFTRRSRDPPGTGKGDTPKGILLHEGNGPRAPLLIRGSKAGPSEGFDSRLRALGLCAHYWSEVRRLAPQKGSTAASGHSGSAPTTDQGFVGWPPKGSTAASEHAKRGMTLGSRATLVNPALAKPLTASTYQPENLGLDYAPGLRPGLLSGTIIRGTPKTPNLSCAACPAPTAVPLARVRSTAAKSSLGRHRKLRLARPQGSAPVSASEDGLRLTRPQGSDLTSAPEDDELCLARPQGSDSTSAPEDDELRLARP

SEQ ID NO: 51110 - protein, 443 aa, Zea mays
  Coding DNA Sequence Number=SeqID_7735
MPEGFGPETSRWATWCFDYDKMPEGGTSSRLPEKGHSSSPRLRRRWRGSSSTLGVNSTIGEVRPSLGRQHGRRISTPKDDVSTTPGPSPLGSPLGTRSEQTARPAAPKPQPAVPRGHQPGSWARQLDSGVGPGQAPADEAPFFEPTLPLSAMAPLPPAPAHRRAAEGLDSHNEQTLALKVSLQTELRFHPRMYEQRPTLEGLRGDKTPGGLPMPAPAAATTTPAPKWPNSSSDDLRADAAATSSSPTSPLKGRGQAIKAKEPEAQSADGGGDLVGNEDIFSRHHLNVDDGSHLPTCGSPLGSSQTDEAPTSVQEAFEPNALKLTTLVASPALSESAPSARPPGCLMKILEAERWLKGTNFRKVAFLQQQQDESDASAPHPGAQKPSRTESSPTRSKVLPLRHGGWVPRVMQAAPGQKEPNRRARSAQQPSGYKHFSTIARTSG

SEQ ID NO: 51111 - protein, 141 aa, Zea mays
  Coding DNA Sequence Number=SeqID_7736
MTTQGGLQPTSNEANMCTNDNGSQLGTRIVDEIMAGKNVFFDLPHKLTGEIWTLKFHCIGAQPGKEIVTVNIDKAYVAFYNVVYIKSKLGYSGRDFLFYKKRCGIDRSRLLALDYIHQEEAMLHAQQETSPDSWWMPNRGF

SEQ ID NO: 51112 - protein, 231 aa, Zea mays
  Coding DNA Sequence Number=SeqID_7737
  Homolog annotation: Hit_ID=Q8S3W6; Match level="QueryCoverage=92%, HitCoverage=55%, E-value=6e-28, Identity=34%"; Hit description =Putative uncharacterized protein
MKNKPEDVDIVEWHYMMLYFGSEKFQRDPETGIEPTDLSLWMITHCKNDEWSEEASRGIYEKAAEKIVEKIYQTERFKLTREEENAIFQTTFKETTGCKANRLHGHGYLSRYPTRSQVMESKFLEQARATVATNQKNIELESQVQLLNEKLACEVAERERILQEKMQALQEEEERKRQVLREEMRQEMVAALAAVAQQSNCESTTPIDPSSVVPTKLLELIPADLSCTCTK

SEQ ID NO: 51113 - protein, 79 aa, Zea mays
  Coding DNA Sequence Number=SeqID_7738
  Subcellular localization annotation: CTP_CleavageSite=47; ConfidenceScore=5.10e-01
MVKNFGSKTVQIAMNAVVTSHLLVCLYSTAAFENKSPTSAALTAECEAATYNSNGAPSMGGVNVVKSIRYCFSSSKAFY

SEQ ID NO: 51114 - protein, 23 aa, Zea mays
  Coding DNA Sequence Number=SeqID_7739
MGKPVPSLLMLLLSRAAWIEQSH

SEQ ID NO: 51115 - protein, 69 aa, Zea mays
  Coding DNA Sequence Number=SeqID_7740
MGGGVGLGARGAQGRAGLGWAGLGHFADRRPTTCADHKTELNRESKSGTERDEHSTSDKEMCFGMMQHP

SEQ ID NO: 51116 - protein, 288 aa, Zea mays
  Coding DNA Sequence Number=SeqID_7741
MTSHGSSDEGNAQSHTDELAREGFPHILWEVLQGAGYTTPPQYAVQLFEKHRVPRCRVRMALEPHPLQPGWRLLDSESFGYRAKDTMEAFALHGLTTFCGFHPLELSTHPICLFPTEKEDDPMWKDRVEHAKDIWAIYPGQTAHLTVRCMNALYRLQVMHGEAMSHLMALLEVTKITLDNREELVVDLSTEMVEKDLQVEQLSTEIQELEELVGTRENIEVLEDQLINTQQQLAEANQHLDMHHQEIQDMEANEDVDIEGGEEPASSLDTAGSGRPPSPESSVASFAH

SEQ ID NO: 51117 - protein, 121 aa, Zea mays
  Coding DNA Sequence Number=SeqID_7742
MESHDLQAEREITACGNENDGFGIVSGNASPLQPNRILDEYVDVYSPLLYTPNPPQVVSIATTAQEKMKLWKETTRSSKITMSSRRGLAATPSRMPVKAACIHVSFPHFDNCKDYVDVSDI

SEQ ID NO: 51118 - protein, 169 aa, Zea mays
  Coding DNA Sequence Number=SeqID_7743
MVVIGRLCSSTHDAVMNECVAPVSNKTLLQYGSRLETYLLSCPGSPELLQPPSGSVSHDYSVAESVCPVQAETHSALLGHWGLNATGLPSSDIASPNGLALHIENMLFFRLELVLLDCSAGLLGQGDEVPADSASGTDLLLTDCSGDSDAGVEDTAFGTATAEVDAGSA

SEQ ID NO: 51119 - protein, 117 aa, Zea mays
  Coding DNA Sequence Number=SeqID_7744
  Subcellular localization annotation: CTP_CleavageSite=35; ConfidenceScore=5.55e-01
MASANVGASLSGVGDHSSTKFMEGGGLKRSSSPPRASPTAPEGPASIPTGSTGGGCQFLIRLFAHHPRPIYRSYDGALFEAILLDLPDPRLDHCYHYYCPHVLELVDGEICLFTLPL

SEQ ID NO: 51120 - protein, 115 aa, Zea mays
  Coding DNA Sequence Number=SeqID_7745
  Subcellular localization annotation: CTP_CleavageSite=46; ConfidenceScore=5.62e-01
MGSASPDPRARTQPRPRTTVSASPDPRARTQPRPRRSHCLARPRARTDHVTGGAIITLLLASSGYGEQDRCPIWFAPVNNSQPLTEARIRQQGSDSSDSCTSTGLKRSSDGHDIT

SEQ ID NO: 51121 - protein, 140 aa, Zea mays
  Coding DNA Sequence Number=SeqID_7746
MVTTSSMVGRSKPGCGLCPALSFKDLHHPCWGGGRAEPELYLPYGPAGHLFLQHSGERALTGLAEGADFDNAGPVGHRRRQLHHAWLAGSASSGAASGATSHRWGGAWLSIRHTGGCCAVRTGGPPKTSHAARAAFVFLG

SEQ ID NO: 51122 - protein, 266 aa, Zea mays
  Coding DNA Sequence Number=SeqID_7747
  Gene Ontology: Mol. function=kinase activity; Cellular component =ornithine carbamoyltransferase complex; Biological process=amino acid metabolic process
  Homolog annotation: Hit_ID=Q6QP54; Match level="QueryCoverage=34%, HitCoverage=36%, E-value=8e-10, Identity=48%"; Hit description =Putative kinase
MAPPVDVVGPSPGLGDVEAPPRSRSSLSSEAEVKFEPPARVRALGSGGAEFAVFRVLARVRALGSGGAEFAVFRVLARVRALGSGGAEFAVFRVLARVRALGSGGAEFTVFRVLARVRALGSGGAEFAVFWVLARVRALGSGGAEFAVFRVLARVRALGSGGAEFAVFRAALSFCQTGQWSGGVTAVTSALPGACVRIELYADGGYQLRIRRLEAPEPLHRARGRSGTDSAFYIRPYVAFPQGGGGECAMLPSMGTEHGVSGELQA

SEQ ID NO: 51123 - protein, 181 aa, Zea mays
  Coding DNA Sequence Number=SeqID_7748
MAGGRLLHRAGGWFPPPEAGRGGGQPTRAGGRALARLALRPSKDGPPPTARGLGPTRHANWPRAEEAKPPRAVHATAQRLQAFLHFRPDQRVKGQTAVQAACNRAKWARPSDFQRTQHGSPGPRVMQPARRLLRASNCTATRATTMPPRLRNQYRDSRQPCVRPSSASQARRSMRPKMGRQ

SEQ ID NO: 51124 - protein, 133 aa, Zea mays
  Coding DNA Sequence Number=SeqID_7749
MGKNNKRKREPTPPSEDFGDSKYSEEEFSSESEGSLAPVSPPASSDDLDDSQGIAAEVWTYIRAIERSGLEGSNELEYSSDEEDSPEEDGEGDDDDDDDGGDGSDDGDGGGRGGSSRSSGGDGSSKGNNKASG

SEQ ID NO: 51125 - protein, 54 aa, Zea mays
  Coding DNA Sequence Number=SeqID_7750
MTQREHSPDFDHRPGGFFYVKRVTDKRVTTLGEIEKDKIMVAKAYNKKVKAKSF

SEQ ID NO: 51126 - protein, 174 aa, Zea mays
  Coding DNA Sequence Number=SeqID_7751
MWQPERSGHPAGRDVVAVGGAVEPDGGTAVGAVESLLTLSCFLGAAQAALSFCQTGQWSGGVTAVTSALPGARVRIEVSGHLCVKCPCNLVSRCGDLVKVASERSQGLGRAGDVSAIKRGPRARRKSLELYADGGYQLRIRRLEGTPNYGPRQYPWSSYVFEIACVEYLSINDP

SEQ ID NO: 51127 - protein, 80 aa, Zea mays
  Coding DNA Sequence Number=SeqID_7752
PRGKSEAAKKGEGVAAKKGKGVATKETTDQAKDGGKKRFEVPSAREKVKETRNPKPRGEEEDLQSQVDRVKSYGASRITT

SEQ ID NO: 51128 - protein, 19 aa, Zea mays
  Coding DNA Sequence Number=SeqID_7753
MVVNKKERIRLHKRFEELF

SEQ ID NO: 51129 - protein, 185 aa, Zea mays
  Coding DNA Sequence Number=SeqID_7754
  Subcellular localization annotation: CTP_CleavageSite=8; ConfidenceScore=5.46e-01
MTATTSALAATTTSAPSGSPAAAITSGGALLRIGPRPRPPTGGDSEAIKAKGPEVRRLVALTFSPAEATTSAVGSLTSGGDHINPTSGSYHLCTDGQRMHQRARKGFCSRPHYGSEDNTIQERRPHGVRRLVRPPGATGGAGEVVDVANPRMARPSPVRWTGSHAPPQRQEAAPKAAESTYRGGE

SEQ ID NO: 51130 - protein, 82 aa, Zea mays
  Coding DNA Sequence Number=SeqID_7755
  Subcellular localization annotation: CTP_CleavageSite=75; ConfidenceScore=5.68e-01
MGAIKVKAQSTQGTRSRLARAQPRAKAADPGGFTSRSRVPSSNGRTFDSPEAQLGQASRRSNLGQIATPTDRIARAFNARVD

SEQ ID NO: 51131 - protein, 298 aa, Zea mays
  Coding DNA Sequence Number=SeqID_7756
  Gene Ontology: Mol. function=protein binding; Biological process =ubiquitin cycle
  Homolog annotation: Hit_ID=Q10SN2; Match level="QueryCoverage=33%, HitCoverage=33%, E-value=4e-34, Identity=73%"; Hit description=F-box family protein, putative, expressed
  Pfam annotation: Domain name=F-box; Domain location=205-252; Score =17.1; E_value=0.067; Accession=PF00646.24; Description=F-box domain
MSRLLDCGTSAVTRGSPTHDPIVPIECNDHGDRERGYFEKEPSQRRKRAPSPPTDQGGSKAGPSEGFDNRPRSRRVRDDSEYIRYMAEARATLPSHFALSLTDLTGKQRRSPRSDCCANHTASGGGLRLARPQDSASASASGGIASSPDPGLGLRRRLRHFSDVHVIAYTGLKHFSDSHVGMRAWARARRAWRARSPAAKVARGAGLGDLPELCTAEVLLRLGAPDICRLARLNLAFRGAAGADFVWEAKLPGNYARLLRFVDEAEEEGGSGRDWSAVGRKDVFARLARPVPFDGGKR

SEQ ID NO: 51132 - protein, 663 aa, Zea mays
  Coding DNA Sequence Number=SeqID_7757
  Gene Ontology: Mol. function=protein binding; Cellular component =signalosome; Biological process=red or far red light signaling pathway
  Homolog annotation: Hit_ID=Q9FVN4; Match level="QueryCoverage=37%, HitCoverage=61%, E-value=1e-86, Identity=61%"; Hit description =RCOP11 protein
MDVEGEVPAAAAAAVANGLGGAGAEEASPAPVSAEQLDVEAYAAQYSGRTRLVRLLFVADRCGVEAMQLEALRMAYDEIKRGEDVQLHRDVVTKIGGRLGPRYGLDQAWVFSVSRRADQRKEKLESELNGYRMCMNVILVSIELGQYAHVSNYVSKAEQTPDSLDPTIVAKLKAAAGLANLETKKYKFAARKPVAELGPVSSRGQPLRNKANLNFSFVKPNGIELGNNFSEVIAPQDVAVYGALCALASFDRSDLKSKVIDNINFRNFLELVPEVRELVNDFYASRRHLPLLPPLSVAAAGHHLTAPAAPLRRRPPPPHPCSAGVPPRPSAPAPSDHTGAARPCSARTACPPPPRVTLLLPVSSASSVAGLICFQRRRPDPPARSRLRLGHRSGRSSRPPSRPSSRPSSRPYLVAVAASSASSVANLAVDLLHPAMDHHHVAALQHAGAVATDAAAHINAAACTAPAGAAAGFAPAGTTAGSTLAGTATLGADTRLGRAPGCQPILACCGQRTRRRPHPLRAWPTGLPGDYRRPDRSSIADPPSQAAPWVLHHSSARCRRDLDFYDTFYRLRAGVYHCRHPGCPGGLEGARTRNDPRSGAGAHIGSHSGCPDGYCLASHHRRPLRSFMRHHRPSQRLPTPLDSTPTTSPPSTRRPLEFTTFGA

SEQ ID NO: 51133 - protein, 249 aa, Zea mays
  Coding DNA Sequence Number=SeqID_7758
  Subcellular localization annotation: CTP_CleavageSite=68; ConfidenceScore=5.52e-01
MSSSSLMRRVFPPSKPPNGGYPPSFRLIVGGTQLRGSWYLSAIVRLQGFSSCSPAAPLHRRSPKMVTSGLMVGESEPGCDLGPTLSFKDVHHPRWGGGRAEPALYLPRGFAGHPLPRRSGERALTGPAGGPDFDNAGLADGGRRHLQRVGVVGLAPGGPSCRRAAAAPCAREDHPGCRTLLGRRSCSGVVLPLHRDGALTRRPAEAAREVPVTDGITATIRAPGLRFFVLVLAPRASAWARARLQQRPP

SEQ ID NO: 51134 - protein, 356 aa, Zea mays
  Coding DNA Sequence Number=SeqID_7759
  Subcellular localization annotation: CTP_CleavageSite=60; ConfidenceScore=5.64e-01
MVAFQGGHPPFKGDYPYLRPQPSRTESSPTRSKVLPCGAGAGSHTSCKPAQSRRSQTAVRGARNRPAVTSDPPLWPRPTGERGGQPCTRHATAPSGRASPTPNTPNMEAQAHASCNRRAECFVHATAPPLVPPPRLLDCGTNTATRGDPAHDPAAPAWRGGGASGRRSKRRFAFAIMTTPKKGLGKGDTPKRILPREGTRLRASLLIRGSKAGPPEGFDSRLRSRGPYTHYCCKGLMGAIKSGISPFERLDHASPEPNLGQGQPTPEDFRLARGPPPTANIFPARPRPCLRQEATLTKSPHRPTKSQEHLMQRWPDTFILARAPRQSRSDRRHFAAPLTGLTEGQRRLRHSDCGAT

SEQ ID NO: 51135 - protein, 132 aa, Zea mays
  Coding DNA Sequence Number=SeqID_7760
MELRAVPDEAEDPWRRLWGAKRRRSGCADSCAQTAATPAASLARQRILPGESDAQTAANADGEVDAADGGAQIRRTTADGAQIQRMAADGAQDDAQTAADEADGGAQIRRTTQRMAEDGAQDGAQTAADEAD

SEQ ID NO: 51136 - protein, 42 aa, Zea mays
  Coding DNA Sequence Number=SeqID_7761
MAVGVSEALYAKAVYLARFKNSIRIVCFSQLMRLLDPLYCIE

SEQ ID NO: 51137 - protein, 54 aa, Zea mays
  Coding DNA Sequence Number=SeqID_7762
MAMMGSTSEKMYLYQNKITRNGSGEMARVACTLHGKRLDGGVSVLSVGVNLIWS

SEQ ID NO: 51138 - protein, 52 aa, Zea mays
  Coding DNA Sequence Number=SeqID_7763
MARVACTLRGKRLDGGVSMLSVRKQQIFVAFVPRWCPKKKAKTEASGGSVLL

SEQ ID NO: 51139 - protein, 162 aa, Zea mays
  Coding DNA Sequence Number=SeqID_7764
  Subcellular localization annotation: CTP_CleavageSite=2; ConfidenceScore=5.56e-01
MSSSSLKRRVFPSSKPPDGGYPPPFRLLVGGTQLHGSCCSVPGLQPRVASGPLAVPASATAAGRGSSAGAAAGTGHGLTSNFSAFCPSLPHKFWHGRGPPGSGIDPEVSAAAVRPPGAEVVVVAAAGAGDGAPFVGLPLLRRPSPSEWGRSYLRRGEPEFRS

SEQ ID NO: 51140 - protein, 90 aa, Zea mays
  Coding DNA Sequence Number=SeqID_7765
MAHRIARPTRGGGRPKSGDGDLVVPVRKGFDPCLEKLRGSSGKLSKGSVEAEGLWKWLATVACARVARAGGAELAGAKDGVWSAKAYGFC

SEQ ID NO: 51141 - protein, 51 aa, Zea mays
  Coding DNA Sequence Number=SeqID_7766
MGKPIPSLLMLLLSRVIALVPTITEMGDHVSGRMRGKVCGKVHSAFGQNTI

SEQ ID NO: 51142 - protein, 147 aa, Zea mays
  Coding DNA Sequence Number=SeqID_7767
MGKNNKRKREPTPPSEDFGDSEYSEEEFSSESEGSPAPIPLRESSDDSDDSQGLAAEVGTYIRAVERSGLEGSDESEYSSDEEDSDDGGEDEDGDDDDDEGGGDGDGDSSGRGGSSGSKDGDGGGSRGGSRGSNRGGSGGGSNRASG

SEQ ID NO: 51143 - protein, 150 aa, Zea mays
  Coding DNA Sequence Number=SeqID_7768
MNKTPALKVPLQMELRFRPHGYEQPPHQGACGATSSGRLASDLCSSGYGPRTDAATGRLSFASPLKGREPDIKAKEPEAEDASSAELEDGFHHQKLEEEVASRPMREVEPRLTSASATARMMNILEAEGRAEAAARLASPHPGAGGHRLG

SEQ ID NO: 51144 - protein, 221 aa, Zea mays
  Coding DNA Sequence Number=SeqID_7769
  Subcellular localization annotation: CTP_CleavageSite=48; ConfidenceScore=5.15e-01
MQAACNRAKWAHPSDSNAPAWRPRPTRHATGAPVATCEQLHRPSHHYRASSTAEPASRSSGHVASQAHVPSWDSGRTLSHGMKTDRRHLWQEKRATLRLRHNDRIKKAKSGLRRHKKLLSARPQGSDSGSAPEDDELRFARPQGSDSGSAPEDDKLRFARPRGSDSTSALEDRLDLDLGGASTSPNPGLGPTTSQEAPSLPYPKLTQATGDKTVVPSGSLR

SEQ ID NO: 51145 - protein, 149 aa, Zea mays
  Coding DNA Sequence Number=SeqID_7770
MGKSNKSKREPTPPSEDFGDSEYSEEEFSSESEGSPAPVSPPASSDDSDDSQGIAAEVWTYIRAVERSGLEGSDGSEFSSDEEDSDGGEDEDDDDDGDDDDGGDGDGDGSGSGGGGDGSKGSTRGGSSTGSSKGSTRGGGGGSSSKASG

SEQ ID NO: 51146 - protein, 26 aa, Zea mays
  Coding DNA Sequence Number=SeqID_7771
MRLHTLRDDVVLYSQRCLLLIKGSGK

SEQ ID NO: 51147 - protein, 165 aa, Zea mays
  Coding DNA Sequence Number=SeqID_7772
MHPLGLFPAEKRDEPMWCNRVSHVKDVWAMHLDQVGRITVQCMSALYRLQALQSDAIAHLTDLAHTTKITPNNREDFVVDLSSKLVEKDIQVEQLSQRIATLEQQVKIRDNTIDILEIQLHDVQEELEEANDHLEMHHQDMKANEAGSEGEEDPEELEPAPGPNV

SEQ ID NO: 51148 - protein, 130 aa, Zea mays
  Coding DNA Sequence Number=SeqID_7773
  Subcellular localization annotation: CTP_CleavageSite=57; ConfidenceScore=5.30e-01
MKLPKPSDPAQPHRKPRITLVGLLSLTGERGPAPRANQLSYPVVSRPKNSTPTNSPACARGPAISDADPHLDVTIVTSPTSLDTSPELDRRRKMKKGIENRNQRVTIFFLVCLSDIDHRKNIWNPGLVMI

SEQ ID NO: 51149 - protein, 168 aa, Zea mays
  Coding DNA Sequence Number=SeqID_7774
MRKKHGSVPKIHTCSGPDSHNEQTPALKVPLQTELRFRPRGYEQPPLRRACGATSSGQLADDLCSSSHGPRTDAATERLSFASPLKGCEPDIKSKEPKDASSAELEDGFHHQKLEEEVASRPVREVEPRLTSLSAPARMMKILEAEGGAEAAARLASPHHRTGGHRLG

SEQ ID NO: 51150 - protein, 258 aa, Zea mays
  Coding DNA Sequence Number=SeqID_7775
MDEGAPLGGLESEDDAEPSHGIHTVLYSLWGRGHLAHRLRIRFPEGEGLRRPKQPNKPRRLTGPAGRGSGHGLTTLGAVSVVPTTLPRPRGSVSRPPGGRLGASAATRRPRAAQAHASLGRAVRHHQGSEARDIQAGQQSRRGSDVDGGGAAAPSASTTPSARSDRASDGKVRPRVSTPKDDVSATPGLSPPGSPPGIRPEQTARSAAPEPQPAVLQGHQPGSWLRQLDSGAGPASGWPGQAPADEVFFSSQLYLCPC

SEQ ID NO: 51151 - protein, 104 aa, Zea mays
  Coding DNA Sequence Number=SeqID_7776
MERLAVAEFQLNKSLHQGEVREIKRLASPHDDCALANALEAIDISAWFYGGRRGSLRPPFAGRASTSSPSVTFTLARLLPSRVPPFPQQQQVMQLRGRCGLPSI

SEQ ID NO: 51152 - protein, 77 aa, Zea mays
  Coding DNA Sequence Number=SeqID_7777
MCRLPSAALGRWPLALCVCTQYSTKSPEGTSKGLGLRLQDDLKGLKRFNQPSPVALAVAAHLFRSVGSAQRLGEFDK

SEQ ID NO: 51153 - protein, 395 aa, Zea mays
  Coding DNA Sequence Number=SeqID_7778
  Gene Ontology: Mol. function=24-methylenesterol C-methyltransferase activity; Cellular component=integral to membrane; Biological process=steroid biosynthetic process
  Homolog annotation: Hit_ID=O82427; Match level="QueryCoverage=91%, HitCoverage=98%, E-value=0.0, Identity=92%"; Hit description=24 -methylenesterol C-methyltransferase 2
  Pfam annotation: Domain name=CMAS; Domain location=72-320; Score= -137.0; E_value=1.7e-05; Accession=PF02353.11; Description =Cyclopropane-fatty-acyl-phospholipid synthase
  Pfam annotation: Domain name=MTS; Domain location=116-233; Score= -92.2; E_value=0.075; Accession=PF05175.5; Description=Methyltransfera se small domain
  Pfam annotation: Domain name=Methyltransf_11; Domain location=133 -232; Score=114.3; E_value=3.5e-31; Accession=PF08241.3; Description =Methyltransferase domain
  Pfam annotation: Domain name=Methyltransf_12; Domain location=133 -230; Score=66.9; E_value=6.9e-17; Accession=PF08242.3; Description =Methyltransferase domain
  Pfam annotation: Domain name=Sterol_MT_C; Domain location=241-360; Score=221.6; E_value=1.8e-63; Accession=PF08498.1; Description =Sterol methyltransferase C-terminal
  Pfam annotation: Domain name=TPMT; Domain location=107-268; Score= -82.1; E_value=0.072; Accession=PF05724.2; Description=Thiopurine S -methyltransferase (TPMT)
  Pfam annotation: Domain name=Ubie_methyltran; Domain location=112 -294; Score=-103.3; E_value=8.2e-05; Accession=PF01209.9; Description= ubiECOQ5 methyltransferase family
  Pfam module annotation: Pfam domain module=CMAS::MTS::Methyltransf _11::Methyltransf_12::Sterol_MT_C::TPMT::Ubie_methyltran; Domain location=72-320::116-233::133-232::133-230::241-360::107-268::112-294
MEAATMVWTAAVVGAGLVYWFVWVMGAAEVKGKRAVDLKMGSITRDKVQDKYTQYWSFFRRPKETATTAASAEKVPAFVDTFYNLVTDIYEWGWGQSFHFSPSLPGRSHRDATRVHEERVADLLGARPGHRLLDVGCGVGGPMRAIAAHSGSNVVGITINEYQVNRARAHNRKAGLDSPRCEVVCGNFLSMPFPDASFDGAYSIEATCHAPRLQDVYGEVYRVLKPGGLYVSYEWVTTPLYRAEDPDHVECIHGIERGDALPGLRRQDEIASIAKEVGFEVLKEQDLALPPALPWWTRLKMGRIAYWRNSLVVRVLTMLRVAPKGVSEVHEMLYETAQHLTRGGETGIFTPMHMVLLRKPAAAASTEEANYGVQDRSLSEERQPFDFGGGMCCSA

SEQ ID NO: 51154 - protein, 269 aa, Zea mays
  Coding DNA Sequence Number=SeqID_7779
  Subcellular localization annotation: CTP_CleavageSite=31; ConfidenceScore=5.11e-01
MDKDRQGAVQKRQAVVRLHEARPKRPRGTAKAAAPGGSQPPLAAKSVAPGSSRVPEAAKAAAAGGTKSVPAGAVNAQELPPPGKRVADFATDISVEDYLVGSGEGQLVVVPPAVATAAAAVVPRAKGSALSASGEIPALAAVRDEAGVVSCRLKEALSQAADFADRATSGALTAVVSAEVERLRAQHADAVREKLAADSKCRKLADKVAALEGERTNLRRQLVEARKEANEALAKAQSAQAEANLARAEGSLARQHAEELEERLNALQT

SEQ ID NO: 51155 - protein, 28 aa, Zea mays
  Coding DNA Sequence Number=SeqID_7780
MAQLSYCMAGTVLWAQFEANNDTRDIVK

SEQ ID NO: 51156 - protein, 353 aa, Zea mays
  Coding DNA Sequence Number=SeqID_7781
  Gene Ontology: Mol. function=aspartic-type endopeptidase activity; Biological process=DNA integration
  Homolog annotation: Hit_ID=Q69V30; Match level="QueryCoverage=47%, HitCoverage=15%, E-value=6e-17, Identity=30%"; Hit description =Hydroxyproline-rich glycoprotein-like
MSSPIKDQGLVPEHMDKSVAQEQSSSEGYETPSDPFPTTSIDRAALRELQRDPTYDPREAEEVVSEFRAILEEAVARYEDVPEPTQDAPEQTKTTTETSRKRKQSDRKRGDRGLNKFPDKTYKISDRLDVQLVTMFALMQHDQQEILYGTKPNASASKRVGYLNPILISEESHTFRIGKDNDEIRGKTDEEVEKRIKDMKKDFEARYATYIGHAMLQFQDREAIMAPYNFKAYRFYKMRGGKYDLSKKLVPLDIHHHWPQFQRGNPENLTEAALYGIVEDLCTFILKEIIYVASRWPNMSPDPTVGWMLAWRSLRLTPVTESRHVRVLGHVGYAKRETDCSIAVSASRWPRRR

SEQ ID NO: 51157 - protein, 109 aa, Zea mays
  Coding DNA Sequence Number=SeqID_7782
  Homolog annotation: Hit_ID=Q6J9V9; Match level="QueryCoverage=42%, HitCoverage=24%, E-value=6e-07, Identity=49%"; Hit description =Putative uncharacterized protein
MQVACNRTAVAHPFGFVASGIEAQAHTSCNRRAGYYVQETAPPLAPMLRLLDCGTGAVTRGTEKGDISKGILLREGSGPRALLLIRGSKAGPSEGFDSRPRALGLRAHY

SEQ ID NO: 51158 - protein, 97 aa, Zea mays
  Coding DNA Sequence Number=SeqID_7783
MDEKRSHPDQSSSVRYYANVPDPPPANRLRQVVRAGRYRCEESGKKIHRARGGIYGKSSGEKNARHLTRRARVPDSRREKRAHAVPFPARNREGRKT

SEQ ID NO: 51159 - protein, 160 aa, Zea mays
  Coding DNA Sequence Number=SeqID_7784
MSLGDYAVDGNDQDISDVSTSEVSHSTDDVPTKVEELTTNLASQDKLPRLVAQERKHFKFKYESTLKELESVRTSVVVSDETKCDECALHMSNITTLRTKYVTLLDEHDELRSKSRLLGWGPGEHMAHGFWLFVPQDQKQQMVLWPQPHEWILFFDLEVA

SEQ ID NO: 51160 - protein, 27 aa, Zea mays
  Coding DNA Sequence Number=SeqID_7785
MAAVLGKWWRTMALAFHGELSTEERNS

SEQ ID NO: 51161 - protein, 287 aa, Zea mays
  Coding DNA Sequence Number=SeqID_7786
  Gene Ontology: Cellular component=nucleus; Biological process =regulation of transcription, DNA-dependent
  Homolog annotation: Hit_ID=Q7XHQ0; Match level="QueryCoverage=48%, HitCoverage=63%, E-value=1e-37, Identity=57%"; Hit description =Putative uncharacterized protein P0565A07.132
MQCLRIASVKAADITSKIKKAILTGHKENEEFALAMCPAEPYVLSGGKDKSVVLWSIQDHISALGDSSSSPGASGSKQSVKTANEKESPKVDPRGIFHGHDNTVEDVQFYPSRDQCNFFKIPQVLHALAHYNARHPGGEFDAVKPLKQSRVGFRGQAWFHINFWARPRSSSSNNKTIKRFFAEVHYKPTSISSPSSSSSSLAITAVPIVEICIIIEEPLSQYRRSCAFCPSYRDILHPKGCRKFVCGNDKDLFEQRLDPCCCTGMGIGKMPFTARPDMSAFLNISPK

SEQ ID NO: 51162 - protein, 106 aa, Zea mays
  Coding DNA Sequence Number=SeqID_7787
  Subcellular localization annotation: CTP_CleavageSite=72; ConfidenceScore=5.22e-01
MAPRSCLRRKDPRSGLSSQSSMVKDARHAPPLLIATQVESTKSAANRTPTWSSATKFATILASLVGSRTIHRSMMLQEHTLSALSNKWKSRNFRRETLPLSNELNG

SEQ ID NO: 51163 - protein, 157 aa, Zea mays
  Coding DNA Sequence Number=SeqID_7788
  Gene Ontology: Mol. function=ferredoxin reductase activity; Cellular component=chloroplast; Biological process=lipoate biosynthetic process
  Homolog annotation: Hit_ID=P80680; Match level="QueryCoverage=52%, HitCoverage=84%, E-value=5e-42, Identity=100%"; Hit description =Ferredoxin-thioredoxin reductase, variable chain
  Pfam annotation: Domain name=FeThRed_A; Domain location=77-150; Score= 189.3; E_value=9.8e-54; Accession=PF02941.6; Description=Ferredoxin thioredoxin reductase variable alpha chain
  Subcellular localization annotation: CTP_CleavageSite=67; ConfidenceScore=5.73e-01
MATATASVAPPSTSTSSVLLHRRLPSPAPAPASAAFPRLSGPAPPPRRARLLLRVALTNEVASDDVAAEEAAAAPKIGRRVRVTAPLRVYHVLKAPDLDIQGMEGVVKQYVCVWKGKRVTANFPFKVEFELAVEGQPKPVRFFAHLREDEFEFVDGE

SEQ ID NO: 51164 - protein, 370 aa, Zea mays
  Coding DNA Sequence Number=SeqID_7789
  Gene Ontology: Biological process=nuclear mRNA splicing, via spliceosome
  Homolog annotation: Hit_ID=Q53MI2; Match level="QueryCoverage=95%, HitCoverage=93%, E-value=1e-121, Identity=66%"; Hit description =Survival motor neuron (SMN) interacting protein 1 (SIP1), putative
  Pfam annotation: Domain name=SIP1; Domain location=151-369; Score =140.2; E_value=5.9e-39; Accession=PF04938.3; Description=Survival motor neuron (SMN) interacting protein 1 (SIP1)
MAASAAAQRRSAGSRTTYERAELEALRDAPSKEAHARLWADVRATLVASGFSGEYDGLLVAEEDVRSRRGNRGMKAMSVRKWPEEAAAAARFLGVAEIGAHRNGDLAVCHEHRFVSAHDHAGTSGVVEESFHQGEDVECEDDSDDDYNGILKPAFAVDGDPDFESGEPLDGFEYLRRVRWEANQIPRVKVAKIYSSAARNEQTPYMPEIPDIPKCLPDLRASKQWEDRFIVDFEETRMDKKYDNNHVLSELDNSDEPSVSSGTKISTKPGSGTEPQTDPTLTMIRSMDAVSRAATLRNYIDMIQSLDALSRNNCMWLFALCVAVHTPLDAETCASLRSLLRKCASILATKTEMDDEVVMLNILMTISGRA

SEQ ID NO: 51165 - protein, 137 aa, Zea mays
  Coding DNA Sequence Number=SeqID_7790
MRRSPSGRRGRRKPGRRLRHAGGDDARRRSAPRCLSPRRPQGQRAPPPPNAAGKGDPRTRAEGTGKGGYPEKDPSPRRNRAPSPPLLIRGSKAGPPKGSTVASDRVGPTPTTGQGFEGRPPEGFHGRLRLLGLRAHY

SEQ ID NO: 51166 - protein, 77 aa, Zea mays
  Coding DNA Sequence Number=SeqID_7791
  Subcellular localization annotation: CTP_CleavageSite=40; ConfidenceScore=5.18e-01
MATRPNKSTYFRAGQPLCMPFIRPDTKGTSAVTTPDGRCTAAGAGAGTVKLRFLDANNKGELNATAARLFRQLSSLD

SEQ ID NO: 51167 - protein, 35 aa, Zea mays
  Coding DNA Sequence Number=SeqID_7792
MAALSSLCLSVLLASWLVCAACLFVLGNASGAAHR

SEQ ID NO: 51168 - protein, 300 aa, Zea mays
  Coding DNA Sequence Number=SeqID_7793
MEVRCQTSFCQNEDGFPKLLRACTVRLGIRSQPEYDGREFVEHGTEKCVVTVYVGSSPRHVEWSVTAVGHRFKDTCQVVARKALRALCQIYEEEVVDTPLRFFPPFQRDRPAWMARMRALEEQQLLEDDPTVVYLTAYLLTLDAQYDFLARHHRQMIARAEDAEKCNRQLHVDLTTAQARATALESRERREEGLELPEGAIVLEGIPVSPKAMDKQEHPESSQDPPPELFEPLTMKKIPAPSLEVKEEAASTPPASPPSEELQELVQLEEEFDPVLPSQSLPEEVINISSLLTHPGDISD

SEQ ID NO: 51169 - protein, 380 aa, Zea mays
  Coding DNA Sequence Number=SeqID_7794
  Subcellular localization annotation: CTP_CleavageSite=79; ConfidenceScore=5.58e-01
MSFALPSCIVPFHLPSPPDGGRPQSFRLVVGGTQLRGSWYLSAIVRLQGFSSGSPAASPRRWSPKTVTPSFWTGRSKPGCDLGSALSFKDVHHPCWGGGRAEPELYLPRGFVGQPPLQHPRERALTSPASGADFDNAGPVDGRAVLPLQRYGASARRLVLRSSGRIRVGICRWADAPLEGAEVDAAREVPVADGTRLVDYLNRFTERELPRAKVTSEEPLGRPSMSRSRRQRCQHGRRQSWLREGGVVGQSLAGSSTGGTDAGVELPRPQAELMSLGVSWPRPRGGRPSRLLGPDSRRRPWRRWPGRGADVVLQSGGPPTASPSEARSDPAEGVVDAEGAAASFGCRRPSLQDQVVLYIRTHLSVTELFVRARVAFHGRR

SEQ ID NO: 51170 - protein, 60 aa, Zea mays
  Coding DNA Sequence Number=SeqID_7795
MQAACNRAEWARPFDSNASSMEVQAHASCNRRAGCYVDRERGIPRKGPFSVKETGSEPPY

SEQ ID NO: 51171 - protein, 131 aa, Zea mays
  Coding DNA Sequence Number=SeqID_7796
MALLDPPPPPERLQPEVALDLVRNLLEWGAPAFAGRICVGASPHGDLVAGEFVLFVSNLSCGLALPIPSFFVLLLEELVLQPQHSTLCFILQAAIIAYLCKMSVGATLLPASSSSIRREGCSLALRRRKAS

SEQ ID NO: 51172 - protein, 209 aa, Zea mays
  Coding DNA Sequence Number=SeqID_7797
  Homolog annotation: Hit_ID=O48967; Match level="QueryCoverage=100%, HitCoverage=82%, E-value=9e-38, Identity=58%"; Hit description =Putative uncharacterized protein
  Subcellular localization annotation: CTP_CleavageSite=38; ConfidenceScore=5.42e-01
MKQWRDDVDRLVSMAHSGSARPRPRSFRRQPETSALVRSPSVKAAPTEDLRAELNRRRAGEDAPIFLERPDDLRAELNCRRAGEDARVSLERVRERRLNFEGRNLDQDFAPLAPQTPRGARIHTGVPLVGLGCAALANHLRAATWPPKFRPHLPEKYDAVTGGRNERGKRPRPQGGNSGSCPVHPNSRHNASECCEIIKLAKRVSERRE

SEQ ID NO: 51173 - protein, 387 aa, Zea mays
  Coding DNA Sequence Number=SeqID_7798
  Gene Ontology: Mol. function=RNA-directed DNA polymerase activity; Biological process=RNA-dependent DNA replication
  Homolog annotation: Hit_ID=O48967; Match level="QueryCoverage=86%, HitCoverage=99%, E-value=1e-40, Identity=44%"; Hit description =Putative uncharacterized protein
MVHIVEHHDFLPEDFMVEEAAASFTPWATNLPTPGAAAAVHSMRQHTPAQTSRASRAAPRALSMARELLRHPPSSTASPGAMKQWRDNVDRLLGMAHSGSARPRPRSSRRQHEASTSVRSPSTPTGAQIQAGVPLASVGCAVLADHLRAATWPSKFRPHLPEKYDGLRHRHYGSRWRHHRNGNILPCCLVRADPDLAREPHPRIDLLLRHGVEAHLHAVRQEPGETLRAPSAPGLPRAVHGTRPPQTGVTHTGGSGAVAQDGKKKKKKNCGHERPPSAAPVIAAVTRGRSERNKHPRPQRGNSDSCPVHPNSRHNAAECREIIELTKRVSERREQMSKDGSPPRRRPGKERVDDGEVAAGERDLGYQSPKGVLKDVFTGDSDSGDDS

SEQ ID NO: 51174 - protein, 412 aa, Zea mays
  Coding DNA Sequence Number=SeqID_7799
LKWGTYKDTEPRHEGPGAKLKEVTTACNAWVISERHNDGLVAARQRSGHGSLNAEAAHRLLVEWTWLIKCRGGTSPASGMDRRRGLSAIKAEAARPRGLTSGSARRLTSRAVSHVAASGLRLSGEQKQSQDPAVSGPDPTQRGPGPVLGVRFVPVEVLDLARRSGPYMQGSDTFPWGSVPTVDTLEDIVFSSHVAALEPSTCGPRAPPQGEDMSLQVGSKLDWRLVRRFRALVDVTTASPPSVTPTATFVLCGGPEEAQYWRGRWFALRVAVRLLRTRRPTHQLYDLWARAPVSEAGAVVFGGDEEAHYRGRRFTYGAPLCIRAPLPPAAVVTMASLVHPERFQSKGSLNLVRNLLGWSVLAFAGKIRVGASPLDDLAAGEFVLFVSYLSCGLTLLISPFFLLLLEELSLQL

SEQ ID NO: 51175 - protein, 321 aa, Zea mays
  Coding DNA Sequence Number=SeqID_7800
  Gene Ontology: Mol. function=thymidylate kinase activity; Cellular component=chloroplast; Biological process=dTTP biosynthetic process
  Homolog annotation: Hit_ID=A2WTG9; Match level="QueryCoverage=16%, HitCoverage=16%, E-value=4e-20, Identity=94%"; Hit description =Putative uncharacterized protein
MAIRVLKSALNAAEDDHAGLQELGGNATHIFYGTEEAKEGKNAYMERRRPDFSKALMESKLLSGTTLIVDRYSYSGVAFSAAKGLDIEWCKAPENGLIAPDLVHLARASGVGWRGLEVLMAVCSRLEAVDLSHCIAAGDREITTLTTAAGLMELVTASASPMVGLDNVVVGCPGRQRLSHKWRQLSEAETQGYYYSAGSKNPERETKFHNPKFVSLLNHLRFYIPQILPNLEKGEEGEHHIVVPLLARAKFRSIALENGNSSCRPFDILRPDGAPRPQMACLGYDVDIDDRLIESAAVVLYNGNMKPWLKLAIRRYKYIWE

SEQ ID NO: 51176 - protein, 227 aa, Zea mays
  Coding DNA Sequence Number=SeqID_7801
  Homolog annotation: Hit_ID=Q6J9V9; Match level="QueryCoverage=55%, HitCoverage=34%, E-value=6e-20, Identity=50%"; Hit description =Putative uncharacterized protein
  Subcellular localization annotation: CTP_CleavageSite=19; ConfidenceScore=5.02e-01
MQAACNRATGMHPFDFNVSSMESQAHTSCNRRAGYYVRKTAPPLAPVPRLLDCGTGAAIRGNPAHGPTVPAKHAGHGSVSRGRRRDGRYGQKWADSNGGRTGKGDTPKGILLCEGSGPRALLLIRGSKADPSEGFDSRLRALGLRAHYWSEVRRLAPRKGSTAASGHSGSAPTTDQGFVGWPPEGFDSRLRTRRARDDSGYVRYMPKARATLPRYPRTFPRPAGAIM

SEQ ID NO: 51177 - protein, 313 aa, Zea mays
  Coding DNA Sequence Number=SeqID_7802
  Subcellular localization annotation: CTP_CleavageSite=56; ConfidenceScore=5.28e-01
MFGALRGQHGAFPPPPCGKATKGRMKKVKSVLDRPLALCGGSGAALANPAPAKPLTASTYQPENSEPDYAPGLRPVRMREQSDRPRHHERHSDLGGVKPLLRGLGGYTRRENSDACAAPTAVPPTRVRLTAAKSGLRRHRKLRLARPQGSDSTSTSDNGLRLARPQGSDSTLTPKDGLRLARPRGSDSTSTSEDGLRLVRPQGSVSASPDPRARTQPRPQRSLRLARPWARTDHVVGGYIITLPLASSGYGEQGRRPIWLAPVKQVMMAPRMLHDDGGSQPPTEARGRQQGPISPNSCASTGLKRSSDGHDIT

SEQ ID NO: 51178 - protein, 162 aa, Zea mays
  Coding DNA Sequence Number=SeqID_7803
MSSSCICIFDCVENRGQCLGLGLVPEPVQWRSCPSHSGWSCGKYDKKLLAIRRVSDVSSAASDDVGRPFVGIIKAEAMLGEAVVFPRPWPSLLWCDTPVSLRVLLSTISSAIISYCNLADGEYVLIPEQGAVHEEDQEQAPETAIEDLPAAPAIEGKPRFYA

SEQ ID NO: 51179 - protein, 200 aa, Zea mays
  Coding DNA Sequence Number=SeqID_7804
  Homolog annotation: Hit_ID=Q10P18; Match level="QueryCoverage=64%, HitCoverage=39%, E-value=6e-25, Identity=54%"; Hit description =TB2/DP1, HVA22 family protein, expressed
MDDNDMHVGVFILLPMLKSCFDVFQESQQPPQQQQPQVQVQQAQPQNQAAPVMRRASSIAARQAAMAQQSQETKPVQSSPKIKRQTSARSGSVASTKPPIAASAPKPGGSPKKGEVKPTADPVQTPTTGADSPKPEPSARSLPGVEGVDKMAIDEASGDAPEGAEELDPALEEETPIEEMIRVTRAKLRRRTTTEVPVGN

SEQ ID NO: 51180 - protein, 429 aa, Zea mays
  Coding DNA Sequence Number=SeqID_7805
  Homolog annotation: Hit_ID=A2X857; Match level="QueryCoverage=56%, HitCoverage=28%, E-value=2e-16, Identity=34%"; Hit description =Putative uncharacterized protein
  Pfam annotation: Domain name=DUF630; Domain location=1-60; Score =62.7; E_value=1.3e-15; Accession=PF04783.3; Description=Protein of unknown function (DUF630)
  Pfam annotation: Domain name=Extensin_2; Domain location=24-309; Score=-129.0; E_value=0.03; Accession=PF04554.4; Description =Extensin-like region
  Pfam module annotation: Pfam domain module=DUF630::Extensin_2; Domain location=1-60::24-309
MGCKGSKLDDQEAVALCRARAELLAAAVRHRYALADAHAALADSIDSVAAPLHRLLRLQAESPGLTLPSARKGGGAPADRLPRSFRPSSSAPQPAHGHSSHLQFGASPGSEPPSPAESPPRRVPEQLQHPHPHHAAYGYEYDYATQPAYAYPPTPAGSLQFYYARSRPPPASVAVTQRVPGPPERVVRFGSFDAAGGYPQQYAYSAQRAPIPPPAPAALQRAAPPAPPKASSWDFLNVFENYDSYEYDTYYYDSATAATAAAAPYTPSRSSREVREEEGIPDLEDDDDEDSVVVNEVAGQYSAPGSGGARSRRSSLGGVSATAELDQAENIIDVIASSKMMSAISVAHLGCKDMDAVDVGVVAMVDSQSLSSALEKLYFWERKLYAEVKVMVMLTKGPVRIIPTTESGFLEAQRPRRKCAYLFPRTPSD

SEQ ID NO: 51181 - protein, 241 aa, Zea mays
  Coding DNA Sequence Number=SeqID_7806
  Subcellular localization annotation: CTP_CleavageSite=67; ConfidenceScore=5.17e-01
MHCALPPSEPPDGVHLCCLLLAVVGGAQPRGGWRSSDIARLQGFSSCSPAAVPRRRSPRMMTVGLVVGRSKSGCGLCPAFSFKDVHHPGWGGGRGELGPTSAWAGDPLLPPAFEGGGHPPALRRRCPPATRGKANCYCLDRVQLSILHPSDGRAARGPATSRSSLRRRLHRGVAQHAVRREGRTRVLGWSRSRSCGENGSEDLPVRFGATAVRWCSVGGQVAAIVGAEVGKTAEGAADVQV

SEQ ID NO: 51182 - protein, 566 aa, Zea mays
  Coding DNA Sequence Number=SeqID_7807
  Homolog annotation: Hit_ID=Q6QP51; Match level="QueryCoverage=28%, HitCoverage=77%, E-value=4e-12, Identity=36%"; Hit description =Putative growth-regulating factor 1
  Subcellular localization annotation: CTP_CleavageSite=74; ConfidenceScore=5.14e-01
MEAQTHASCNRRAECFVPATAPPPAPPPRLLDCGTNTATRGGQEQRSRRQPSLRPIRGQRENPLSRREDNAPVRSERRFTFAIMTASKKAPSLPTDQRFEGWPLGRVQQPPQSMWAPHPLLVRGSKAGPSEGFNGRLRLLGLRAHYWSGVRRLAPEGGNDLVTESHRREASSPRTPSPGDRVRQITRSSPETPCSAPTEGNMALSPLLLAERRRRGRLGGCSRKAGSGQTVDSVNIPARELGTRPYTRATASSHEGTTRPAEALRETLRPRRSQTTPPRPRGLHPAGALARTHRNKTQPRKAGPLAKKCDESLQASANTPFEARGLLSGTIIRGTLKAPNSQLVTPISTKLQRPDGCDQARDQSIRGTRSRLARAQPRTRAADPGGSPPRPRPPSSGEHVLGSPEARSSPRSNPDQIAGAFNAKGSDLGSAPEHGELRSARPRARTRAKPRKTANCAPPDPGLGLGQSPGRRRTPLRPTQGSDLGSALEDDELRFARPRDSNSALASANGLRLARPRGSDSASAPEDGLDLDLGEASTSPNLGRGPATSTGGAIITLLQADSGYGE

SEQ ID NO: 51183 - protein, 219 aa, Zea mays
  Coding DNA Sequence Number=SeqID_7808
MVTSSSMAGESEPGRDLCPSLSLKDFHHQGWGGDCTVPGSLSRAASEPLPVPPLATAAGRGSAADELVGATHGPTSNSTAFCPSLPHKFGHGWGPPGSSIRPEVIAAAVRPPGAEVFIVAAAGAGDGESFVGLLLLSRPLPHRVGLGNPRPLFDEPRPGVAVPARTEAELARKEDQSGDPWTASPSEARSDLARGVVDAEGAAAPFSRQDLSLQDRIIL

SEQ ID NO: 51184 - protein, 112 aa, Zea mays
  Coding DNA Sequence Number=SeqID_7809
  Gene Ontology: Mol. function=ion channel activity; Cellular component= integral to membrane; Biological process=ion transport
  Homolog annotation: Hit_ID=Q4VDM4; Match level="QueryCoverage=58%, HitCoverage=12%, E-value=3e-17, Identity=60%"; Hit description =Cyclic nucleotide-gated ion channel 2
MASWSSSDTISFSEVSPFDTILHLLQLMWSFKPCLYMDFGLASAVTTLWTCTDVTHLVHVLLQFRLVWCGKLIRYARAVAAHYVCSVKGLCFDLFIIRGRNRAFNACWRCTM

SEQ ID NO: 51185 - protein, 101 aa, Zea mays
  Coding DNA Sequence Number=SeqID_7810
  Gene Ontology: Mol. function=drug transporter activity; Cellular component=membrane; Biological process=multidrug transport
  Homolog annotation: Hit_ID=Q651I6; Match level="QueryCoverage=59%, HitCoverage=12%, E-value=3e-22, Identity=88%"; Hit description =Putative ripening regulated protein
MAKKPVEEALLAAADEQESLSVREELKKQLWLAGPMIAGALLQNVIQMISVMYVGHLGELPLAGASMANSFATVTGLSLLLIDVYTLGLIRYKRIDGIVED

SEQ ID NO: 51186 - protein, 180 aa, Zea mays
  Coding DNA Sequence Number=SeqID_7811
MPSRRSTSSRHCFMAPGIAVELGGWHSNSLATDSAPGAALDSLDVCTGVCYHAECTAAAPGVGRLVAHAQGGTYKDAEPRHVGPGAKWKEVTTACNARRPYVKLRPLAYVTGSRPRGRIGSLPERGAEAHTVFFVPESRDPAVSGPDPTQRGLGPVPRVQFAPVEVLDLTRGSGFLVCRL

SEQ ID NO: 51187 - protein, 48 aa, Zea mays
  Coding DNA Sequence Number=SeqID_7812
MEATDHADRGSMDGFNGQWVPHGTTSAECKTGILAELTVMSSSGLSYD

SEQ ID NO: 51188 - protein, 71 aa, Zea mays
  Coding DNA Sequence Number=SeqID_7813
MAVIGSTSDKMYLCQVPNFGILNDKAETGLIPERPTRNGSGEMARVACTLCGKRLDGGVSVLSVVVNPVWS

SEQ ID NO: 51189 - protein, 371 aa, Zea mays
  Coding DNA Sequence Number=SeqID_7814
  Gene Ontology: Mol. function=ATP binding; Cellular component=integral to membrane
  Homolog annotation: Hit_ID=Q75KB2; Match level="QueryCoverage=92%, HitCoverage=91%, E-value=9e-93, Identity=56%"; Hit description =Expressed protein
MDRLVLFSRRRRRWILLTAAGAAAAVGAYKIYHHPVVAERRHRLVRLAAAVAAIADAATSSADAAALVVSDLADFVRSDADEVPRSVKQLAKLAASPEVSATVSTLSEAVTSGMFRGAGSSSSGPGSGGTVALSDRFVDKLFSDSGERLASAVAGSFARHLVLAYYSAPSPQGEASSSPTVWVNVVATGKCRKAISTWVEVFVGTAVREFIDKTIHINTYEQIFEGLTNPKHDAKVKELLVSVCNSAVETLVKTTHHALYNTNDNLDANDSCSGSGNGNGVGEGWVERVSSTLAVPSNRKFVLDVTGRVTFETVRSFLEFVLWKLQDGARKGGDSMVDSGLRVVRNPSHLRHHLYGGYTDLDSGEAIVSLT

SEQ ID NO: 51190 - protein, 351 aa, Zea mays
  Coding DNA Sequence Number=SeqID_7815
MESHDLQAERESRLVGGYEIDGSGYDYGAGKWYSFRLERMARLRHTARKSVIPFLPSRLAERPLRRPVAGQSSHLERLHHRLHEEQERRRQEQQGSSFSLQHEIESVRRCSPVLPLEAPPAPPLGALASGVAAGGWVARPITRDAARGCHFHDALDTLLRRTLNRRTWSIEYRCVIYQHSRGVYPDRWEATWLVRRLEKSLQGAEVCSEHYSISERDSAEAAMQDAAQRALSHYCSVLGGVADGLDLKYYPRRPSGSTGGVIVSPVGEDNPRLSSTVNLAVVLNTELDHALDELSRARAEVALLWAERAERRHLDDGSPAPVGTQHPYHSPRRGRQFYGNPDCKTKINLEP

SEQ ID NO: 51191 - protein, 748 aa, Zea mays
  Coding DNA Sequence Number=SeqID_7816
MAEVLRRFEVQVHQLTPNAVVALAKYVWAATSYGGAVEDHPGLPVAVMCSHYYVVYPQFEVAEDDEDEGAFRCAARMSSGHDLVEEFVGLNRVFELNRLPYGGYPGEDAADRRGKKPMGVDGDMCGLRGKDVFARPPGVFGVNAGVMNKDRQDTAQKRRAVIRLADPRREAKKARGSAKAAAPGRSQPALAAKPAAPRFSKASESAKAVVVGGTKPPPGKAAKRRELPSPGKRVADFGTNISVDDYFVGSGEGELVVVPPAVATAASTVVVGVKGAAFCASGEIPSAAAIKDVASSMSQQLREASQQLSQQLSQAADFADRVTLGALTADVAAEVERLRAQHMDVVREKSATESKNLWLAEKVAALEAEKTDLRRQLVEERREANQAISEAQAAQAEAKVAWAEGSLASQRAEEWEARFNALRGRVDKAEASTHAEEELLVLPTIVEGFMSFASLVTCEGAMNALSRKGCRHYEVFDQSDENFEREIFKAEDPVVKQSAGALFDRMWGLHGREAMERAEDVDDLGGLAGSAPEAAKVNPALPSDANENLSAVPVPTVAGEDPVSAPAPTGEDVLKVVVEPAVEDPTAAAGPLQGFEPAHATATDNANFVAASTMVVEDDSDDSVSKFFESDDSGSSVVWTEESSDEDLDYFAALDVAAAEASPRVMGAEVLPVASAGRRRRRVVAKRRVSEVEGGRLRVDGAGKRELLSSPTGASVGEGELRNLFEGEELRIMLFNYREMGIIPKVEP

SEQ ID NO: 51192 - protein, 443 aa, Zea mays
  Coding DNA Sequence Number=SeqID_7817
  Homolog annotation: Hit_ID=Q6QP51; Match level="QueryCoverage=32%, HitCoverage=81%, E-value=6e-09, Identity=30%"; Hit description =Putative growth-regulating factor 1
MQAACNRTKGAHPFDFDASSTEAQAHTSCNRRAGYYVRETAPPLAPVPRLLDCGTGAATRGDPAHDPTVPTEHIGHGSVSRGRSGRTGGTFGRRSRRRFTSAIMTASKKVRHVVRFRILFDFLFLSLATGTGKGDTPKGILLREGSGPRAPLLIRGSKAGPSEVFNSRLRALGLRAHYWSEVRRLAARKGSTAASGHPGSAPTTDQGFVGWPPKGSDSRLRARRARDDPGYVRYITKARATLPRVRLTSAKSSLRRHKKLRLARPQGSGSTSTLDDGLRLARPQGSDTASASEDGLRLARPRAWAQPRRWTTDSASPDPRARTQPRPRKTVSASPDPGLGLNLDLGRRTRPRPRRSLCLARPSARTDHVTGRAIITLPLASSGYGEQDRRPIWLAPPRAQQGVPPRPTPASASGGIITTPDPGLGLSLGLSLGLGRRPSPRPT

SEQ ID NO: 51193 - protein, 50 aa, Zea mays
  Coding DNA Sequence Number=SeqID_7818
MPSYDFVELVNFPLNVFEVCIFGCSGFGSRDLRSYAFNDCCTFGSCRFLN

SEQ ID NO: 51194 - protein, 234 aa, Zea mays
  Coding DNA Sequence Number=SeqID_7819
  Homolog annotation: Hit_ID=Q6J9V9; Match level="QueryCoverage=26%, HitCoverage=31%, E-value=1e-07, Identity=46%"; Hit description =Putative uncharacterized protein
MVEKGHGSRGGMTVTRSAITKRRRWRRSGQGQAKRATLHLRHNDRVKKGIGKGDTPKGILLREGSGPRALLLIRGSKAGPSEGFDSRLRALGLRDHYWSEVRRLAPRKGSTAASGHSGSAPTTDQGFEGWPPKGLTAASVHVERGMTLGFAEKQPWPDRLASRPDRRSIQCKDRLTPYPDARYSVDKAEENSAACPAPTAVTPARVRLTAAKSSLGRHRKLRLARPQGSDSTST

SEQ ID NO: 51195 - protein, 153 aa, Zea mays
  Coding DNA Sequence Number=SeqID_7820
  Subcellular localization annotation: CTP_CleavageSite=36; ConfidenceScore=5.05e-01
MNAVVTSHLPVCLYSAAGKKVNRQDFYTGKTVARTHCTVGRKNQKVNLHGGTAPHSETVSFLDNELREGVFRTFGFLKPKRLFFTDQARYEKRSSTAKGLLLGPCFVAEGPAERNSFGLSCSYVMTKVPFMKLRYYSISEDEGSNRLKDRMTF

SEQ ID NO: 51196 - protein, 206 aa, Zea mays
  Coding DNA Sequence Number=SeqID_7821
MGVPKGCLGRRGSGWPRSADGKLKRAPSPPSEDFGDSEYSKEASSESNRLPTPASPLVSSEDSDDSMGLSTVARAYWRSIERTGLGGSDESGVSSDEVDSSNSSEEWSGVDGDGERDDSSNDNDGGDDGNKGDDDKGDGDGRGGDDKGNSDGSSDDSDGRGDRSRGGSSKGDSDNNSGNGDGGGNDGSGGKGDGGSGKASGTMPLV

SEQ ID NO: 51197 - protein, 29 aa, Zea mays
  Coding DNA Sequence Number=SeqID_7822
MTKLMLAEGVEKLRKWKCTFGPERSSSSS

SEQ ID NO: 51198 - protein, 578 aa, Zea mays
  Coding DNA Sequence Number=SeqID_7823
  Gene Ontology: Mol. function=protein serine/threonine phosphatase activity; Cellular component=cytoplasm; Biological process=imaginal disc-derived wing morphogenesis
  Homolog annotation: Hit_ID=P48462; Match level="QueryCoverage=9%, HitCoverage=17%, E-value=5e-12, Identity=63%"; Hit description =Serine/threonine-protein phosphatase beta isoform
MDPAALKFLLDEIGMLFDEQNTKWDARFSEWNAKREPEPYLGDEVAAKEVAANDLREARDLEREDVEHVKLHEDRSQGAAVAGREVALAARLLAADACAARIVDCAAPFDSYVPAYAAQFDGFDLDHAAFLSNGTNSDLMGSAFFKEREEADKCMPSQSKLVIDLDPADNMETLFSESAFHDVPGANYMEALTTCSTPGLIECAMDELIRMAQAGERLWVNTGGREVLHVDTYDNIFAKPGGSFLGPDVHGDAWFGAPPSRSGELEIEDRVSIHLLWFGKDRGVSGTFDVDVTADFLRAQELDIMCRARQVVEEGYEYFPDRQFVTFFSAPIYHQLGCSFTIFKSKTDSSSSSPLRCSTKCPSQALHPIVKLNLVAVVNIAGTGIKFCGGFDINVFTMVHQIEGQGDVWGSLPVTLAACGHYVMVMMVMEPCARGKPFDRIIGKGYYTERVTAISCRAAVNVQQRFLWDPGVVVAFSRKLRHTCVDGRTTHCYDCELLTGETLVNLPDQYDTTLIFKHIQKSILIIHKNWSSHVLLERMKNLSKIRKLKELTSCLTATTETMALDHCFFISFGYYSSF

SEQ ID NO: 51199 - protein, 292 aa, Zea mays
  Coding DNA Sequence Number=SeqID_7824
  Subcellular localization annotation: CTP_CleavageSite=68; ConfidenceScore=5.46e-01
MSSRSLMHRVSPPSKPPDGGYPPSSRLIVGGMQLRGSWYLSAIVRLQGFSSCSPTAPLHRRSPKMVTSSLMVGESEPGCGLCPSLSLKDFYHQGWGGDCSVPGFRTRVASEPLAAPATATAAGRGSSAGEIAKAGHGPTSNSTAYCPSLPHEFGRERGPPGSSTRPEVSAAAVRPPGAEVVVVAATGAGDGAPFVGLLLLRRPSPLEWGCSCLRRGNRSSVCSGTSNASVFVHYGCRGLNMHGDDVVLRSGGLRTVSPSEARSNLAKVVVDAEGAAGPFQRQDPSLQDQIVL

SEQ ID NO: 51200 - protein, 168 aa, Zea mays
  Coding DNA Sequence Number=SeqID_7825
MQIIERKCEAQKGVGIRRKTLDKLTDQPGNLIPLDIVEVPRSFGEKTLDKLTDQPRNLIPLDIVEVPDLSIIERKCEPQKGAGIRSNLNFYVVLWTVGEKTLDKLTDQPGNLIPLDIIEVPDLSVSGDNFDLAEDDPCDPTTTSKPEAPMQSLNQLPVVTDLADVRSV

SEQ ID NO: 51201 - protein, 90 aa, Zea mays
  Coding DNA Sequence Number=SeqID_7826
MQIIERKCEAQKGAGIRTNLNFYVVLWTVGEKTLDKLTDQPANLIPLDIVEVPDLSPKEKNKEAALTRFVAYQTGDGGGALGFEWWKTNL

SEQ ID NO: 51202 - protein, 110 aa, Zea mays
  Coding DNA Sequence Number=SeqID_7827
MQIIETKCEAQKGAGIRSNLNFYVVLWTIGEKTLNKLTDQPGNLIPLDIVEVPDLSVSRDNSDLVEDDPCDPTTTSKPEAPMQSLNQLPVVTDLADARSVLSQNGVNKLL

SEQ ID NO: 51203 - protein, 131 aa, Zea mays
  Coding DNA Sequence Number=SeqID_7828
MAPLAGPDCLSVSLCQVALKSEWRRRCCPSVILELVDTIMRSDRSRISKELVDTILRSDRSRISKVGNHRELVQRLRWRLGLARRSRIARVIVGGLRLPKVLKNLILQCLWSIICGQGSSNKSPRFEEARK

SEQ ID NO: 51204 - protein, 253 aa, Zea mays
  Coding DNA Sequence Number=SeqID_7829
MVTSSLMVGESEPGCGLSPSLSLKDFHHQGWGGDVPGFRTRVASEPLEAPASATAAGRGSSAGVIAEAGHGPTSNSTAFCPSLPYEFWHGRGPPGSSIRPEVSAAAVRPPGAEVVVVAAAGAGDGAPFVGLPLLRRPSPMEWGFSPVDYLNRFTKHESPRVKVTSEPGCPSAGPMPELISRGLGSGWRPWKMVGRGPRGNRPSRLLGPDSRRSPWTASPSEAGSDLAEGVVDAEGATAPFQREDPSLQDQIVL

SEQ ID NO: 51205 - protein, 170 aa, Zea mays
  Coding DNA Sequence Number=SeqID_7830
MQIIERKCEAQKGVGIWSNLNFYVVLWTVGEKTLDKLTDQPGNLIPLDIVEVPDLSVSGDNSDLAEDDPWDPTTTSKPEAPMQSLNQLPVVTDLADARSEKKTLDKLTDQPGNLIPLDIVEVPDLSVSGDNSDLAEDDPCDPTTTSKPEAPMQSLNQLPVVTNLADARTI

SEQ ID NO: 51206 - protein, 36 aa, Zea mays
  Coding DNA Sequence Number=SeqID_7831
MAKDFGSKTVQIAMNAMVTSHLLVCLYSTAGCVLCL

SEQ ID NO: 51207 - protein, 179 aa, Zea mays
  Coding DNA Sequence Number=SeqID_7832
  Homolog annotation: Hit_ID=Q6J9V9; Match level="QueryCoverage=88%, HitCoverage=55%, E-value=3e-54, Identity=71%"; Hit description =Putative uncharacterized protein
MRDRERGYFKRILLSEGNGPRALLLIRGSKVAPCGIRQPPQSTRAPSPLLIRGSKAGPSEGFDSRPRACRVRDDPRYVRYMAEAWATLPRYPRTFLRPAGMVCNGIPPKGGTEPSDPIEWVRVQQITRRGSEAALAPGYDKLLTTSTNQLKNSEPDHAPGLRPGRMREQQGQPRNHKKN

SEQ ID NO: 51208 - protein, 143 aa, Zea mays
  Coding DNA Sequence Number=SeqID_7833
  Homolog annotation: Hit_ID=O65525; Match level="QueryCoverage=62%, HitCoverage=10%, E-value=3e-08, Identity=40%"; Hit description =Putative uncharacterized protein F4D11.40
MVPHSLTEIQNARGVMDVLSEMLNAIDPGNREIVQLDHTVPEVLVIPGFLNSTQHAGSKAGGHCGPCGPMSFIQAKSGAACQLNIGGLSLPVKCVGPEGRRTAAPKIVTAVRVADRVMPPGTAFFVNGLCPLLPTREREIDGE

SEQ ID NO: 51209 - protein, 154 aa, Zea mays
  Coding DNA Sequence Number=SeqID_7834
MQIIERKCEAQKGAGIRSNLNFYVVLWTLGKKTLDELTDRPGNLIPLDIVEVPDLSEKKTLDKLTDQPGNLIPLDIVEVPDLSEKKTLDKLTDQPRNLIPLDIVEVPDLSVIGDNSDLAEDDPCNPTTTSKPEAPLQSLNQLPVVTDLADARSV

SEQ ID NO: 51210 - protein, 96 aa, Zea mays
  Coding DNA Sequence Number=SeqID_7835
MVSTSSCKKFRFSNNRAKSYARFKEGEKTLDKLTDQPGNLIPLDIVEVPDLSVSGDNFDLAEVDPCDPTTTSKPEAPMQSLNQLPVVTDLADARSV

SEQ ID NO: 51211 - protein, 388 aa, Zea mays
  Coding DNA Sequence Number=SeqID_7836
MGSTRVAFVLLPLEESDLAGVGALQPSLGFKDFHHAADCIPHQWSSRMMTTSSMVGRSKPGCGLCPALSFKDLHHPCCGGGRCLPVREDLSGDLPVQAGAATIRWRSAGAQVAAVVGAEVVVARGGFSADETIGATRGQTSSSLALIACPRPSSGDVGEGLLTAAFTLSGRRRATRSLLSRRPSGVENLWPLYDELEPEAAVSVWTEAESAREEASSAQEQVASRAEEVQQRRLGLGQVIRERDQPRSHAAEAVSRAEVLEGQLDEATERPTEVSARARALAEALATMARARCWRPPSRWRSFRPCRRPRPGQIPPKDPAIEAVKKRKRRSGRKTFFEENFDAEGAPLSFPAELNFSCDELLQLQLSWTSTELNFQLQLNFNFSCGPL

SEQ ID NO: 51212 - protein, 163 aa, Zea mays
  Coding DNA Sequence Number=SeqID_7837
MSIYEHQFGFEIQNQKVDRHWKTEYQAADRPPMDRGPSAESGTGQSDQQYRPSEIIRARTVRDRHGFGGLRKKLAGRFKSKRPRGGDDDYTPTTDSEAQSSAGGTDSMDTEDFPHVHPDYPIDTSGWTFPKRRFSMAEYCSRRTVNQYTLPSDTNIQFFHTQL

SEQ ID NO: 51213 - protein, 435 aa, Zea mays
  Coding DNA Sequence Number=SeqID_7838
MQAACNRTKGAHPFDFDASSMEAQAHTSCNRCAGYYVRETAPPLAPVSRLLDCGTGTATRGDPVRDPTVLAEHISHGSVSRGRRRDGRYDQKWAGSNGGGRRTEAAVKSSASSRPLLGHRENPLPWREDDMTGGTFGRRSRRRFTSAIMTASKKVRHVVRFRIIFHFLFLSLATGTGKGDTPKGILLREGSGPRAPLLIRGSKAGPSEGFNSRLRALGLRAHYWSEVQRLAPRKGSTASSGHSGSAPTTDQGFVGWRPKGSDSRLRARRARDDPGYVRYITKARATLSSLGRHRKLRLARPQGSDTASASEDGLCLARPQGSGSTSTLDDGLRFARPQGSDSASPPEDDELRARPQGSDSASAPEDDELRLARPQGSGSTSTLDDELRLARPQGSDTASVSEDGLRLARPGARTRPRPRRTDSTSTSEEPPPRPT

SEQ ID NO: 51214 - protein, 157 aa, Zea mays
  Coding DNA Sequence Number=SeqID_7839
  Homolog annotation: Hit_ID=Q6QP51; Match level="QueryCoverage=24%, HitCoverage=17%, E-value=6e-10, Identity=76%"; Hit description =Putative growth-regulating factor 1
  Subcellular localization annotation: CTP_CleavageSite=48; ConfidenceScore=5.41e-01
MVAFQGGYPPFKGGSPYLRPQPSWAKSSPTHSKVLPYGTGAGSPHVVQAGSKQKKPNRHARRRLWQEKRATLRLLHNDRVKKGTGKGGYPEKDPSPRRNQAPSPPTDQRFEGWPPGRVRQPPQIAWALHPLLVRGSKAGPSEGFHGRLRLLGLRAHY

SEQ ID NO: 51215 - protein, 403 aa, Zea mays
  Coding DNA Sequence Number=SeqID_7840
MQLGCTPPPAVIQDGDLQFDGGGKQAGLRPLPLPQPQGFSSSVLGRGLPRAWLSDPSGFEAAPGTAFRHGSWKSIRPEVIAAAVRPPGAEVVVIAAAGAGDGESFVGLLLLRRPPNRTPRSLLDEPKPGVPVSARTEAELARKEDLVGRSLAASSVSGTDAGVDLPRPRARLMSSGDSWPRPRCDQPSRLLEPDSWRRPWRRWPRRDDDVVPQSGDPRTASPSEARSDLAEGVVDAEVKKARRIASAEELSSVKTCSVHGITYPNASYLSQKVMSERQLHYNSPDCPGVHRTVRCSKEERPQELASFGKLQRLLRYNSPDMSGVHWTVRCNYGATAISAPTATCSAFIARQRAQKSGTPMLVHRTLYSTCPVRHRTSRRAQKTELQRSNPNDFGDVAGAPDMS

SEQ ID NO: 51216 - protein, 175 aa, Zea mays
  Coding DNA Sequence Number=SeqID_7841
  Gene Ontology: Mol. function=catalytic activity
  Homolog annotation: Hit_ID=Q7F0N4; Match level="QueryCoverage=82%, HitCoverage=32%, E-value=2e-56, Identity=72%"; Hit description=Alpha- rhamnosidase-like protein
MNTSSINAASSWSIMKEEFTFQAHDRPFNNCHASTIVEVEKEIFLVSYFGGSIEGAPDVKIWTQRYSDGYWHPPVVADEENATAMWNPVLFQLPSHELLLFYKIGEHPQKPNVFSWSGAMKRSLNGGMSWLEREQLPPGILGPIKNKGKDQLGSPNLKGTESLQELQQINSQEYH

SEQ ID NO: 51217 - protein, 392 aa, Zea mays
  Coding DNA Sequence Number=SeqID_7842
  Gene Ontology: Mol. function=phospholipase A1 activity; Biological process=lipid metabolic process
  Homolog annotation: Hit_ID=Q6BTJ4; Match level="QueryCoverage=50%, HitCoverage=30%, E-value=3e-08, Identity=28%"; Hit description =Similar to CA1621|CaIFF6 Candida albicans CaIFF6 unknown function
  Subcellular localization annotation: CTP_CleavageSite=75; ConfidenceScore=5.76e-01
MTARSTWVAGFAAGPRSRSSSRHRHRRHSATWSWSPSAPPSRLTRGRRRPMPAERSSGQEPPCLRKNFLVALGLRADLPVHFIDDEKCLKATDLDPHQNRALGVRMVAGFAAGECCARALHGWGVRRGSAWRERASRRSACVWTTGGCGRWRDSRRGSAARGRRACGRPGVREKRRRTCIAVGVREKRRDATNLLAPVEPGPELSGTIIRGTPKTPNLSWSHRKLRIARPQGSDSGLAPEDDELRLARPQGSDSSSAPEDNEFRFARPQGSDSGSAPEDDELRLARPQGSDSGSAPEDDELRLARPQGSDSALASADGLRLARPRGSDSTSASEDRLDLDLGGASTSPNPGLGPTTSQEAPSLPYPKLTQATGNKTGVPSGSPRDPPGSKRR

SEQ ID NO: 51218 - protein, 37 aa, Zea mays
  Coding DNA Sequence Number=SeqID_7843
HCGTGGYEIDGFGYDYGAGEDEVVEGDFQEFQDYDEF

SEQ ID NO: 51219 - protein, 156 aa, Zea mays
  Coding DNA Sequence Number=SeqID_7844
  Gene Ontology: Mol. function=nucleic acid binding
  Homolog annotation: Hit_ID=Q53QK3; Match level="QueryCoverage=59%, HitCoverage=8%, E-value=3e-29, Identity=72%"; Hit description=PWWP domain, putative
MAAGDRGALMWRRGKRILPVFSWKNKMVGLASCGEMLWQLSVAACGLQQREKITMWSSAEREHLVLHFSRPCISPTKCDLINIFSQYGHVNEVKPDVANSASSAQVIFKRRMDAEAAFAGARKINALGPALVSFRLTDFPASASGNKASHVGSKSE

SEQ ID NO: 51220 - protein, 486 aa, Zea mays
  Coding DNA Sequence Number=SeqID_7845
MVLLHSARYQQSLRRYHARGVRSRDLQARILTAEGSSGTLGVNYTFDEGLLRESGSSRRLGRSPRGLGQLSPEDISPARGLGNSIPASVPPVDDPARLWPTKSSFRANSASVRADTATPGFGSSKSDRGVPLTKQEKPRTWCLKREVEAGRSSGHVVSQAHVPSRGSGRTFSHGVKTARPRFVPRTARARATAAPRTTRPVALTPRWDRRRLWQEKQATLRLRHNDRVQRAASEHVGPAPTTGQRFKGRPPQKGSTAASGYSGSAPTTDQGGNDLVTESHQREASSPRTPSKGDRVRQITRSHLAAPLTGLTKGQRRLRRSDCCATRQSEADRQPGPASGTIGNSASPDPGLGLGLSPGRRRTPLRPTQGSDSCSAPEDGELRSARPRARTWAQPRKTANSAPPDPGLGLELSPGRRRTPFRPTLGLGLSPGLSRRSPPRPTQGLGLDLGLGRQTRPRPRRSLHIAQPRARTDHVNRRRHHYPTPS

SEQ ID NO: 51221 - protein, 203 aa, Zea mays
  Coding DNA Sequence Number=SeqID_7846
  Homolog annotation: Hit_ID=A3AJE1; Match level="QueryCoverage=41%, HitCoverage=57%, E-value=1e-13, Identity=41%"; Hit description =Putative uncharacterized protein
MDPMLGAIIIGAEHVCAGANTIGAYTSDAEMSRRGKYAKQRKGPLTGTAFDPLPLPSGVPVPMCFCGDPCKVDKSEDHDTYRQRYWMCANFAFEPTIVQRRMNLMTPPPLCDFEQWIDTEISEKDKKWLENLQKWDAEDKERMKKRREELAAEQQREDEEKMRRVAECREDKEKKLERARRAKEAMEENPDAFHKGKWPRCTQ

SEQ ID NO: 51222 - protein, 59 aa, Zea mays
  Coding DNA Sequence Number=SeqID_7847
MPRNMGKSVYLARIKLDSNHLLLAGSLEDMVAGVTWPSTLPPGWTVEWDPASAEEEHEE

SEQ ID NO: 51223 - protein, 265 aa, Zea mays
  Coding DNA Sequence Number=SeqID_7848
  Subcellular localization annotation: CTP_CleavageSite=70; ConfidenceScore=5.24e-01
MEETHLHVFDAFCPRQSTPARAPACPAPRPSQTSVVARARAYKTLPGFEYTLPRTLKTSPELARRRLPVRSESAAAQSPCHRRPASRAIPNPVQPSEKTVHDSVKLPERGIRVCFAGEASPRSPELSTPPEYVDRVNHSAILRFLVHTVATLHREAHRALGLNQFAVVWPVHSPPTSTPACARGPDDSGHPRRQAVPRRDRQSLPEPTPTLHRTSLAADCNLADGEYVLVPEQGAAQEVAPDPAPEPAPEDLPATALEGKPRFYA

SEQ ID NO: 51224 - protein, 241 aa, Zea mays
  Coding DNA Sequence Number=SeqID_7849
MTPELVDAATSTRSGEASGGSPSGGEDEQRAAKGATPSSIDGEGLARAAMELAGAPCTWVCGSSKGRLEARPWGGAPPGCQEEEQGHWVPSAMDGQKERRSCVQDIWPGIPARAAKKSRSVEGEDRARFVELLPKSQRRSSDVCYGARAEEGTGVPGPRGRDTGRPQCCAIGLARQWASARKRERRWASAGRIQPKVPSRLESLARLKLRGYATIGWLRWNCGHYSTTHHIQSKNQIKQLS

SEQ ID NO: 51225 - protein, 143 aa, Zea mays
  Coding DNA Sequence Number=SeqID_7850
  Subcellular localization annotation: CTP_CleavageSite=54; ConfidenceScore=5.50e-01
MAPPVTWSVRALGWARRRLLRGRGRFCLPRPRSSLSPGSGEAEFVVFRGRGRVRALGRARRSSSSSEAEPESEPWVGPLQLCADGGYQLRFRSLGVSLIMVPDNDKIGEYSHGSENIKALNSGDAQLTDDLASKGDIYQPYLR

SEQ ID NO: 51226 - protein, 468 aa, Zea mays
  Coding DNA Sequence Number=SeqID_7851
  Subcellular localization annotation: CTP_CleavageSite=37; ConfidenceScore=5.31e-01
MGGARSSSALSSLEKRNFVEVGSPTASPRRWSPKTVTASLMVGRSEPGCDLGPALNFKDLHHPCWGGERGEPGLYLPRGFVGHLLPQHSRERALTGLAGGSDFDNAGLVGGERRQLQRVGLAGSAGSGSAPGAPSRRESGCRAARTGGPPKTSRAARAAFVFWGYPAFAPVWRLRAEVGASLVREDSSGDLPVGRWLPPSALRWWRLKKSSSPTGSPPPSVPRASGSLALIACPRPSSGDVGEGIVAAASALRPSPLQFGHLEQRSLSLLPERAAVSHLEPCRPAGPPMDPRPLFDEPKPEAAVLAWTEAELARKEDFVGRSLAGPSTGGTDAGVELPKPRAGLVSSENSWLRLRGGRPSRLLGPDSWRRPWRRWPGRGADVVLRSGDPPTALPSEARSDFTEGGVDAEGAAAPLPSTSEPTGSVHLVVIVCASESYFSRKVTSENRLSERELLIAKGDESGIRIPEA

SEQ ID NO: 51227 - protein, 223 aa, Zea mays
  Coding DNA Sequence Number=SeqID_7852
MQAACNRTEGAHPFDFDASSMDAQAHTSHNRRAGCYVQETEPPLVPLLRLLDCGTSTATRGNPAHDPTVPTRHIGHGPVSRGRRRDGRYGQKWAGSNGGGRRAKAAVKSSAKLTSLLGQRESPLPWREDGAPEKRATLHLRHNDRIKKGTGKGDTPKGIPLREGNRPRAPLLIRGSKAGPSEGFNSRLRALGLCAHYWSEVRRVGPSEGFNGRLRPLGLRAHY

SEQ ID NO: 51228 - protein, 274 aa, Zea mays
  Coding DNA Sequence Number=SeqID_7853
  Subcellular localization annotation: CTP_CleavageSite=30; ConfidenceScore=5.02e-01
MTEPRDSYASGIRIPHSSPSAITPRPGAIAAQVFSREFGSSKQLGRPPQSLSQLSPEDISPARGLGNSTLALVPPANGPARLRPMKSSFRANSASVHADTATSGFGSSKSGRGWPAAARSSSSDNNLRSRWPNCSGDGLRADTATTMPSPTSPLEGRGQAIKAKEPEARSADGGGDPVGDEDFFIRLHLNVDGESHLPTGRSPLGSSRTSGAPTSARKRRTGAKVGQPQNTNAALAAHDVLGGPPVHVAQRPLLRQEEAPGAELEPAEPASPTR

SEQ ID NO: 51229 - protein, 42 aa, Zea mays
  Coding DNA Sequence Number=SeqID_7854
MARVACTLRGKRMDGGVSVLSVKKQQIFVASVPRWYRKKNQD

SEQ ID NO: 51230 - protein, 130 aa, Zea mays
  Coding DNA Sequence Number=SeqID_7855
  Gene Ontology: Mol. function=zinc ion binding
  Homolog annotation: Hit_ID=Q2QWV7; Match level="QueryCoverage=55%, HitCoverage=19%, E-value=6e-18, Identity=62%"; Hit description=TRAF -type zinc finger family protein
MHKLAQIFLLGLVAVCMDGTMGDQFRSPSTVAVDLRREMLDYITQRSNSFIADALIESEANQDTPGAVAEPPKSLGPPTVVLVQRTSDNPAGAPDHLTSSVSVFFTLPKSVSPVMQILQHIGGTSMQKQL

SEQ ID NO: 51231 - protein, 157 aa, Zea mays
  Coding DNA Sequence Number=SeqID_7856
MAPKRKASSSSAAVIPPIDPNSQLPFAVWALECDPLLKKLTPWLPRSGKFLMMNGKSTLRKRKRDIFGEYLVWIGTLVLQFLLLKECLCLNLLMLTPMGVLHLLLTPMGVLHLPLTPMGVLHLLLTPMGMLHLLLTPMGVLSVLLMKTTGRKKMRSL

SEQ ID NO: 51232 - protein, 627 aa, Zea mays
  Coding DNA Sequence Number=SeqID_7857
MGGLGVSDGFARELMRTCAAPGERMSSPELRESSARMLKVTGGCWPRNVPIPRAASGDVFTSRMVRKWRVFPYGRNIAAVVSAVMDKDRQGAAQKWQAAIRIVEARPKRQKRGSATAAAPGGGKPPLAAKSGVPASSKAPEAAAGAGGSKPAKAVPPLSRVAEAAKAARALPSAGKRVADFANDICVEDYLGGSDEAQLATVAPAAAIATAAIVPKARGEALGSGGEVSALAVVRDEADAATRRLKEVTEALSQVADFASRTASGALTAAVSAEVERLRTQHADAVREKSASNSKCRKLTDKAEAKLARAEGNLAKELAEHLQERLTALESRAKGAEAAMRAEAEQTRTQLMDTYRGAAGTPRCRGGFMSYASLVTCEGAMNALSCEGCRHFEVFDQVDEDFDRDVYKVEDLVVKDSAGGPLRPDALRGERVDDLGALNSALSDPEPTPAEAVSGVALEPTPETAAIATAAPTSAAAGEDLPPKVAEGEPDALAAAAPSAEDPAAVAAETTAEAAAEPMAEASAAPGPSQVQDFGPAHATATAKFLAASTAEGGNECGGSGSEFSEFFDVADSGSSVEWTEESSEEDLDYFAALDVAAAETSPHAADAQDVPGPSTRAPTAKGGCKA

SEQ ID NO: 51233 - protein, 185 aa, Zea mays
  Coding DNA Sequence Number=SeqID_7858
MLVWLPPLRRRGRCLNLVSCSYYRVGAEAARYTQRSKSSVQQPHARLGTGVTLTRSAISFSEKQQISKGEYLCTQQPTFTHGMGKSDIMHGICGARDILQKLQYLMQISRSIKIDCGKRLGGHNNLSQNHIIGGLLRSRRSCKKKHLRKISMEIMPKLPYRELRHNVKPKTKGCTDLKMKRQIDP

SEQ ID NO: 51234 - protein, 480 aa, Zea mays
  Coding DNA Sequence Number=SeqID_7859
MASLVHPERIQSKGALNLVRNLLGWSALAFAGRIRAGATPLGDLAAGEFVLFSYLSCGADANDRLVLPSNGPTLDRKLWRTQPSLSPELLLVLDRIETFGDRVGPGTDLSWEGLEVLVKGITSESFIPESLILPQGIPTLCDDLALASATAPRPLDKGKGAASSSSARGGAEVSEEERRRRLRRADGSFVSDPPVGPRRSALRSVIRPLAGPRRPTPRPRARRGASALRHHNHRVPRHHNHHYDGTSQLVTPISTKLQRPDGRDSGQGPVHSRDTISPRPSPTSGKQENSAVCPTSTAVPLDRVRLTTAKSSPGRHRKLRLARPQSSGSTSTPEDGLRLARPRGSDSTSTPDDGLRLARPQGSDSASTSDDGLRLARPPGPDSASTSEESPPRPTPGSDRPRHRGPIITLPLASSGYGEQDRRPIWLAPVKQVLMAPRVLHDDGGSQPLTEARRRQQGPDNSDSCAPTGLRRSSDGHDIT

SEQ ID NO: 51235 - protein, 257 aa, Zea mays
  Coding DNA Sequence Number=SeqID_7860
  Gene Ontology: Mol. function=structural constituent of ribosome; Cellular component=ribonucleoprotein complex; Biological process =translation
  Homolog annotation: Hit_ID=Q96S84; Match level="QueryCoverage=78%, HitCoverage=98%, E-value=2e-96, Identity=84%"; Hit description =Ribosomal protein L15
  Pfam annotation: Domain name=Ribosomal_L15e; Domain location=55-246; Score=476.7; E_value=2.9e-140; Accession=PF00827.8; Description =Ribosomal L15
MARGRVRPAAKVEAMGGHGGAIVVVGGREASIAAGAGPQGASSAVERGEERAGEGAYKYVSELWRRKQSDVMRFVQRVRCWEYRQQPAIVRLTRPTRPDKARRLGFKAKQGYVVYRVRVRRGGRKRPVPKGIVYGKPKHQGITQLKFQRNKRSVAEERAGRKLGGLRVLNSYWVNEDSTYKYFEIILVDVAHTAIRNDPRINWLCNPVHKHRELRGLTSAGKKFRGLRGKGHTHHKNRPSRRATWKRNQTLSLRRYR

SEQ ID NO: 51236 - protein, 39 aa, Zea mays
  Coding DNA Sequence Number=SeqID_7861
MLAELAAVDSAASVMLRAAEALLEANLTRAPPERWDAAV

SEQ ID NO: 51237 - protein, 111 aa, Zea mays
  Coding DNA Sequence Number=SeqID_7862
  Homolog annotation: Hit_ID=A2Z5U0; Match level="QueryCoverage=63%, HitCoverage=14%, E-value=7e-09, Identity=39%"; Hit description =Putative uncharacterized protein
MAVPLDFPDSHLPLTDPTWALSNPLSVAEPTTDSALVTVVLTLWRFALADHVLDDVIAPLSSSWHQMDSLVLSWINDTLIVELQDIARERKGTDHQAWITLEDQFLGNLEA

SEQ ID NO: 51238 - protein, 405 aa, Zea mays
  Coding DNA Sequence Number=SeqID_7863
  Homolog annotation: Hit_ID=Q6QP51; Match level="QueryCoverage=54%, HitCoverage=87%, E-value=7e-14, Identity=34%"; Hit description =Putative growth-regulating factor 1
  Subcellular localization annotation: CTP_CleavageSite=44; ConfidenceScore=5.51e-01
MAVAGRRKKQSSRPQAHVPSWDSERALSHGVKTTRPCSVPRTARARTTATPPTTRPIALTLRQDRRHLWQEKQATLHLRHNDRVKKGIGKGDTPKGILLREGSGPRALLLIRGSKVGPSEGFDSRLRALGLCAHYWLAPEGFDSRLRARRARDDSGYIRYMAEAQATLPRGYTRRLVTPISTKLQRPDGAIQVKALSTQGTRSRLARAQPRAKAADLGGFTSRPREHLMQGSTDTLSCHALLSRQSRSDRSHFVAPLTDLTGKHRRCPAPTAVPLDRVRLTAAKSGLGRHRKLRLARTQSSGSTSTPDDGLRLARPQGSDSTSTPDDELCLARPQGSDSTSTPDDGLRFARPQGSDSASTSDDGLCLARPPGLDSASTSEESPPRPTPGSDRPRHRGAHHYPTPS

SEQ ID NO: 51239 - protein, 158 aa, Zea mays
  Coding DNA Sequence Number=SeqID_7864
  Homolog annotation: Hit_ID=Q6QP54; Match level="QueryCoverage=28%, HitCoverage=15%, E-value=9e-07, Identity=62%"; Hit description =Putative kinase
MARVACTLRGKRLDGGVSVLSPGVGRGGDSSEVEAESRPGGRARQRPSSEVEAESEPWGRAKRSPSSGVEVESEPWGRARQSSSSGVEVESEPWGRARRSPSSGVEVEPELWVRARRSFLWRPRPDLAAVSLTLSSGTAVGAGQRRCFPVRSVSGATK

SEQ ID NO: 51240 - protein, 409 aa, Zea mays
  Coding DNA Sequence Number=SeqID_7865
MQQLARRLLDAWAWASKLSCQKSEKRVHLARLHAACMAARPFRPLVWAKPGCTPPPVVTQDGDLRLDGGGKRAGLRPLPLPQPQGFSSPGLGREVRRVEVGPRVGGGPLLHSVMGGGAVVVRGAGSCSVSGLQTRVASEPLAAPASATAAGRGSSAGAIAGAGHELTSNSTAFCPSLPHEFCRGRGPPGSSIRPRVSATAVRPPGAEVVVVAAAGAGDGAPFVGLPLLRRPSPSEWGRSYLRRGNRSSVCNGISNAAEPTPKSTSRGLGSGWCPWKPVGRGPRGNRPSRLLGPDSRRNSWTASPSEDGSDFAEDVVDAEGATAPFSVKIRAYRIRSSCSVCLLRSPRPEKHTLAVLAKLRLFSSCFEHLDSLSKVMSEVSVSRRRRSPSARSALAAYVYSVVSRIRFPK

SEQ ID NO: 51241 - protein, 394 aa, Zea mays
  Coding DNA Sequence Number=SeqID_7866
  Gene Ontology: Mol. function=DNA binding; Cellular component=nucleus; Biological process=regulation of transcription
  Homolog annotation: Hit_ID=Q5Q1I9; Match level="QueryCoverage=96%, HitCoverage=96%, E-value=1e-135, Identity=68%"; Hit description =Floricaula/leafy-like 2
  Pfam annotation: Domain name=FLO_LFY; Domain location=1-383; Score =849.0; E_value=2.5e-252; Accession=PF01698.7; Description=Floricaula Leafy protein
MDPNDAFSAAHPFRWDLGPPAPAAPAPPPPPPPAPQLLPHAPLLSAPRELEDLVAGYGVRPSTVARISELGFTASTLLGMTERELDDMMAALAGLFRWDVLLGERFGLRAALRAERGRVMSLGGRFHTGSTLDAASQEVLSDERDAAASGGLAEGEAGRRMVTAGKKKGKKGVGARKGKKARRKKELRPLDVLDDENDGDEDGGGGGSDSTESSAGGSGGGERQREHPFVVTEPGEVARAKKNGLDYLFHLYEQCRVFLLQVQSLAKLGGHKSPTKVTNQVFRYAKKCGASYINKPKMRHYVHCYALHCLDEEASNALRRAYKARGENVGAWRQACYAPLVEIAARHGFDIDAVFSAHPRLTIWYVPTRLRQLCHQARGSHAHAAAGLPPPPMF

SEQ ID NO: 51242 - protein, 81 aa, Zea mays
  Coding DNA Sequence Number=SeqID_7867
MAQILPVRRHERLLGDSEKRPDRSRDIHGGNLALFVRMGKEHLARWAHTPVTVPKCADAREIGGPHAGDTRRGKMGWRGVG

SEQ ID NO: 51243 - protein, 217 aa, Zea mays
  Coding DNA Sequence Number=SeqID_7868
MTAIGLIPAEPSSYLLFTIFFSLLTSHFSLPLSFSLLFPLEDSIKEYYYHTLEETKDYEPCATVFNPRITKHCDLRGEGVENGVACDLAEGILSSVFFALSEMGVERAGGGFYRRAVLMVVLGCGVVMMEQVTQGNKCDGVGDGVAGGNGGGCAAKKGVGGGSAHGGGARMRGAWVSGGVNDPDVCGLWFQESLPLCMGSSQSEEKLHYPMHAEDWA

SEQ ID NO: 51244 - protein, 354 aa, Zea mays
  Coding DNA Sequence Number=SeqID_7869
TQSELVRSNPRVMKAGEHREDKEGESFVRFGHGGDFVIILKNFLLLLERMRFAKKKEIGSQMEVRCQTSFCQDEDGFPKLLRACIVRLGIRSQPEYDGREFVEHGTEKMRALEGQQLLEDDPTVVYLTAYLLTLDAQYDFLARHHRQMIARAEDAEKLNRKLHVDLTSAQARVAALESREAIAVEALKQAKDEHVQKLMDAYLVTNNQRRALWIQEPAPSNPVQPIKAEDPQILEGHPVSIRGEKKAWELPEGAIVLEGIPVFPQAMDKQEHPESSQDPPPELFEPLTMKKIPAPSLEVKEEAASTPPALPPSEELQEPVPLQEEFDPVLPSQSPPEEAFNISSLLTHPGDVSD

SEQ ID NO: 51245 - protein, 270 aa, Zea mays
  Coding DNA Sequence Number=SeqID_7870
  Homolog annotation: Hit_ID=Q6QP51; Match level="QueryCoverage=43%, HitCoverage=56%, E-value=4e-52, Identity=83%"; Hit description =Putative growth-regulating factor 1
LAPQKGSTAAPEHSGFKLITDQGFEGWPLGGVRQPPQSTRAPRPLLIRGSKAGPSEGFDSRLRACRARDDSGYVRYMAEARAALPSHFALPLTDLIGKQRRSPRSDCCATRPGKADNSQVQPQAQQEAPPRPTLGLGLGRRSLPRPTPGLGLNLGLGRWSPPRPTPGLGLNLGHGRKHAVRHGAASGALGRTVRGREGRRRLHGTARRVRLHRDVFRCSARLVGSASTSASGGIASSPDPGLGLRRSLRLARPWARTDRATGMHHYPTPS

SEQ ID NO: 51246 - protein, 58 aa, Zea mays
  Coding DNA Sequence Number=SeqID_7871
  Homolog annotation: Hit_ID=Q8H6I5; Match level="QueryCoverage=100%, HitCoverage=6%, E-value=2e-10, Identity=53%"; Hit description =Putative RIRE2 orf3
MTSLRMATEILSKDVPRVFQELSDMSSAKSPFLRRESSVWESLRQQGVLLAEANERLA

SEQ ID NO: 51247 - protein, 70 aa, Zea mays
  Coding DNA Sequence Number=SeqID_7872
MKSGVDLESSRMSSSPLSTDDLLRRVASTVGRLDAGVLNQPPMRPNHGYVSLGLRNFKTSRPPVPEDAAG

SEQ ID NO: 51248 - protein, 40 aa, Zea mays
  Coding DNA Sequence Number=SeqID_7873
MALGKSVNMPEGSGYAPREARGLLSQLGYGQTVDNVNKPA

SEQ ID NO: 51249 - protein, 199 aa, Zea mays
  Coding DNA Sequence Number=SeqID_7874
  Homolog annotation: Hit_ID=A2XFR6; Match level="QueryCoverage=32%, HitCoverage=18%, E-value=3e-09, Identity=46%"; Hit description =Putative uncharacterized protein
MPTPLVESLAFAARSSTSAPPAPAVQAPAPEGDDPDDSGDDDEDDDDEEDEEENVNEEANDVQQNYFMGFGPVTEHYTSMFETGHFPNLLQDVLHVLGTYVRPLYETRRVCEPPRACYYITRIHVRMMDAGIEGSQTSIVPGGAGEDRLNTLAGIVAGPNTDLDNATLDLSSVHLELEDAHARIAALEAQLQGRDPPEA

SEQ ID NO: 51250 - protein, 264 aa, Zea mays
  Coding DNA Sequence Number=SeqID_7875
  Homolog annotation: Hit_ID=Q6J9V9; Match level="QueryCoverage=39%, HitCoverage=42%, E-value=8e-38, Identity=69%"; Hit description =Putative uncharacterized protein
MVAHPFGIVASGGPAWRPGPTCHVTGAPVTACKETAPLLAPMLRLLDCGTGAATQGSPARDPTVPGTVKGDIAKRILPSEGNRPRALILIRGSKVAPPGGSKAGPKEGFDSRPRACRVRDDPGYVRYMVEARAMLQRYPRTFPRPAGTNCNGITPEGGIEPSDPIEWVRENNAVHPAPATVPVTKEMLTTASHDFPRVQPRAQQGAPPRLTLGLGLGLGLSLGLGRRTPPHPTPGLELGGVAASPDLGLVSATLLGIHHYPTLS

SEQ ID NO: 51251 - protein, 304 aa, Zea mays
  Coding DNA Sequence Number=SeqID_7876
MKAKSHHQPNQGDRRREARSGERDAAKGVAATAARAGTQTGGGAREEEHGVCSSLVPRDGSGQTCRGRRSAWGELGLQEQQGEEVVGYWLRETMGKKGACASAHRSEGRQGRLVLGLPCAGGNAAGARAGHGGFLARVAPEEGPRRGRRYGRVGAQGLVACSGRLHLEIFCWRGAPGRRAAGAWGAGHGEKGMRHHGWGRGTSRHGSDGEGAPTPWVLGHGGEGSPDLGASPESSTMGKRPSLRHVPEGIGHTGEGMEKRVLEARPDRAPGAWSPSAIEVAGQLESSCAPTREEGKTLGRESAG

SEQ ID NO: 51252 - protein, 135 aa, Zea mays
  Coding DNA Sequence Number=SeqID_7877
MTHSYGECLACSFLLDVLPELHKSPRFFVELGLHLGLGPQLAPADLNARRRCKGAVTSWHAKVVFSVVILLIDVVALASWVATLVVKAVTIIRAAGKAVVACEHEVAHGTGITESGEIPTDVGVVLFLGTRGSGG

SEQ ID NO: 51253 - protein, 43 aa, Zea mays
  Coding DNA Sequence Number=SeqID_7878
MLKDRVEHAKDIWAIYPDGPGDSVVARMSAFLHRRNRLPLCTS

SEQ ID NO: 51254 - protein, 45 aa, Zea mays
  Coding DNA Sequence Number=SeqID_7879
MGKPVPSLLLLLLSRGYAINRGLPSKAVAGRSSGAGSGAGSGATS

SEQ ID NO: 51255 - protein, 208 aa, Zea mays
  Coding DNA Sequence Number=SeqID_7880
QHVSRGLDFFGELNSAMHYPEPTPAEAVSGAALEPPPGTAEGAPDAPASVAAGGDVPPETAEGAPDAPAAVAPSAEDPSTVAVEAAAEATAEATAEATTGSSQVQDFGPAHATTTTKFLAASTVDGGNKCDGSTSEFSDFADSGSSVEWTEESSEEDLDYFAALDVATAEASPHAADTEDVPGPSTGCRRRRAVAKRRVSEAEGSRLR

SEQ ID NO: 51256 - protein, 148 aa, Zea mays
  Coding DNA Sequence Number=SeqID_7881
MYPWRLGYRLREILQQPISSAPGYRSLSLAQMSAQIALRVHRLLDLLAFLLAAGADSEIIPDRRSFLEKQAKRGPSGPLRRTVRDTRMTLGQNQCKNTSFHYRLSGGKAKTVRALARTVRPQARTVRSGRTVRTRRADRPRSAEWPNG

SEQ ID NO: 51257 - protein, 532 aa, Zea mays
  Coding DNA Sequence Number=SeqID_7882
  Gene Ontology: Biological process=intracellular signaling cascade
  Homolog annotation: Hit_ID=Q8RUC0; Match level="QueryCoverage=72%, HitCoverage=99%, E-value=1e-163, Identity=70%"; Hit description=Leaf senescence protein-like
  Pfam annotation: Domain name=DUF231; Domain location=363-528; Score =94.3; E_value=3.7e-25; Accession=PF03005.6; Description=Arabidopsis proteins of unknown function
  Subcellular localization annotation: CTP_CleavageSite=37; ConfidenceScore=5.06e-01
MSGAPEDSNSNSPPSGISRGTRAIIHRTVRCTPDSVRCAKEERPQELASFGNLQRLVRYNSPDMSGVHRTVRCNSGATTIRRQRLPAAHLMCAARAQKSGAPILAHRTRNSTGHPGGPTSQNLQRSESNGSDDMVGAPDMSGMVLCFKLLFGPTAAIFLSAVVILSCFTNVPQLQLSLKYTGELDSSYVAPAPVPKCDIFRGEWVPDPAPPQYTNETCDFIQEHQNCMLYGRPDLEFLKWRWKPDGCDLPRFDPHRFLQVVANKSVAFVGDSLARNHMQSLFCLLAKVEKPKDVSVTDRADPNMILYYEGYNFTMYLFWSPFLVRSEEDVAGVFKLYLDEPDSRWLSVASQLDYVLLSGANWFTRQSYFYEGGQLVGGVYVPLNFTSSLTNQHSHRMAFRTALRALAGARFRGKVILRTLSPMSHFEGGAYDAGGDCRRTRPYRADETAPMGGLELEFYTSQLEEFREAKGLDVVLMDPTAAMLMRPDGHPSRYGHWPDEKRTLYNDCIHWCLPGPIDAWNDMLLHMLSHSS

SEQ ID NO: 51258 - protein, 93 aa, Zea mays
  Coding DNA Sequence Number=SeqID_7883
MELGGGTAVGAVESLLTSSCFRWAMRKLLRGRGRVRAPGSGEAEIAGWCWGGVRALGSGEVEFVVFWGRAQVRALGRARRRSSSSGAEPKSEP

SEQ ID NO: 51259 - protein, 247 aa, Zea mays
  Coding DNA Sequence Number=SeqID_7884
  Subcellular localization annotation: CTP_CleavageSite=21; ConfidenceScore=5.29e-01
MSGAHRTVRCPLPTVALATCRAQNPRPTVGPSRPLAHRTVRCTPDSPHLSWHSITKILRNGPRAHFPFNSKCHKLADKVAALEREKADLRRQLVGERRETNEALAQAQAAQAEANLARAEGNLARERAEQLQERLTALESRVERAEAASRAEAERTRKHLMDTYHELGAQTGDFEVPDREPGLRCLEWVQEELQALPTVVEGFMSYASLVTCEGAMNALSREGCGTSRSSTKPSKILSEISTRLMTP

SEQ ID NO: 51260 - protein, 49 aa, Zea mays
  Coding DNA Sequence Number=SeqID_7885
MVFLTIELPDAKDFDCIGLPICRRAKQLLSQESYATRIRKMRAVGGQGS

SEQ ID NO: 51261 - protein, 64 aa, Zea mays
  Coding DNA Sequence Number=SeqID_7886
  Subcellular localization annotation: CTP_CleavageSite=26; ConfidenceScore=5.36e-01
MHRSPILKNKRSPKKSAKKSKKRAVSQRLVAHRTLMSDDNGRIQRSTATGANGRLTWRAPDTAQ

SEQ ID NO: 51262 - protein, 91 aa, Zea mays
  Coding DNA Sequence Number=SeqID_7887
MGGSEPGSFAEKDPFRGWDVSLADDVTGAPARLPPLLLPQLTHRLLDAWAWVPKLACQKSEKRVHLARLHAACMAARPFCPLVWAKMGGRL

SEQ ID NO: 51263 - protein, 77 aa, Zea mays
  Coding DNA Sequence Number=SeqID_7888
  Homolog annotation: Hit_ID=A3AMH4; Match level="QueryCoverage=66%, HitCoverage=32%, E-value=3e-08, Identity=56%"; Hit description =Putative uncharacterized protein
MTKQPVKVYKWDMDGTLILLKSLLVGSYARDFEGLKDSECRSKRDSPSLFSHARSIMYALKEKKIDMVIASCSPPRT

SEQ ID NO: 51264 - protein, 71 aa, Zea mays
  Coding DNA Sequence Number=SeqID_7889
MSGTFAHAPAEDALAALVYALDLVSSKSFFEKLLTHIQTYLELIVELYKFDDGMNEATLCYLLVVHKVCIA

SEQ ID NO: 51265 - protein, 229 aa, Zea mays
  Coding DNA Sequence Number=SeqID_7890
  Subcellular localization annotation: CTP_CleavageSite=37; ConfidenceScore=5.12e-01
MQPGSTPPPAVTQDEPLSASVSATAAGRGSSTDEIARAAHGPTSNSTAFCPSLPHEFGHGRGPPGSSIRPEESLGSVSLVVRGFSCLVKGIPRPLFDEPRPGVAVSARTEAELAREEDLVGRSLAGSSVSGTDAGIDQPRPRVGLTSSEDSWTRPQGDRPSRLLGPDSRRRPWQRRPGLGDDVVLQSGGLWTALPSEAGSDFAEGVVDVEGAAAPFKRQDPSLQDRIVL

SEQ ID NO: 51266 - protein, 350 aa, Zea mays
  Coding DNA Sequence Number=SeqID_7891
  Homolog annotation: Hit_ID=Q5VPC8; Match level="QueryCoverage=51%, HitCoverage=14%, E-value=1e-61, Identity=66%"; Hit description=WD-40 repeat family protein-like
MYMREHGSKHMLRIMGLPKALNLTSPVGNAMHCSLDCHKFIGITTNASVFAQGLVSNLITAGHGREAAFAAAVLGDNALMEKAWQDTGMLAEAVLHAQAHGRPSLRNLVITWNKMLQKELDHTPTVKTDAAAAFLASLEDPKLTSLGETEKKPPIEILPPGMPPLSAPPIVIKKSGTKPGLPNAVKASNGPIGAPMVQGAPMAQGTPGAQGIPMNQVTPSQGSDEAKPLEATVVDAAPTTSEGTAAPAAAEGTAAPSSEEAKAAPGSEGGTSHPINEEATAVAVSDAPGSPDAAAAAALAPAADTSSSDAPAVTPSEVTVSPPSTDAPELTDKPSPTEASLPPPPSVSGV

SEQ ID NO: 51267 - protein, 230 aa, Zea mays
  Coding DNA Sequence Number=SeqID_7892
  Homolog annotation: Hit_ID=Q5VPC8; Match level="QueryCoverage=100%, HitCoverage=34%, E-value=2e-41, Identity=71%"; Hit description=WD-40 repeat family protein-like
LHPTHPWLVTADANDRVSVWNWEHRQVALMSVAWLERSLRNSLREMLVRRYTGGHKGAIACLMTYMSAAGEAHDGGVVAVELSRVMGSAPQLITIGADKTLAIWDTVTFKVYCMVAHPLQPHLVATGTNIGVILSEFDPRALPAIAPLPTPTGSKEHSAVYIVERELKLLNFQLSNTANPSLGNAGVASDAGRSRNDSLEQLIVNQSKKHISTPAPHDSYSVLSVSSSGK

SEQ ID NO: 51268 - protein, 249 aa, Zea mays
  Coding DNA Sequence Number=SeqID_7893
  Homolog annotation: Hit_ID=Q6QP51; Match level="QueryCoverage=33%, HitCoverage=38%, E-value=7e-25, Identity=71%"; Hit description =Putative growth-regulating factor 1
MKATRVLPIRGLGRWKGAMHEGSVTDKVFTNVLQGPPPTTRGLGPTRHASWPGTKEAKPPHAERVTTPRLQALLHPRRNQRLKGRTAMQVACNCTARAHPLGFIASSMEAQAHTSCNRRAGYYVQATAPPLAPMSRLLDCGTGAATRGNPTHGPTVSIEHIDHGLAPRKGSIAALERSGFRLITDQGFEGWPLGRVRQLPQSTQAPRPLLIRGSKAGPSEGFDSRPRARRARDDSGYVRYMAEARATLP

SEQ ID NO: 51269 - protein, 198 aa, Zea mays
  Coding DNA Sequence Number=SeqID_7894
MAPKRASSKAVPSIDEAAKAALLMEKKRQGPPENTPQEAAEDGAVSKRQRQDHPTPEGTLHTCSSGGVPQAPPPGFAPPEGEDAIEDDEVIGISAEDQLQLWALRIKNHNLQKQKYILEAKRQRVTAQAKVRQMIQDEEQRARELEQEIALMQGEGQYNLQHGPPLQQRVPAGDLFIPQRNPFIPQVTAFQGINYLDE

SEQ ID NO: 51270 - protein, 125 aa, Zea mays
  Coding DNA Sequence Number=SeqID_7895
  Subcellular localization annotation: CTP_CleavageSite=91; ConfidenceScore=5.27e-01
MMVLASVTTTSFVILLLFSLPSCLHLCATPFSTKGVGAGAYSSYSSDTSLDTDSRSGYCTSTRTFSHHAHTIVGRPVRLPGFRPVLPLQPAASAHGRSCDLTDARRREYGASRSCSWPFSVRAVE

SEQ ID NO: 51271 - protein, 432 aa, Zea mays
  Coding DNA Sequence Number=SeqID_7896
MRATNREMVKGFTRSTCVGGFLNSGERDLATSVTRALSLSLSKAHGFTRKLSEGLDRTEEDGRGAGHGGCSRAALAGCGEVAGGNGWLGQDRRGHSRVHLAPLCPLGRQVLKRGSRWLVLDTLHQEVESVRPRSSVAQLEAPPAPPWDVPAVGGATGGDPGGDPDDDDSDHSTESSEPQEVEGWVTRPITHDAARGCHFHDALDTLLRQAFDRHTWSIEYRCVVYQHSRGRYPDRWEATCLVRRPEDDLRGAEAVSEHYSISERDTAEAAMQDAARRALSQYCSLFGGVADGLNLRYYPRRPTGSTESVVVSPVGEANPRLSSTVNLVAVLNTELDHSLDELSRARTEIAELRAELAERHHQEGGSPAPVGTQHPYRSPPRGHHTYGSPMSDNRRRCNRRAQQEQHDQQEEQQRQPPPPPPMSVEQMFLMQT

SEQ ID NO: 51272 - protein, 43 aa, Zea mays
  Coding DNA Sequence Number=SeqID_7897
MSNVVVFCNTLPLQLKKGCSQSAQSQGKVTDNEHYRDRQHHTV

SEQ ID NO: 51273 - protein, 306 aa, Zea mays
  Coding DNA Sequence Number=SeqID_7898
  Homolog annotation: Hit_ID=Q5NAJ4; Match level="QueryCoverage=29%, HitCoverage=39%, E-value=8e-07, Identity=43%"; Hit description =Putative uncharacterized protein P0443E07.29
MLESSVPTPRRTRHHRLPVGPRNPSGACSPWISRPAPWRLRPCPAPTDVISSLGHGSPPDRRLRHLATPSDRDLPRSFVLGHSHDATLLSSHSLESTVERSTEAGEQARVVRPIHPRCLCQPCPAWRAARGSSTPPPPALGAGTPITVTMAVWVRGLGVCVLLDPVDTDSLRPSVNIIFACRRREKQQPPPGHRLARMFRPSSLLCSTCNNTDVASSSYYSSPAGDDQGSSSRALLVMNGAIDRDLFVASLRRDLSTEPSQSPLLSTTSAMVVSTTEEKVHRGFVVVKRSRDPYSNFQSSMVAMIV

SEQ ID NO: 51274 - protein, 138 aa, Zea mays
  Coding DNA Sequence Number=SeqID_7899
MKKTLEDLRAEHRTGVQRIAAWADEASSALVPLGVSPIPVSEQSVSISDALPVLDSTADRLRRLDQILGARLEAEGSRLCQAVIEYVLTCFRNQDPAISLEPVIAGPVADAEDAAWGSVQDDVDVVAERFQRDPTDDE

SEQ ID NO: 51275 - protein, 129 aa, Zea mays
  Coding DNA Sequence Number=SeqID_7900
MGIWPRGSIGFLPERGAEVYMVWSEHVSALDLRLALIKAWVFFVPESRDPAEGGPDPTQRGPGPVPGVRSVPTEVLGSARRPGPDMLGSGAFPWGPDPSLIPWRILSFLATWRSRSRPRGGIGYCLPRD

SEQ ID NO: 51276 - protein, 49 aa, Zea mays
  Coding DNA Sequence Number=SeqID_7901
MEARRLQDGLVAVRQQSGQGTFNAEATHRLPAKWQGSLNAEAAHHLPVE

SEQ ID NO: 51277 - protein, 182 aa, Zea mays
  Coding DNA Sequence Number=SeqID_7902
MSGVHQTVRCDIEATDTSAPTDTCSTLNARQRAQKSDTPMLAHQTLYSTCPVSVGAEVSVASMSHRTVWCTPDMSGVPLTTLRRHGAHAAISSRVVNSTRPHHVDGSGAATWPEKMIHSKLSTVGTDPHGKVPDPYIYGSDLQAGSRTSAGTDRTPEMGLGPLCVGSGPLAAGSRDFGTKNT

SEQ ID NO: 51278 - protein, 30 aa, Zea mays
  Coding DNA Sequence Number=SeqID_7903
  Homolog annotation: Hit_ID=Q8S468; Match level="QueryCoverage=100%, HitCoverage=17%, E-value=4e-07, Identity=83%"; Hit description =Putative pol protein
MTGEKQMFSSYVKSKDFHDTIIFGDGNQGK

SEQ ID NO: 51279 - protein, 130 aa, Zea mays
  Coding DNA Sequence Number=SeqID_7904
  Gene Ontology: Mol. function=binding
  Homolog annotation: Hit_ID=Q10CF3; Match level="QueryCoverage=47%, HitCoverage=19%, E-value=2e-10, Identity=61%"; Hit description=Cell differentiation protein rcd1, putative, expressed
METITSGQKYRDCRQGHYMSHQIAMTVATNPVSYEGCIQGYSIGSVKVDDTEVISFLLQTEIIPLCLRTMEMGSELSKTEFGDQGEDSNILSSRLKEISTPDRPATLRFLGTRITAIDMVLLSVFTLTDS

SEQ ID NO: 51280 - protein, 97 aa, Zea mays
  Coding DNA Sequence Number=SeqID_7905
MSDDLVVPVHFEVGQELCFHFLDHPLLVLLELELLVSRQGADNPRPRAGRSATWREAAVLSGQARTVRGTGLDGAAEDRRRRLDLAPGRDPVGEERS

SEQ ID NO: 51281 - protein, 26 aa, Zea mays
  Coding DNA Sequence Number=SeqID_7906
MASKERLPSHNPGLFRSQSQPDTDGS

SEQ ID NO: 51282 - protein, 311 aa, Zea mays
  Coding DNA Sequence Number=SeqID_7907
MHRVLPPSEPPDGERPRFFRLVVVGGMQLCGSWYLSAIVRLQGFSSGSPAASPRRWSPKAVTTSSMVGRSELGYGLCPALSFKDLHHPGWGGGRAEPELYLPRGFVGHLLPQHSRERALTGLAGGSDFDNAGLAGGERRQLQRVGLAGSGSAPGDPSRRESGRRAARTRGPPKTSRTARAAFMFLGCPAFAPVRRLCAEMASVVSAEVVAAEEVLVADGITATIRAPGLRLFGFDSLSSPLERGRGQGPCSSSVRPEAIAAAVWPPGAEVVVTAAGAGVGEPPGVLSSRRPSNVWGGGLFVLTGAEPEFRL

SEQ ID NO: 51283 - protein, 46 aa, Zea mays
  Coding DNA Sequence Number=SeqID_7908
MDLLVSNSFCLLDVDMHMHFQVLNALFNLYIKEDRNKQPKMESSLT

SEQ ID NO: 51284 - protein, 128 aa, Zea mays
  Coding DNA Sequence Number=SeqID_7909
MSKGCLLVCLQSADFMEQRNFWANPFPNFLLRKWLQGCSKVHDHAQANSLDFLVPQLIQICVLATYQHPGHIKNLEDLGYGLLSYLTTPKFVLANGTERDCESGIGTERLRPIDFLERNGSGSEKNIP

SEQ ID NO: 51285 - protein, 55 aa, Zea mays
  Coding DNA Sequence Number=SeqID_7910
MKGAKKAPGSSEEEEEEEDDDDEDDQASTSSSEDEEMAQLVSSPSAWSSFAEAAR

SEQ ID NO: 51286 - protein, 69 aa, Zea mays
  Coding DNA Sequence Number=SeqID_7911
RLAFALDVLTKQRRSARGQRDGRRKSPALDVLTNRTAWVAGNSFYFDICGSEPESPVNEGKPRCICHLP

SEQ ID NO: 51287 - protein, 284 aa, Zea mays
  Coding DNA Sequence Number=SeqID_7912
  Subcellular localization annotation: CTP_CleavageSite=29; ConfidenceScore=5.02e-01
MSSRSLMHRVFPPSKPPDGGDPPSFRLVVGGNITPWELVPFSHRSASRIFIMQPGRTPPPAVTQDGDLQFDGGGKRAGLRPLPLPQPQGFSSLVLGRGVCRVGVGPCVGGGPLLPSVIGGRVGVVRDADSYTVPGSLSRAASEPLPVPPLATAAGRGSVADEFAGATRGPTSNSTAFCPSLPLEFGQGRGPPDSSIRPEVIAAAVWTPGAEVVVVATAGAGDDKPFVGLLLLRRPLPRRVGLFVPAESGDLRTASPSEARSDLADGVVDAEGAAAPFSRQDPSL

SEQ ID NO: 51288 - protein, 219 aa, Zea mays
  Coding DNA Sequence Number=SeqID_7913
MAVAGGQVQRSRRQPSSRLVRGQREDPLSRREGNAPEKRTTLRLHRNDRVKKGTGKGGYPEKDPSPRRNQAPSPPTDQRFEGWPPGRVQQPPQIAGSKVGPQRVHSRLRRRARDDHGIPSEGGIEPSDPVTRGPGLADHPQLIGDTMFGAHRGQHGAFPPSSLRKGDAGAGSGAALANPAQAEPLTASTYQPENLGPDRTPGLRPARMRERPGQPKHYV

SEQ ID NO: 51289 - protein, 194 aa, Zea mays
  Coding DNA Sequence Number=SeqID_7914
  Gene Ontology: Mol. function=kinase activity; Cellular component =ornithine carbamoyltransferase complex; Biological process=amino acid metabolic process
  Homolog annotation: Hit_ID=Q6QP54; Match level="QueryCoverage=54%, HitCoverage=37%, E-value=6e-19, Identity=51%"; Hit description =Putative kinase
MAPPVDVAGLRPRLGDVEAPPKPRSSLSSVAEVGSEPQVRARRRSPAGAGAESDPWGRAKRSSSSSGAEPKSEPWVGRGGDRRLPGPSPCPSPGSGETEIVVFWGLARVRALGRAEFAVFRDLARVRALGRAYPSPSPGSGGVRRLPGLSPSSSPGSGGAELPMAALSFCQAGQWSGEVTAVTSALQAGGRASG

SEQ ID NO: 51290 - protein, 21 aa, Zea mays
  Coding DNA Sequence Number=SeqID_7915
MARVACTLHGTFGLGMKLYTI

SEQ ID NO: 51291 - protein, 75 aa, Zea mays
  Coding DNA Sequence Number=SeqID_7916
MVHIYTPSALQLGGPRLSLIVAILAKGRNLRTRNEAVHNMKSMVGTKVEPATKLCAKKLRLSSRKRNRLKEEKAI

SEQ ID NO: 51292 - protein, 164 aa, Zea mays
  Coding DNA Sequence Number=SeqID_7917
VSSDEAAAGGEESAGGVAAAEEEEVGIATYRRRQRAAGRGSSGNPQSNRARRFGKPAIQQGAVNQRSHQKPPRNHFERGQRLRHLATSSAPGDFVELVPRRANVGVKAKTPPFARSLRCSRWSDRDKTGRDTPRLIGTRRRSATKSSHSAASSSSGAHVRSGPL

SEQ ID NO: 51293 - protein, 627 aa, Zea mays
  Coding DNA Sequence Number=SeqID_7918
MQVVELVPCARNKWGNWNEFWFYVAEGTVEGHEGLPVSEMCSHFYSAYPPFEVAEEDVDEGALRCAAGLSSGCDLVEEFVVYGVWPLAHGWALGEVCPRQMPFHGGRVVRSPAFTLNLQNRDPAAFVREAEDGAVRLVGRYVSRTEGQRNFDIRGSNDRLNRVFELNQLLYDGYPGQDDVDRRGKKPVVETGDDPAPAAAPSSKKRKLGTAMGGLGVSDSFARELMRTCAAPGGRMSSPELRESSARMMRVTGGCWPRNVPIPRAAGEDFFTSRMVREWRVFPYGRNIAAVVSAVMDKDRQGAAQKRQAVVRLVEARSKRQRGSAKAAAPGGGKPPLAAKSGAPTSSKAPEATAGAGGSKSTKAVPPSSRVSEVAKAARALPSAGKRVADFATDISVEDYLGGLDEGQLAIIVPAAATTTAAVAPKAKGGALSAGGEVAALAAVRDEAGAASRRLKEVVESLSQVADFANRTASGALTAVVSAEVERLQTQHADAVREKSAADSKCRKLADKVAALEGEKADLRRQLAGERRETNEALVKAQDAQAEANLARAEGNLARERAEQLQERLIALESRVEWAEAATRAEAERTRTQLMDTYRELGARTGDFEVPDREPGLRCLESVQEEL

SEQ ID NO: 51294 - protein, 170 aa, Zea mays
  Coding DNA Sequence Number=SeqID_7919
MNSPTPASGGDTRFSSDFLSHDGFPSILWEVLNSAGYPMPPLYTVELYEEHRVPRCRVWLTLEAHPLQPGWRSLDSETIEFRADDTTEAAAMKTLTTFCGYHPLEMVMHPLGLFRAEKKDDPMWCNRVSHMKDNQLHDVQRELEEANDTLDMHHMEMEANEAGSEGEEAP

SEQ ID NO: 51295 - protein, 272 aa, Zea mays
  Coding DNA Sequence Number=SeqID_7920
MNSPTPTSGGDSRFSSDFLSRDGFPSILWEVLNSAGYPTTPLYTVQLYEEHRVPRCRVWLTLEAHPLQPGWRSLDSETIGFRTDDTVEAAAMKTLTTFCGYHPLEMMMHPLGLFPPEKKDDPMWCNRVSHVKDVWAMPFRGDAMALLANTAQTAKLTLDSRERFCGRPIHRVGGEGSAVERLRQRINHPWSNRWRSETTLLMSWRISFTMCRGNSKKQMTTWTCTHLEMEANEAGSEGEEAPEELGPAPGANGTTSAMPPSPVSSVASTAQG

SEQ ID NO: 51296 - protein, 140 aa, Zea mays
  Coding DNA Sequence Number=SeqID_7921
MACSPAEERRDDPMWKDRSGSMPKDIWAIYPERNLWLICPLRWWKKDLQVEQLSNEIQELEELVGTRENTIKVLEDQLINTQQQLAEANQHLDMHHQEIQDLEANEDVDIEGGEEPASSLDTAGSGRPPSPESSVASFAH

SEQ ID NO: 51297 - protein, 349 aa, Zea mays
  Coding DNA Sequence Number=SeqID_7922
MRYLTSALERETTCCCFEDLETRSLKGSKKTVVKGATEIAKNPLGGGEVGLLRDLRLSVNKRGAELVVGHAGPRQNVDGVLVLVKEENLGAMLYGDPEEVDGEGPGLSSQTQAAGWDHALEEGNTRRREHDVVDVEKEVDGVIATPKDEQGPSGLHSPEKTREDGPNDGRIDDEAEGLVVVHFEVLSEAPKDTTGLVLMQSTISLDLVMENPLVSYHVGGMGIWHQVIDVVGQRGCILLHSTTLVTIGERSTVEGGDRRGSWSGGGHEHQPVNLSENIDRSAHDHQVDMARVAVDGYRMVHWWLVTREGQSTSGSSEEWTRGSGHKRCWSNGSLVAPSEATGRDGHGRR

SEQ ID NO: 51298 - protein, 186 aa, Zea mays
  Coding DNA Sequence Number=SeqID_7923
MSALREAGRSASMQAMRQVQQPLQHVEGAARKAAPPPPRRCGGLGVLGRDGKRGRFVEVLGEERGGEVGIGTRGRGVVDDGLRRAVLRAAVGRPDEEDVRGVKGEEGGGDPDSDGAGEQHGEEVEERDEEEADVAHEPGALDLDGASSAGPPRVLARLDDRVGGGAMRGERVRASDGRETLDRIDG

SEQ ID NO: 51299 - protein, 160 aa, Zea mays
  Coding DNA Sequence Number=SeqID_7924
  Gene Ontology: Mol. function=magnesium ion binding; Biological process=metabolic process
  Homolog annotation: Hit_ID=A4KAG7; Match level="QueryCoverage=57%, HitCoverage=10%, E-value=3e-16, Identity=48%"; Hit description=Iso -kaurene synthase
MEDEPISIVFQVTANGVGLLDPGVESNRIFFFRLKHVQQVELSNPNVEIRLLEVFYHKIYKSTTRQPSTTPNRELYLGVKVHCGEEVAIKLRWNVGKENMQRGLQFIGRNFSVAVYEQVNSPIGFNITFTGLLSLTTDIGLEFPIIQTNFCGILNGYSII

SEQ ID NO: 51300 - protein, 52 aa, Zea mays
  Coding DNA Sequence Number=SeqID_7925
MGKPVPSLLMLLLGRVTALVPTITGMGDHVSGRVRGKVCGQVHSGFSNPYAK

SEQ ID NO: 51301 - protein, 148 aa, Zea mays
  Coding DNA Sequence Number=SeqID_7926
  Gene Ontology: Cellular component=endoplasmic reticulum
  Homolog annotation: Hit_ID=A3BM19; Match level="QueryCoverage=36%, HitCoverage=11%, E-value=5e-14, Identity=59%"; Hit description =Putative uncharacterized protein
GASPRHARSLPMVGHGWEGLCWPVYGGGGSAGRGHVARGANTGDLWLRYGETDGYPSQKGITYDAHRKDIDITRIVIFGRSLGGVVGAVLSKNNPDKHRVPHRQRGARSLNLKQPAIVPPQPSEATESVEGSCSVVFPDDNVELDPSI

SEQ ID NO: 51302 - protein, 263 aa, Zea mays
  Coding DNA Sequence Number=SeqID_7927
  Homolog annotation: Hit_ID=O40947; Match level="QueryCoverage=46%, HitCoverage=13%, E-value=9e-08, Identity=23%"; Hit description=ORF 73
MGPLFRINLEIQALPRSVRRQLVGLRSPNLGSRTGRGARALRRHHLQIRYHHQRRLCQTDRRHRGGRGGSSSSNDNVCPASKATGRFTVPKRAELEQEREDFKEDIRKVSDREEEVTRKERSLVKKKEHLDQKEEAATALHDKLKAYNAVLEKQRDKQVAAEAKLQKLQQELADKASDIARAEGNLKAREASLVKRTTDLTWQEEDLVFREEMWARRNKLLDELELEAEEKGKRLEGKVRRSRSASSRQRRRRRRPRAPRRWR

SEQ ID NO: 51303 - protein, 23 aa, Zea mays
  Coding DNA Sequence Number=SeqID_7928
MGKPVPSLLMLLLGRAAWIKQSH

SEQ ID NO: 51304 - protein, 215 aa, Zea mays
  Coding DNA Sequence Number=SeqID_7929
  Gene Ontology: Mol. function=carboxyl- or carbamoyltransferase activity; Cellular component=ornithine carbamoyltransferase complex; Biological process=amino acid metabolic process
  Homolog annotation: Hit_ID=Q8SA97; Match level="QueryCoverage=47%, HitCoverage=23%, E-value=4e-13, Identity=45%"; Hit description =Ornithine carbamoyltransferase
MAPPVDVAGLRPRLGDVEAPPKPRSSLSSVAEVESEPLGRARRRPSAEARAESEPWGRAEWSRSVERRSDNGHFGSAGWGARVRIKLYADGGYQLRIRSLEGLNALRNASAGLVVPSCELVVARGKRAIRDRLGFFTYAPASPFRKEEGGKAPCCPRWAPNMVSPVSCKRVIRVDVRAPFVRGRLGAQRHAQKYLRVICRTRSPSDGVRGLDASL

SEQ ID NO: 51305 - protein, 97 aa, Zea mays
  Coding DNA Sequence Number=SeqID_7930
  Subcellular localization annotation: CTP_CleavageSite=25; ConfidenceScore=5.28e-01
MKLWKETSRSSKTTTSSRCGWARLRHTARKSVIPFLPSRLAERPLRRPVAGQSSHLERLHHRLREEQERRRQEQQSSSFSLHQEIESVRSESRLEGG

SEQ ID NO: 51306 - protein, 135 aa, Zea mays
  Coding DNA Sequence Number=SeqID_7931
  Gene Ontology: Mol. function=aspartic-type endopeptidase activity; Cellular component=anchored to membrane; Biological process =proteolysis
  Homolog annotation: Hit_ID=Q6K6I0; Match level="QueryCoverage=80%, HitCoverage=33%, E-value=1e-24, Identity=54%"; Hit description =Nucellin-like aspartic protease-like
  Subcellular localization annotation: CTP_CleavageSite=25; ConfidenceScore=5.42e-01
MAPAPRRASSFFSVLLVLLFALSVVGRAGATGVFQVRRKFPRHGRRGVAEHLAALRRHDVGRHGRLLGAVVDLGLGGVGLPTAAGCLPAQRSLYYTRIEIGSPPKGYYVQVDTGSDILWVNCIRCDGCPARSGLG

SEQ ID NO: 51307 - protein, 208 aa, Zea mays
  Coding DNA Sequence Number=SeqID_7932
MSRGHELLVHDDEELPLVLVVDEAVPAAVCATFVHGTRRCISGGEACPQSHHVVALALVRRWRAHSTRGARPLVPRFLSPSFPAPALVTMSRRGKSAKQRNGPLTRTAFDPLPLPTGVPVPMCFCVILARLTSLRIMTSIDREDTERIEKRREELAAKQQRVDEQEMRCVAECREEKERKLERAHHAKDTMEENPDAFRKGKWPRCTR

SEQ ID NO: 51308 - protein, 85 aa, Zea mays
  Coding DNA Sequence Number=SeqID_7933
MADVPGVDSTAAMREDMEAICVAKSPSWRWTSARAVVIAANSDGWAEAAVSASADPGISDTRLLELPRLRRLYEWLMVGGLEEEV

SEQ ID NO: 51309 - protein, 906 aa, Zea mays
  Coding DNA Sequence Number=SeqID_7934
  Pfam annotation: Domain name=MAP7; Domain location=565-718; Score= -79.0; E_value=0.05; Accession=PF05672.2; Description=MAP7 (E-MAP -115) family
MPSSSSSTADTPSVGASSEDTLSNVAAEELRPGDTVEFGASRMSLVRVQDMQQLGYFGGGVARVPGAEEVPEPEGELVVFEAFFAAGLRLPAHRFMAEVLRRFEVQKRKIGHKIAQFGSCTFTPKTGKTSMEVVELVPCARNKWGNWWEFWFYVSEGTVEDYPGLPVAVMCSHYYAAYPQFEVAEDDENEEALRCAARMSSGHDLVEEFVGYVVWPLAHGWALGEVCPRQMPSRGGMLVWSPAFALDLHGRDPAAFVREAEDGAARIVGRYVPKAEGLRSWDIRGSNNRLNQVFELNRLPYGGYPGEDAADRRGKKLMGGTEEGTSQLMGTCAAPGGRMSSPELRESSARMLEVTGGRWPKNLPIPWAEGEDMSTSRIARGLRIFPYGRNIVAVVSAVMNKDRQDAAQKRRAVIRLPYPRRKAKRAWGSAKAAAPGGSQPTLAAKPVAPGSSKVPKSTKAVVSGGTKSTPGEAAKVRELPSPGKRVADFATNIIVDDYFVGSGEGQLVVVPPAVATTAATAVLGVKGGAFCAGGEISSATAVKDEAGTMSRRLREASQQLSQQLSQAADFADRVASGALTTDVSAEVERLWAQHADAVREKSAAESKSRRLAEKVAALEAEMTDLRRQLVEERREANRAIAEAQAAQAEAKLARAEGSLASQRAEEWEVRFNALRGRVERAEASTRSEVERTRAQLVDSYSKLGARTADFEVPDREAGLRFLEWLQEELLALPTIVEGFMSFASLLTCEGAMNALSREGCRHYEVFDQTDESFEREIFKAEDPIMERAEDVKDFGGLIGAPPEAAEGNPVLPSDAGEGPSDVPVPAAAGEDPVSAPVPTVEGAQEVVAEPTVEGPTAADAPSQGFGPAHATATKSANFVAASTVVAENDSGDSVWQNHPNYSSLSA

SEQ ID NO: 51310 - protein, 193 aa, Zea mays
  Coding DNA Sequence Number=SeqID_7935
MAGPRRCFRGNSRVTDGNVGVLECPTQVPKCKMVDKVQIKDKAKTLLSLENRTVLWCTGQCPVRQAGSGKQAALGTSTAVYGYNSPDCPVGRSQANSSLSGIHRRRTAIIHRTVRCAPDCPVSQRSAGPTVGRAICAGHVAEPTARRRHRTVRITYSPPSRCSEFTGLSGGASDSVRCARLALANRLLSGLRQ

SEQ ID NO: 51311 - protein, 150 aa, Zea mays
  Coding DNA Sequence Number=SeqID_7936
MGKSKKGSSSLPRSGDKRKREPTPPSEDFGNSEYSEEEFSSESEGSPAPVSPPASSDDWDDSQGIAAEVWTYIRAIERAGLEGSDESEYSSDSSEEGSGGDGGDDDDDGGDSDGGDGSGKGGDGSGKGGDGSGMGGGGKGSSRGSNQASG

SEQ ID NO: 51312 - protein, 212 aa, Zea mays
  Coding DNA Sequence Number=SeqID_7937
MSKNTRDTRFIPRFGHTTKVPYFLVEAPTKSWVSFNPNPPFADHKDLKWERQEMCEREWEVFFKLEMEFGSCSCVGREDRLNRPWDRFNRLGQADSQSASQTGRLQVRLQKQVLTPVEPPLGAGSTAWGSDWQSVCQSGGQTGQLTLTPVEPPLGPVQPVLTSELKKLSSAAVKFSWKAQLQLKKLNSAEVKFSWKAQLQLKKFSCFSTRTL

SEQ ID NO: 51313 - protein, 211 aa, Zea mays
  Coding DNA Sequence Number=SeqID_7938
  Gene Ontology: Cellular component=nucleus
  Homolog annotation: Hit_ID=A2Y8T6; Match level="QueryCoverage=25%, HitCoverage=8%, E-value=5e-23, Identity=88%"; Hit description =Putative uncharacterized protein
  Subcellular localization annotation: CTP_CleavageSite=61; ConfidenceScore=5.21e-01
MARSSFKLEHPFSSSLRFLIPPSSSGLQLMLLVVLGFRLFGCFDGVLVGGSSENGDALPVVAKTPKRRTTLESQLIKFEDEDSEKARAVADAMSPVQIPSLNREVKILMGRFLASLSSKSPAINAIVLNSSVLYAILVISIYDLRMSSPMRVKDHMYGSPILNIKWHHTLNSTEPKLITADKHIVRIWDPNTLPYMLPSENAFSAAVSALE

SEQ ID NO: 51314 - protein, 61 aa, Zea mays
  Coding DNA Sequence Number=SeqID_7939
MAMMGSTSEKMYLCQGNRTDPVELSGAHAWSSEVFGTRTGACGPNNLEAYRMYGSPEQIHI

SEQ ID NO: 51315 - protein, 176 aa, Zea mays
  Coding DNA Sequence Number=SeqID_7940
  Gene Ontology: Mol. function=endonuclease activity; Cellular component=nucleus; Biological process=tRNA processing
  Homolog annotation: Hit_ID=P60193; Match level="QueryCoverage=40%, HitCoverage=40%, E-value=2e-29, Identity=87%"; Hit description =Nuclear ribonuclease Z
MDQSELNHNLVPLEVREEYELRRDLKVRAFRTYHAIPSQGYVIYSVKQKLKQEFIGLPGSEIKRLKLSGVEEVSDNYCVYPNEVHHTARERTQANPMESCPSKEVENWVEKLVEENFNLITELGEQGRVRVLLLKLDDPVPRRKPAIAFLHSSYKCKEWLRPLLKAYLQKLISLEK

SEQ ID NO: 51316 - protein, 143 aa, Zea mays
  Coding DNA Sequence Number=SeqID_7941
  Subcellular localization annotation: CTP_CleavageSite=37; ConfidenceScore=5.49e-01
MMVLASVVATSFAILLLFSLPSCLRLRATPFSAEGMKASASSPYSSGTSPNADLRSGYCTSTRTFHNMHTPSFSPSTDVTFIFPAFALFFLPNLLPPPTVAAASRPMLVNTGTRRVGLAPSLSRLGYLGDEESRYGILDNQAL

SEQ ID NO: 51317 - protein, 156 aa, Zea mays
  Coding DNA Sequence Number=SeqID_7942
  Subcellular localization annotation: CTP_CleavageSite=70; ConfidenceScore=5.16e-01
MQAACNRTKGAHPFDFDTSSMEAQAHTSCGQKQRSSRQQAHVPSWDSERTLSHGVKTTRPCFVPRMAPARTMAAPRTTRPVALTLRQDRRHLWQAKQGPRKGILRKGSFPAKEAGPEPPTDKRLAPEGFDSRLRARRARDDPRYIRYITKARATLP

SEQ ID NO: 51318 - protein, 116 aa, Zea mays
  Coding DNA Sequence Number=SeqID_7943
  Homolog annotation: Hit_ID=Q5NKP3; Match level="QueryCoverage=85%, HitCoverage=50%, E-value=1e-38, Identity=67%"; Hit description =Putative uncharacterized protein 9C20.7
MAILLKQPPMEICFHWREALALVSLIDDEKKFGDCQFDLWKQYYVVACVAVFGKLRRNRRLDAVQSGCTALSISNKGTSWSSPTPPNQESSVLAMSCAFDDYYIKDYGVILAPEVT

SEQ ID NO: 51319 - protein, 310 aa, Zea mays
  Coding DNA Sequence Number=SeqID_7944
GGVRVLGLSCLCSGTAPLREGRCSPVWEDPSGDLPVGRWLPSSVLRWWRLKKSSSPTGSPPPSALRASGSLALIACPHPSSGDVGEGLVAAASALKPSLLLFGRLEWRSLSLLPERAVPLCDEPEPEAVVSAWTEAELARKEDFVGRSLAGPSTGGTSAGVGAVGRAVCSGQVPGGDPGGDGPGVVLTSSFGAEILRLRCRLRLGRTSPKVELTSRVLLLPLHRRLSLQDQFACKSLLSVKACSVSRIAHPNTSYFSQKAMSELSDVPSVAVDLALTVGQLVRPGLQNLGDDERAFLGRRELVPPSGVLS

SEQ ID NO: 51320 - protein, 25 aa, Zea mays
  Coding DNA Sequence Number=SeqID_7945
MKRPTEGTQVSVQTAKEPDLSFYLF

SEQ ID NO: 51321 - protein, 148 aa, Zea mays
  Coding DNA Sequence Number=SeqID_7946
  Subcellular localization annotation: CTP_CleavageSite=47; ConfidenceScore=5.51e-01
MAEIFCRLASIPRLKTNKSSSMPPGMSKTHFSRFNLISLAFSLSNVSQVMDKALSLLSLDYDVVDIIYSTGAKGSTQTNKKIKVRVQKKGAKETEENPGLAHRTVSGAPGSVQAELSTFGNLEKPLRYNSPDYLMGHLTIRCAKRSNG

SEQ ID NO: 51322 - protein, 59 aa, Zea mays
  Coding DNA Sequence Number=SeqID_7947
MGLGVCGSLCQVWVRPLGRSARHCGTGGYEIDGSGYDYGIGEDEAVEGDFQEFQDYDEF

SEQ ID NO: 51323 - protein, 116 aa, Zea mays
  Coding DNA Sequence Number=SeqID_7948
MDNLSGKRISAAGELEVTPVTHSGFPFCFAAGAIGSPVNRRLSALCRVALPFHYVAVTPYRCLINGENEEEIEVTEEKTPPPLESQAETCLYFDICGPEPDSPTNEGKPRCICHLP

SEQ ID NO: 51324 - protein, 179 aa, Zea mays
  Coding DNA Sequence Number=SeqID_7949
MENEEEIEVTEEKTPPPLESQAGTSLYFDICGPEPDSPTNEGSTLSKAFMQNRVFDLEIPYLDSLITSIPLRVFSLVGLCNHFRIAISSMFCNVCKTGETFLERTTVGGPNDLGGSVTVRSCPAPSMRTTMLQEWFIAAVRLLPNSRVNALHEDFCHTSPVQYAPYEGVVGRLPRNAFH

SEQ ID NO: 51325 - protein, 105 aa, Zea mays
  Coding DNA Sequence Number=SeqID_7950
  Gene Ontology: Mol. function=catalytic activity
  Homolog annotation: Hit_ID=A3B342; Match level="QueryCoverage=90%, HitCoverage=33%, E-value=7e-17, Identity=49%"; Hit description =Putative uncharacterized protein
MYDKLRRSRRLDAVQSGCSALSIVKQGNLMVVVKGYYLADEPRVHFVLQPNQESSVLGMSRAFDDYYIEDRGVILTQEVTQRRTDNNDQFIILATVGVAFVPTCL

SEQ ID NO: 51326 - protein, 364 aa, Zea mays
  Coding DNA Sequence Number=SeqID_7951
  Gene Ontology: Mol. function=nucleotide binding; Cellular component =membrane; Biological process=defense response
  Homolog annotation: Hit_ID=B0JCV8; Match level="QueryCoverage=33%, HitCoverage=20%, E-value=2e-28, Identity=49%"; Hit description =Misfit TNP1-like protein
MENNLYMLRLMMLKWIEDYEIEECLIWKWVAKGFIQKKAGSSSLFEQGEEYFYELINRSMIQAVESKKFAGIIYGCRVHDMVLDLIRDLSTEENFVTVSYVDDRRGTPSSLTRNVVRRLAHQNRRLTKETHQDNLMESSMRSLVACGCDIDGWVFVFHPSSKLLRVLALEKCRPSTDIRNLLWLEHSETVRTPPPSPQPSRDSRQSKKSKFPLLKLVSTFEKKKSKATTAGTSRFLKGIGRDLTSRTVDLAEHEESVEKAKAMAAKIKIPTKADYKNVPKHYVPARPLLTLEKLRKVPADQKAFLAFEDMWLMMNLQKLDVQLVTLFALDHWICFLIYSKVGKVLVLDSLNYDPSTYAKFLSIL

SEQ ID NO: 51327 - protein, 107 aa, Zea mays
  Coding DNA Sequence Number=SeqID_7952
  Subcellular localization annotation: CTP_CleavageSite=73; ConfidenceScore=5.82e-01
MTNSTSLYGGISGNSYGKTSEKSLTTRMLTPTNFPSTKNVASLVAVVTAIPTSNLSPLELVINVGSQGVKSISSQSREGFVLQSTFPLIPLLSHPALRNKARIKWEI

SEQ ID NO: 51328 - protein, 147 aa, Zea mays
  Coding DNA Sequence Number=SeqID_7953
MGKSKKGGSSSHHSGDKRKREPSPPSEDFGDSEYLEEEFSSESEGSPAYASAPVSSDDSDDSQGIAVEVWTYIRAVERSGHEGSDESEISSDEEDSSNSSEEGSGGDGDDEGDGDGGKGDGGNGKGDGSSGKDDGGSGMASGKVQLA

SEQ ID NO: 51329 - protein, 149 aa, Zea mays
  Coding DNA Sequence Number=SeqID_7954
  Gene Ontology: Mol. function=structural constituent of ribosome; Cellular component=large ribosomal subunit; Biological process =translation
  Homolog annotation: Hit_ID=A2ZP31; Match level="QueryCoverage=38%, HitCoverage=41%, E-value=5e-12, Identity=64%"; Hit description =Putative uncharacterized protein
  Subcellular localization annotation: CTP_CleavageSite=51; ConfidenceScore=5.07e-01
MKRNPCITSSRRKCRKAHFTRPRPPSAAFSCPPGCRRSSIPIRKDDEVQVVRGTYKGRVDFMSENVRAVLDQAGFNKSHMEALRANLLLKVLSQSSSHQFLKSVGIKTSASSKSSSSNQSELREQLAAEATAAVQGELDQLRKKCEVKW

SEQ ID NO: 51330 - protein, 191 aa, Zea mays
  Coding DNA Sequence Number=SeqID_7955
  Subcellular localization annotation: CTP_CleavageSite=66; ConfidenceScore=5.05e-01
MDDFQWRFLTLTVYDGSSIKTLSSTPVCTVSATTFHWRVKAKGKLRLNLLMHMNYKEEPSKAQELRMMIERTKLPSVSSQIKICDDSDLVIGVASHLLCCDGLPIFVIDVYPFCDEIRVVMEVISFYDDQSFGRCPMAYDVRADMAADVNADVASDVAADVSADVVYVLLYATSLVTDVQRIILLGNCKRY

SEQ ID NO: 51331 - protein, 40 aa, Zea mays
  Coding DNA Sequence Number=SeqID_7956
MASRRREREMVREVEAEERVSHRGKGVAVVVPDGCGGAEA

SEQ ID NO: 51332 - protein, 458 aa, Zea mays
  Coding DNA Sequence Number=SeqID_7957
  Homolog annotation: Hit_ID=Q6QP51; Match level="QueryCoverage=13%, HitCoverage=30%, E-value=7e-14, Identity=60%"; Hit description =Putative growth-regulating factor 1
MQAACNRTKGAHPFDFDASSMEAQAHASCNRRAGYYVRETAPPLAPVPCLLDCGISAATRGNPVHGPTVPTEHIGHGSVRRGRRRDGRYGQKWAGSNGGGRRAKAAVKSDRERGYSERDPSPRRKRAPSPPTDHRFEGWPLGRVRQPPQSTRAPRPLLVRGSKAGPSKGFNSCLRPLGPRADYWSEVRSLAPRKGSTAASGHSGSAPTTDQGFVGWPPKGSTAASEHTERGMTLGTSDTWPRLGLRSRGSGAALANPAPAKPLTASTYQPENLEPDYAPGLRPVNAPSTQGTRSRLARAQPRAKENSAACAAPTAVPPVRVRLTAAKTGLRRHRKLGLNLDLGRRSPPRPTPQRGLSHDLGRRTPPRPTPGLGLNLDAGRRSPPRPTPGLGLNLDLGRRSPPHPIPGLGLSLDLGRRSPPRPTLGPRLSLDLGGASASPDLGLGPTTSQGGHHYPTPS

SEQ ID NO: 51333 - protein, 200 aa, Zea mays
  Coding DNA Sequence Number=SeqID_7958
MAGEVPYLKANPRDLSVAAKARRRPGSMVADHCGCTEDGGKEKEEIGRGMKRGVTPEFVNMSKEILYPQIQGVTPATLPRPEGFGPETSRWVTWCFGYDKTPEGATSSPTLGKAIHHRQDFEARNIQAGQQSRRGSDISRGSSSTLGVDSTFGGIRPGLGRRHGRRISASKEAIGTTPEPSPPGPPPGTRPKQMAESAAP

SEQ ID NO: 51334 - protein, 377 aa, Zea mays
  Coding DNA Sequence Number=SeqID_7959
  Gene Ontology: Mol. function=catalytic activity; Cellular component =protein serine/threonine phosphatase complex; Biological process =protein amino acid dephosphorylation
  Homolog annotation: Hit_ID=Q6Z8B9; Match level="QueryCoverage=95%, HitCoverage=92%, E-value=1e-138, Identity=69%"; Hit description =Putative uncharacterized protein P0470A03.13-1
  Pfam annotation: Domain name=PP2C; Domain location=47-342; Score =130.8; E_value=4e-36; Accession=PF00481.12; Description=Protein phosphatase 2C
MGICASSKRVRQEEQDSDENVVYVMDEQGGGGEGEDGRGARAAASRKVASLFSQKGKKGPNQDAVILCQGFGMEDGVFCGVFDGHGRCGQFISKLVRDYLPFMILSHRNALLMGSDDDDDDPAFSDASASASASSTDGSGQSSPAPAQLLEEWREACANAFEAMDKELKLQANVDCNFSGTTAVCAIKQGKDLIVANLGDSRAVLATMSDTGYLKAVQLTTDQKPNVPQEAERIKRCNGRVFALKDEPSVLRVWLPDEDCPGLAMARSLGDYRLKRHGVVSEPEVTHRRVAPGDLFIILATDGVWDVLSNEEVVSIVCATPRKQHASKAVAEAAAQRWRTRYPTSRVDDCSAVCLFLRDQDWASSVAAARAKAAASR

SEQ ID NO: 51335 - protein, 219 aa, Zea mays
  Coding DNA Sequence Number=SeqID_7960
  Subcellular localization annotation: CTP_CleavageSite=9; ConfidenceScore=5.06e-01
MSSRSLMHRAFPPSEPPDGEHPQSFRLVVGVTQLRGSWYLSAIVRLQGFSSGSPAASPRRWSPKTVTTSPWVGRSKPGYDLGPALSFKDVHHPCWGRGRAEPELYLPRGFVGQPLLQHSRERALTGPARGADFDNAGLVDGGRRQLQRVGLAGLAPGAPSCRKGGCRAARTGGPPKTSLAARAAFVFWGYPAFAPVRRLRAEVGAPLVQEDSSGDLPMG

SEQ ID NO: 51336 - protein, 39 aa, Zea mays
  Coding DNA Sequence Number=SeqID_7961
MVTQRVFKDKRTLAFTKLLLRDFFCNFLGKHRLPVVYAK

SEQ ID NO: 51337 - protein, 76 aa, Zea mays
  Coding DNA Sequence Number=SeqID_7962
MESYKVDTDRCTQCSRRTTPKNGISSGRADEASSREYDPQKPDSPHTRASVPLRTMILEACSPTLFVLAEGGTGMG

SEQ ID NO: 51338 - protein, 141 aa, Zea mays
  Coding DNA Sequence Number=SeqID_7963
MAAEKKEDEEWERERPHRSEIAAKVAKAMFEKRKIEKQKINLHVLCYLRLWRYIKVGKTKRTTLSFWEHINLVEANYYTQNDKEEEDAFLSLAANKLEAHYFRQKVVEAKEDEPSHMNIFLQDGNKEWDEEDWVKFEGGSD

SEQ ID NO: 51339 - protein, 100 aa, Zea mays
  Coding DNA Sequence Number=SeqID_7964
MDDVGDEPDGLVRGDLHDGPCLDPFGELVDSDQNVHVAMGCLFEGSDQIKSPYHELPGVANCLEQASRNHVEKRSSQGFMERRGARRFHYGYPRGVIFLC

SEQ ID NO: 51340 - protein, 128 aa, Zea mays
  Coding DNA Sequence Number=SeqID_7965
MRQREKVREGTKGVCHNGAGGRGSRGNMREQEQGVARVEGYEDGGRLARAWRRQGARDVWGRGRRWREWGCRYRWPNGSCLAGRAEAWAPFNSDVAWPDIIKMGRVPAPSRDVCHAWATVSGRSVGPS

SEQ ID NO: 51341 - protein, 461 aa, Zea mays
  Coding DNA Sequence Number=SeqID_7966
  Gene Ontology: Mol. function=oxidoreductase activity, acting on paired donors, with incorporation or reduction of molecular oxygen, NADH or NADPH as one donor, and incorporation of one atom of oxygen; Cellular component=...
  Gene Ontology: Cellular component=cytoskeleton; Biological process =aromatic compound metabolic process
  Homolog annotation: Hit_ID=A2WK63; Match level="QueryCoverage=16%, HitCoverage=12%, E-value=4e-23, Identity=67%"; Hit description =Putative uncharacterized protein
  Subcellular localization annotation: CTP_CleavageSite=5; ConfidenceScore=5.21e-01
MEPTRGSRPRCTPPPRRQWKVSRIPTCPLARISPCPRMDPARSPNLGTLSWWRRPLARILMNTVQAREASARLPHRDRCFAAAANRIRPLARAFCDASALRADAGANGTPSPQDHAEKDPHPPDVLDIAIVGGGMMGLAVAYAMSNMPLTKHLRVAIIDSNPALKSRSYLGKNSIPDSRVSTVTPATISFFKGCSSPQLTFFYALLAGDIQCTEKRAQAGNSYFVVKSLKEKKKVLLACVTMKFKILEEPKLGRAWKFLSPMSEIVDLKKLFAPSTIAVVHWFDDLLALFQYHDYFLRCNLIIVDAELAVSLKILELENIRTSDQKDLWKSVKINKLTFQGVKLCGRCKVYFGQNVVCKQSLTVNGEGRIIKLFALCRWDSGSTVGEFDGHSKRVLSCDFNPTRPFSIVICGEDILANFYEGPPSKFKHSIRSNGPYFIAISPSMFQVKGLKSIGALYVTC

SEQ ID NO: 51342 - protein, 99 aa, Zea mays
  Coding DNA Sequence Number=SeqID_7967
  Gene Ontology: Mol. function=kinase activity; Cellular component =ornithine carbamoyltransferase complex; Biological process=amino acid metabolic process
  Homolog annotation: Hit_ID=Q6QP54; Match level="QueryCoverage=90%, HitCoverage=32%, E-value=2e-11, Identity=46%"; Hit description =Putative kinase
MAPPVDVAGLRPRLGDVEAPPKPRSSLSSVAEAESEPLGRARRRSSAEARAESEPWGRAKRRLLLSECKASGEPEICSPLERGLGRDGNPPESAALVRG

SEQ ID NO: 51343 - protein, 92 aa, Zea mays
  Coding DNA Sequence Number=SeqID_7968
MSHLMVLLEATKITLDNREELVVDLSTEMVEKDLQVEQLSTDIQELEELEIQDMEANEDVDIEGGEEPASSVDTAGSGRPPSPESSVASFAH

SEQ ID NO: 51344 - protein, 146 aa, Zea mays
  Coding DNA Sequence Number=SeqID_7969
  Gene Ontology: Mol. function=RNA-directed DNA polymerase activity; Biological process=RNA-dependent DNA replication
  Homolog annotation: Hit_ID=Q6UUN3; Match level="QueryCoverage=47%, HitCoverage=7%, E-value=2e-08, Identity=43%"; Hit description =Putative gag-pol polyprotein
MKLEEFVCLKQGSDSVKQYLAKFNHLSQYAIEQVNTDLKKKNCFMRGLNDRLQQKMATCLDLTFNKAMNTTILVEKKNLGQGKTKWFGREGDCPYPEKNKSKFQKTFGNASQGKGNMENNQVGKGKRRTRWVIILKWLLHQKENPS

SEQ ID NO: 51345 - protein, 160 aa, Zea mays
  Coding DNA Sequence Number=SeqID_7970
MGSLMKVGLELLDLSSTASAPRRLSAELDPIGRLRQISIFQRKNPNLHRLCLESVPEDLARAAVPCGAVGSVVKIGAGGLCDPWGILSRHHQARFWPALAGIRRRAPRVQLIRPQCRCTALPSDHRIAGMVCSGVGVGALLGFEHGVEEGPYTVGSRWVV

SEQ ID NO: 51346 - protein, 154 aa, Zea mays
  Coding DNA Sequence Number=SeqID_7971
  Subcellular localization annotation: CTP_CleavageSite=18; ConfidenceScore=5.27e-01
MAPTKCTSGGGLAQSSIRKATKSRSRGAFRFALRESQLLEKAASWIQPFGWLLAFRGAKAKAKSQTKHTLRVRSVVMGVVARMTKVVDLADVVVYALGCMGSNMRKCGGFAWVDSVVFGLQQFPSVFGLSLGMSMWCALYLRHRKGITSSLVES

SEQ ID NO: 51347 - protein, 215 aa, Zea mays
  Coding DNA Sequence Number=SeqID_7972
  Homolog annotation: Hit_ID=A2XFR6; Match level="QueryCoverage=39%, HitCoverage=24%, E-value=1e-12, Identity=48%"; Hit description =Putative uncharacterized protein
MVRTIQTTRINTNIIPPPRQVPVYPVVVEETPVDLPRIRVERGVILEDNLEELLPMPTLLAESLAFAARSSTSAPPAPAVQAPAPGGDDPDDSSLTCCKTCCTHWEPTSDPCTRQEPDQHVPGGAGEDHLNTLAGVVAGLNTDLESATLDLSRVHLELEDAHARIASLEAQLDGRNPPEVQVPAMALSPPRKRIRYVEPGSNQAALDFKIYFVIS

SEQ ID NO: 51348 - protein, 33 aa, Zea mays
  Coding DNA Sequence Number=SeqID_7973
MASACWNRGGERAKGSRAQIGVRGSSEGTVWDT

SEQ ID NO: 51349 - protein, 457 aa, Zea mays
  Coding DNA Sequence Number=SeqID_7974
MELCRAWVVFSVYSAGPVRHNRSPHGHPSLCMERLQARNAALCRSLCSTEVNRRPPQTIRAPCSALSPRPYDCPFARVRRLISTLQCARTLPSPQPTPARSAPISLRLPHRTRSAPSCSPSAHLDSLCCHPKPAREAENEGELLVALVIGSDHSLRQRAPSLIPNPSFRFRIQRKHSHFPMKVGPAVGGGGGGHPSSIITKHTARSGSSRSIANLWHATQSGSHQQEAADRVDTATSVTDPLLEWAREAHWSMRGLPAAISLPRANLPPRNGVPKQLQPYMLRSSFPRVPETPPPIALASSMEGSPPRHSCCSVSPAPFLFLTCGFQFSFLPSDGVLDQRDRVHGTVSGAALELEKGCVATAEGTTPVSGGGVPLHNPPTPPLPSNHVGAKVYYLPYVTDVEYYTIGGKKISSTSIYFESLSINPSLDDIQYAYFAIPMPGSAKQSKTSIELCGGYN

SEQ ID NO: 51350 - protein, 48 aa, Zea mays
  Coding DNA Sequence Number=SeqID_7975
MRVEWGGYEIVDSGYDYGAGKRYSFRLERGEDEAVEGDFQEFQDYDEF

SEQ ID NO: 51351 - protein, 203 aa, Zea mays
  Coding DNA Sequence Number=SeqID_7976
  Subcellular localization annotation: CTP_CleavageSite=24; ConfidenceScore=5.26e-01
MVAQGAGRAVSSSLAKSLGLRKPKREAGSGAKNRHQTLSQAPSLPTDQRFEGCPPEGFDSRLRSCGPYTHYWSEAGPRRVHSRLRRRARDDHGYVRYITKARAALPSSPETPCSAPIEGNMALSPLLLAERRRRGVCKKAESVPDRPLALCRGSGAALANPAPAEPLTVSTYQPENLGPDRTPELRPARMREQPDQPKHCVRH

SEQ ID NO: 51352 - protein, 160 aa, Zea mays
  Coding DNA Sequence Number=SeqID_7977
MGKSKKGGSSSHHSGNKRKREPTPPSEDFGDLEYSEEEFSSESEGSPVHASPPASFDDSDDSQGIAAEVWTYIRAVERAGLEGSDESEYSSDEENSSDSSEEGGGDGDGGDDDDDGGDGDGGGDGGEGDGKGGDSGGKGGSGDGGNGSKGSSRGSNKASG

SEQ ID NO: 51353 - protein, 340 aa, Zea mays
  Coding DNA Sequence Number=SeqID_7978
MTLTSLSMREKAPPPPPLYYSGCSCRSGSLHGRGRSGWNGRPWPTEFLKSLQLHRVWRISLRLHVADEVLGPFIGSDVDVCLLEQLFQGGWSFLKDGSDESRVIRPAERAEGLVALVLDGFEVLGLRRFVEKGLEICDKPLAEVGPVIDALLRKVLEPLQRILPENNGKGSSEVWQQISGKDCVLASKPDIMLRSFPLVLLGMATITVPRVVALAECLVVRSLPCFRCLILGYGLSKILFPGLMVTPNVTTPVSKLVCLALQGLLPQYSGLIVGDGCIPYSSLNKEDIREERAWGYNTCSGYLPCRQSGQNDHQPYSRRHTGAGVTHFFSPSDPGPHLIG

SEQ ID NO: 51354 - protein, 112 aa, Zea mays
  Coding DNA Sequence Number=SeqID_7979
MGEGVPGNPWWLGPIKRVSEHVESLGTLEQATVQLELTWVELATLPGDDGTGRGSHGDAVKRLGHAAHGREAAVDGEYLPRAVSQGGRTCRARRGDFQLTGDEDPYRDSLIR

SEQ ID NO: 51355 - protein, 283 aa, Zea mays
  Coding DNA Sequence Number=SeqID_7980
  Gene Ontology: Mol. function=DNA binding; Cellular component =chromosome; Biological process=nucleosome assembly
  Homolog annotation: Hit_ID=A2ZL69; Match level="QueryCoverage=29%, HitCoverage=62%, E-value=4e-21, Identity=68%"; Hit description =Probable histone H2AXb
  Pfam annotation: Domain name=Histone; Domain location=168-240; Score =31.5; E_value=3e-06; Accession=PF00125.15; Description=Core histone H2AH2BH3H4
MGEEKRRDSSSNNHRNGGCNRGARVGRLGRRVGLRLCYREGRLGGCSAAVGRALGIARRGWRAARLACVQGRLGIGCGPVGCSCVAAGSRRWALGRLGSRAGSGWLDLLVAGGKVNRQGLPHRTNSHPHSLNGEPQGPRSLITKVPPAPPSNIPLFSYQYRSAARINLEEFESFQTPKRRSGDEFHRRRRPRARRRWAPVYLSTVLEYLVAEVLELAGNAARDNKNRIVMRQIQLAVRNDEELSKLMGTVTIAASGVMPDIHQTLLPKKAGQKGDIGSASQEF

SEQ ID NO: 51356 - protein, 26 aa, Zea mays
  Coding DNA Sequence Number=SeqID_7981
MASFALWMGGGASFVVVAVNVAERSG

SEQ ID NO: 51357 - protein, 54 aa, Zea mays
  Coding DNA Sequence Number=SeqID_7982
MAMMGSTSEKMYLCQNKITHNGSGEMARVACTLHGKRLDGGVSVISVGVNLIWS

SEQ ID NO: 51358 - protein, 294 aa, Zea mays
  Coding DNA Sequence Number=SeqID_7983
MQRRAAQRPYVRLRPLAYVMGSKPRGSIGSPPERGAEVYMVWSGHVSAPDPRLALIKAWVFFVPESRDPVEGGPDPTQRGLGPVPAIWYIPAEVLDPARRVSSPSAPKVAPTSESGSQQQASAGSGAGDLPPPATTEAALSGPSSIPLPTPEELEVILGRRLQSGAEPEAAPTPLPRVLSRAHQALWETEAAILREWEALATEHQRLGDWRAQLEERTKAASHQFASERSELEQEREDYKEDLQKVFDREREVTQKEKRLAKKEEHLDQREEVITALQEKLKAYNVMLEKQRDE

SEQ ID NO: 51359 - protein, 85 aa, Zea mays
  Coding DNA Sequence Number=SeqID_7984
MDVLMIRNLEEDHQGLKKSQDVKEEKLEHSQQEKAKDKPSLRGHSCVTGDNQRSSGVVIQRIRSLGALDQLRDLHPIKLSGLVLY

SEQ ID NO: 51360 - protein, 214 aa, Zea mays
  Coding DNA Sequence Number=SeqID_7985
MMNTDVPGSNALTDRAKIDLNMLLALVLDEVDGEVDNSDVAAVDTHTSREVVIKLLEELAELARLSHHISNSLVCSLSTRTGDHRLKLGGPRDEVVPKEHCIAGCRPAETDLLDSICDVGLGEDFGGQPRLLGALSPEREAGRVQQDVEACEPPQRGWESQRPAGGGQLGRGRGAGKGGRRLGAQAPTARCAGAGDWGGKGKGEALVPSWNGKP

SEQ ID NO: 51361 - protein, 70 aa, Zea mays
  Coding DNA Sequence Number=SeqID_7986
MWAQGQNRGNKIEVYNASVAQKISERHNDGLVAARQRSGQGTLNAEATHRLPVEWQGSLNAEAAHHLPVE

SEQ ID NO: 51362 - protein, 150 aa, Zea mays
  Coding DNA Sequence Number=SeqID_7987
MGFDWKHWKLMRSIYLSFGHEATILGQTDEYRVWATLLSAMTKDFAMTDEFPPYEDMVVMFLVLVVLVFVRFDVAHVFGCFVDLLLELRETKHILLVHLDLVMDHFKVVDLVIKLLFSWLCTIGLPLLVPCRPDESFVSLIGVQGHEDRA

SEQ ID NO: 51363 - protein, 60 aa, Zea mays
  Coding DNA Sequence Number=SeqID_7988
MGVLPYLTFRGRKLKEKGRMWHAKRRAAEGEGSRMRQIKRRASQRFNPELKLQWLVNAKN

SEQ ID NO: 51364 - protein, 88 aa, Zea mays
  Coding DNA Sequence Number=SeqID_7989
VETGGKRKENTRRQPLGEDVDELQRGGDAENPNIAGGDTLADEVQVDLHVLRVLMLHGSGEEVDRADVVAVDEGGPLKGAVELLEKLA

SEQ ID NO: 51365 - protein, 113 aa, Zea mays
  Coding DNA Sequence Number=SeqID_7990
MEEGCEGCGRWEWNNELVVGVVWKEAPESTTQSVGKGEGGEATMCAERARGGAPTRPLGGEGDNEGSIAREAIAARRNTMEIGDGEAVDARSRKSEGNGVLLPQTGCKERQPR

SEQ ID NO: 51366 - protein, 250 aa, Zea mays
  Coding DNA Sequence Number=SeqID_7991
  Gene Ontology: Mol. function=cysteine-type peptidase activity; Biological process=proteolysis
  Homolog annotation: Hit_ID=Q67VX6; Match level="QueryCoverage=84%, HitCoverage=33%, E-value=4e-17, Identity=33%"; Hit description=Ulp1 protease-like
MVAASPEKLHCGDAGSGDKEKEVAGRDDAEVMSPQLSDELLREKAQRIQVMLTRGMSERLPDRGKKLLATLDAIHREQDRRQARGDGARAPLRSLTSGNWNAVIVQYSDGLGNEACERIVRSRCIESSGLHSDLSRVKVSVADFMSSFGADKEAGIKISSLEIKGRSPNKPSTSIENKGKLCEEKDSCEASSQQMNSVHEELHLDTSENMRKTSSDVGASNNGNNVMWEEVPTPSRKRVHQQREVIFGVL

SEQ ID NO: 51367 - protein, 67 aa, Zea mays
  Coding DNA Sequence Number=SeqID_7992
MSPTTHGSWRLEGVVAERYARAVEPQAEKQAGSKAGEGELEQRRSTEKWAARDLEYVMCHASDSARL

SEQ ID NO: 51368 - protein, 85 aa, Zea mays
  Coding DNA Sequence Number=SeqID_7993
MEGGVAGGNGGGCAAKRGVGGGSALQRGCGGAVVVHMEAGHVCGGAWVSGGVNDPDVCGLWFQESLPLYEKTFLKKKENTQAQQC

SEQ ID NO: 51369 - protein, 69 aa, Zea mays
  Coding DNA Sequence Number=SeqID_7994
MDEYIREDIDILQRREGVQRYAETARGFEGRFHLRARGSNLWIFLTNGKKTIRKKAVVFKLIIGSLERG

SEQ ID NO: 51370 - protein, 257 aa, Zea mays
  Coding DNA Sequence Number=SeqID_7995
RLDILPPSHVPICQETDIAYTYTEEARQGFGMTSIAAKSSRDLHTLTTPLLPLPLSVTLRGRCTDAEITGEEDALAWEMDLTPGAHAQRGRETRARRSLTRGVPTSAPGVADPGAWKRGERMGRYPETFLQLRHMKYIMNIREMIRYPQILPDYTDLFFYLLNKFKSKELSSSSLIQYRGVLYFLPYRVSYGDIFRLACTWLVLSVCPSVCGWQTIRVMYNSANLAPEYVVFNGTKWATLVSLSTITHIESYPADVW

SEQ ID NO: 51371 - protein, 187 aa, Zea mays
  Coding DNA Sequence Number=SeqID_7996
  Subcellular localization annotation: CTP_CleavageSite=11; ConfidenceScore=5.07e-01
MAAQGAGRAVSSSLAKSLGLRKPKREAGSGAKNHQQALSQAPSLPTDQRFEGWPPEGFDSRLRSRGPYTHYWSEGPLREGWPRGDEDETGALLGPLASLSRVDACNPLLQAHPTWARDEHEGRGIPTSLTPVSGRLASPPFALALTLDPSGLGHAATLTSQPKGPPGLGTPTGLKNHLSPGSDQFKG

SEQ ID NO: 51372 - protein, 88 aa, Zea mays
  Coding DNA Sequence Number=SeqID_7997
MGKLCLRQTNTRKANTQWEWRDGESSVYPLWQEAGWWCICALGWRELGLVLRNPVVRKQQTFTVLVLRWCLRKNLNSEVAGGCCNTRF

SEQ ID NO: 51373 - protein, 100 aa, Zea mays
  Coding DNA Sequence Number=SeqID_7998
MGVHSDHPLATHWRHHVRRPPRATWCFPPPSSLRKGDEGAYDKSRENSAACPAPTAVPPARVRLTAAKSSLECHRKLCLARPQGSESTSTSEDGLCLARP

SEQ ID NO: 51374 - protein, 104 aa, Zea mays
  Coding DNA Sequence Number=SeqID_7999
MQIIERKCEAQKGAGIRSNLNFYVVLWTVGKKTLDKLTDQPGNLIPIDVAEVPDLSASRDNSDLAEDDPCDPTTTSKPEAPMQSLNQLPVVEGVAPGLEKVLLV

SEQ ID NO: 51375 - protein, 31 aa, Zea mays
  Coding DNA Sequence Number=SeqID_8000
GIAQRRPPTPNRSYLETVYLSLKGATPSWLW

SEQ ID NO: 51376 - protein, 104 aa, Zea mays
  Coding DNA Sequence Number=SeqID_8001
  Homolog annotation: Hit_ID=Q2QTF5; Match level="QueryCoverage=87%, HitCoverage=98%, E-value=9e-09, Identity=39%"; Hit description =Retrotransposon, putative, centromere-specific
METRALLFCLGIREKTEREKDLNMLDSDCRRTPTCDGHHGQMRARIGMFKHNMESLSSLLSYGSGVIDECPSGQGVTLHKIVTAIGGGVSVAKAQRLWKAVVGP

SEQ ID NO: 51377 - protein, 34 aa, Zea mays
  Coding DNA Sequence Number=SeqID_8002
MAPSVGAVGKAGPREVRWAEEVHLRKPCYDFYFL

SEQ ID NO: 51378 - protein, 172 aa, Zea mays
  Coding DNA Sequence Number=SeqID_8003
CAPVFALGRGLRLRFRLRPKNGLNSHVCPYTQASVFVLLECTGALEGTGRKLLPLSDGLFGLAFELKTRGSPCGPGRKLKLSFYPQNKRRPSMWKDTEPKVHVLSEGHGGTEGKRLGGALPRAAGLFGLAFGLKTRDGFRGVLGKYPGFLKAELPEVLGGGLLGQAPHPLAA

SEQ ID NO: 51379 - protein, 144 aa, Zea mays
  Coding DNA Sequence Number=SeqID_8004
MGKDNKRKREPTPPSEDFGDSEYSEEEFSSESERSPAPVSLPASSDDSDDSRGLAAEVWSYIRAVERSGLEGSDESEYSSEEEDSDDGGEGGDEDDDDDGDDDDDDDDDDDDDDDDGGSGGGCTRGGGGGGAKCGGGGRGRASG

SEQ ID NO: 51380 - protein, 199 aa, Zea mays
  Coding DNA Sequence Number=SeqID_8005
  Homolog annotation: Hit_ID=Q0WWS3; Match level="QueryCoverage=20%, HitCoverage=51%, E-value=5e-17, Identity=95%"; Hit description =Putative uncharacterized protein
MKNVAKCDTWCELQNPANHRVFERKLRPKPSGGGHVCLGVTPKDTPNTPPRGEGRGVWPPAPQGERPGARPAIRPYGPIERSSLSSDRDPRGVLSDGLGPSSLERDAWEAVVGADGIRAPLARPSGRCAATAWFELEHACRDPKDGELCLSGAKPEETLVEARSDTDDSKSPHEFYRVKPMIRGIGGATPSTYSQTLNR

SEQ ID NO: 51381 - protein, 32 aa, Zea mays
  Coding DNA Sequence Number=SeqID_8006
MAGQAANSASWSWARSVPPGFRLHEFPTPYYT

SEQ ID NO: 51382 - protein, 513 aa, Zea mays
  Coding DNA Sequence Number=SeqID_8007
  Gene Ontology: Mol. function=ornithine decarboxylase activity; Cellular component=cytoplasm; Biological process=spermidine biosynthetic process
  Homolog annotation: Hit_ID=P21169; Match level="QueryCoverage=91%, HitCoverage=72%, E-value=0.0, Identity=89%"; Hit description =Ornithine decarboxylase, constitutive
  Pfam annotation: Domain name=OKR_DC_1; Domain location=91-501; Score =905.9; E_value=1.8e-269; Accession=PF01276.11; Description=OrnLysArg decarboxylase, major domain
MPDQKLMSWRRGYVPILILRTSRQSSLPLRIVAVAFFALLKAHPVFIYRVFLYSEHAVELPAGVTAVINGNEQQWLELESAACQYEENLLPPFYDTLTQYVEMGNSTFACPGHQHGAFFKKHPAGRHFYDFFGENVFRADMCNADVKLGDLLIHEGSAKDAQKFAAKVFHADKTYFVLNGTSAANKVVTNALLTRGDLVLFDRNNHKSNHHGALIQAGATPVYLEASRNPFGFIGGIDAHCFNEEYLRQQIRDVAPEKADLPRPYRLAIIQLGTYDGTVYNARQSVHKQQAGFSQTSQIHKKDNHIRGQARFCPHKRLNNAFMLHASTSPFYPLFAALDVNAKIHEGESGRRLWAECVEIGIEARKAILARCKLFRPFIPPVVDGKLWQDYPTSVLASDRRFFSFEPGAKWHGFEGYAADQYFVDPCKLLLTTPGIDAETGEYSDFGVPATILAHYLRENGIVPEKCDLNSILFLLTPAESHEKLAQLVAMLAQFEQHIEDDSPLVEGVAERL

SEQ ID NO: 51383 - protein, 221 aa, Zea mays
  Coding DNA Sequence Number=SeqID_8008
  Gene Ontology: Mol. function=nucleoside transmembrane transporter activity; Cellular component=integral to membrane; Biological process=nucleoside transport
  Homolog annotation: Hit_ID=P0AFF4; Match level="QueryCoverage=91%, HitCoverage=48%, E-value=1e-110, Identity=99%"; Hit description =Nucleoside permease nupG
  Pfam annotation: Domain name=Nuc_H_symport; Domain location=1-210; Score=191.5; E_value=2.2e-54; Accession=PF03825.7; Description =Nucleoside H+ symporter
MPTVYSESLFVEVTAKFGDSSVLGAELQITNMFGNTFLHSFDKDPMFASSFIVQHASIIMSISQISETLFILTIPFFLSRYGIKNVMMISIVAWILRFALFAYGDPTPFGTVLLVLSMIVYGCAFDFFNISGSVFVEKEVSPAIRASAQGMFLMMTNGFGCILGGIVSGKVVEMYTQNGITDWQTVWLIFAGYSVVLAFAFMAMFKYKHVRVPTGTQTVSH

SEQ ID NO: 51384 - protein, 219 aa, Zea mays
  Coding DNA Sequence Number=SeqID_8009
  Homolog annotation: Hit_ID=A5B938; Match level="QueryCoverage=29%, HitCoverage=56%, E-value=5e-10, Identity=58%"; Hit description =Putative uncharacterized protein
  Subcellular localization annotation: CTP_CleavageSite=23; ConfidenceScore=5.50e-01
APARHAAPPNLPRGRGAAKKNPRRLGRQGTPVLPPAPRSGRPAFRSPGSGYTLIDTTLGNGYLGSRIDEERSKMRYLRPGARPAIRPYGPIERPSLSSDRDPRRETDSEQVPRGKDEKDFEKRVKECLKLPGGKRMGAGDAHRPVCGTAPAGPPIGSGRGPLSPAPAAKARGPEAPPAAVVGADGFELEHACRDPKDGELCLSGAKPEETLVEARSDTD

SEQ ID NO: 51385 - protein, 410 aa, Zea mays
  Coding DNA Sequence Number=SeqID_8010
  Homolog annotation: Hit_ID=Q46837; Match level="QueryCoverage=100%, HitCoverage=40%, E-value=1e-117, Identity=90%"; Hit description =Putative lipoprotein acfD homolog precursor
MVQAADLGTNIQRLYQHELYFRTNGRKGERLSSVDLERLYQNMSVWLWNDTSYRYEEGKNDELGFKTFTEFLNCYANDAYAGGTKCSADLKKSLVDNNMIYGDGSSKAGMMNPSYPLNYMEKPLTRLMLGRSCQLGLWAPAQKEVTIKSNANVPVTVTVALADDLTGREKHEVALNRPPRVTKTYSLDASGTVKFKVPYGGLIYIKGNSSTNESASFTFTGVDRYLGKMNRVADDITVAPEYLEESNNQAWARGGAGDRLLMYAQLKEWAEKNFDIKKWYPDGTPLPEFYSEREGMKGWNLFQLMHRKARGDEVSNDKFGGKNYCAESNGNAADTLMLCASWVAQTDLSEFFKKWNPGANAYQLPGASEMSFEGGVSQSAYNTLASLDLPKPEQGPETINQVTEHKMSAE

SEQ ID NO: 51386 - protein, 28 aa, Zea mays
  Coding DNA Sequence Number=SeqID_8011
MSEPKMRKDKHKGKAARILHRNRLLHVQ

SEQ ID NO: 51387 - protein, 104 aa, Zea mays
  Coding DNA Sequence Number=SeqID_8012
MGSSSRSSCSRRPNEQELEIMRMREEMRQQREFMEACNAHNQAMYQFNTPPTHIPAPADRVTTEAGGSGSDPTTGTGFVDSLFAFPPPGGGSGQSSNHPSGGYL

SEQ ID NO: 51388 - protein, 32 aa, Zea mays
  Coding DNA Sequence Number=SeqID_8013
MRFSQNTLNTKQPAKVSKSVWMPSGRGKVARY

SEQ ID NO: 51389 - protein, 259 aa, Zea mays
  Coding DNA Sequence Number=SeqID_8014
  Homolog annotation: Hit_ID=A2ZTL9; Match level="QueryCoverage=17%, HitCoverage=15%, E-value=6e-07, Identity=67%"; Hit description =Putative uncharacterized protein
  Subcellular localization annotation: CTP_CleavageSite=24; ConfidenceScore=5.45e-01
MLAVPFCKLPFPVWPSRLPQSFLRSMSTQNLLTGACTSSAPAPSEAEEGDRTPLADAANAAEELYRLRDTFFPRDPSEKVAALRARADAALALLDAFPSVVLDVCLVVIADFILCMGGEATYLYDIWLDGRRIAELAPSLFAAVNRKAVRTRTVHEAVMGGSWVLDIRVGGIFPLVPSRNFSKSGILFRRSTCYLILQINTFGHHPLRVLILPSRPMIDLWWGLLVSRRLIIFGGPGLHQDASSFSGLQLKIGVGQQIT

SEQ ID NO: 51390 - protein, 204 aa, Zea mays
  Coding DNA Sequence Number=SeqID_8015
MAQALSELLAEETRLKFMSSITDVSSHNVLAAAQKSRNTLFQSCEHCKTTTHRSENYFAKFPEKLADFRVRRATRGRGTGPSPRGSVAVAATSSAGDSSSSWVLDSGASFHVTSDQSRLASTTPVTEGTYVQTADGTYHDRKTGDVIGTDRRRKSSPRHYILDTSRLPSNHTTTPHVLAASGPTTSFARGIIVLVTYVDLVCLL

SEQ ID NO: 51391 - protein, 160 aa, Zea mays
  Coding DNA Sequence Number=SeqID_8016
MESWYRFDVTVDRIESLVRHDHIPARTKKREWVASGHEESRRRRNPRWGSSISPPSLTSTTCARGRANSARRRPNHRRPQIRRTDPKLRNLVPKALPQQIAISRTEYVLIQEPEAQQEAREPAPELVAEESPAAPAFEGNPGTLQDMVDGVTWPSTLPPG

SEQ ID NO: 51392 - protein, 170 aa, Zea mays
  Coding DNA Sequence Number=SeqID_8017
MVPIRGGRIAPPLEAAISVDSVAAAGSTVGASTPVWAAAACAPAWSAVGASAPIRAAATRAPIRMRGCPLCRLLSRCFPRQPELFVGVVVDRSRAASSTAAQNLELCCRRTCSIRRLRCFYFRSRRCQLRRRQPCCPRRCRCSRCCCSLAFLCRGDLGLLLAPRTRSDRA

SEQ ID NO: 51393 - protein, 56 aa, Zea mays
  Coding DNA Sequence Number=SeqID_8018
MDILPQEDDRGRFSLSLTSHHHRAAATPFATLQLPPALGSRARRGGRLTSSTRLTA

SEQ ID NO: 51394 - protein, 38 aa, Zea mays
  Coding DNA Sequence Number=SeqID_8019
MALELRRSKTAVDCGPRARAEQGGASFRCYPLGMYSGV

SEQ ID NO: 51395 - protein, 849 aa, Zea mays
  Coding DNA Sequence Number=SeqID_8020
  Gene Ontology: Mol. function=oxidoreductase activity; Cellular component=nucleus; Biological process=electron transport
  Homolog annotation: Hit_ID=Q6Z690; Match level="QueryCoverage=88%, HitCoverage=87%, E-value=0.0, Identity=78%"; Hit description =Putative polyamine oxidase
  Pfam annotation: Domain name=Amino_oxidase; Domain location=273-706; Score=306.2; E_value=6.4e-89; Accession=PF01593.15; Description =Flavin containing amine oxidoreductase
  Pfam annotation: Domain name=DAO; Domain location=265-705; Score= -28.3; E_value=0.00079; Accession=PF01266.15; Description=FAD dependent oxidoreductase
  Pfam annotation: Domain name=SWIRM; Domain location=152-244; Score =74.4; E_value=3.7e-19; Accession=PF04433.8; Description=SWIRM domain
  Pfam module annotation: Pfam domain module=Amino_oxidase::DAO::SWIRM; Domain location=273-706::265-705::152-244
MEEGSKAQLPPPLHTEAMDQLPPVLMDQDEGREAAETMEEEEAAAADISDAADPMDDGEAAGDSAAAAEPMEDDAPTSSPTPSAPSATAAVDDSTIARKRRRRKKQFPGMIPTAGVRVLRGSSSSSSHTAAHLSGVPRRRGRPPTSSSLRLARELDSEALIALAAGFPADSLSEDEIVAAVLPRIGGAEQSNYLVVRNHIVALWRSNPLSPVAANAALASIRAEHAPLVAAAHSFLSEHAYINFGLAPAVLSLPPQPPPSSPPPSVLIVGAGLAGLAAARHLIALGFKVAVIEGRLRPGGRVFTKTMRSSAVEYPDTVAAADLGGSVLTGINGNPLGVIARQLGFPLHKVRDKCPLYLPDGRPVDPDMDARVEAAFNQLLDKVCQLRQVIADGVPHGVDLSLGMALEAFRAAHGVAAEHEERMLLDWHLANLEYANAAPLADLSMAFWDQDDPYEMGGDHCFIPGGNSQFVRAFSDGIPVFYGQNVKRIRYGRDGVMVHTDKQAFCGDMVLCTVPLGVLKKGDIKFVPELPAQKKEAIQRLGFGLLNKVVMLFPYDFWDGRIDTFGHLTEDSRQRGEFFLFYSYSSVSGGPLLIALVAGESAVKFEQASPMENVEKVLETLRKIFSPKGIEVPNPLQAICTRWGTDRFTYGSYSYVAIGASGDDYDILAESVHDRVFFAGEATNRRYPATMHGALLSGYREAANILRAARRRAKNVYSPEKMDINVDVKVGVNGELKDTVRDSCIDLDDLFRSPDAAFGGFSALHDPSTSEPDSVSLLRVGIGARKLGAGSLFLYGLIMRKHVAVLAAIEGDEQRLSIMYRDFGTKLVGLDSLGDAGESLISRIKAARK

SEQ ID NO: 51396 - protein, 119 aa, Zea mays
  Coding DNA Sequence Number=SeqID_8021
  Subcellular localization annotation: CTP_CleavageSite=57; ConfidenceScore=5.45e-01
GVAQAALSFCQTGQWSSGVTAVTSALPGARVRIEVSGHLCVKCPRNLVSRCGDLVKVASERSQGLGQAGDVSAIKRGPRARRKSLELYADGGYQLRIRRLEGTPNYGPRQYGLEGIDMD

SEQ ID NO: 51397 - protein, 157 aa, Zea mays
  Coding DNA Sequence Number=SeqID_8022
MDRAPRPEHSPPTSSSACACGPADSGHHHRQVVPRCDRKDLPKPTPPFVGPPSPLHPREVRNWLYAFVYHIDDGYGGYKCGHCTTEVGVSEALYAKAVSPSLLAGNRWGRLMCVGTEFLATSCSLEDMVAGVTWPSILPPGWTVEWDPTSAEEEHEE

SEQ ID NO: 51398 - protein, 453 aa, Zea mays
  Coding DNA Sequence Number=SeqID_8023
  Gene Ontology: Mol. function=cysteine-type peptidase activity; Biological process=proteolysis
  Homolog annotation: Hit_ID=Q5NKP7; Match level="QueryCoverage=99%, HitCoverage=55%, E-value=0.0, Identity=83%"; Hit description =Putative uncharacterized protein 9C20.3c
MKQVDRPPNNPKRITIQSSQECFSVDIPSVEQPNPCPEVENPPNVDSQNLTNETVQIDSDEDDFMLALKKCNVSESHTRVLRKVMTKRIKHEELPRQRLNVRCNPQDVIASINILNERQREAIRRKGFSTILDMTVDALCSRSHLQWLMDKLDPKDMTIRPGPGKELKITKDIVHLILGVPNHGGGKPLGIDEAVAASNLRAELGVAKDEFNVTFLQDRLRKGEDDDLSIRCFFLILFNRLLFPTASWGITYHEVLLTEEMHRFHEIDWCQLIFNDLCEAAKKWHNRITTNVSTTIYGCSIVVLPLPPKIRLAHLALNFFDKNIIKALTKADKRKPECRTNIFDAPRPAPMPRPTFNIKLPSIKEMMSSKINDLPHRHRSKFTDILAAYDLEVDKSCVAIKDSIDKIIEKQYDIADKFIELIDEVLRAESENLENETDEPHQPGNSADSAGLS

SEQ ID NO: 51399 - protein, 766 aa, Zea mays
  Coding DNA Sequence Number=SeqID_8024
MGGLGVSDSFARELMRTCAAPGERMSSPELRESSARMLRVIGGCWPKNVPIPCAAEEDCFTSRMVHRWRVFPYGRNIGAVVWTVMDKDRQGAAQKRQATVRIHEARPKRQRGTAKAVASGGGKPPLAAKAGASAPSKAPEATAGAGGSKAAKVVPPAGGVAEASKAARALPLAGKRVADFGTDITVDDYLGGSDEGQLAMVAPGAEIATAAIVPKARGEALDAGGEVSALAVVRGEAGAATRRLKGVTEALSQATEALSQVADFASRTASGALTAAVSAEVERLRTQHADAVREKSASDSKCRKLTDRVAALEREKADLRRQLAAERREANEAVAKGQAAQAEAKLARAEGNLAKELAEHLQERLTALESRAKEAEAAVHAEAERTRTQLMDTYRELGARTGDFEVPDREPGLRCLQWVLEELLELPAVVGGLMSYASLVTCEGAMNALSREGCRHFEALDQVDEDFGRDIYEVEDPVVKESAGALYDRMWGLYGREVVRERAEAARAQAERDERVDDFGALNSALPGPEPTPAEAATGVALETTPEPAEDAPSVPTSAVAGEDLPPKVAEGAPDAPAAAAPSAEDSAAVVAETAAEETAEAPAAAGPSQVQDFGPAHATATTGFLAASTAEDGNEYGGSVSEFFDFTDSGSSVEWTEESSEEDLDYFAALDVAAAEASPHAADAPDVLGPSTGRRRRRAVAKRRVSAEEGARLCVSRGGRQELLSLPAATSTGEGELRSLFAGEELRIMLFNYREMGIIPKVEPM

SEQ ID NO: 51400 - protein, 180 aa, Zea mays
  Coding DNA Sequence Number=SeqID_8025
  Gene Ontology: Mol. function=nucleic acid binding; Biological process= metabolic process
  Homolog annotation: Hit_ID=Q5NKP8; Match level="QueryCoverage=67%, HitCoverage=16%, E-value=2e-46, Identity=77%"; Hit description =Putative uncharacterized protein 9C20.4c
  Pfam annotation: Domain name=FAR1; Domain location=111-179; Score= -9.3; E_value=0.00065; Accession=PF03101.6; Description=FAR1 family
MVAPWGNKSIRRTTRREPVSVRWNYAYRISYCCRCNYSTSSFEGPGVDDQTIFEASRMTVNQGGQHLNIMRTIGEHEQDTPVILQRHEVTIDPRLVPKVGMTFSGVDETYKFYSRYAYEVGFPLKKYRERKNCKLLNCSMEGKRAVRGISNPKDTEKNQLQCNKTHDPEYMEFISSMQES

SEQ ID NO: 51401 - protein, 205 aa, Zea mays
  Coding DNA Sequence Number=SeqID_8026
  Homolog annotation: Hit_ID=A2XFR6; Match level="QueryCoverage=33%, HitCoverage=19%, E-value=5e-07, Identity=43%"; Hit description =Putative uncharacterized protein
MSSEEFLPTPTPLAESLAFTAGSLASAPPSPVVQAPAPGGDDPSDSGYDDEDEEEEEEEENINKEANDEQQDHYVGLWPVTEHYTSMFETWHFPNLLQDVLHALGTYVRPVYETRPVCEPPRACYYISTIHVRVMDAGLNTDLDSGTLDLSRVHLELEDTHTRIVALEAQLEGRNPPEVQVPAMALSHPRKRIRYGELGSITRLL

SEQ ID NO: 51402 - protein, 173 aa, Zea mays
  Coding DNA Sequence Number=SeqID_8027
MRTRLKKNKMKIKTMSHLKRRTLIKGEMKIIKTRKMFKKFRIKDRHTQESTKQFKEITPSTPFLHYATSLAVNAVAVAFVTVAIALAAVAVALAIVVSVTVSLAIIVVAITIALAVPPPPPLPSPSPLLPSSLSPSPSLPLNSSEESEESTSSKETSFESSDQPSPARSMERQ

SEQ ID NO: 51403 - protein, 173 aa, Zea mays
  Coding DNA Sequence Number=SeqID_8028
MGSTLVSISAKQSLLIIEKPYLDSHITSIPLRVFSLVGARIRAKPRKTANFAPPDPGLGLGLGPRRRRTPLRPTQGSDSGSAPEDDELRFARPQGSDSGPGLCRTASASPDPGARARPRPWKTDSTSASEEPPVARPRAQARRVNRKRHHHPTPSRLGPQRTKPVSHLASSAR

SEQ ID NO: 51404 - protein, 202 aa, Zea mays
  Coding DNA Sequence Number=SeqID_8029
MAARLFRFSQPVLAVLASNHITRQSWERYCAAATAIRPSSHRGDSHQGSSEFAWVPALRAWLLEARARLEDSPIVRRRHRAAAFPPITAARDPLRQHSGMLWLDRGSSGKVTPVMAPPPWPLVALVLVRIINMYYVMFGVMLISAIPCLFVLMRVDEQATEDPGVQQPFNLVVSKGLANPGNMEYTTCGYRVQPLQSVKLVY

SEQ ID NO: 51405 - protein, 96 aa, Zea mays
  Coding DNA Sequence Number=SeqID_8030
MAGRHCELGEHEGRGRANEEHGQVEWGTGSLKGKCALGPFLSVLEKNNWKCLGSSSQDSAQSRSTGLSGGAPDSVRCARLAQVNCRSREEFNSVRL

SEQ ID NO: 51406 - protein, 115 aa, Zea mays
  Coding DNA Sequence Number=SeqID_8031
MTASKKGPGKGDTPKGILLREGNGPRAPLLIRGSKAGPSEGFNSRLRALGLRAHYWSEVRGPAPRKGSTAASGHSGSAPTTDVAEPPELFQLKCLSHASGVATHLNRNNPSVPQI

SEQ ID NO: 51407 - protein, 76 aa, Zea mays
  Coding DNA Sequence Number=SeqID_8032
MAAEKWPKKSFKKAKKASMMLESNISISSLPSEPAELSPGPHTKGDDKIRQMAEAIMDRVVDQLLNEAAEVVLKED

SEQ ID NO: 51408 - protein, 223 aa, Zea mays
  Coding DNA Sequence Number=SeqID_8033
  Homolog annotation: Hit_ID=Q6QP51; Match level="QueryCoverage=80%, HitCoverage=76%, E-value=7e-16, Identity=37%"; Hit description =Putative growth-regulating factor 1
  Subcellular localization annotation: CTP_CleavageSite=80; ConfidenceScore=5.63e-01
MFGALRGQHGAFPPPPCGKATKGQPDGRNSGQGSVHSRDTNSPHSSPASGRNSRPRRIHASPEGLLKQRAHPRLAQGLARAGFAVKQPWPDRLANRPYRRSIQCKDRLTPYPDARSSVDRAKQPSPASGATRSSASPDPEARLPPRPRKVVSALPDPKAQPQPQPQKVVSASPDPRARTQPRPREESRPYPTPASASGGVSASPDLGLGPTTPQGVHHCPTPS

SEQ ID NO: 51409 - protein, 123 aa, Zea mays
  Coding DNA Sequence Number=SeqID_8034
MARRHTATVEGGFTAEAPHRRAIPRVTVVSNSNWRRGQLPQAKSILHNPTPRVETPQRRLSPAAALLGVLRSMLWTRGGGWFYSQSCEYLGGVGFLEVGSRTPLPEIPGGGFVRLLRRARRSC

SEQ ID NO: 51410 - protein, 88 aa, Zea mays
  Coding DNA Sequence Number=SeqID_8035
MAFLPSCGKCLTPPDRRHLRCSSHEDSDNFHPLEMVMHPLGLFPAKKKDDPMWCNRVSHVKDVWAMYPDLVGRVTIQCMSVLYCLQAL

SEQ ID NO: 51411 - protein, 111 aa, Zea mays
  Coding DNA Sequence Number=SeqID_8036
MEQLPRRKKGAEGLTGGETAPLEKLHGPLAKLTEGQAQLGRGWSELATVAKARAVMAGGGKLARAKEGCLASEGFANWIKRYGGEKSALGLELRIKVNVLGFSSKAENSEI

SEQ ID NO: 51412 - protein, 274 aa, Zea mays
  Coding DNA Sequence Number=SeqID_8037
MARSRLLVTRSTTSVPSSPPDAGPWRVICPFAIIKYGFRPNAIIKMGFAATPFSIIVQQTKCHFIPSAHYERLLSWVKSRRYLLTVSLPISTSHQRRPVLAPPPPSPCPRPRRRLGHPGLAPAAGAQASSPPPPRPRHQHCLEFQVRDAAQGLQSAPPPKPIEVAPSPKAIQCVGSNCPLFVNMDSNLSDIVAMLDGEPELTLAVVDPIVAIDNVPQAQYIDWNTLQIVERQDEEGRLEVIDEDQLYNLLGLTVDEENPPADAMGNDGDAGTNL

SEQ ID NO: 51413 - protein, 130 aa, Zea mays
  Coding DNA Sequence Number=SeqID_8038
  Subcellular localization annotation: CTP_CleavageSite=103; ConfidenceScore=5.60e-01
MASVLWASPCSPAPCRHPLSLPSLPAPSPKQQVPAPPTSPMENSKPPPRPGVLAAQLGLASSLSRHPSRCSTARTTCSTICATGCVWSCWCSAQRLRDAIDLRSAYESSSKPAPLSTSHLAHRSSAKSPN

SEQ ID NO: 51414 - protein, 153 aa, Zea mays
  Coding DNA Sequence Number=SeqID_8039
MMENFGSKTVQIAMNAVVTSQLLVSLYSAAVDRKDQTVTLQGGTDTRSEVGSFLRNELREGVFWAFGFPKLKRLFSRVKLVTKNDLAPRKGLLLGSCFGAPKVSHEEAASAEVVSKRWPKDRRCLLQSTVALVAIASLVHRTVRWHSGQSSEL

SEQ ID NO: 51415 - protein, 131 aa, Zea mays
  Coding DNA Sequence Number=SeqID_8040
MEGHEACYYGKIKNIVEITFAENKPLALVFFECKWMPPKSKKSVKGLFKGLGLFQGSSSSSSRRRELLSAVHGDEDEQLTKEEHNEEEQHNEDEQHNEEVQHNEEVQHATWDQAAQQHQPWDLFDHQREQQ

SEQ ID NO: 51416 - protein, 150 aa, Zea mays
  Coding DNA Sequence Number=SeqID_8041
MNSEGRAAEGVHERGLGFPALEESLHVSREGGHARRGEGEAGARVHGAEEQGTMEGAYAGASGPERPLATGREEQGAAGGTPAPWTPGRSFSAEEEGRPAAGASSAMGKGAALPAAASEKANGDNLKLLSIRDFEFSSDMRYLAESDKID

SEQ ID NO: 51417 - protein, 225 aa, Zea mays
  Coding DNA Sequence Number=SeqID_8042
MAQWFIPWFGQDQRLPTPRCGVPTDEGCNQPLSSGPKTHLNTTGGLADSAMGITPAREHKRALHTARQANGGVGQLQRTIGREGATLAELRLCKNCSKQAAVDGEWWRSSLFAWAERERGRGDLAEGTSERWEVGKQGAGAGTWPENARTWARPWRGIVGERFGTADRWGQRDREGSDRVGERNDTNKPGPRGSKRGRAGGGADRRGPPVRHQGRAGVGARGGWA

SEQ ID NO: 51418 - protein, 101 aa, Zea mays
  Coding DNA Sequence Number=SeqID_8043
  Subcellular localization annotation: CTP_CleavageSite=28; ConfidenceScore=5.09e-01
MSSSPSPSGSPPAVGMPYGGAGGISGWSAGEAASRTPPPTEARGKSPAAPAHALGIGAPSSRAGDDAVSPGDWTDLAPYDVVDAPPGEKAKMGSQTYVQCT

SEQ ID NO: 51419 - protein, 131 aa, Zea mays
  Coding DNA Sequence Number=SeqID_8044
MALRSDRRGVGAGVNRCDGSRCSTGALDSLVNYSGARPQKPEGGEFAAVRSWCTGHYPVAHRTVRFDIGCLTERITWGTLNVMVPWMAPVPDAYYAWCQYWASEGFQKASVHHRKYQGTNPNHKFGSDGML

SEQ ID NO: 51420 - protein, 167 aa, Zea mays
  Coding DNA Sequence Number=SeqID_8045
MDPPCIVVVVLCYTIRGKLPLDQFVTLSFWRGVIRGRVWILGSIGLCTSTVSLSRALWRRHGRVICPFAIIKYGFRPNAIIKMGFAATPFSIIVQQTKCHFIPSAHYNLRPFNAVNCTNKRSVRKLAHRLFQPRFKKNVQTRFKNYSTLGSNKSSVQTNKLLQPRFR

SEQ ID NO: 51421 - protein, 217 aa, Zea mays
  Coding DNA Sequence Number=SeqID_8046
  Homolog annotation: Hit_ID=A2Z4I9; Match level="QueryCoverage=21%, HitCoverage=9%, E-value=1e-10, Identity=59%"; Hit description =Putative uncharacterized protein
  Pfam annotation: Domain name=Tubulin; Domain location=32-175; Score= -73.7; E_value=0.044; Accession=PF00091.16; Description=TubulinFtsZ family, GTPase domain
MAENNGLLWAEEPEHGLTVAGPKRAEEEEVEHYMDLGFDAEGDDPTGADEEWRYFKNADFDHPTDARAADLDHPIEARLVDLDVGFLVFNAVGRGTGSGLGSLLLERLSVEYGNKSKLGFTVYPSPQDYKSFPVDILMDAIRGKIMEKIATRQKIAARLTGRVLPSVINELNIKSRSLKYTITGSGGLKAEVLPSVINELNILVVFFESEELSMLEK

SEQ ID NO: 51422 - protein, 212 aa, Zea mays
  Coding DNA Sequence Number=SeqID_8047
  Subcellular localization annotation: CTP_CleavageSite=58; ConfidenceScore=5.70e-01
MWPITPAQPNNFPLTLAHAYLRVPLAASLTRALSGTQARCVSRTAVPSIRSLTSGSPVAEPSSSSTNPAHVALVPSISEVGDYIPAEGSSKAINQSRRNPLFSLVRRFLRHPRELSKGERKSCSAAVVAHRRLPSILGRPVHSGKLDSGWRASSGGIAGRYTTYAQRIPHRCAILAVQSAHRRRRCACGRQTKVRIIVEPSVTFVNTAHLES

SEQ ID NO: 51423 - protein, 224 aa, Zea mays
  Coding DNA Sequence Number=SeqID_8048
MEKGEEGIVHGISAHGGFHAWGGVGLAYTPPRASWPRPRGSPGVLDCWAHREMQLGTTPAGARQPWTRSRRLPGGGASALRVCSRTGGAAMLLDQGAGGTEAGQAGSHTRRTCRPRRAEKTRGEGLLTSTGNSSYSPWMNLQLAMDHRRLVRVVAGRGTSVGLRAGASNDHAERTRREAARPGEQREDARDGREERTHLEPPFANARFESGEGDEELCDGGVSI

SEQ ID NO: 51424 - protein, 185 aa, Zea mays
  Coding DNA Sequence Number=SeqID_8049
  Gene Ontology: Mol. function=catalytic activity; Cellular component =nuclear pore; Biological process=transport
  Homolog annotation: Hit_ID=Q10R44; Match level="QueryCoverage=55%, HitCoverage=13%, E-value=2e-28, Identity=48%"; Hit description =Nucleoporin family protein, putative, expressed
MCCWWLGVIFEWEGVIVEDDAELERQAWLTLAQEEGKSPPPAFVLRRVEGMKNEQAISKALYHEYYGDKQGALENLIQCGNWKKAHTIFVTSVAHSMFLSYFYVLKNSMQERNAMDDSGSLEEMSESCRSFFGRLIESLLVWGSKLPVESSETWASIHRKMTGGITRLASMEFSIISSSATSDQN

SEQ ID NO: 51425 - protein, 263 aa, Zea mays
  Coding DNA Sequence Number=SeqID_8050
  Gene Ontology: Mol. function=oxidoreductase activity
  Homolog annotation: Hit_ID=Q10I64; Match level="QueryCoverage=52%, HitCoverage=23%, E-value=2e-61, Identity=80%"; Hit description=FAD -binding domain-containing protein, putative, expressed
  Subcellular localization annotation: CTP_CleavageSite=43; ConfidenceScore=5.15e-01
MARQQPERVPPQRRPVGCGGGWKRDGVCGSPPLSGGLFAAATSASSRSECRRSGVLSVVEPAPERRAVRGVPRGGPEDVLLTVCPWDPRVRGGTLFHQTTFSLPVRRAVLFVVEVHRLRDLEPRALCGVELYDGILMRYVKASTTYLGKPAPRGEPSGDMVDFDITYYRSCDPGQARLFEDVLEEVEQMGIFKYGGLPHWGKNRNLAFVGAARKYPGLPRASTPACRASCASRTPTTPTASSPAVAVSAAASCAHWSCSWSTT

SEQ ID NO: 51426 - protein, 24 aa, Zea mays
  Coding DNA Sequence Number=SeqID_8051
MSCAFDDYYIKDYKWIMKHFLITI

SEQ ID NO: 51427 - protein, 181 aa, Zea mays
  Coding DNA Sequence Number=SeqID_8052
MNLVFWFLHLSESLCKYDARCIACVNQNIVDQKSLDDTRYHHGIIVGIISELKILLGEERNFIPPNSRCYTSLRRGGAAEYRGGGIADEAAIAHWFPNSIQVRLPEAKIMGKNMGKLILTGWATVWLAVAPWHTKSLVSNLEPHGKIYSRRGTNTHYATKAMARNTFRERSSEAMGGLPRR

SEQ ID NO: 51428 - protein, 96 aa, Zea mays
  Coding DNA Sequence Number=SeqID_8053
MDVLMIRNLGEDQQGLGKGLGVEEEQQGRHNTKEIKSDSATTPSRVAGPVCTKMDAKMHLDSNCDGLDMELALVARSIAQYTVDNQRRSGAAIAGF

SEQ ID NO: 51429 - protein, 28 aa, Zea mays
  Coding DNA Sequence Number=SeqID_8054
MGAHGVHLLAKNFLIRVKWEIFGAFRMA

SEQ ID NO: 51430 - protein, 127 aa, Zea mays
  Coding DNA Sequence Number=SeqID_8055
MCVHPQEALGFIAVPSVLVITPLPDVTNKKSRVTLMDWARVTIYKDTPSVKMVTKKGFAPKPVVTEPPKSLGPPTVVLVQRTSDNPVGALESLDKFGICFSYLSQERFTRHADITSIGVTRMRKQLH

SEQ ID NO: 51431 - protein, 165 aa, Zea mays
  Coding DNA Sequence Number=SeqID_8056
MSSLVLGQYPLRQWFDREPEDTSSTETRGTHYVQQTRFRVVEVGMPLVHTGPMYRGASFPLTPKRDTPFIGETFSLPACLRMIGRTVEQFGTQGFMKFFPEFGYELRSTIRHYSLRNPMQTENASNVQFRIGDDGIFYFDWKEVGDLCKSINDNPDRIIPFGGPG

SEQ ID NO: 51432 - protein, 37 aa, Zea mays
  Coding DNA Sequence Number=SeqID_8057
MAVVLVWCLDAAGALVTRAHRAYKSYPLKRNLVLEIC

SEQ ID NO: 51433 - protein, 104 aa, Zea mays
  Coding DNA Sequence Number=SeqID_8058
MDIVEDILRPRVDSIRGQIKKNGVSKLVLLKGKCALGPFLSILVIECKHKCLNVKICPWMNKVQITSKDLRSSHLASTVLTLNKVFVAAIYKASNPNSKKRDPV

SEQ ID NO: 51434 - protein, 35 aa, Zea mays
  Coding DNA Sequence Number=SeqID_8059
MAPRLPKQKVLFRGTYWMRQWMLLLKEEEKLQRLE

SEQ ID NO: 51435 - protein, 210 aa, Zea mays
  Coding DNA Sequence Number=SeqID_8060
  Gene Ontology: Mol. function=carboxyl- or carbamoyltransferase activity; Cellular component=ornithine carbamoyltransferase complex; Biological process=amino acid metabolic process
  Homolog annotation: Hit_ID=Q8SA97; Match level="QueryCoverage=56%, HitCoverage=22%, E-value=3e-16, Identity=43%"; Hit description =Ornithine carbamoyltransferase
MAPPVDVVGPRPRLGDVEAPSRSRSSLSSVAMVESESLGRARRRPSAEARAESDPWGRAKQSSSSSGAEPESEPWVGRIGVRRLPGLSLSLSPGSGGAEFAVFRGLAQVRALGRAERRAEPESKPWVGRSGVRRLPGLSPSPSPGSSEVELPMATFALNAPAIWSVGAAIWSGLLLGEDRASGEPELYADGGYQLRIRRLEGTPNYGPRQ

SEQ ID NO: 51436 - protein, 481 aa, Zea mays
  Coding DNA Sequence Number=SeqID_8061
  Subcellular localization annotation: CTP_CleavageSite=18; ConfidenceScore=5.29e-01
MKLWKETSRSSKITTSSRCGLAATPSRLPVKAALSTFLFRTLIYCKNYMDVSDMARLRHTARKSVIPFLPSRLAERPLRCPVAGQSSHLERLHHRLREEQERRRQEQQGSSFSLHQEIESVRSCSPVLPLEPPPAPPLGAPASGVAAGGDPDDGDGDDSSSHDTDFSANPEPEGWVARPITRDAARGCHFHDALDTLLRRAFDRHTWSVEYRCVVYQHSRGVYPDRWEATCLVRCPENSLQGAEACSEHYSISERDSAEAAMQDAARRALSHYCSVFGGAADGLDLKYYPRRPSGSTGGVIVSPVGEGNPRLSSTVNLAAVLNTELDHALDELSRARAEIALLRAERAERRHFGWWFPRSRRDSAPVPLTSAWTPVLWQSRLQDQDNSRTIDHVREQAQRRKACSAGASRSTGGGAPAAAPAAPAPDVHRADVSDADSGSSSHRSDFGRHSAAAAAAASTTPASDASDAQRQALQETPKFS

SEQ ID NO: 51437 - protein, 62 aa, Zea mays
  Coding DNA Sequence Number=SeqID_8062
MPSMGLGVCGSLCQVWVRPLGRSARHCGTGGYETVDSGYDYDAGEDEAVEGDFQEFQDYDEF

SEQ ID NO: 51438 - protein, 78 aa, Zea mays
  Coding DNA Sequence Number=SeqID_8063
MALGTQCLCSPLATEQVTTGRGISARCVGLRFAGDAPPYGSGCAAALALAAGGGRLSLRRRFGDKGSGLDLTGASCKR

SEQ ID NO: 51439 - protein, 125 aa, Zea mays
  Coding DNA Sequence Number=SeqID_8064
  Homolog annotation: Hit_ID=Q10RU8; Match level="QueryCoverage=30%, HitCoverage=4%, E-value=6e-11, Identity=84%"; Hit description=DENN domain containing protein, expressed
ARLIERTPSMSDLNEVIFGQEHLSRDDLSFIFSLKAEERCRRPHTDLDKVEVINASEQRRSVWVADCAGGRRADEPADRSRRWQVVATCTGRWARGGHVDKAITGRQVVTTDVPTLTSIHKDERR

SEQ ID NO: 51440 - protein, 226 aa, Zea mays
  Coding DNA Sequence Number=SeqID_8065
  Gene Ontology: Mol. function=sequence-specific DNA binding; Cellular component=nucleus; Biological process=regulation of transcription, DNA-dependent
  Homolog annotation: Hit_ID=A2XCF9; Match level="QueryCoverage=81%, HitCoverage=82%, E-value=2e-35, Identity=48%"; Hit description =Putative uncharacterized protein
  Pfam annotation: Domain name=GATA; Domain location=131-166; Score =66.6; E_value=8.6e-17; Accession=PF00320.18; Description=GATA zinc finger
MAGCGAAADENPAAEELASGADASLNAFFDHAGLELAAAAGGGQGADDDEEEELEWLSNMDAFPSVETMSAEVEAAPSAAPPARLEPLPHASHAVGPRTKGLRRRRRVTAPWSVPPVLPPPAGSGAPRRRCTHCASEETPQWRQGPAGPSTLCNACGVRFKSGRLFPEYRPILSPTFSPLLHSNSHRRVMEMRRHVEAEEAAPAAGRAGARVRRAERAAARAAKGE

SEQ ID NO: 51441 - protein, 256 aa, Zea mays
  Coding DNA Sequence Number=SeqID_8066
  Homolog annotation: Hit_ID=Q10RU8; Match level="QueryCoverage=94%, HitCoverage=24%, E-value=7e-37, Identity=44%"; Hit description=DENN domain containing protein, expressed
MEEEELTSGGGDAALLAPEPREQAAEEGRSPRDAEAFEDAVEEASAASTSPVACCNGDAAETSSPPAWKSQVDGPSAPEEAETYESPSASSSGCAAMEVESSLVSELREEPGRVDAGSAASPSGQRAGGTEEHENSMATPGAGSPSREETDSCMHSAPSSPPRSASSTSSPPRSASLTSSPPLPQIKQQSRHVRTGSFQRFREQMQRAWKWGPIGGGGGGERSPREQLLRTTVNIEAMANQKRHWYQVRSKSQMSE

SEQ ID NO: 51442 - protein, 44 aa, Zea mays
  Coding DNA Sequence Number=SeqID_8067
MGAPDSPVRHRCANSAPPKTYFRKFGLWSLFRGYEIRICGSLFF

SEQ ID NO: 51443 - protein, 158 aa, Zea mays
  Coding DNA Sequence Number=SeqID_8068
MDMSFSLVDEVVGSFVGGDVSVGVPEELLGGRPLGKLTLDMLVSVLMLVHEILNIMSTLSSSIHLLKESSLVWGRIMFAGVMMTPDILALVPVMAPVTLLQVLPCHGGFVVRDNIVFHSPVDDELLMEVEGWFWHRSHGDHISRLGDHDSFKNLGDLG

SEQ ID NO: 51444 - protein, 133 aa, Zea mays
  Coding DNA Sequence Number=SeqID_8069
MRVVWDALGQGSSEDAREKLRSETLEVFKGPYNPRQKGSQLMGKTKARIVVSKKARKEARSSSLYQEALIANQSIDTVVVLQDLRGPDSPEPVVDLILEKGFNLSELMSFDPALVGSTIIDVADQPSRPNVIF

SEQ ID NO: 51445 - protein, 82 aa, Zea mays
  Coding DNA Sequence Number=SeqID_8070
MRKWARPSPLLLVLLSCRSNIPLDRPTRWQGGRPSHTINHFLNGTCKNCATSKAEYTNTQLDLTGLTALAYNAPLTPAAAVE

SEQ ID NO: 51446 - protein, 57 aa, Zea mays; identical to SEQ ID NO: 44635
  Coding DNA Sequence Number=SeqID_8071

SEQ ID NO: 51447 - protein, 241 aa, Zea mays
  Coding DNA Sequence Number=SeqID_8072
MKALVKVLVDCAEDATKSLGGLVDHALGHMHDEEIVARTLFAMKEKLELLQQDALEAKVQAFPEIAKYEGDDISVEPTTPSTPPTITDPFVDEEEFYYPDVSDEWYFSDSDRSTRKRPHGRDYSKLERKKGASSSSPEYLSRLQEITEKQIQWSIEKSEKKEKCTEEEREIEKKRLELEAQKLRIRQRELKHEELESANKRLQMLLSTNEEDVDPEVWIMMKEQKNACSSSYFVLIKHCVV

SEQ ID NO: 51448 - protein, 127 aa, Zea mays
  Coding DNA Sequence Number=SeqID_8073
MVAPEDLKIRAATTRIEPMKFGSEEGIDAPRGRQRMRRRTASMDCDFWALRLPRRTGFTTHELDVLLVVLLAADLHRYFAAEMGKRMKEKYDKYWGIWHINNNTIERGQLHRRRKEGEMKGQREGEY

SEQ ID NO: 51449 - protein, 130 aa, Zea mays
  Coding DNA Sequence Number=SeqID_8074
  Gene Ontology: Mol. function=metal ion binding
  Homolog annotation: Hit_ID=A5BSB8; Match level="QueryCoverage=71%, HitCoverage=32%, E-value=6e-10, Identity=35%"; Hit description =Putative uncharacterized protein
  Pfam annotation: Domain name=zf-C3HC4; Domain location=38-91; Score =45.0; E_value=2.6e-10; Accession=PF00097.16; Description=Zinc finger, C3HC4 type (RING finger)
MSLSKLQATTFFAVPRNRTPNITLGSRRWCQPLSTTDCAICLDPLADIAGPDHKKDDAAATSMLRAMPCSHIFHQHCIFQWLHRNAVCPLCRYQLPTTFEDEDTEVEEDAEEMDNSNSRFRGCLVAPAKV

SEQ ID NO: 51450 - protein, 80 aa, Zea mays
  Coding DNA Sequence Number=SeqID_8075
MKTVDTVVVLQDLRGPVSPEPVVDPILKKGFNLSELMSFDPALVGSTIIDAGDQPSRLNAIFGKLQCIKDMLSTPTQALV

SEQ ID NO: 51451 - protein, 112 aa, Zea mays
  Coding DNA Sequence Number=SeqID_8076
MLVLLLLVPRALPLAADLTHHVVVVVVEVVAVGWVPAWPTVCFGINHQKGGDCVAYSPPSRLLSSPCDATTPEVSGPETSRWATWCFGCGKTPEGGTSSRPPRRGHSSSPKF

SEQ ID NO: 51452 - protein, 46 aa, Zea mays
  Coding DNA Sequence Number=SeqID_8077
MHTVAVDRAHRRQWVKAGQWSGEVTAVTSALPGGVRQDKGVRPPLR

SEQ ID NO: 51453 - protein, 282 aa, Zea mays
  Coding DNA Sequence Number=SeqID_8078
MSGAPKDSNANSPPSGISRGDFAIIHRTVRCSKEERPQELASFGNLQRLVRYISPDMSGATPEQQLLGANGYLRRNKCARSARRSQARSYWRTGQGTVHVRCAPDTQAGPQVRSSNGQNPTAVMTWRGHRTCPAPKVHNKPIKKINVGFQLREFSEPARYNSPDCPVYTGQCPVLQEDAALELGSLGKSERPLRYNSPDMSGVHRTVRCNSGATAISAPTATCSAFNARQKRAEVRHARTGTPDIEQYMSGVHRTSRRAQKTELQRSNSNGFGDVAGAPDMS

SEQ ID NO: 51454 - protein, 206 aa, Zea mays
  Coding DNA Sequence Number=SeqID_8079
MAQGTSLVRARAGELLSPMASALLSHFFQKRAAPLLPALYLAQEPPWCLEMVGVLHLARNLLIHTRCLSSRVACSEHPLPTSSLASPAELLLGRALLMPVAPIPIQISCPFSSAAALLRGFLVALVVGLQPGVRSPIRDAVETRGEKTPAALAAIIFVLGKTVERLCVSNSQLAVMSRSAPYPFNKMPSHVDNPCGKSRLVQVESM

SEQ ID NO: 51455 - protein, 117 aa, Zea mays
  Coding DNA Sequence Number=SeqID_8080
MGEGPEEDASAQGVHRRLWSKSRDGGASVLISRATRDQRSYRSKNTSAHHRTGGWSLAAGECAGSLLAAGLGDMRVALVVEVEAIAKMPEVGLPKQQKLQDGYPHTLLLLSPSVSGW

SEQ ID NO: 51456 - protein, 898 aa, Zea mays
  Coding DNA Sequence Number=SeqID_8081
  Gene Ontology: Mol. function=methionine-tRNA ligase activity; Cellular component=cytoplasm; Biological process=tRNA aminoacylation for protein translation
  Homolog annotation: Hit_ID=Q9ZTS1; Match level="QueryCoverage=88%, HitCoverage=95%, E-value=0.0, Identity=91%"; Hit description =Probable methionyl-tRNA synthetase
  Pfam annotation: Domain name=tRNA-synt_1g; Domain location=20-413; Score=687.4; E_value=1.1e-203; Accession=PF09334.2; Description=tRNA synthetases class I (M)
  Pfam annotation: Domain name=tRNA_bind; Domain location=677-770; Score=162.0; E_value=1.6e-45; Accession=PF01588.11; Description =Putative tRNA binding domain
  Pfam module annotation: Pfam domain module=tRNA-synt_1g::tRNA_bind; Domain location=20-413::677-770
MASSSSPPPPKLPIPGRRNILITSALPYVNNVPHLGNIIGCVLSADVFARYCRLRGYNAIYICGTDEYGTATETKAMEEKCTPKEICDKYHAIHNEVYKWFNIKFDKFGRTSSPEQTEVCHAIFHKLMENNWLTENTMQQLYCDTCQKFLADRLVEGTCPNKVCNASARGDQCETCSTLLNPTELIDPKCKVCKNTPRIRDTDHLFLELPLLRDKLVNYINETSVAGLWSQNAIQATNAWLKEGLKPRCITRDLKWGVPVPHEKYKDKVFYVWFDAPIGYVSITASYTPEWEKWWKNPDNVELFQFMGKDNVPFHTIMFPSTLLGTGEKWTMMKTISVTEYLNYEAGKFSKSKGIGVFGNDAKDTNIPPEVWRYYLLMNRPEASDTLFTWADLQAKLNSELLNNLGNFINRVLSFVAKPAGAGYGSVVPDAPNAGAHTLTKTLAEKTSKWVEQYLDAMEKVKLKQGLKSAMGISSDGNAYLQESQFWKLYKEDPAACAIVMKTSVGLVYLLACLLEPFMPSFSDEGVKLREAQKQQLMLKPTKLLTSSRAQNYLDDDTEDGYMLPVPLPRAPAPAPVEKRTQFQCVASKVFCSYQTLGSHHASNVHGGRGCCFVPPVCSHSSPAAPAATPLSPINSPCMIDPHFNPDGGTKKEPKKQSGGSKSKTAEADITVAKLDIRVGLIRKAEKHPDADSLYVEEIDVGEDAPRTVVSGLVKFIPLEEMQSRKVCVLCNLKPVAMRGIKSHAMVLAASNEDHTKLVEPPESAAVGERVTFAGYAGEPEASLSGKSKTWEKLAAELHSNGPAPAPAAPPPPRTTAPPPVLLPAPDYCGLDVRQGEVEETRGGARWYGRTGGTSIGYHASIRALCPVPSPSRARPSPSPPPCTSQKATAPGAAPVGE

SEQ ID NO: 51457 - protein, 30 aa, Zea mays
  Coding DNA Sequence Number=SeqID_8082
MKSICDLDKTPGPGRQVKYDNLEEILLSLS

SEQ ID NO: 51458 - protein, 50 aa, Zea mays
  Coding DNA Sequence Number=SeqID_8083
MTKHLRTSPQHWRPPPVNSLDHLRQALTFVMPSKKASVPGAAALQPLDTN

SEQ ID NO: 51459 - protein, 254 aa, Zea mays
  Coding DNA Sequence Number=SeqID_8084
MQHTEAVRDKSAAENKSRNLMEKLSAAEAEKEDLARRLTTEKEDADRACVEAQAARAEANLALQRVVEAELSHRGLRGYLDKTEASTRTGVDRAHTLLMNAYRQLGARTAPFDASGEEVGLRFLEWLQEELELLLAIVTGLMSFASLITCEGATNALSHEGCRHFEVFDRSDKDFDCGIFQVEDKMANAEQVDDFGGLDNTEPWRKMRGRGLGSDRRWLLVLARTLWRPPRRLVKTSQWQLLWGDRYPPGPLKE

SEQ ID NO: 51460 - protein, 196 aa, Zea mays
  Coding DNA Sequence Number=SeqID_8085
MKHQVLGQRRTRYPSLYDFACPSHGWSHPQNTPEQAEGTDRTETCAVPFAGGLRDKGYVEVYGSPTSSPPREAHMGFDPCSAYAPQAPSPSSAPPEGKDTVEDREDIGISAKDQLKLRALRIKNHHLQKQKEILEAKRQRVTMQAKVRQMIQDEEQRARELEQEIALMQGEGQHNPQRGLFIPPVTAFQGINYLDE

SEQ ID NO: 51461 - protein, 98 aa, Zea mays
  Coding DNA Sequence Number=SeqID_8086
MKHPERGIKLCLTGDPGSRSPDFTRPSANVDRAPRFYHLKAFLLKVKENRKDCNLADGEYILVPEQGVAQEVAPDPPPEPTFEDLPAPALEGKPRFYA

SEQ ID NO: 51462 - protein, 632 aa, Zea mays
  Coding DNA Sequence Number=SeqID_8087
  Pfam annotation: Domain name=HR1; Domain location=527-597; Score=3.6; E_value=0.094; Accession=PF02185.7; Description=Hr1 repeat
MEVVELVPCARNKWGNWHEFWFYVAEGTVEDHPGLPVSEMCSHYYSAYPPFEVAEEDVDEGALRCAAGLSSGRDLVEEFVAYGVWPLSHGWALGEVCPRQMPSHGGKLVRSPAFVLDLHSRDPAAFVREAEDGAVRIVGRYVPKTEGQRSWDIRGSNDRLNRVFELNRLPYGGYPGQDDVDRRGKKPVVETGDDPAPAAAPSSKKRELGIAMGGLGVSDGFARELMRTCAAPGGRMSSPELRESSARMLRVTGGWWPKNVPIPRAAGEDFFTSRMVRDWKVFRYRRNIAAVVSAVMDKDRQGASQKRQAVVRLHEARLKRPRGAAKAAAPGGSQPPLAAKSAVPASSRAPEAAKAAAAGGSKSVKAAPVSSRVPEAAKAARELPPPGKRVTDFATDISVEDYLVGSDEGQLVVVPPAVVTAAAAVVTATAAVVPRAKGSALSADGEIPALTAVRDEAGAVSRRLKEMKEALSQAADFADRAASGALTAVVSAEVERLQTQHADVVREKSAIDSKCRKLADKVAAMEGEKTDLRRQLVEERKEANEALAKAQSAQAEANLAWAKGSLARQRVEQLEERLSALQTRVERAEASTRSEAERTRKQLMDSYHELGARTADFEVPDREPGLRCLEWI

SEQ ID NO: 51463 - protein, 107 aa, Zea mays
  Coding DNA Sequence Number=SeqID_8088
MKLWKETSRSSKITTSSRCGLAATPQSAACEGRVIYVSFPHFDLLNLKSLHKHKINHHLPCKHLHQLKTRIRLKMMKIKIKRMSHLKRRILIKGDIKMIKTMKMIKK

SEQ ID NO: 51464 - protein, 398 aa, Zea mays
  Coding DNA Sequence Number=SeqID_8089
  Pfam annotation: Domain name=Transposase_28; Domain location=169-317; Score=-47.9; E_value=0.0042; Accession=PF04195.3; Description =Putative gypsy type transposon
MKTFEWIIFKNPLEARGLHPLGAPPEPTSKEDDSWAWAPASETGPLVLAEVKRRTTVGGGPLLTWRFAFFALGDRRPRSMTRGPGPPESEARPLHSTEMKRRTTAGGSWVALVRVGRDSLRRLGVRARESFLKKDSPCVWQLCFHIFSQQLRPFAFELSAPLCFCAPLLSATVVAMASPVHPERFQSEVALNLVHNLLGRGAPAFAGRIRAGASPLGCGLPLPISPFFLLLLEELSLQLQHLTPHSILQSAIFACLCKMSVGVALLSPVLGRKGVVQRPSGESEMSCGSIFARTSPASHGTLPRTGRAPARLSGQAGEHRALPCLHLFGFNGLDVASNDEGSFVLMHASRRPPPLASCSTGLDVSRLDTTIPKKELVTRPPGGSLDWDLDLYTTLAKE

SEQ ID NO: 51465 - protein, 282 aa, Zea mays; identical to SEQ ID NO: 47395
  Coding DNA Sequence Number=SeqID_8090

SEQ ID NO: 51466 - protein, 209 aa, Zea mays
  Coding DNA Sequence Number=SeqID_8091
MTTSCGYHPLEMVMHPLGLFPAEKKDDPMWCNRVSHVKDVWAMYPDLVGRITVQCMSALYRLQALQSDVMAHLANLAQTTKLTLDSREDFVVDLSSELVEKDLQVERLSQRITTLEQQQELEEANDYLDMHHLEMEANEAGSEGEEAPVELGPAPGANVTASAMPPSPPPLFTKAKDPLDADVWLRIVESKFPLLTGDCPDDTKARFAA

SEQ ID NO: 51467 - protein, 198 aa, Zea mays
  Coding DNA Sequence Number=SeqID_8092
  Homolog annotation: Hit_ID=Q46837; Match level="QueryCoverage=94%, HitCoverage=12%, E-value=1e-109, Identity=100%"; Hit description =Putative lipoprotein acfD homolog precursor
MTSTAVIAKTDRYLGKMNRVADDITVAPEYLEESNNQAWARGGAGDRLLMYAQLKEWAEKNFDIKKWYPDGTPLPEFYSEREGMKGWNLFQLMHRKARGDEVSNDKFGGKNYCAESNGNAADTLMLCASWVAQTDLSEFFKKWNPGANAYQLPGASEMSFEGGVSQSAYNTLASLDLPKPEQGPETINQVTEHKMSAE

SEQ ID NO: 51468 - protein, 149 aa, Zea mays
  Coding DNA Sequence Number=SeqID_8093
MATRPWRSSTGRGSEDIREPSKSAPAVISQSGNRRFAKGSTLRRWMAAITPAAGPGKGDTPKGILLREGNGPRAHLLIRGSTAGPSEGFNSRLRTLGLCAHYWSEVRRLAPRKGSTATSGHSGSAPTTDQGFVGWPSKGSQPPQTQSEG

SEQ ID NO: 51469 - protein, 522 aa, Zea mays
  Coding DNA Sequence Number=SeqID_8094
MELGSHGARGTSWHANTRELDGDAKKVPAIGENPSRGRSRLAEDTTVRREIRQGRAASREALGSTGRKAGEQMVKRLGSRTRLAGAGASVGWKGKHDARHWEKLSRPTGPGTRLRPLAYVTGDRPRGSIGPPPEQGAEAHRSKSGHASHPRGPTCLLGSPVSYSEVRVECIGVQCSLVEELAPKEGDSWAQAPASEPGLLVSAEMKGRTTAGGSTLFTRRTSPLLLAETKRRIYRGRWHAPHAADWSAAFGRDEEAHLPRAVVCSSLGAEVKRRAITGQLYAPCTAVHLLRTWRPTPKEYDSWARALVPETGSPWRTSGERLLERIRVGVSPHGDLATREFVFFVSKLPSGLALPISSFFVLLLEGLGLQPLHVTPCFILQAAIIAYLRGMSVEVTLFLFLPPASGGRMITSLVKVDSGLSHRSAAPTAPPALPATAGHAAPTPPRGSYKTSYTVEVADACLDGLVLTPVGGRGLGPPRHDAHAEVVATAGDPLVQRWSLPLASHSELAFNTTLLVQSSPYL

SEQ ID NO: 51470 - protein, 156 aa, Zea mays
  Coding DNA Sequence Number=SeqID_8095
MSHPPWAPVPGCREAKPPLALVPRSLGAAAEDGEVKFSNPMRWYQGTPHVAQQNHKYEGNRLVPSPEAGPGATVGTLNQGYPLLQYEDTVHGEQHLTPPHDRSQGHHVTRKGDILQDAVSGSVPPRESTGPLYTQPGPPSTTRDSQVSKSDPLGGI

SEQ ID NO: 51471 - protein, 92 aa, Zea mays
  Coding DNA Sequence Number=SeqID_8096
MDVLMIRNLGEDQQGLGKGLGVEEEQQGRHNRKEIKSDSAATPSRVPEPVYTKMNAQDASGLRLQELALVARSIAQYTVDNQRRSGAAIAGF

SEQ ID NO: 51472 - protein, 182 aa, Zea mays
  Coding DNA Sequence Number=SeqID_8097
  Homolog annotation: Hit_ID=A3BDL0; Match level="QueryCoverage=58%, HitCoverage=78%, E-value=6e-23, Identity=56%"; Hit description =Putative uncharacterized protein
MQPGEHEVGRKVADYGWGNKDIIKSEICCRCRKDRMTSRHNRGAGVNNPGRVALQLHVQQGSDEASCIPGAGGGVGAAGGCLEWSEGGVGLRGRPENTQGAPSLGTRTSLAALSRRGDALSRGHTFAGPGIKALGNAFVGDGVAGVVGEAARGVVEGLLAALFGIRASAALLVLLLRTTNIS

SEQ ID NO: 51473 - protein, 113 aa, Zea mays
  Coding DNA Sequence Number=SeqID_8098
  Subcellular localization annotation: CTP_CleavageSite=48; ConfidenceScore=5.25e-01
MQLQGNSPWVVDSGASTHMTSSDGGTPSSTPVVAPPHSDVEQPPPDVAASHDSPSATPGGRGPVPPFGPGVGLADTTSSSPSLLPTNYRSALADANWRAAMMDEYQALVDNNT

SEQ ID NO: 51474 - protein, 180 aa, Zea mays
  Coding DNA Sequence Number=SeqID_8099
MESHDLRAEWESRLVGGYETVESGYDYDAAGRIPEVGEFQRRSSLEHRTLSGGTPDSPGQTRVFLFRHGGKSSSSSPPSGEPATVVVVMLRGEEYHVVAAVVGHELETPEAEHRPGPKRLLKTIHLELNGKVFVNTQQDPYLARQLSAFQTREDPRPTSEFVAACPCPDGLMQDGTQDGG

SEQ ID NO: 51475 - protein, 220 aa, Zea mays
  Coding DNA Sequence Number=SeqID_8100
  Gene Ontology: Mol. function=helicase activity; Biological process =protein amino acid phosphorylation
  Homolog annotation: Hit_ID=Q1EPC6; Match level="QueryCoverage=69%, HitCoverage=9%, E-value=1e-47, Identity=60%"; Hit description=DNA helicase homolog, putative
  Subcellular localization annotation: CTP_CleavageSite=17; ConfidenceScore=5.03e-01
MTSAKKRQQGPCRTASCASTGLKHSPDGHGHAATNSLVGRGSSRVRNADNTDTKIYEEGCIEPMIEDVALKETLNKEQRSAYDKILSVIDTNNSGVCFVDGPGGTGKTYLYKGLLAALCSQDKIAVATATSGVAASIMPGGRTVHSRFKMPLTIDDGAVCSFTKQSGTTKLLQKASLIIWDEASMANRQAIEALDNIMRDIMGASWAALWWEDNCVWGRF

SEQ ID NO: 51476 - protein, 242 aa, Zea mays
  Coding DNA Sequence Number=SeqID_8101
  Homolog annotation: Hit_ID=Q6J9V9; Match level="QueryCoverage=68%, HitCoverage=44%, E-value=1e-47, Identity=64%"; Hit description =Putative uncharacterized protein
MQEACNRTTVVHPFGSVATDGPAWRPGPTFHVTGVPVTTWTGKGDISKRILLSEGNGPRALLLIRGSKVVLCRVRQPPQNTRAWSPLLIRGSKTGLSEGFDSRPIARRVRDDPGYVRYMAEARATLPRGSKAGPSEGFDSRPRARRVRDDPRYVRYMAEARATLPRYPRTFLRPAGTICNGIPPEGGTEPSNPIKWVQVQQITCRGSGAALAPGYNQIVDRVDKTSLKARSLTMHPGCGQAA

SEQ ID NO: 51477 - protein, 158 aa, Zea mays
  Coding DNA Sequence Number=SeqID_8102
  Gene Ontology: Mol. function=helicase activity; Biological process =viral genome replication
  Homolog annotation: Hit_ID=Q8LML8; Match level="QueryCoverage=94%, HitCoverage=9%, E-value=7e-55, Identity=71%"; Hit description =Putative DNA helicase homolog
MVMFAFQMRNIDPGNRLCNGTRLVVRGFQKNSIDAEFVLGQHAGMWIFLPRIPLCPSDDKMFPFHFKRKQFSVRLSFAMTVNKAQGQTIPMVSVYLLEPVFSHGQLYVALSRATTRSKVKILAIPVIDEKKKKWVKKNSTINGATYTKNIVYKEVLTL

SEQ ID NO: 51478 - protein, 131 aa, Zea mays
  Coding DNA Sequence Number=SeqID_8103
MATGPSYMRCACLFRWQAVRPCCGIHYAHHHSRVTKKAARHICTIGATDIMALGDLLGDTCIGYFYMYSLCFDPGPICRGPAPLYVPPLSYKREGTQRYKADTLRPNLGSSSLRLSHSQGHTSSQAQYITE

SEQ ID NO: 51479 - protein, 99 aa, Zea mays
  Coding DNA Sequence Number=SeqID_8104
MVSLMLRRVSKEDIQSGTRCKFVGSNRKKVEIAGATKNTEVFVGQGSTKQGKMGVGGVDGLSGEKIQQGHDIHSKVSWVRRNDQVEALSNSRPLSHWMA

SEQ ID NO: 51480 - protein, 202 aa, Zea mays
  Coding DNA Sequence Number=SeqID_8105
  Subcellular localization annotation: CTP_CleavageSite=55; ConfidenceScore=5.25e-01
MAPNALAVAPRPLDKGNGAAGLNPSFACQGFLPLCSQGRASSARYHVRRALCETEAAILWEWEALEAEHQRLSDWRTQLEERTKVASRQFASKRSELERDHKDYKKDLQKVYARELEASQKEKGLAKREDALSQREAVVTELQAKLSAMDKILDEQRVQQTTTVERIQKWERELEDKASNIALVEENLGPLGHDLGPQSERA

SEQ ID NO: 51481 - protein, 76 aa, Zea mays
  Coding DNA Sequence Number=SeqID_8106
MASLVHPEHFQSKGALNLELGLQLQHLRPHSILQVAIFVHLCEMFVGVAPCTSLFRHFFVLVKSGKAKDHLGAYYF

SEQ ID NO: 51482 - protein, 153 aa, Zea mays
  Coding DNA Sequence Number=SeqID_8107
MAYDYYASGAEDEWTLQENMEAFSRIFVAIAPVLDRFALDAQAIEDVDPRAIDLAMRIAERMFLKMKKDEVKIKIEEEDNDRWRPYDESTSSQGASFKSTSHMCFVSNESDNESEDEEEHESDSKDEDDLQQFFAQLSKKNRTSLLKLMKRAE

SEQ ID NO: 51483 - protein, 204 aa, Zea mays
  Coding DNA Sequence Number=SeqID_8108
  Gene Ontology: Mol. function=metal ion binding
  Homolog annotation: Hit_ID=Q65X88; Match level="QueryCoverage=49%, HitCoverage=54%, E-value=6e-10, Identity=39%"; Hit description =Putative uncharacterized protein OJ1593_C11.14
MERPTVRSGRPSVSSTTARPQLSNLGLGYSIAIALGFLILFASFLLAFYFCFGRGGDYWAGEAVTTASSSGHLSITVPRVLFVAEGSESPEDDAYPSSSAAAACSPVGLDAAAIASYPKVAFSSRVRRGQRHVLHLPQRVQGRRDAARDARVQARLPRRVPRRLAEPERVLPRLQVLSRPDAQCHAALRARPALAVRRRPEAPQ

SEQ ID NO: 51484 - protein, 65 aa, Zea mays
  Coding DNA Sequence Number=SeqID_8109
MRLTDAGDGQPNESLYEKKPEEPTLVLTSLVIEILQPGANPILTNLNMSKMHLLLRLGTAQKENR

SEQ ID NO: 51485 - protein, 136 aa, Zea mays
  Coding DNA Sequence Number=SeqID_8110
MDARDQVYEGGPHQAVLIGVEGRAWLVADDDNLGFASGGGEEAERVELDDAPMGGDLCLVGFLDNELVGQSALESWSVELGSFRSIARDALGRVENALLVWGWPRVRQRVRLPPEVSVSHPAMASGEPCLESLVPW

SEQ ID NO: 51486 - protein, 117 aa, Zea mays
  Coding DNA Sequence Number=SeqID_8111
MKRASLCKGTKRCQRFIYNYSNSTVRNTVDYSGQEKLFGKTGQARTVRALAADRPRHEDVTRPEPMQKSKSVLRTVRWKSKHRLRPHADSSGPLCGGPSATPELTFDQGTTNQGQSD

SEQ ID NO: 51487 - protein, 328 aa, Zea mays
  Coding DNA Sequence Number=SeqID_8112
  Homolog annotation: Hit_ID=Q2QQC8; Match level="QueryCoverage=90%, HitCoverage=84%, E-value=1e-101, Identity=63%"; Hit description =Expressed protein
MNWEAASTHLIMVTIALALNLHHCKFGSCVMLAERKFPFHGFTVAHCDAGTPAGWNDGSDDLVNEINTKIIDSLQYARKDYFQNTTKEYPSELKPLFSAFGLKNFTITTLRSFLLYYLPLIQPKPHTGSDDEDDDLLHDTQEKTMDLVTPFYNSVKQIVRETSIVTTRRVFERIVVRHVSQRTAWKLLKDASKSSKRKAARGMPTPQYTYCVARTTFRAHALGITAAWVVQSIIEVYRCFIRKPSEDCEALSSDGNEQFDDMNKFRLFGRKIYGITIKSCFSLVLASAGAGIGALVHPVHGQWLGCALGDVAGPIIAIIVFKKMQLPL

SEQ ID NO: 51488 - protein, 41 aa, Zea mays
  Coding DNA Sequence Number=SeqID_8113
MRTTFRLRRNNRAKKATGTRKGGYPEKDPSPRRNQAPSPPY

SEQ ID NO: 51489 - protein, 39 aa, Zea mays
  Coding DNA Sequence Number=SeqID_8114
MTLHIWHLFGEVLQVGDEGLGLGEGLDLEPKIRDVHLDP

SEQ ID NO: 51490 - protein, 665 aa, Zea mays
  Coding DNA Sequence Number=SeqID_8115
  Pfam annotation: Domain name=SlyX; Domain location=201-268; Score= -8.1; E_value=0.056; Accession=PF04102.3; Description=SlyX
MNSPTPASGGDSRFSSDFLSRDGFPSILWEVLNSAGYPTPPLYTVQLYEEHRVPRCRVWLTLEAHPLQPGWRSLDSETIGLRTDDTVEAAAMKTLTTFCGYHPLEMVMHPLGLFPAEKKDDPMWCNRVSHVKDVWAMYPDLVGRVTVQCMSALYRLQALQSDAMTLLANTAQAAKLTLDSREDFVVDLSTELVEKDLQVERLSQRITTLEQQVEIRDNTIDVLENQLHDVQRELEEANDHLDMHHLEMEANEAGSEGEEAPEELGPAPGANGTTSAIPPSPPRWVERVGEREGGRGEVAGVERERGGSPAAFVFVPRPGQGDVGVPPKPRLSLPSVAVAEPEPRGRARRKSFGRGQGGVRVLGSGEAEFRRLPGFGPSPSPGVGRSGPESEPWGRARRSFVVFRVLARVRALGSGGAEFAVFRVLARVRALGSGGVEFAVFRVLARVRALGSGGAEFAVFRVLARVRALGSGGAEFAVAPLARPDCLSDFTLSSGTAVGVAQAALPFCQTGQWSGGVTAVTSALPGARVRIEVSGHLCVKCPCNLVSRCGDLVKVASERSQGLGRAGDVSAIKGGPRARRKSLELYADGGYQLRIRRLEAPEPLHRARGRSGTDPTFYIRPYVAFPQGGGGECAMLPSMGTEHGVSGELQAATGAPVARRVGEST

SEQ ID NO: 51491 - protein, 87 aa, Zea mays
  Coding DNA Sequence Number=SeqID_8116
  Homolog annotation: Hit_ID=Q8SA86; Match level="QueryCoverage=93%, HitCoverage=8%, E-value=3e-08, Identity=49%"; Hit description =Putative retrotransposon protein
MDRVRSTARVSREGDEAIAAETTPISEVMRQSGLVVPEEAVAEGRREKKGEANDHGHESTKIELWDDKTLVPHAAWLSMPSDSLNSG

SEQ ID NO: 51492 - protein, 280 aa, Zea mays
  Coding DNA Sequence Number=SeqID_8117
  Gene Ontology: Mol. function=kinase activity; Cellular component =ornithine carbamoyltransferase complex; Biological process=amino acid metabolic process
  Homolog annotation: Hit_ID=Q6QP54; Match level="QueryCoverage=30%, HitCoverage=36%, E-value=7e-12, Identity=50%"; Hit description =Putative kinase
MALPVDVAGPCPRSGDVGAPPKLGSNLSSVAEAEPEPLGRARRKSFGRGQGGVRALGSGEAEFVVFRGRAQVRALGSGGAEFAVFRVLARVRALGSGRAEFAVFRVLARVRALGSGGAEFAVFRVLARVRALGSGGAEFAVFRVLARVRALGSGGAEFPMAPLARSDCLSDSLCRVALQSEWRRRRCPSVRPLYADGGFQLRIRRLEGTPNYGPRQVGGSSTGTEGEQRVRELNDAVVVPRLRGCLGCHGRPWCMLGIVSNLVEASASLGSPGQQGNSRQ

SEQ ID NO: 51493 - protein, 73 aa, Zea mays
  Coding DNA Sequence Number=SeqID_8118
MAGGNELAGAKERWLAGEGFELGIKVNIPDLWLKIRKAGGGVGGDYIPASLGRQSGKLDLKNSSVSQVASSSE

SEQ ID NO: 51494 - protein, 65 aa, Zea mays
  Coding DNA Sequence Number=SeqID_8119
MGYTTCGYMVQPLQSVKMMVNTRKGGGIYLPPNRHTRRIFRQQQQQAEMDPSNPPPAGADPAVAA

SEQ ID NO: 51495 - protein, 32 aa, Zea mays
  Coding DNA Sequence Number=SeqID_8120
MVYMLLRPVQFMDEDEADLQILFPRIQIKNQW

SEQ ID NO: 51496 - protein, 81 aa, Zea mays
  Coding DNA Sequence Number=SeqID_8121
MTWQGGTGLSGVHRTVRCAIEQTAQPTVKFGGWSSRAHGATTALAAGGGTERQAGEPNALKLTMPAVDQPRVIEVRPARRA

SEQ ID NO: 51497 - protein, 777 aa, Zea mays
  Coding DNA Sequence Number=SeqID_8122
  Gene Ontology: Mol. function=oxidoreductase activity; Cellular component=endoplasmic reticulum membrane; Biological process =electron transport
  Homolog annotation: Hit_ID=Q53PZ7; Match level="QueryCoverage=62%, HitCoverage=95%, E-value=0.0, Identity=74%"; Hit description =Cytochrome P450
  Pfam annotation: Domain name=p450; Domain location=33-499; Score =73.4; E_value=7.4e-19; Accession=PF00067.13; Description=Cytochrome P450
MEAAADAFPWAAQCAGMALLASSLCVVALALVLLLLRRWPWCSCHVCRAYLTGSWARDFTNLGDWYAHLLRESATGTVHVHVLGCTVTANPANVEYMLKTNFDNFPKGKTFAALLGDLLGRGIFNVDGHAWRHQRKMASLELGSVTVRSYAFGIIAQEVEARLLPLVASAADAGAVVDLQDVFRRFAFDTICKISFGLDPGCLEPEMPMSELADALDTATRLSATRGAAAAPLLWRAKRLLNVGSERELRAAIKLVDELAAAVIRERRKLGVAASGHDLLSRFMASAGADDDDRYLRDIVVSFLLAGRDTVSSALTTLFMLLSENPGVAAAMRAEAGDGGPAPPLTYEHLKRMHYTHAVLYENMRLFPPVQFDSKFCVGPDVLPDGTYVPGGTRVTYHPYAMGRMPRIWGADHGAFRPGRWLTGAGGSFVPESLYKYPVFQAGLRVCLGKELAVTEMKAVAVAVVRAFDVHVVGDSGSAACKPKFVSGLTASISGGLPPPDPAAQALLLPRRLEARGRWCSCSTSCFNSNGGSSRRRMRFGGVAAFPAAMGHGQQVDYGEDAGGLGDSDAGGSEPEPPLERTRGGSGGGSKRSRAAEVHNPHSLCSQPLERPPEIRILSAATAAAMDASFTLSYSHHCPNLLSALDLPSGEAGTTSSALTRHPSGAPRSAATVAHAPATPRLCAAPPSPPFPVSPSKQAPAPDLQLVCRFPVSETPRVCNCRRWTMKRWIKEMEEDGRHGRHFQVSTAPPPPFLPPDSISLDPDTSFLGSISEFIDS

SEQ ID NO: 51498 - protein, 354 aa, Zea mays
  Coding DNA Sequence Number=SeqID_8123
  Subcellular localization annotation: CTP_CleavageSite=42; ConfidenceScore=5.75e-01
VVSIATTAQAKMKLWKETFRSSKTTTSSRRGLAATPSRLPVKATMARLRHTARKSVIPFLPSCLAERPLRHPVAGQSSHLERLHHRLHEEQERRRQEQEQEQQGSSFSLQQEIESVRSCSPVLPLGGAPCTTTGAPPASVVAAGGDPDDGGGDDSSSHDTDFPADHEPEGWVARPITRDAARRCHFHDALDTLLRRALNRQNSLQGAEACSEHYSISERDSAEAAMQDAARRALSHYCSVLGGVADGLDLKYYPRRPSGSTGGVIVSPAGEDNPRLSSTVNLAAVLNTELDHALDELSRARAEIAQLRAERVERRHLDGGSPAPVGTQHPYRSPRRGHQSYGNPDCKTKINLEP

SEQ ID NO: 51499 - protein, 132 aa, Zea mays
  Coding DNA Sequence Number=SeqID_8124
MVEAFKKSLWFSPSGGAKLARVVEPGSCSNQWRAPIIAPLVDGQMAMFLGCCHKLLPDTSAKRSRPTEPFVPEHAGEMSVCPVGGMHQQQPCQFADADSGVRDHYDCVLHATGSATLSLSTAVKLIHPLVST

SEQ ID NO: 51500 - protein, 228 aa, Zea mays
  Coding DNA Sequence Number=SeqID_8125
  Subcellular localization annotation: CTP_CleavageSite=22; ConfidenceScore=5.06e-01
MGHSISSFDSPRLDDNPPPPVRSPSNQGPSHDISLWSVTEQLVGFDAAESSPRNPLPAPQGWPLFARRETRVSTRLQALSTAPAYKHHRQRERKVSGHRHLVLAQPLAVRVAIRELRERACEANPSPIWQEASWSGGNSSPEPGGGAEFLSLRGPARASSQPPGAGSWSRVLTGVRGSAVCVYGTSGWRRKTAPGAVDLRGNDQSRTQNRDRRFVIQGLTARTGSHKH

SEQ ID NO: 51501 - protein, 55 aa, Zea mays
  Coding DNA Sequence Number=SeqID_8126
MESHDLWAERESRLVGKRHYGTDGYEIDGFGYEYGAGEDEAVEGDFQEFQDYDEF

SEQ ID NO: 51502 - protein, 403 aa, Zea mays
  Coding DNA Sequence Number=SeqID_8127
MDSGYRPATDNQDHRDSARNGSHLRRSSVGSDGVDLQRRRTARKWRGRRSGGQRRNGDGAEQGEIRPRSAPAGHKKRVADGAGAADRPWRRTAQCRRDLPLAVDGGVPGGGRGSGGQRERSARTVGQDLSGQAVDVIVGERSARPGRWTAQRVGEEGGGRGVDRGPPLAADIAGKGEGRATERRRDQRAGRDGSTTTARRRQKFGSGSAFKTWPLAAEWEMPKIFEKDASDAKPRLVRLRYKGKDWRSYYLDSVKSYTFGVAPKEQRRGANSSGDELIFDVDEDKTEEKDIAEYKGKGFAKTEEAKKAIEDDTPLGEGPFDQDLGGRRYRVHHAAGKVMGAKQLAEAISFVEQLGYPFGSTIFASGLDDYLYCCPDNMETEGLLLSKALRNKRNIESEAAKKR

SEQ ID NO: 51503 - protein, 75 aa, Zea mays
  Coding DNA Sequence Number=SeqID_8128
MTVGGGCLSYGAPDSPVYTGHVRCASHVTNAVGIRPLELLSSGPAWMSGSRWREVAVAPELHRTVRCTPDMSGEL

SEQ ID NO: 51504 - protein, 281 aa, Zea mays
  Coding DNA Sequence Number=SeqID_8129
  Gene Ontology: Mol. function=structural constituent of ribosome; Cellular component=ribonucleoprotein complex; Biological process =translation
  Homolog annotation: Hit_ID=Q53Q51; Match level="QueryCoverage=46%, HitCoverage=85%, E-value=7e-51, Identity=77%"; Hit description =Ribosomal protein L24, putative
  Pfam annotation: Domain name=KOW; Domain location=51-82; Score=36.2; E_value=1.2e-07; Accession=PF00467.20; Description=KOW motif
  Subcellular localization annotation: CTP_CleavageSite=8; ConfidenceScore=5.06e-01
MKRNPRVTSSRRKCRKAHFTAPSSVRRVLMSAGLSTELRHKYNMRSIPIRKDDEVQVVRGTFKGREGKVVQVYRRCWIIHVERITREKVNGSTVNVGIHPSKVIVTKLKLDKDHKALLDRKAGAAPPTKLRASLLPTTSPRPPLAPPPPAPLSRRSTRLFTKQKRNREEPSLDQTEELDAVDAFKTCHTSSKRGLSESAREALSSSHQSLKERWHQNIGILQVIIIKSKKKCEEAEEQQERTQRELEEYKKITEKNNKEMEETNVLIKKLLSLHGNASSST

SEQ ID NO: 51505 - protein, 119 aa, Zea mays
  Coding DNA Sequence Number=SeqID_8130
METGEQREQAFLGKLLLGLRRGQQCSTQQASSRAGLGRRRVEAGRLGGSRRAVASGLWRLDRHRYPLERAVEQRVGEDGGVCYGSRLGDQRAGGRRRLLLCYGSRAAEREQEDDGVCYD

SEQ ID NO: 51506 - protein, 168 aa, Zea mays
  Coding DNA Sequence Number=SeqID_8131
MPPAPPQGIPAAGGIPDGDRDDDNAGGSSSHDTELSEEPEPDGWIVRPITHDAARGGVANGLDLKYYPRRLIGSAGGVIISPVGEGNPRLSSMVNLVVVLNTELDHALDELGKVRAEVAELLAECAARHYLDGGSPAPIGIQHPYRSPPRGRFDYGTLDCRTRIDLDP

SEQ ID NO: 51507 - protein, 137 aa, Zea mays
  Coding DNA Sequence Number=SeqID_8132
MHDFLLELALLDCSGWLLGQEDGLPSCSNAGIDFLLAGCSDGTAIAEETASGTAAAGAGAVMIALSIRCWKVGKGWHGWQGRTLTKSVLLPSAVGDHTTPSHDRLHWAVCNSRSTALEASGLALEAEAVVAAATPAA

SEQ ID NO: 51508 - protein, 38 aa, Zea mays
  Coding DNA Sequence Number=SeqID_8133
MGSYSWLRYFTQGATTIVFRNLSGLLRIKDDEADEAEE

SEQ ID NO: 51509 - protein, 90 aa, Zea mays
  Coding DNA Sequence Number=SeqID_8134
MGSYSWLRYFTQGATTIVFRNLSGLLRIKVAIRRTAYKSIAYVAQDQPAPSTPPLDDEEETTFSALSSFFLEGFVMEPLSLSPYSFRLIG

SEQ ID NO: 51510 - protein, 247 aa, Zea mays
  Coding DNA Sequence Number=SeqID_8135
  Gene Ontology: Mol. function=protein disulfide oxidoreductase activity; Biological process=cell redox homeostasis
  Homolog annotation: Hit_ID=Q941V7; Match level="QueryCoverage=74%, HitCoverage=72%, E-value=4e-49, Identity=56%"; Hit description =Glutaredoxin-like
  Pfam annotation: Domain name=Glutaredoxin; Domain location=102-168; Score=63.5; E_value=7.2e-16; Accession=PF00462.15; Description =Glutaredoxin
  Subcellular localization annotation: CTP_CleavageSite=37; ConfidenceScore=5.57e-01
MWSSWVRRSKTSLRLTSSPSFSSPTVSSPSFSSPTVSSPTGKDHPGIGAVLDDEALDDDSPCAGSKSVLHRTRSATRLRTCKSFAAAAEAAAASVAGERRVVLYFTTLRAVRATFEDCLAVRTILRGLRVSVDERDVSMDAAYLAEVRALMRRDRPSLPQLFVGGRLLGDADVVRLLHESGELRRVLAGAAQAEPTPCAWCGGSRFVPCGTCCGSHRRFSEKTGGFRVCASCNENGLVRCAACSSCS

SEQ ID NO: 51511 - protein, 884 aa, Zea mays
  Coding DNA Sequence Number=SeqID_8136
  Gene Ontology: Mol. function=protein transporter activity; Cellular component=nuclear pore; Biological process=protein import into nucleus, docking
  Homolog annotation: Hit_ID=Q9ZWR5; Match level="QueryCoverage=100%, HitCoverage=100%, E-value=0.0, Identity=83%"; Hit description =Importin-beta1
  Pfam annotation: Domain name=GAT; Domain location=109-197; Score= -21.7; E_value=0.1; Accession=PF03127.5; Description=GAT domain
  Pfam annotation: Domain name=HEAT; Domain location=170-207; Score =7.8; E_value=1.8; Accession=PF02985.13; Description=HEAT repeat
  Pfam annotation: Domain name=HEAT; Domain location=214-250; Score =19.3; E_value=0.014; Accession=PF02985.13; Description=HEAT repeat
  Pfam annotation: Domain name=HEAT; Domain location=361-397; Score =14.5; E_value=0.19; Accession=PF02985.13; Description=HEAT repeat
  Pfam annotation: Domain name=HEAT; Domain location=403-439; Score =18.3; E_value=0.029; Accession=PF02985.13; Description=HEAT repeat
  Pfam annotation: Domain name=HEAT; Domain location=642-679; Score =1.5; E_value=16; Accession=PF02985.13; Description=HEAT repeat
  Pfam annotation: Domain name=IBN_N; Domain location=21-101; Score =89.7; E_value=9.2e-24; Accession=PF03810.10; Description=Importin -beta N-terminal domain
  Pfam module annotation: Pfam domain module=GAT::HEAT::HEAT::HEAT::HEAT ::HEAT::IBN_N; Domain location=109-197::170-207::214-250::361 -397::403-439::642-679::21-101
MDITQVLIAAQSPDANLRTVAEGNLTQFQEQNFPNFLLSLSIELSNDEKPPESRRLAGIILKNSLDAKDSAKKELLTQQWVSVDPSIKLKIKELLLVTLGSSVHDARHTSSQVIAKVASIEIARREWQDLVAKLLGNMTSAGAPAPLKQATLEALGYVCEEISPQDLEQDQVNAVLTAVVQGMNQTELSPEVRLAAVKALYNALDFAESNFANEMERNYIMKVVCDTAVSKEVEIRQAAFECLVAIASTYYSHLEPFMETIFYLTANAVKGDEEPVALQAVEFWSAICDEEIALQDEYEGSEDGNSAIHFRFIEKALPLLVPLLLETLLKQEEDQDQDDNAWNISMSGGTCLGLISRTVGDAVVPLVMPFVETNITKPDWHCREAATFAFGSILEGPSVGKLAPLVQAGLDFLLNTMNDANSQVKDTTAWTLGRVFELLHSPAGINSIINGSNLPRIMSVLLESTKDAPNVAEKVCGAIYFLAQGYEDAESTSSVLTPYLSNTIAALLSAADRAETTHFRLRASAYEALNEIVRVSNIPETSGIIAQLLQEIMRRLNLTFDLHILSSGDKEKQSDLQALLCGVLQVIIQKLSSTDAKSIISQTTDQLMVLFLRVFACHNSTVHEEAMLAIGALAYATGPDFVKYMPNFFTYLEAGLQNYEEYQVCSISVGVVGDICRALEDKSLPFCDRIMTVLLKDLSSSMLNRSVKPLIFSCFGDIALAIGENFEKYLPYAVPMLQGAAGLLGTLDLSDDDMVDYGNQLRRGIFEAYSGILQGIKGPKAQLMIPYATHLLQFTEAVSKDRSSYNIYPCSVVICAIRDDSVTKAAVAVLGDLADTLGQSSKDLFKTHLFHVEFLRECQAQELDDEVRETAQWAQGMINQAVVS

SEQ ID NO: 51512 - protein, 173 aa, Zea mays
  Coding DNA Sequence Number=SeqID_8137
  Homolog annotation: Hit_ID=A2Z1R0; Match level="QueryCoverage=34%, HitCoverage=13%, E-value=3e-12, Identity=59%"; Hit description =Putative uncharacterized protein
  Subcellular localization annotation: CTP_CleavageSite=49; ConfidenceScore=5.36e-01
MGQEVRISLPPSFPMNQAAESPKSAKAPAQGWLGKMVMLPGMLGHMSVESSRRVNLRTRRLSRAQGSTILIWTSTTIHKRNFEKEDTTVYRNNKHFFFSDYSICWSDVDETFEVDWEFLNAQWSDGMCANLQIVQTIGIAWLPNEFSFMKLILSKARLLRTLYVDRNQDDFDN

SEQ ID NO: 51513 - protein, 924 aa, Zea mays
  Coding DNA Sequence Number=SeqID_8138
  Subcellular localization annotation: CTP_CleavageSite=19; ConfidenceScore=5.25e-01
MPTSSSSAVATPPADSSPPAAASSEETLSSLMAEELRAGDSVDFGVSRMSSVRVQDMQRLGYFSGGVARAPGPGGNTSADTECRGGSVEKRMIGDEVAQFGSCTFTPKTGKTTMQVVELVPCARNKWGNWNEFWFYVAEGTVEGHEGLPVSEMCSHFYSAYPPFEVAEEDVDEGALRCAAGLSSGRDLVEEFVAYGVWPLAHGWALGEVCPRQMPFHGGRVVRSPAFALNLQNRDPAAFVREAEDGAVRLVGRYVPRTEGQRSFDIRGSNDHLNRVFELNQLPYDGYPGQDDVDRRGKKPVVETGDDPAPAAAPSSKKRKLGTAMGGLGVSDSFARELMRTCAAPGGRMSSPELRESSTRMLRVTGGCWPRNVPIPRAAGEDFFTSRIVREWRVFPYGRNIAAIVSAVMDKDRQGAAQKRQAVVRLVEARPKRQRGSAKAAAPGGGKPQLAAKSGAPTSSKAPEAMAGAGGSKSTKAVPPSSRVPKVAKAARALPSAGKRVADFATDISVEDYLGGSDEGRLAIVVPAAATTTAAAAPKAKGGALSAGGEVAALAAVRDEAGAASRRLKEVVESLSQVADFANRTTSGALTAVVSAEVERLRTQHADAVREKSAADSKCRKLADRVAALEGEKADLRRQLAGERRETNEALVKAQAAQAEANLARAEGNLARERAEQLQERLIALESRVERAEAATRAEVERTRTQLMDTYRELGARTSDFEVPDREPGLRCLEWVQEELQALPTVVEGFMSYASLVTCEAMNALSREGCRHFEVFDQADEDFERDIYKVEDPVVKESAGAIYDRMWGPHGREVVRERAETARAQAAHGERVDDFGALNSALPDPEPTPAEAVSGVALEPTSEAAEDAPEAPASAAAGEDLPPKVTEGAPSAEGPAAVAAETTAGATAEPTAEAPATSGPSQVA

SEQ ID NO: 51514 - protein, 54 aa, Zea mays
  Coding DNA Sequence Number=SeqID_8139
MGLGVCGSLCQVWVRPLGRSAVAMRIDGFGYDYGAGEDEAVEGDFQEFQDYDEF

SEQ ID NO: 51515 - protein, 565 aa, Zea mays
  Coding DNA Sequence Number=SeqID_8140
MAKTGEPGLEHHGSLYHLTHRNGGTTHDETGVEAEGRSRRVEIPPQSQRHDGANVVAGVENGVCSKKTIAPRCRGSRSRGGRGRKTRSKSLIFGRGRRSSVNDRQGDTAKRHQQTDLPASSIVRASRSPAREADGSARVCASHGVRARGRIEGETTDPAGKATAATDPVGKTRSSQRDGRSSRKGRSNVDPAGKAAAATDPTKAKKGVGGGACPAGQGPAPDLAEGVDGTGDGRSSKWEALLLGPKRRTPTKGDQGRPGSHARAELRGAARSVLGGSAWSGRARPGWCRAPVDAGAGAAGVRAAVDVRRAGSSVARGRWARHRAVCARGGSAGSGSVACRALGLGDAGGSGVGELGRGARWREEQSEVEEGRRAQGALDAMEQGGRGWRSFGGPRQMEPAPWLESSCSRGARPWRPLGDGSRCSPAGDAPMGRRSGSAGVEGARRPWEAPALAAVVVLGVGARRPWEVLADPPPAVRIQGEEGRPLPRAPAPRAVGAGGCAPRLGSHARAELRGAAPVTAAPLEGAAPGGRSLPGAAAAQVGGGCSWRLLGGREPPAAAVGRKKT

SEQ ID NO: 51516 - protein, 106 aa, Zea mays
  Coding DNA Sequence Number=SeqID_8141
  Subcellular localization annotation: CTP_CleavageSite=43; ConfidenceScore=5.22e-01
MPITFVNGLWKSIEDPEVFSSLSRFPLLPSRRSFPAHSFGYTRPSSGSGFVLAVLHIHNSGSENTCSHNPLGKHCQIMFLRTFGGRRPPTATFKVRAVVYDQSYRL

SEQ ID NO: 51517 - protein, 199 aa, Zea mays
  Coding DNA Sequence Number=SeqID_8142
MAERYQLPRSCVPPTTRRKDGEYPPSGGLEGGKTRCIRECEDMVAFQGGHPPFKGGSPYLRPQPSWAESSPTHSKTSGRKGGQPCRRHATAPSGRTSPTPNTPGMEAQAHASCNRRAECFVHATAPPLAPPPRLLDCGTDTATRGDPEHDPAAPAWRDGQCGQKWAGSNGGGRRAGAAVTSSAKLTSHPGAAREPSLTA

SEQ ID NO: 51518 - protein, 435 aa, Zea mays
  Coding DNA Sequence Number=SeqID_8143
  Subcellular localization annotation: CTP_CleavageSite=91; ConfidenceScore=5.49e-01
MQACIPSETRYASSDLIVCKRSVRGCFRASRLCPASSAPVSSQQQGSSYATARRRPTSHLPVPPARHRTRSRPDMGPGTGNGAGAALQYLAAAASAATGNNVSTVPHSRTLFYSIEYRCLNDVFYVHSKLLQATDYSPTMPEGSRGAAQDDKTDSRKGSHTQSQPCAKAYPRLPRAASTRYDTTLPDPDLDPSSNKPGTGVERCGVTSRRSRVQRRSSTPSPRFSCASQAHARPRSDSDAPTPAFLSHVHLTPVRATVPRLTCPHIYQIPVTTTTTTTSSLHPPRISHPTFWSKLRETSRATDQLRLASSAVAVQMASRRGSFLSLPRQLLLMAAVLGTVVLLGEGATARPLLGIAEPPASPGAAAAAPGPGVAAQAAEAGGGRAPDRSEAGVEVILAGFAAAVAVVIVCYIRVTRESKNGSGSVGEKRGSLGGF

SEQ ID NO: 51519 - protein, 113 aa, Zea mays
  Coding DNA Sequence Number=SeqID_8144
  Homolog annotation: Hit_ID=Q8LN95; Match level="QueryCoverage=36%, HitCoverage=29%, E-value=7e-09, Identity=70%"; Hit description =Putative uncharacterized protein OSJNBb0015K05.12
MATCCSISLPSSPWLLLLAVLIIGDAAAVMAVPTRPLLRIAEPPTAPGTAAGPAGASRPGGGRGGRLPDRSVAGAEVILAGFAAAVMVIVFCYIRVTRRNSGGVGLGGKQQRL

SEQ ID NO: 51520 - protein, 207 aa, Zea mays
  Coding DNA Sequence Number=SeqID_8145
  Subcellular localization annotation: CTP_CleavageSite=84; ConfidenceScore=5.48e-01
MDQVKSASDDPVPPTGKSGAWSDQLVALKNSSLGGYNFTGRSARGSDSSVCQSRNGSCHVGLGPTVKWCTGRSGAPKTGKQPIRDSLPAPSLRIVHCPELGARGRPKRPPNRPARLPSDSAKQPKKASRRRQINPLAKQIGEAELPTNPPTEQVGKAELPTNPPAEQVGKSESPTNPLVEQHAEAELSAIRLLSNLVKWSCQPTLWQ

SEQ ID NO: 51521 - protein, 109 aa, Zea mays
  Coding DNA Sequence Number=SeqID_8146
MGAHGGREVLAADRWQTSLVLGGSRRRDAMLYGGRGESAPKKSVAELERDKEEGIHTDMPGPHSRHQRQIPRERELASGPTCHCLRVVQRLPSEPHPIGRRHLRTNGPG

SEQ ID NO: 51522 - protein, 65 aa, Zea mays
  Coding DNA Sequence Number=SeqID_8147
MVVRLLQQGYDVTVASNFHNSALEALDYVKLGVHNLETTGHTKDGGNKNFEVTSAREKVKEAKVI

SEQ ID NO: 51523 - protein, 133 aa, Zea mays
  Coding DNA Sequence Number=SeqID_8148
ESEEPTKCTRSTIFLYASISTNSKMRMGLKMMKEKIKRMSHLKRRAMIKGEMPLIKMRKMNKFQDRYTQESTKQFNEITPVEEALQDSDWVVAMQEELNNFTRNEMQFCSEMLVIIGHPPAANNRSSAYLDED

SEQ ID NO: 51524 - protein, 429 aa, Zea mays
  Coding DNA Sequence Number=SeqID_8149
  Gene Ontology: Mol. function=ARF GTPase activator activity; Biological process=regulation of ARF GTPase activity
  Homolog annotation: Hit_ID=A5AXJ3; Match level="QueryCoverage=13%, HitCoverage=35%, E-value=1e-14, Identity=65%"; Hit description =Putative uncharacterized protein
  Pfam annotation: Domain name=C2; Domain location=335-413; Score=52.1; E_value=2e-12; Accession=PF00168.21; Description=C2 domain
MENRDLGREFSGHGMRAGTKNRGELHGKPGARMPTAGEDAARPAKLAGKQRPTQGKVRAQSGRRGSQEKLMARLAVPWDEAHKRNFQEIRAPRDILGSADSHRSPTSCPLLSPPSSLSSLLPSFDSTPLPDAPSLALPPPPAPARRVAPVLPATPRSAACSPHHPHLDVTSDLLGFRVLRLTPNPAAAARAEASSSQCSPPQPHRVSGSPPCFWRPRAPAARAPVLPRRALLLRRTEETQSQAQGLRQPQALLADSDGDEVPTAKPGKSAPAGKTKKKLLAGDATSKNQTKVAKAKGVFGNKVFLQFWKNTAERENMVGKKRGIISPLDHLAGLLEVRVVRGVDLAICDLRSSDPYVVLRIGKALKVKTRVVKKSINPEWNEDLTLSRGCASLVPLKFFSADIVPYERVAQTDFHASLGPPQKDRVHGL

SEQ ID NO: 51525 - protein, 366 aa, Zea mays
  Coding DNA Sequence Number=SeqID_8150
  Gene Ontology: Mol. function=DNA binding; Cellular component=nucleus; Biological process=mRNA processing
  Homolog annotation: Hit_ID=A5C3R9; Match level="QueryCoverage=73%, HitCoverage=16%, E-value=1e-120, Identity=77%"; Hit description =Putative uncharacterized protein
  Pfam annotation: Domain name=RMMBL; Domain location=110-150; Score =43.1; E_value=9.8e-10; Accession=PF07521.3; Description=RNA -metabolising metallo-beta-lactamase
MASYVLNGSHLGATPNLRDSYTSRLFERYSSGFLLIKVEDMDAYAPKDLLVVTTGSQGEPRAALNLASYGGSHTLKLSKEDVLLYSAKVIPGNETRVMKMMNRLTDLGPKIIMGKDSGLHTSGHAYREELEEVLRIVKPQHFLPVHGELLFLKEHESLGRSTGIRHTTLMYSDGDKAFGTSTDLCIDERLRIASDGIIFVNMEIFRPQKEHGLAQTGLKGKFKITTRCLWLDNGRLLDALYKAAHAALLSCPMNCPLSHMERMVAEILRKMVRKYSEKRPDVIAVAMENTTASFSEHLDAKSSGNFEPSSATSHLSRSPAMSLEGSYKTHPDNPEVDAEGQKPFLRPREQHWMMQPHCYASIMHNG

SEQ ID NO: 51526 - protein, 581 aa, Zea mays
  Coding DNA Sequence Number=SeqID_8151
  Gene Ontology: Mol. function=translation initiation factor activity
  Homolog annotation: Hit_ID=Q9AUJ7; Match level="QueryCoverage=100%, HitCoverage=100%, E-value=1e-133, Identity=47%"; Hit description =Eukaryotic translation initiation factor 4B
  Pfam annotation: Domain name=eIF-4B; Domain location=1-581; Score =855.5; E_value=2.8e-254; Accession=PF06273.2; Description=Plant specific eukaryotic initiation factor
MSKPWGSVGAGAWALDAERAEEEEREQALTFPAPEPPLPAGGAASFPSLREAAAAGGGGKSKKKNKGTTLSLSEFTTYGAAAAQRRAAPVEPKGLTHDEMLLLPTGPRERSAEELDRSRGFRSYGGGSGFGGPGGERRGGFDDEDRRGPGRSSDLDMPSRADEADDWGATKKFTPAPTDSGRRDRFGGPSPLGRADDIDDWSRGKKPLPARYPSLGSGGGFRDSPAFRDSPAASDSDRWVRGATPLPHNGEGAGERPRIVLNPPKRDPLVASTPPAEVARNRPSPFGAARPREDVLAEKGVDWRKFENEIEHKTSRPTSSHSSRPNSAHSSRPGSPGSQVSAVGSEGAPRARPKVNPFGEAKPREVVLQEKGKDWRKIDIELEHRAINRYDVRGITIEFLLLVVESYKLIQNLDFVMEALANGTPFICCVIQVLFAKTDLYPWPESDEERNLKEEINLLKVDLKEIERNMSNGSDQTSVDAKGLSEKISQLESQLEQLSRELDDKIRFGQRPRSGAGRVTALAPTSLGEEPHATVVDRPRSRGGMEPPPRQEERWGFQGSRERGSFGASRNSDRPMARQRW

SEQ ID NO: 51527 - protein, 94 aa, Zea mays
  Coding DNA Sequence Number=SeqID_8152
MLLPQKVEQMSTTQLDSTQMLPTDGGDEGFERVIEDVWEQHNDLLVGEAAGAHAVGVEGDPSRDTILRWEIMSKLAGRGGGLRKRNSNPRSSQR

SEQ ID NO: 51528 - protein, 94 aa, Zea mays
  Coding DNA Sequence Number=SeqID_8153
MTATSSSTPSATAEEVPTAPTPVVEGDTGGASSSIPPPTSEETETEAAIRREWEALESEHQRLSDWRTQLEERTKAASHQFAFERSELVRDRKD

SEQ ID NO: 51529 - protein, 144 aa, Zea mays
  Coding DNA Sequence Number=SeqID_8154
MAHRTVRCATGAPTVRHRCANALSGFCDWEGSAVDQPGPTRQRVHRDSPVHTGQSDNRCTSASVGAPDTVRCTLLTVGAGHVSPANFAADRCAADRWLTGQSEHPQSKPPRVQRSSLRNTIQESQISPSPDHAPHFLGEGTILT

SEQ ID NO: 51530 - protein, 177 aa, Zea mays
  Coding DNA Sequence Number=SeqID_8155
MNAILEEQQTQQTTTVERIQKSERELEDMASNIALAKENLKEKDASLDKRATDLAWPEKDLAFKEEMFERRDKLLAEHELEAEQKEKELEDRIRQLQAAQAPHGPKRWRRQRKHLKISRRSIVPGSSASLHGPAKRARRCHDPAISLEPMIAGPVADTEDAAWVGVQDTVEVVAERF

SEQ ID NO: 51531 - protein, 48 aa, Zea mays
  Coding DNA Sequence Number=SeqID_8156
MVLRHPYFGPMDECPSGQGVTLHKIVTAIGGGVSVAKAQRLWKAVVGP

SEQ ID NO: 51532 - protein, 64 aa, Zea mays
  Coding DNA Sequence Number=SeqID_8157
MEVENLLENDVGCPTTTTKMVWRLERQDECPSGQGVTLHKIVTAIGGGVSVAKAQRLWKAVVGP

SEQ ID NO: 51533 - protein, 123 aa, Zea mays
  Coding DNA Sequence Number=SeqID_8158
MAGAHDTVDAQLLEVRGQVDGLAADIRTMHERLNSTVTSTIERFNQLDLAQTATRTTLDTILARLDALTTKMEQDYGGDTEQDDGDRHGRACHVDCPNKRTLLIRDDGEYSSASDSEEIEHAL

SEQ ID NO: 51534 - protein, 250 aa, Zea mays
  Coding DNA Sequence Number=SeqID_8159
MTGLMSFASLVTCEGAANFLSREGCRHFEVFDRVTEDFDHGIFQVGDEVLKQSAGALYHRMWGPNGRDTVQERVDRALELMLNDEGVKDFGGLEILVTRAEDARTGAEEQPAPQDDPDGDPAAAAAPSQVPMSGPAQATPTDVDINFVAAANAVPVNGNSSGSETESWSSDGGDFGSPFSWIEESSDEDLDYFAALVVATTESLPQPEVREGFAPPAGAIAEEHRRQKVVLKHNVGEMSRNGRRRQMGME

SEQ ID NO: 51535 - protein, 240 aa, Zea mays
  Coding DNA Sequence Number=SeqID_8160
  Subcellular localization annotation: CTP_CleavageSite=2; ConfidenceScore=5.41e-01
MSSSSLMRRVFPSSKPPDGGYPPPFRLLVGGTQLHGSWYLSAIVRLQGFSSAGPVAPPRRRSPRMVTTSSWVGKSKPGCDLGPTLSFKDVHHPRWGGGQAEPALYLPCGPAGHPLPRRSGVEALAGPAGGADLDNVGLIDGGRRHLQRVGVVGRAPGGPSCRRAAAAPGRCPTRLGGFEWGSAGGLVPPAIGAEAEATREVLVADGITATIRAPGLRFFVLVLAPRASAWARARLQQRPP

SEQ ID NO: 51536 - protein, 154 aa, Zea mays
  Coding DNA Sequence Number=SeqID_8161
MAEQHGPWLGQSVRALGQLPTNATGHSATPQPRHHARYPIGLPWLADQWRRVQRVDCGATLLPVRDRPAGPAERNGTPRRAGGRTEGVRARPCLCPCPVVLPPRWFVRCLEWKPTKRSAVPRQWKVGRPHPLHMEMVRCRSSSTYVGRSRCCFY

SEQ ID NO: 51537 - protein, 173 aa, Zea mays
  Coding DNA Sequence Number=SeqID_8162
  Gene Ontology: Mol. function=oxidoreductase activity; Cellular component=integral to membrane; Biological process=electron transport
  Homolog annotation: Hit_ID=O48956; Match level="QueryCoverage=96%, HitCoverage=49%, E-value=3e-50, Identity=68%"; Hit description =Cytochrome P450 98A1
MKINIDENGKSLKESGAKQHFVDEFFTLKEQYDLSEDTVIGLRSMGSVSTCSLCLSEWAVARDPKVWSNPLQYRPERFLEENIDIKGSDFKVPSFGVGRHVCPGAQLGINLVAFMIGHLLHYFEWSLPEGTRPEDINMMESPRLVTFMGTLLQAVANPCLEKELYNRAHRCKI

SEQ ID NO: 51538 - protein, 457 aa, Zea mays
  Coding DNA Sequence Number=SeqID_8163
  Homolog annotation: Hit_ID=A2YMU4; Match level="QueryCoverage=17%, HitCoverage=12%, E-value=1e-19, Identity=66%"; Hit description =Putative uncharacterized protein
MKPSRAVVEPRPCWKERRIANSKFLSPEQACTQALFCPPRARRDFSTRSPRNLPPFHPWPQSAAPNPPPHPCARNARTPRFLRPQPPQSAAFPSATAIVSIRRRSAATDNFSHAIPCPAPASAHPLALAPVFEEVVTLPPSSTPPALPHPPNPWSLLDSPDYRGAARRIYGAASVLVGIRRGGSCLPGIGAACLRSEMDRIRDDRRGGVSAGGVPRPPRKRLRSNGGGGPRDSPRSERRRGERLMLFGGGGCASRDHSDDISDESLGGDDAEQELARRYHQQRRSPSTAPPPPSPPLLHHASAPRLRNVHPVGVNRIISVGVPRVLPDERIHRFVGTDKFVFLAREALDIFKHRGCCRSTDRQPMLCVALFRSGKRAAQLHPVDPALWACAAVMEDPRGADRRKRRMSREGAGGGTWCRGHLSFQGQDLRAAATTATGRSKSICEKKPEQVPGSERA

SEQ ID NO: 51539 - protein, 33 aa, Zea mays
  Coding DNA Sequence Number=SeqID_8164
MVTEIASLLIPSGAHPLRLLPRRLLPSLLPRRG

SEQ ID NO: 51540 - protein, 442 aa, Zea mays
  Coding DNA Sequence Number=SeqID_8165
MADPQSYLKTRNKVECSPRQKATDLVRLKEMAGPRSCVKTRNKGLHGFTSGSARWLMSWATSSGSPPEREVKGKAWTRVSTGPLLTTGSSSFRDLAEVRTLLGGSGLIRIGVWCPSVEVGTPRYILGCVVFSCHVAPFGLPMRWGQAPSSAWPGDVAWVRRLHVVEEVFRDDPEESCIGASGAKLRGRITAGGCTLPAWRFDFSTAGFDEDEGAFNRGAVACSFVRRFTFLTAGCPENEGAHNCGAVARSLRGGSPSSRFGWGAPVFSGEVRVRATPSGDLTAGELAPVVVPAVLPSSCCCLEERNLKEVGALPPLLGFKDFHHAARLQSPASGEKAFTGLAEKANFGYARPAGCKRCQLPRAWLPGSDGPRAASDAASCRLVGTWLSVHRTVTVAPCAGPPHPRLLPRHWPYWGVVQDVVRRGGGGGVLGWSCPHSVGVRE

SEQ ID NO: 51541 - protein, 129 aa, Zea mays
  Coding DNA Sequence Number=SeqID_8166
  Gene Ontology: Mol. function=kinase activity; Cellular component =ornithine carbamoyltransferase complex; Biological process=amino acid metabolic process
  Homolog annotation: Hit_ID=Q6QP54; Match level="QueryCoverage=70%, HitCoverage=37%, E-value=3e-33, Identity=72%"; Hit description =Putative kinase
MAPPVDVTGLRPRLGDVEAPPKPRSNLSSVAEVESEPLVRARRRPSAEAKAESEPWGRAKQSSSSSGAEPESEPWGRAKRSSSAEFVVFWGLSPSPSPGSGGAEFAVFRGLARVRALGRAEWCSPSSGA

SEQ ID NO: 51542 - protein, 260 aa, Zea mays
  Coding DNA Sequence Number=SeqID_8167
  Homolog annotation: Hit_ID=Q6QP51; Match level="QueryCoverage=74%, HitCoverage=98%, E-value=8e-20, Identity=34%"; Hit description =Putative growth-regulating factor 1
MQVACNRTTGGHPFDFDASSMEAQAHTSWIGKEDTPKGILLREGSGPRALLMIRGSKAGPSEGLTPRKGSIAASEHSGFAPTTDQGFEGWPLEGFDSRQRARRARDDSEYVRYMAEAQAMLPRSIQCEDRLTPYPDARSSVGKAEENSAACPAPTAVPPARVRLTTAKSSLRHNRKLRLARPQGSAPASASPDPRARPQPRPRRMVSASPDPRARPQPRPQKESRPHPTPALASGGVSASPNLGLGPTTPQGVHHYPTPS

SEQ ID NO: 51543 - protein, 367 aa, Zea mays
  Coding DNA Sequence Number=SeqID_8168
MHCDLPPSEPPDGEHPCCSRLVVVGGAQPRGGWHPSAIARLQGFSSGSPAAFPHQWSRRMVTTGSMVGRSKPGCGLCPALSFKDLHHPCCGGGRAESELYLLHGPAGHVFLQHSGERALIGLAEGRTLTTRGRSAASVVSSSMPGSLAQLALALLPVPPPTAGAERGCPPTVRVAVASCRLGGHSWTDLRLFGFDGLSSPLRSPASHPEFIVPQALRCGGCSYPREWNRSSVCNGWLSAGERVASQAEEVQQRRLEPGRVIREDQLRSHASEAVSRADVLGGQLTEATERPAEPPGQIPPKVETTPRVLLFPLSMSEPAGIDLFIGSRITYPSESYLSRKVMSEESLSSVGLAAYVYSVVFRIPLSK

SEQ ID NO: 51544 - protein, 152 aa, Zea mays
  Coding DNA Sequence Number=SeqID_8169
MGKSKKGGSSSHHSGDKRKREPSPPSKDFGDSEYSEEEFSSEPEGSPVYTSPPASSDDSDDSQGITAEVWTYIRAVERSGLEGLDESEVSSDEENSSDSFEEESGGDGDDEGDGDDGGDGGGDDNGGKGDGDGGGCKSGGGGSKASGKAPLA

SEQ ID NO: 51545 - protein, 944 aa, Zea mays
  Coding DNA Sequence Number=SeqID_8170
  Subcellular localization annotation: CTP_CleavageSite=26; ConfidenceScore=5.02e-01
MPSSSSSAATTPTTEASSEDTSGTVAAAELRPGDTVEFGVSRMSSVRVQDMQRLGYFGGGVGHVPGAEEVPEPEGELVVFEAFFIAGLRLPAHRFVLEVLQKFEVQKRKIGHKIVQFGSCTFTPKSGKSSMEVVELVPCARNKWGNWWDYWFYVSEAEVEDHPGLPATIMCSHYYVTYPPFEVAEDEENERALRIAARTSSGRDLVEEFIGYGVWPLAHGWALGEVCPHEMPSLGGQKVRSPLFALDVRGRDPAAVVREAEDGAVRIVGRYVPKTESQRCWDIRGSNDCLNRVFELNRLPYDGYPGEDVVDRRGKKPAAVTEDDPAPEAAPATKKRKLGTAVGELGVSDSFAMELMGTCAAPGGRMSSPELRESSARMLEVTGGRWPKNVPIPRAAGEDFSTSRMARDLRVFPYGPNIAAVVSAVMNKDRQDAVQKRRAVIRMVDPVREAKRARGSMKAAASGSGKLVPAAKTAAPRGSKASTGKKAAAAVGTKPLPGGPSPAKLPPPGKRVADFGTNISVEDYLGAVEGSVSAVVAAADAAAEASGRLRRLCCVGRPDYGRRRRSRESFGRSTRMLSGISRPRRARNRRLAEKVAALEAKKTDLRRRLAEERREANQAIAEAQAAQAEAKVALAKGSLASLLAEEWEARFNALRSRVDKAETSVRFRKSCGRTRSSWEAYRDLGARTAEFRKCPTARPASASLNGCRRSCWSDDNFEREIFKVEDPVVKDSAGALFDRMWGPHGREAVRERSDRAREQMARAEDVEDLGHLNGMQPEAEVNPVLPEAEVDPAPPPKTSEGSLAAPASTVSCGGSSPAPAPMAEDPPKEAAELAAEDPMAAAGSSQVQDFGPAHATAIANFVAASTVVAGNESDESVSKFSEFDDSGSSVVWTEESSDEDLDYFAALDVAAVEASPRVTDAEVFPGPSAGRRMRRAVAKCRVSE

SEQ ID NO: 51546 - protein, 207 aa, Zea mays
  Coding DNA Sequence Number=SeqID_8171
MADLPPDAHTAGLGHPPLAAGLGAAPASLAAGIASLGLPAAGQTHPMGPGRSLADAEAPYIVGLRPLRDVSSPALRRGSPPGFPALAAPPRAQHKCLSVKRWTKYKSRIKEKSNWKCLGSSSQDSAESESTGLSGGAPDSVRCARLARANWPLSEIHRRRTAIIHRTVWCAPDFPCVANPSLAPCFFVNFKCKGERLQVVEIPRKRD

SEQ ID NO: 51547 - protein, 216 aa, Zea mays
  Coding DNA Sequence Number=SeqID_8172
  Gene Ontology: Mol. function=sugar:hydrogen symporter activity; Cellular component=integral to membrane; Biological process =carbohydrate transport
  Homolog annotation: Hit_ID=Q84QH3; Match level="QueryCoverage=100%, HitCoverage=39%, E-value=1e-73, Identity=64%"; Hit description =Putative sorbitol transporter
  Pfam annotation: Domain name=Sugar_tr; Domain location=23-216; Score=- 147.4; E_value=0.0032; Accession=PF00083.15; Description=Sugar (and other) transporter
MASAELPGVERKKKSNVTYAFICSILASMASIILGYDIGVMSGAALYIKKDLKITDVQLEILMGILNFYSLIGSFAAGRTSDWIGRRFTVVVAAALFFAGALLMGLAGGYATLMLGRFVAGVGVGYGLMIAPVYTAEVSPASARGFLTSFSEVFINVGILLGYVSNYAFARLPLRLGWRVMLGIGAAPSVLLALMVFGMPESPRWLVMKGRLADAR

SEQ ID NO: 51548 - protein, 204 aa, Zea mays
  Coding DNA Sequence Number=SeqID_8173
  Homolog annotation: Hit_ID=Q6ZKC2; Match level="QueryCoverage=82%, HitCoverage=62%, E-value=3e-25, Identity=35%"; Hit description =Myosin-like protein
MSLQTNDGGAVIETPASPLPQEDILGLRQELAVIEDEIHILAKQTIPRLRVDNEMEYRDIIQGGMKLEEHMHALKLIKEEVLVLSSEKMELEALCKELSVKVQSLYRELEQIQSENKQIPAIREGLHDIQEEISRARMAYEHEKRAKVELLEGSQAIESDFINIKIEAQRLRTELEKRRSRVFKHHAFGSYYKKIEHGIASSNW

SEQ ID NO: 51549 - protein, 159 aa, Zea mays
  Coding DNA Sequence Number=SeqID_8174
MSSIPPPAGGLSAAIVVVARRWKEYHVVAVVEGHELKTPETEQRPGPEMLLETAHLELDGKLFVNTQQAPTWRANCRRFETGGSLSRRVNVPRAPAQMGRARGRARRGEARWPETGVREVEIPRPSCSSRAQVGRKERIQVYNGGVAECYVSSGGELAP

SEQ ID NO: 51550 - protein, 137 aa, Zea mays
  Coding DNA Sequence Number=SeqID_8175
MPPSATVGECSGVTVELLIAQIAQRFGLPEDVLVLRSAIFLLYLSVDETTTTCVSVRQPFHLYHLRDHFMRCMAKILQLLQAPGAGKWKRLVLGAIHVMAKAQGCGGQTGKAATRHWYINVTLPVATGYRTLRIAMD

SEQ ID NO: 51551 - protein, 130 aa, Zea mays
  Coding DNA Sequence Number=SeqID_8176
MNLFVRQITIRASPHNRSNANKSNVDMILIPGTKDDTYQKLKEENERLKMSLTQLKGKCIAQPSQDNRDHMVKKLKTGTTVTYTKSLEENVKDLRIVKKKEQKMKINASSKSLNHASIKGEGDDMKLWGA

SEQ ID NO: 51552 - protein, 253 aa, Zea mays
  Coding DNA Sequence Number=SeqID_8177
MEDPLAHGNESGFQTGQSEGLKAGKNSEGDKGYLDNLGNEEDDFNESEDDLLDSQDLEEFIKDEELILSPSQEKGKMSISATHSEDAGKEAGVKKGGSMEGEFVEGVRRSSRLESNDEMKIADKSTARAMAKDAFINKGVELGSSFNEAVENLDLIKSLELSRKNLVVQSVKCNFDPNKSVIHDSDMDNSVHNEGEDNALTDLENVMVLRKGRKIRHRKKSVRKKKDNKSPKHRNIPIKRKGLKEGLTQSCSE

SEQ ID NO: 51553 - protein, 245 aa, Zea mays
  Coding DNA Sequence Number=SeqID_8178
MGRAMRCGDGEDEGGGVDPAAWLRDAGMEWAARCEDGREGEGEGGGVDPATPWMGRGCDMRAGCEMGGGKRGWMTPLVTAARCGDGLGADRPRDSGRGKGGAAVKRPAVAAVPRPTVAAPDPEGEWRRQRSSAVVAVSRPAVAAPDPEGERRQRPCAVAAIPRPVAATPLPRRAVAEVPRSAARPLCRQAAASPKPRGGGTYKAGEQATPVDVRVATATHEARCSSERRHGRGEMRTAMIARDIL

SEQ ID NO: 51554 - protein, 134 aa, Zea mays
  Coding DNA Sequence Number=SeqID_8179
  Gene Ontology: Mol. function=drug transporter activity; Cellular component=membrane; Biological process=multidrug transport
  Homolog annotation: Hit_ID=A2ZY61; Match level="QueryCoverage=59%, HitCoverage=16%, E-value=2e-26, Identity=73%"; Hit description =Putative uncharacterized protein
MAPRWGIHGAHRRRRPCPLPHRIPHVRACVWMLSAGSGAHTPRLTYLVGGSFPDEWAGFSRKAFDSLGGFVRLSVASVVMLCLEMWYYTAVLILMGCLKNPEIQVDAISIWSVPFVLTESASAFGENTTPRTNV

SEQ ID NO: 51555 - protein, 184 aa, Zea mays
  Coding DNA Sequence Number=SeqID_8180
MVPLAPVGVFSTLPLLATWIAGVTRALSFAENRPYCILPVGELGRYVKEIGSCSWPPSPQLVDERLIGSAVGEGAHHVGVGGVGEFVSLLGEPPDVIPEAFPILLGAPLKVPGALGALVGALEVLDEGLPEVDPVVDGAGWQMFEPGPRSLRKVDGEELDDEVVVLDPHHAAREAVVFQPYTGI

SEQ ID NO: 51556 - protein, 164 aa, Zea mays
  Coding DNA Sequence Number=SeqID_8181
  Subcellular localization annotation: CTP_CleavageSite=77; ConfidenceScore=5.09e-01
MANSSTFFGDEVYAPGSRITFGSIDFLATATGELRLARPDVPTATSTGPTRSTRSRVEKRCLRRRTTGLKRCLNRLVAAAKQRAKRILPSTLVAVVGCQPASVLDLLEDDSSHASMECNSDSDEAVGRACFMATPPQNNNGGGDKEPPNQEEEYQRQRQARILA

SEQ ID NO: 51557 - protein, 66 aa, Zea mays
  Coding DNA Sequence Number=SeqID_8182
  Subcellular localization annotation: CTP_CleavageSite=34; ConfidenceScore=5.38e-01
MPPPLPLFFFPKPLSLSLPSLIFSLAAAPCPSCRPSPVRPPLQLGRPVPVSGKLIIVHDIEIGNLI

SEQ ID NO: 51558 - protein, 198 aa, Zea mays
  Coding DNA Sequence Number=SeqID_8183
MALKDGKLGLTLHTLESLFLSRVRKRHIFVAFAPRWYLTRKNKTEVREDSVLHLGSFAYREEFVPPLIFPLGFGILVSNGTDGSDNPLIELRLSASAAGRLTVLYGLRLQLRPSPSLTIRPAPRSKEGNSDGIECPFRKKDRSWLTASTFSSRDKGWGVNLSTKAAGPAAFVDSPRRNRNIATSPYCPKQGRWIKNLV

SEQ ID NO: 51559 - protein, 607 aa, Zea mays
  Coding DNA Sequence Number=SeqID_8184
  Gene Ontology: Mol. function=helicase activity
  Homolog annotation: Hit_ID=Q1EPC6; Match level="QueryCoverage=61%, HitCoverage=23%, E-value=2e-81, Identity=44%"; Hit description=DNA helicase homolog, putative
MTVEQRNEKNRKRREVSQRNKGLAIQAEASREDINMKTFETVNFETSGCSAIDFTNFATQVPNNNTSPTDNIIERERQRHRERRAKMSVDQRNELNRKRREARQQNKGQHMMSTMSGDVDEKVNVNQDDDSDWLHRNDTFKADDVFTTRDLLAPGGVHDTVGNTPNHNLERAAYFRERYKNLTPAEMEFRRERLRLYDNTPKRKGSKIEYIRKRRALLADTLSQESIAMESPIYTPEVVHPTTDAIEPDGFVVTPCDWVIPEIASNPFLPAPTQTEDVDSPHMSTGPLRRKHVPRGERQAILARRNRQFEASISRNMATTTEDTISDAGEGADCTQPHMTTENNNNVQCRNQCHGDIVATNESASMTEQGSGVDHTQSKPRVISNVDDDDGVVFEDDADENEGYLFAGQYEDTDEDIEIDGSQDESTATDVPDPYDKVYNNIPEETHMLKTVPNCGYCTAKKFEYETPGFCCRGGKVELAPLETPPQLKRLWDSADSDARHFRDNIRFFNGHFSFTSLYCCLDSMTTNVRDSGIYTFRAQGMMYHNIKSFGKEGGAEHKHLELYFYDDDPTLEHRYRKCREEHQQKDKEVIRQIVDILRGKPVLRAH

SEQ ID NO: 51560 - protein, 127 aa, Zea mays
  Coding DNA Sequence Number=SeqID_8185
  Homolog annotation: Hit_ID=Q2QSM2; Match level="QueryCoverage=39%, HitCoverage=45%, E-value=7e-07, Identity=58%"; Hit description =Putative uncharacterized protein
MKTLIAIWGKFPSGNNGSARPYKSMHMLSVKILCEALETTYPGLGRAINLRMVLVLRTVNGFASGLWARRNRMSSPGWSTVRQNRHRLGAIDGTWSGICPRTTCGGTDSASVPHPLRKKLLNHHKIK

SEQ ID NO: 51561 - protein, 156 aa, Zea mays
  Coding DNA Sequence Number=SeqID_8186
MDLHGEVDLAVAVRGGVRGQGGAVANPTRNVGALIEEDSAVVVRATVGSEEVGAGDGVELVTPSVPIAGVRILSPGSEGVGRLGDFDDDVGGARQLERPRVNHDLDSVEDVEIVQPHSRDTGGAEQLGDLRLDEIILRPGVSLDDHVVDADAHGVR

SEQ ID NO: 51562 - protein, 151 aa, Zea mays
  Coding DNA Sequence Number=SeqID_8187
MARAAARARSEEAGRRRGVTAWEKDANAKRSGGATCPRKPYAQGLQQRVRTPMGGIQTPLVGPAPPHVQAGPPGRDPNPPCRGLGHQQGILVLQGRTCSRPYFGPGQGSDDAMWPLGARCEPLRRSKTSVRIKCKATEACSDQVQGMGRSL

SEQ ID NO: 51563 - protein, 247 aa, Zea mays
  Coding DNA Sequence Number=SeqID_8188
  Subcellular localization annotation: CTP_CleavageSite=36; ConfidenceScore=5.23e-01
MAALNGSAGFLATSVQSLEQGPPCASLLLRAPVWCRSDLVSVHHGLVFGLPAARCSSSRAGAVDVSLGSGSGSSISVNLPPCRSSLGHAEEAVDVFMPLPHGPRSGTRFRAVGASWRGRCCLFPHWEILRGRVEVRTVRPAATWRHRTPARVQSRAWSMSYPGALGSPVGDLDPYKWGPDPYLGVRLVHVEVLDLPGGLDPIHGGPEPAHGGPDSLLKSLSIWLSWTHGTIGPARRAGAGPEAYGLS

SEQ ID NO: 51564 - protein, 135 aa, Zea mays
  Coding DNA Sequence Number=SeqID_8189
MSRGELCNSPPAKVIAAVASVWKRVGTGLRKESASIEEAHASCVEGMLKKSIRELGVQTVSLRDGLNGGGRKGRRKVPLWTDVLRFTDPKVGNALRSLDFMADAYNMPAAEAKPVAIVISITIKGDRTGSRHWAE

SEQ ID NO: 51565 - protein, 215 aa, Zea mays
  Coding DNA Sequence Number=SeqID_8190
  Homolog annotation: Hit_ID=Q7XBE0; Match level="QueryCoverage=68%, HitCoverage=15%, E-value=1e-13, Identity=32%"; Hit description =Putative gypsy-type retrotransposon
MAVFLQRMGDSGGDQLYVGSANFQIRFGRKAEYFKIPLPSSERYEGEWFYVRNMAGSAPQFTGREPVSTEEWHHGVEASFKSEVEHLLTAIKTLKQQGLTGARLVRVFMHRGVQPLMACQKPMHRNSGVNDLDRHSSEPLALTEIEAWVKVIMTLSLGSFMDEDSPLPLSKGVASSLVSFFFLVFFLFLWPSSSVMFVRGSAWDRAPSALPSTPS

SEQ ID NO: 51566 - protein, 588 aa, Zea mays
  Coding DNA Sequence Number=SeqID_8191
  Gene Ontology: Mol. function=nucleic acid binding
  Homolog annotation: Hit_ID=Q8H912; Match level="QueryCoverage=40%, HitCoverage=24%, E-value=3e-08, Identity=24%"; Hit description =Putative zinc knuckle domain containing protein
  Pfam annotation: Domain name=zf-CCHC; Domain location=382-399; Score =6.3; E_value=0.17; Accession=PF00098.14; Description=Zinc knuckle
  Pfam annotation: Domain name=zf-CCHC; Domain location=401-418; Score =11.0; E_value=0.034; Accession=PF00098.14; Description=Zinc knuckle
  Pfam module annotation: Pfam domain module=zf-CCHC::zf-CCHC; Domain location=382-399::401-418
MLLRALIFPDDLLPLLPWSVAQSLLCRLALRSPADLLPAFVGAAHAPRSDDAHPVTKWKGACFFENRAWLEFRNGTGRGLGGGVVHVEHTVFSFKEPEVLHPHSHGTSTPSWAKALGVDGRYGSPPLPHPEPSATKIAPNPNPPKTTRNHAIQSTNPEAPSLDLLSKGIHYGSLRDVEAFQAGKALSSSILVSPRKINPELQGHARRVLENLVQDVHLHGHGPPLSQQGAAAPNLRHKDRANLTAERDFNASSNGDGVAEQALREDPHNTILRKRIPASEKMKWTVDNDPPCLKAVRVRSALKAPSVGFGEVNLFGSAGNGQHRTSHPSAGKFSMSSMEEEGWVVVKPRFWWRGKIINHGGNLFHQEDEVKRASFFKKKFQGKCYNYLLTEHYAFRCWAPPRCWCCLRSGHKAESCPDKINLVKSNSKNNHHDSLKHSLRPIHCQGANNTTHTVQQHRPSTTALQKGHEQLQRQPHNLLPRHNSKSYLEAAQGNQDMAARYPGDPRARPSRAFCAISVTSNIRRRRDELINKAVVCSYDGRDTKGGPPNRKSRREFVWSYGAPIGEKCDRAEDSRGREVNRRDWRDDV

SEQ ID NO: 51567 - protein, 205 aa, Zea mays
  Coding DNA Sequence Number=SeqID_8192
  Gene Ontology: Mol. function=phenylalanine ammonia-lyase activity; Cellular component=cytoplasm; Biological process=phenylpropanoid metabolic process
  Homolog annotation: Hit_ID=A2X7F7; Match level="QueryCoverage=45%, HitCoverage=13%, E-value=1e-40, Identity=90%"; Hit description =Phenylalanine ammonia-lyase
MGNGTTVGSGLASTVLFEANILAILAEVLSVVFCEVMNGKPEYTDHLTHKLKHHSGQIEAATIMEHILEGSSFMKLAKKLGELDPLMNPKQDQGNAYRDGAIRRATLHVKSATRYTPQIMPSLHPSVAQMKRAWILAITIAEQQLLQAEFDDCVSANSSGATCCRTIALTLMLLLLVRHVIVVVRDVSMLQDATVLFSVSFSTPT

SEQ ID NO: 51568 - protein, 37 aa, Zea mays
  Coding DNA Sequence Number=SeqID_8193
MLSPLAPHLTKLFQKKKEPSIAKKAAGLKKRRIITVT

SEQ ID NO: 51569 - protein, 212 aa, Zea mays
  Coding DNA Sequence Number=SeqID_8194
MATREPPDQILKVQIRSREGKLDSRVYSSRGTLGHFRDQRERSSNGIPSEGGIEPSDPVARGPGPTDHPQRLGGCSRKPGSGRTVDSVNIPARELGPRPCTRATASSHEGTTRPAEALRKALRPRRSETTPPRPRGLHPAGALARTHRNQMQPRKAGPLAKKCDESLQASANTPFEARGLLSGTIIRGTLKTPNSQLVTPISIKLQRPDGCD

SEQ ID NO: 51570 - protein, 664 aa, Zea mays
  Coding DNA Sequence Number=SeqID_8195
MQVVELVPCARNKWGNWNEFWFYVAEGTVEGHEGLPVSEMCSHFYSAYPPFEVAEEDVDEGALRCAAGLSSGRDLVEEFVAYGVWPLAHGWALGEVCPRQMPFHGGRVVRSPAFALNLQNRDPAAFVREAEDGAVRLVGRYVPRTEGQRSFDIRGSNDRLNRVFELNQLPYDGYPGQDDMDRRGKKPVVETGDDPAPAAAPSSKKRKLGTAMGGLGVSDSFARELMRTCAAPGGRMSSPELRESSARMLRVTGGCWPRNVPIPRAAGEDFFTSRMVREWRVFPYGRNIAAVVSAVMDKDRQGAAQKRQAVVRLVEARPKRQRGSAKAAAPGGGKPPLAAKSGAPTSSKAPEATAGAGGTKSTKAVPPASRVPEVAKAARALPSAGKRVADFATDISVEDYLGESAPSSCRSGSSPLESRVERAEAATRAEAERTHTQLMDTYRELGARTGDFEVPDREPGLRCLEWVQEELQALPTVVEGFMSYASLVTCDGAMNALSREGCRHFEVFDQADEDFERDVYKVEDPVVKESAGAIYDRMWGPHGREVVRERAETAMAQAARGERVDDFGALNSALPDPEPTPAEAVSGVALEPTPETAEDAPDAPASAAAGEDLPPKVAEGAPDAPAAAAPSAEDPAAVAAETTAEATTEPTAEAPATSGPSQVA

SEQ ID NO: 51571 - protein, 296 aa, Zea mays
  Coding DNA Sequence Number=SeqID_8196
  Gene Ontology: Mol. function=heat shock protein binding; Cellular component=membrane; Biological process=protein folding
  Homolog annotation: Hit_ID=Q0PMD7; Match level="QueryCoverage=69%, HitCoverage=60%, E-value=9e-79, Identity=61%"; Hit description=J -domain protein
  Pfam annotation: Domain name=DnaJ_CXXCXGXG; Domain location=66-144; Score=95.9; E_value=1.2e-25; Accession=PF00684.10; Description=DnaJ central domain (4 repeats)
MRRLEFAFLFKVSTPPRRSGGRRRSMIGRSETHKRWLRRELGITKDVTSLVQIIKFVQLHAHLNGGAESFLNVKSCKGSKSGASSRCAGCQGSGFKVQIRQLGPGMIQQMQHPCNECKGSGETISDKDTCPQCKGDKVVSEKKVLEVVVEKGMQNGQKITFPGEADEAFVLTHLDNRQLLIKPNPGEVVKPDSFKAINDEGMPMYQRPFMKGKLYIHFSVEFPDSLSLEQCKALEAVLPPKPISQYTDMELDECEETMPYDVNIEEEMQRRRQHQEAYDEDDDVPGGGQRVQCAQQ

SEQ ID NO: 51572 - protein, 426 aa, Zea mays
  Coding DNA Sequence Number=SeqID_8197
  Gene Ontology: Mol. function=structural constituent of ribosome; Cellular component=ribonucleoprotein complex; Biological process =translation
  Homolog annotation: Hit_ID=P35684; Match level="QueryCoverage=91%, HitCoverage=100%, E-value=0.0, Identity=95%"; Hit description=60S ribosomal protein L3
  Pfam annotation: Domain name=Ribosomal_L3; Domain location=87-380; Score=664.8; E_value=7e-197; Accession=PF00297.13; Description =Ribosomal protein L3
MAMGKYPPGITTPYPYPRHKNNPIGSPIYTGKEEEGRMSHRKFEHPRHGSLGFLPRKRSSRHRGKVKSFPRDDPKKPCHLTAFLGYKAGMTHIVREVEKPGSKLHKKETCEAVTIIETPPLVIVGLVAYVKTPRGLRTLNSVWAQHLSEEVRRRFYKNWCKSKKKAFTKYALKYENDAGKKEIQLQLEKMKKYASVIRVIAHTQIRKMKGLKQKKAHLMEIQVNGGTIADKVDYGYKFFEKEVPVDAVFQKDEMIDIIGVTKGKGYEGVVTRWGVTRLPRKTHRGLRKVACIGAWHPARVSYTVARAGQNGYHHRTEMNKKVYKIGKAGQETHDASTEFDRTEKDITPMGGFPHYGIVKGDYLMIKGCCVGPKKRVVTLRQSLLKQTSRLALEEIKLKFIDTSSKFGHGRFQTTDEKQRFFGKLKA

SEQ ID NO: 51573 - protein, 123 aa, Zea mays
  Coding DNA Sequence Number=SeqID_8198
MTKVSAYRRWSKGFTGGTGHSPCKITPMPFTFANNFKDLQKTKTPNRKGIRCKDYGGRKKNKELGWFEKKRYKGSSSLISCEKQTIRIEFLSLQGILPGSKSIDHHRSRYQDEYNQFLTSREC

SEQ ID NO: 51574 - protein, 545 aa, Zea mays
  Coding DNA Sequence Number=SeqID_8199
  Homolog annotation: Hit_ID=Q5Z644; Match level="QueryCoverage=20%, HitCoverage=12%, E-value=1e-07, Identity=36%"; Hit description =Membrane-associated protein-like
  Pfam annotation: Domain name=Extensin_2; Domain location=127-405; Score=-142.2; E_value=0.1; Accession=PF04554.4; Description=Extensin- like region
MGVAPSTSLFRHFFVLVKSGKAKDHFGAYYFQTRSDPAVAYIPSLGGTWWENWCGDWVIASAEANDRLALSSDGPRLNRKLWMARSSLVPELQLVLDRIKSLAAGGLTSMRVRGPGTDLSWEELEVLVKGITGLRTMILATLSTPDKSGVAVRQTAPPPELPAPPPWPPAPRTRAKGLQAAPPPWAAPGCRRKRGDAGCAAPTNRSFRTPPPPLGPRRPAPRSVRGLLVGPRRTTPRPRARRGASVLRHHNRWVCRHHNHHHRRARRRLQHLGMISPRGTTSSNNSSRNISSSRSSGRPASRVAGRASSPSAPKVVPPSPPAAAAETAQLGPQAPAGGPAAAAPTPSGVAAVEGVPTAPTAATASTKAMSSSTPLVAVEEALAVPAAAIEVDEGGASSSNPPPTLEETEVIFGRWLRSGVEPEAAPVPLPRVLSRAHQALQETEAAILWEWEALEAEHQRLSNCRAQLEERTKAASRYGSSRPRLWRACRGYNRSWMTGPTALPWPRRTSRKRMPPWISGRRISAEEKERALEERVRQFKAAQAA

SEQ ID NO: 51575 - protein, 123 aa, Zea mays
  Coding DNA Sequence Number=SeqID_8200
MTLQSQPDSATRYPMLFIQLHRVQKGRRVTGEVKHFPQDGRKAIVREEVRAETSVSSAGGVLDSSQAFELRFEGHVFVISEEKMSQDKKTVAETKLTEEEKLLEEKTAGFVESIAKTKYREDY

SEQ ID NO: 51576 - protein, 76 aa, Zea mays
  Coding DNA Sequence Number=SeqID_8201
MKTLTTFSGYHPLEMVMHPLGLFPAEKKDDPMWCNRALQSDAMAHLANLTQTTKLTLDSREDFVVDLSSNLVEKDL

SEQ ID NO: 51577 - protein, 273 aa, Zea mays
  Coding DNA Sequence Number=SeqID_8202
  Subcellular localization annotation: CTP_CleavageSite=12; ConfidenceScore=5.15e-01
MAPRRFSQPSTSSSHNRALGPRHEIPCMLLKFPAPAVPGQISLQLGPALCVCSSLLSSPACRAPFVPVSRALASPELPCARLDLLPPRRSAVRTASSRTAPPTRAPPSSLCPWFFPLRSQPSKLPTLAPDLPWLYAPSQLCPLFGVFAPVEPAQPPFFPSLDLPARLAPPAPWFSARLAGHGGYACLLAVDGSAQATVAPREMVRVPAPGFRFRRADLCSVLAIFSASDLWRRRKLVVVLRSARFHSKRRPSSSRPWRTRTSVSCPLVHAVDP

SEQ ID NO: 51578 - protein, 87 aa, Zea mays
  Coding DNA Sequence Number=SeqID_8203
MPAARWGAVLGRLLVPLADALRELDDLTALGGAVATVGVHKACATVTLYGRGRLLRSLRLPVAAATTGAAVCGFSWPWFFFFFFLPS

SEQ ID NO: 51579 - protein, 107 aa, Zea mays
  Coding DNA Sequence Number=SeqID_8204
MGNGHEPVQGRPADDGVEGEVNLRDVELNVLRAEVLLGPKCYRECDAPEGVHRLWAHSREWARGSQLGPWDLQLLECNMTDDVEAGPSVNQNMVQPHVGDDRGGDER

SEQ ID NO: 51580 - protein, 352 aa, Zea mays
  Coding DNA Sequence Number=SeqID_8205
  Homolog annotation: Hit_ID=Q6QP51; Match level="QueryCoverage=52%, HitCoverage=95%, E-value=5e-09, Identity=31%"; Hit description =Putative growth-regulating factor 1
  Subcellular localization annotation: CTP_CleavageSite=45; ConfidenceScore=5.24e-01
MQAACNCTKGAHPFDFDASSVEAQAHTSCDTFGRRSGRRFTSAIMAASKKGLGKGTLRKGSFSVKEAGPEPSYGSEVRRLAPRKGSIAASEHSGSAPTTCQRLAPEGFDSRLRARRARDDSGYVRYMAEARAMLPRAQSTQGTRSRLAGAQPRAKAADPGGFTSRPRAPSSNGRTFDSPDAQLGQASRRSNLGQIATPTDRIEAPPRLTPELGAQPRRRTTNSASPEPRARTQPRPRKTDSASPRPQGSNSTSTSDDGLRLARPQSSGSTSTSDDKLRLARPQGSDSTSTSDDGLCLARPPGLVLNLDLERRSPPRPTPGPRLDLDLGGASASPDLGLGSTTSQGGPSLSYP

SEQ ID NO: 51581 - protein, 120 aa, Zea mays
  Coding DNA Sequence Number=SeqID_8206
MPRRLYLLLRRGGRSLLLQLLACGAPAPRAGGNDLRDQADLASARSVTTGSWFSDCIGASGLLVVVGSQGSTSAKSELSLLAERSGTSATSVVQHLQVPRIASHWHEADAPEDERARKGL

SEQ ID NO: 51582 - protein, 127 aa, Zea mays
  Coding DNA Sequence Number=SeqID_8207
MSSSGQTSVTKQWRHGGEHILSRVAHAIARPAAECGLRDGPSATKHGPNRPTNRKRPKPEDGLRGVDVCSEHYSISEQDSTEAAMQDAARLNLVVVLNTELDHTLDELSRARAEVDELRAEHVECRH

SEQ ID NO: 51583 - protein, 122 aa, Zea mays
  Coding DNA Sequence Number=SeqID_8208
MSIKAAGPTEAKRAGTPFAGLDTLTKTCGDVLTRRGLIQPQGPPESKFQHLAPTVRATTKPPAMAPKRANPKADEAAKAALLAARKGKALALTQSTHQEPIAFRFPTPAKTTPSAPAEPTNL

SEQ ID NO: 51584 - protein, 82 aa, Zea mays
  Coding DNA Sequence Number=SeqID_8209
MAVSERGVKGGATPAGASLSEIFGAEQWKCNEMNNIPILFTLDWNCIHAFTFEQAEDLFKTFVRGSLYPKGDNASKDEGHYV

SEQ ID NO: 51585 - protein, 276 aa, Zea mays
  Coding DNA Sequence Number=SeqID_8210
MVMELPLDAQSSGRRLDVDERVEQCCAVVGVLHVLARFVLVLQMQLLRGHIYNREKGHFWDYCPTMTKPKKERSKGKALTSVRTWDDSSSEDEPPRTRSHRSSSRSSRSSHKCLMARGLLEKFETFANLNCELSTKIELLESSAPSTATDDGLIKKNEKLKAKLASSQGTMENLLEKMEILSIHNNELTTKLENIGSTPAASLVEIPKIIKKDASTSCFDLIDNSNPCNQVLVENIVVETCSDEVAKENEQLRQEVARLGKALYDKKGKAKQIRPL

SEQ ID NO: 51586 - protein, 110 aa, Zea mays
  Coding DNA Sequence Number=SeqID_8211
MQVACNRTKGAHPFDFDASSMETQAHTSCNRRAGYYVQETAPPLASLPCLLDCGTSTATRAGTGKGDTPKGILLRKGNGPRAPLLIRGSKAGPSEGFNDRLRLLGLRAHY

SEQ ID NO: 51587 - protein, 38 aa, Zea mays
  Coding DNA Sequence Number=SeqID_8212
MAGEIIQRSEKGIHNAREVAKAAEKSTEPEVLNLNFRL

SEQ ID NO: 51588 - protein, 136 aa, Zea mays
  Coding DNA Sequence Number=SeqID_8213
MALPVDVAGLCPRLGDVEAPPKPGSSLSSMAEAESEPLGRVRRRSSAEAESEPLGRARRRSSAEAESEPLGRARRRSSAEAESEPLGLGEAEFVVFRGLSPSPSPGSGEAEFVVFRGLARVRALGRAERSSPSSGA

SEQ ID NO: 51589 - protein, 33 aa, Zea mays
  Coding DNA Sequence Number=SeqID_8214
MESESQPQHQKKGEELAADLAMPVDGVFTCDDA

SEQ ID NO: 51590 - protein, 90 aa, Zea mays
  Coding DNA Sequence Number=SeqID_8215
  Subcellular localization annotation: CTP_CleavageSite=26; ConfidenceScore=5.21e-01
MAKARAMLPRVKLTTISHYLPQVQPRAQQGAPPRPTLGLGLSLGLGKRSPPRPTLGLGLDLSLDLRRSLHLARPRPRTDYATGDTSLPYP

SEQ ID NO: 51591 - protein, 66 aa, Zea mays
  Coding DNA Sequence Number=SeqID_8216
MGSTLVSISAKQKPYLDSHMTRIPLCQRTGAEEEGVLSRSEPLNRRRCPSNSICRPAPDVDRADVF

SEQ ID NO: 51592 - protein, 307 aa, Zea mays
  Coding DNA Sequence Number=SeqID_8217
MKCRLVPGHGCSVFSSSSEEGGGANPDVPLLPWGDVVIEFATAGRADDRRCCRAARGEYHVVAAIVGHELETPEVKHRPGLKRLLKIVHLELNEKVFVYTQQAPTWRAKCRPFGPARTLNRLRVENNRRHGRTQGTIITYYRKTSPEAEAEVGRGCDSSRGRGRGPRSGEAETFSRGRGLGSGEAELPVAPEAELGGGRDLLSIRCEAIPALNAHAIQSVGKAIWLRSLHDKVCPSLASGEPRVRPLPEEALGRGVNPSGTTVLARGRARVRRDCVPEASTLTRAYRSLRSILRMFSSQVKEHWGYP

SEQ ID NO: 51593 - protein, 97 aa, Zea mays
  Coding DNA Sequence Number=SeqID_8218
  Subcellular localization annotation: CTP_CleavageSite=57; ConfidenceScore=5.40e-01
MAPCNSPLPVHGRQPLLLFTEPSSSSLPWWMLSARAPSPACVLLRRAPLMLAMCSAKCAASRATQQPIRDAVKTLASGQRRALPVRRNTEPCGQPCV

SEQ ID NO: 51594 - protein, 103 aa, Zea mays
  Coding DNA Sequence Number=SeqID_8219
MEFGVPGPRAEEAGVEGVEEVSGCSLEASARWALRVPVGESRGEGGDRKEGSRTPCAGEEGEDAMVGRSPCQPLWGKKGAMDKSWRRLFQGLGQRPSREVEAP

SEQ ID NO: 51595 - protein, 26 aa, Zea mays
  Coding DNA Sequence Number=SeqID_8220
ARSASLRQTVEPEASSASSPPLGRIF

SEQ ID NO: 51596 - protein, 107 aa, Zea mays
  Coding DNA Sequence Number=SeqID_8221
MADPPGTELFRRKNPDRYKVEKVGFRDNRHMVTCKRQLTVGVDGRDDRDGRTRSFPLGRHFNLAGERSGSSVARKRRRPGRRKARTRAQNVEAHDSTVHIGFSEARY

SEQ ID NO: 51597 - protein, 447 aa, Zea mays
  Coding DNA Sequence Number=SeqID_8222
  Gene Ontology: Mol. function=nucleic acid binding; Cellular component= nucleus; Biological process=chromatin modification
  Homolog annotation: Hit_ID=A3BJE1; Match level="QueryCoverage=59%, HitCoverage=40%, E-value=2e-61, Identity=49%"; Hit description =Putative uncharacterized protein
  Pfam annotation: Domain name=RRM_1; Domain location=124-195; Score =38.4; E_value=2.7e-08; Accession=PF00076.13; Description=RNA recognition motif. (a.k.a. RRM, RBD,
  Pfam annotation: Domain name=YDG_SRA; Domain location=19-151; Score =40.2; E_value=2.4e-09; Accession=PF02182.8; Description=YDGSRA domain
  Pfam module annotation: Pfam domain module=RRM_1::YDG_SRA; Domain location=124-195::19-151
  Subcellular localization annotation: CTP_CleavageSite=8; ConfidenceScore=5.07e-01
MTSAPPARCSPPATGSTARSASSTTSPGVLVGDAFYYRTEICIVGLHTATQADIGYIPRRLLDGGQSIATSIVSCGGTLERGNLALHNSYQYGMEVCVIRCRDVDQGPHRKVYVYDGLYRVKSVFLDGVPPHWDEDKVREIFRKFGEIDSIQLARNMFTAARKDFGFIGFTARQSALDCIKMVNKDGVGEGSGKVPIKASLQRPRHAFKKYSRQGSSSLLGVRRGFVDKSSSGRGHHSDRYRHFSPVRHSYSDNHSRRHSIDVEERHTSVRGYRAYYRRDSPVHAPSYKYGRTHLETRISEEYAEGRYTSKYPKHRYAMHGTMERDAYRRIKYGHSYQERAHRTCPDCKLCGQNYNYPNGEEFSAISGCQEAYYQTDRDLIPSTSQVASHCEGSCCKVRSLTLDVRVWEPSVINLFQSLVYMFVNSIWEETLPDDNSSNSMSIALQC

SEQ ID NO: 51598 - protein, 199 aa, Zea mays
  Coding DNA Sequence Number=SeqID_8223
MSGQFTTSLRVMTEEVSCRGHSILHNLRGSNKALSDRQLQEAEAPEASEKDMGISQERSTAYFVVKTRAILQECAKSPFKSRRRSQKPKPGKINRSRSCTLLRVTHPTYQNMWVIILQLLLLRLVSHRLFGHSFHLRHHYNLPIHEVSSQKGANRPISSEISGRNPKLAQSTVLCQNQNTSIERYPTSEAFLHSLSFSF

SEQ ID NO: 51599 - protein, 112 aa, Zea mays
  Coding DNA Sequence Number=SeqID_8224
MGVGKGRLVAVVGGEQLPSSSINSALASPAFSHLLLLFAVYPPLLPSISNMGKSKKGGSSSHRPGDKRKREPTPPSEDFGDSEYLEEEFSSESEGSPAPASPPASSDDSDDS

SEQ ID NO: 51600 - protein, 57 aa, Zea mays
  Coding DNA Sequence Number=SeqID_8225
DLDKIGQGFTSADPLEEIDIGDGIKDEIHRLLEVDFIRPYRYAEWVSNSVPVEKKES

SEQ ID NO: 51601 - protein, 91 aa, Zea mays
  Coding DNA Sequence Number=SeqID_8226
  Subcellular localization annotation: CTP_CleavageSite=63; ConfidenceScore=5.23e-01
MAVGVSEALYAKAVSPDLLTGNRWGRLINSASAFGNQTPQPNNCMSRGRGVDSFTPGSLEDMVAGVTWPSILPPGWTVEWDPTSVEEEHEE

SEQ ID NO: 51602 - protein, 363 aa, Zea mays
  Coding DNA Sequence Number=SeqID_8227
  Subcellular localization annotation: CTP_CleavageSite=53; ConfidenceScore=5.04e-01
MARARAYKAHSGVDHTLPRTLKPHRSSTHRRLPPSEKTEHTSVKLPERGIEVCFAGEASPRSPEFTTPPECMDRMTSHESSDDGNALSHTDGLAREGFPRILWEVLQEAGYTTPPQYAVQQFEKHRVPRCRVRMTLEPHPLQPGWRSLDSESFGYRAEDTIEVIALHGLTTFCGFHPLELSTHPIGLFPAEREDDPMWKDRVEHTKDIWAIYPGQTAHLTVRCMNALYHLQVMRGEAMSHLMALLEATKITLDNREELVVDLSTEMVEKDLQVEQLSNEIQELEELVGTRENTIEVLEDQLINTQQQLAEANEHLDMHHQETQDMEANEDVDIEGGEEPASSVDIAGSGRPPSPESSVASFAH

SEQ ID NO: 51603 - protein, 157 aa, Zea mays
  Coding DNA Sequence Number=SeqID_8228
MGKSKKGSSSSHHSGDKRKCEPTPPSEDFGDSEYSEEEFSSESEGSPVHASPTASSDDSDDSQGLAAEVWTYIRAVECAGLEGSDESEYSSDSSEEGSGNDGGDGDDDGGDGDGGKGDGSGGDDGGKGGNGDDGDGSKGSSRGSNKGSSKGSNRASG

SEQ ID NO: 51604 - protein, 96 aa, Zea mays
  Coding DNA Sequence Number=SeqID_8229
MATEQGHGGIRRFGERRLILAQFRCTGPLRGKVGSLLRLLLKSIGPSGPVSIQSCVNPPYWTFLLGPRKNDLTNLLGPWAFVRFMLQRSAFFTIEL

SEQ ID NO: 51605 - protein, 77 aa, Zea mays
  Coding DNA Sequence Number=SeqID_8230
MAEEVRGPELRACTCAEASRDTPRTPAWRSGADGNRAPTRSQGSTAMAGERRRVSREKGAPGNELATAWPMGDDGRQ

SEQ ID NO: 51606 - protein, 146 aa, Zea mays
  Coding DNA Sequence Number=SeqID_8231
MWFVCSVVKPRIYCLRIGIKMSSHDAKVLQNLVLNLASSVETGALNIRSFLEEAFHHLGDEHYLLNALLAIRKEIDLMEQDALENKARSDPEKERMEEEIKLVEAVNPVPRQFPFTPTPSSPELYEASDNDSYDSDRSTRYSIWNL

SEQ ID NO: 51607 - protein, 112 aa, Zea mays
  Coding DNA Sequence Number=SeqID_8232
MEDREWMYMGRSGQGQVTNEWINKTDAFLERAFEAQLKEERRHHLELDARMRSKQQRTEDILRYIQSATGVAPPPSLFTPNPPPSQFSTPNQSAASNDPHVSPTEPNCVRRL

SEQ ID NO: 51608 - protein, 353 aa, Zea mays
  Coding DNA Sequence Number=SeqID_8233
  Gene Ontology: Mol. function=oxidoreductase activity, acting on the CH-OH group of donors, NAD or NADP as acceptor; Cellular component =mitochondrion; Biological process=metabolic process
  Homolog annotation: Hit_ID=Q67U69; Match level="QueryCoverage=28%, HitCoverage=26%, E-value=2e-18, Identity=51%"; Hit description =Formate dehydrogenase 2, mitochondrial precursor
MSLDTKLILNAISELFDKFDARWSMRDAAREASRRVPVPTQCTVVGADVVADNWGNLFDSGVDSDEQRYEEPINADNWGGFFDGADVSANAEFAGHWDNPSSNPDATAYVTPEVAVESVHPAARGRFFNDDSGAPLDSDDDSSVHGGHGSVMSHLLEREADTAFLPHLDQRDGVEAWLILRRCTPASFNVASTDPNNEVSSAVTADALAKAAPALFASRAPRPSLKYLELLLQAEIDFDHIDLPTAAAAEHIVAQVTGNNAVSVVEDQLRCTLFLTRNFLSSHHQAVSKEWDMVAVVHPVCNVGEKKVDAICTGQIEHLLLHHLKRSPTSIGAKAHLLLKKIHQYHSSSFAVD

SEQ ID NO: 51609 - protein, 267 aa, Zea mays
  Coding DNA Sequence Number=SeqID_8234
MGYPRQGPQTSTKSPLGGKETTLSHDSPKANLGWKTKSRLTRGYRRAGDIVMARLWPTLDEERITDSPEGISRDAPEGARLRRPTLRGGPTDQLSDSPECVSSDAPEGDQLRQPTLRADKATNSLSSNPTRQRAEYGASDPLAAARAHRWSTPAASSARSSKYRAKPSWSVVPSPTPCLLFGPMCPTSLIRAYTSLGALDHPSPRLGLLAGVTPTRPERPLYRLLASSPALTVKTLPLSSPDSPKRSWPAPATSDPLEPAPASSPAT

SEQ ID NO: 51610 - protein, 143 aa, Zea mays
  Coding DNA Sequence Number=SeqID_8235
  Subcellular localization annotation: CTP_CleavageSite=17; ConfidenceScore=5.36e-01
MAARSASLCSVAPASASASALADSSRADSSSANSQKKDLKHKQRKQTRTRTKDGQGVPPARARCSEAATWAAAKSAARVSARLSASAARPRDWSRSSTTWTNSDRCRCTSARATAPLRAPLPPPRAPLPPRLSGIFGFESISQ

SEQ ID NO: 51611 - protein, 445 aa, Zea mays
  Coding DNA Sequence Number=SeqID_8236
  Gene Ontology: Mol. function=oxidoreductase activity, acting on single donors with incorporation of molecular oxygen, incorporation of two atoms of oxygen; Cellular component=chloroplast; Biological process=abscisic ...
  Gene Ontology: Biological process=acid biosynthetic process
  Homolog annotation: Hit_ID=Q285R6; Match level="QueryCoverage=63%, HitCoverage=46%, E-value=1e-111, Identity=67%"; Hit description=9 -cis-epoxycarotenoid dioxygenase 2
  Pfam annotation: Domain name=RPE65; Domain location=1-344; Score =233.7; E_value=4e-67; Accession=PF03055.6; Description=Retinal pigment epithelial membrane protein
METKTHAPCEAHLPICTRPISHGNPNPQPRHPALRPRPWLARLHPRPWPPVPCAPAACQPPPPQPSLKYFYFTADGRKSPDVEIPVDAPTMMHDFAVTENHAIIPDQQIVFKLQEMVLGGSPVVYDRNKTARFGVLPKRATDVSRLRWVDVPDCFCFHLWNAWEDEATGEIVVIGSCMTPADAVFNESAAGEESFRSVLSEIRLDPRTGTSSRRAVLSDADQVNLEAGMVNRQLLGRRTRYAYLAIAEPWPKVSGFAKVDLEAGTVEKFIYGDGRYGGEPCFVPHLNAPAGAAEDDGYVLCYVHDEGRGASEMLVVNARDMRAEAAVKLSGRVSYGLHGTFIASKNICSLQSGDQQEFGDGAKVEHAGQIHVCEANAGGLKVSLNGLEELVQTSDWTQVDLNLDQSLSQVGGYFCLLTRSVVEYRFKFKTVVALLIYKRTLNSHN

SEQ ID NO: 51612 - protein, 457 aa, Zea mays
  Coding DNA Sequence Number=SeqID_8237
MSCSSRGWSRLVYALQLDRYNGGWFVSLIRPPVAEEQWPLLGHVASVLKMDPKGRNPNWDRWGPKDVPQGSQSWGKNRNLTWRLKPNLGKSDNKEDILTSSGDGGQSGTTIGAVEEVDILSLDTKDIVRFKVHVKSVAMIPPIIEVGVKPFLYDIYFKIDNITDEGWNDDSINLGKRASVDRQGFGDPTFEKSSKKARNVGDNSEKEDLRLENIGDIMSQGKNSGRCFEVLDGMEDVKPVDEDKGYDDNPINEEDDFNESEDDLMNSQDLEEFAKDDDVVLPFPQDKDNKILAVTQSEGVVKNDGEKAMNMEVDHVEGIRRSNRLESNDEMKIADKATARAIAKDAFINKGIELGPSSTDSVVNLELIKSLELSRKNLAIQSIKSPLGPSVPVVSESEVDKIVQNDEECNELTDTENVMVLRKGRKIRHKKSAKKNLRYTPNKGRGVYSDLIPNLPE

SEQ ID NO: 51613 - protein, 102 aa, Zea mays
  Coding DNA Sequence Number=SeqID_8238
MIDLKVESYKYYPWLKVHPDTLELKDVVVYRCSAWCLDPSLVPASRELWIVEPPFAVDGVSSGRRMLMYPIRITFSSAPRRDGSDPKLHAITSGGDGSGHVQ

SEQ ID NO: 51614 - protein, 102 aa, Zea mays
  Coding DNA Sequence Number=SeqID_8239
MATATAAPASVARRRIWGHARDGGSLRRDGGSGDTLAMADSCGATTNLGTRCGIGSRGHARGGGPMSFSENPVVGRIWLWGESEYCYNYVWRKIKLVIGLRI

SEQ ID NO: 51615 - protein, 632 aa, Zea mays
  Coding DNA Sequence Number=SeqID_8240
MPFHGGREVRSPAFALNLRNRDPAAFVRDAEDLAVRLVGRYVPRTEGQRSFDIRGSNERLNRVFELNQLPYDGYPGQDEADRRGKKPAVETGGDPALAAAPSSKKRKLGSDEGQLALAAPGAAIVTAALAPKARGETPGVGGEVSALTLVRDEAGVATRRLKGVTEALSQATEALSQVADFTSRTASGALTAALSAEVERLRTQHADAVREKSASNSKCRKLADKVAALEKEKADLRRQLAGERREANEAIAKEQAAQAEARLARAEGNIAKELAGELQGRLSALESRAEGAEAAMRAEAERTRTQLMTAYRELGARTGDFEVPEREVGLRCLEWVQEELQELPTVLEGLMSFTSLVTCEAAMNALSREGCRHFEALDQADEDFGRDIFEVEDPMVKESAGALYDRMWGSYGREVVRARAEAARAQAERGERVDDFGALNSALPDPETTPAEAATGVAPGPTPETAEDAPGAPASAAAGEDLPSKVAEGAPDAPAAAVPSAEDPAAVGAEAAAEASAEAPAAAGPSQVQDFGPAHAIATTEFLAASTAEDGNEYDGSVSEFFDFTDSGSSVEWTEESSEEDLDYFAALDVAAAEAVPHVADAPDVPGPSTGRRRRRAVAKRRVSVEEGARLR

SEQ ID NO: 51616 - protein, 96 aa, Zea mays
  Coding DNA Sequence Number=SeqID_8241
  Homolog annotation: Hit_ID=A2XI79; Match level="QueryCoverage=33%, HitCoverage=3%, E-value=4e-08, Identity=81%"; Hit description =Putative uncharacterized protein
MALGCGMPDILAELGGAVGWETFFVSMSKTGFGIATIYVHILRGDKESVFPAAISKDGRAYNDQVSECPTPCVKDACALRHLVYPQNIPIKQGYKE

SEQ ID NO: 51617 - protein, 21 aa, Zea mays
  Coding DNA Sequence Number=SeqID_8242
MAEHTTIRVLQQRTGSSRSNE

SEQ ID NO: 51618 - protein, 53 aa, Zea mays
  Coding DNA Sequence Number=SeqID_8243
HTKVEGLGGRSTFGGGRAWAGRRADGGSGGSMGGGGVHSGENITVVGEAIEST

SEQ ID NO: 51619 - protein, 208 aa, Zea mays
  Coding DNA Sequence Number=SeqID_8244
  Gene Ontology: Mol. function=transcription factor binding; Cellular component=intracellular; Biological process=regulation of transcription, DNA-dependent
  Homolog annotation: Hit_ID=Q3S835; Match level="QueryCoverage=45%, HitCoverage=51%, E-value=3e-40, Identity=75%"; Hit description=RAB7
  Pfam annotation: Domain name=Ras; Domain location=39-153; Score=-6.2; E_value=6.5e-09; Accession=PF00071.13; Description=Ras family
  Subcellular localization annotation: CTP_CleavageSite=83; ConfidenceScore=5.12e-01
MASLSPIVPLSVLASLEGWGVAWRPALGLGFSWRSNCPFVILGLDTVLRFSALPPFPSTRKTRKIATRRSFNTLDTWHDEFLNQAGPSDPQRFPFILVGNKIDLDGGSKRMVLEKKVREWCASKGDIPYFETSAKEDHNIDTAFLCIARLALEHEHDQDIYAFVICPFCVPPVTSRQLRNKSRTLNRQADVLPRSQPFPGRLELRGCY

SEQ ID NO: 51620 - protein, 359 aa, Zea mays
  Coding DNA Sequence Number=SeqID_8245
MWDPAPAPQGRTLGRVGEDSARDGWRRKQGEWPLKGGQSLSEGDHVFSLPYASRLSTFQAPGWGMPAVFSPYRWRNATPWELVPFSHRSASRIFIMQPGCTPPPAVTQDGDLQLDGGGKRAKLRPLPLPQPQGFSSPRLGRGVCRVGVGPCVGGGPLLHSVIGGKGGRRPWRRQLHRAWLTDASGFGAARSAGVCHDSLKSIRPEVSAAAARPPGAKVVVVAAAGAGDGAPFVGLLSLRRPTPIEWGYSPVDYLNRFTKHESPRVKVTSEARGSGISMNRGGVGSKMKPGWPEPSWVVRQRDRRRSRSAEASGRAGALGRWLAEAPGSGDPQTASPSEARSDLAEGVVDAEGAAAPFQR

SEQ ID NO: 51621 - protein, 260 aa, Zea mays
  Coding DNA Sequence Number=SeqID_8246
  Gene Ontology: Mol. function=carboxyl- or carbamoyltransferase activity; Cellular component=ornithine carbamoyltransferase complex; Biological process=amino acid metabolic process
  Homolog annotation: Hit_ID=Q8SA97; Match level="QueryCoverage=41%, HitCoverage=20%, E-value=3e-15, Identity=45%"; Hit description =Ornithine carbamoyltransferase
MALPVDVAGLRPRLGDVEAPPKPRSSLSFMAEAESEPLGRARRRSSAEARAESEPWGRAERSSSSSGAELESEPWVGRSRVRRLPGLSPSPSPGSGGAEFVVFRDLARFLGKPFTYFIGCHALFLESNYFDPIGKASDLALLSILIFILLVASTLTDLNGAFGWLAIHIDNLKVNFRCTFDGLRYGAAFNPLQCAIMLLRRMAKKLPVLLRYQCLHVHTYFKNSRPSEKLKEGEDIYIYQGDKSFCYEDDHRVLVCEFIL

SEQ ID NO: 51622 - protein, 146 aa, Zea mays
  Coding DNA Sequence Number=SeqID_8247
MEVQEKGMLTSRRYSKRMTKANPKELLDIEPQTYCRLDKKEELLCEEHENEGAPKAEDPITQLLMKIEEGNKETHRRMELMQGAVGNMESAMKLVVAEQGDLQEWRPEVELKMKEMTETMRSVQIQVEKMEKKPMMFAGEPSGGGC

SEQ ID NO: 51623 - protein, 948 aa, Zea mays
  Coding DNA Sequence Number=SeqID_8248
  Gene Ontology: Mol. function=nucleic acid binding; Cellular component= cytoplasm; Biological process=stem cell maintenance
  Homolog annotation: Hit_ID=Q69VD5; Match level="QueryCoverage=89%, HitCoverage=87%, E-value=0.0, Identity=93%"; Hit description=ZLL/PNH homologous protein
  Pfam annotation: Domain name=DUF1785; Domain location=260-312; Score =103.7; E_value=5.5e-28; Accession=PF08699.1; Description=Domain of unknown function (DUF1785)
  Pfam annotation: Domain name=PAZ; Domain location=313-454; Score =166.3; E_value=7.9e-47; Accession=PF02170.13; Description=PAZ domain
  Pfam annotation: Domain name=Piwi; Domain location=590-911; Score =547.1; E_value=1.9e-161; Accession=PF02171.8; Description=Piwi domain
  Pfam module annotation: Pfam domain module=DUF1785::PAZ::Piwi; Domain location=260-312::313-454::590-911
  Subcellular localization annotation: CTP_CleavageSite=38; ConfidenceScore=5.14e-01
MTPPPPPPQARLHQGSSAKGGHAERRKQPLQSSVTQPKAEPAAAAAVLPVPEGGKRCRGGGRRRGRAKAPGEPRAALLAPAQAQTQAPPPRTVIGPPVPSKGLSFCRRPGFGTVGARCVVKANHFLAELPDKDLTQYDVKITPEVSSRTVNRAIMAELVRLYRASDLGMRLPAYDGRKNLYTAGTLPFDAREFVVRLADEDDGSGVPPREREYRVAIKFAARADLHHLRQFIAGRQADAPQEALQVLDIVLRELANQRYVSIGRSFYSPDIRKPQRLGDGLQSWRGFYQSIRPTQMGLSLNIDMSSTAFIEPLPVIEFVAQILGKDVISRPLSDANRIKIKKALRGVKVEVTHRGNVRRKYRISGLTTQPTHELIFPIDEQMNMKSVVEYFKEMYGFTIQHPHLPCLQVGNQKKANYLPMEVFYQACKIIEGQRYTKRLNEKQITSLLKTVHQNDYEQDPYAKEFGINISEKLTSVEARVLPAPWLKYHDTGKEKECLPQVGQWNMVNKKVINGCKVSHWACINFSRSVPETTARGFCQELAQMCQISGMEFNSEPVMPIYSARPDQVVKALKNVYNIALNKLKGKDLELLLAILPDNNGQLYGDIKRICETDLGLISQCCLTKHVFKISKQYLANVSLKINVKMGGRNTVLLDAISWRIPLVSDIPTIIFGADVTHPETGEDSSPSIAAVVASQDWPEVTKYAGLVCAQAHRQELIQDLYKTWHDPQRGTVTGGMIRELLISFRKATGQKPLRIIFYRDGVSEGQFYQVLLYELDAIRKACASLEPNYQPPVTFVVVQKRHHTRLFANNHKDRSSMDKSGNILPGTVVDSKICHPTEFDFYLCSHAGIQGTSRPAHYHVLWDENNFTADEMQTLTNNLCYTYARCTRSVSVVPPAYYAHLAAFRARFYMEPEMLDNQTSKTSNGTSGVSVKPLPAVKEKVKRMMFYC

SEQ ID NO: 51624 - protein, 178 aa, Zea mays
  Coding DNA Sequence Number=SeqID_8249
MHGDGAARKKAVENEPGHARTRDETVDGWASVGSGKHRGRGGPVQQQQAPQALVPRSHVYSHAYELSLSMRTERAAADSSRLACIALQRRARGRAGQDVACPPGAARARVPRSWGWRASDKAERSGKAGQAGRQAYTRMQCPGGWEREQEQRRCCRSARRALPAGAVRRERYVPELDR

SEQ ID NO: 51625 - protein, 567 aa, Zea mays
  Coding DNA Sequence Number=SeqID_8250
  Gene Ontology: Mol. function=acyl carrier activity; Cellular component=chloroplast; Biological process=fatty acid biosynthetic process
  Homolog annotation: Hit_ID=Q1W7L7; Match level="QueryCoverage=69%, HitCoverage=92%, E-value=1e-137, Identity=61%"; Hit description =Palmitoyl-ACP thioesterase
  Pfam annotation: Domain name=Acyl-ACP_TE; Domain location=223-498; Score=479.2; E_value=5.2e-141; Accession=PF01643.8; Description=Acyl- ACP thioesterase
  Subcellular localization annotation: CTP_CleavageSite=59; ConfidenceScore=5.06e-01
MGFATVGALLLGSAPASGPSDSGGAPKSAESNPPFDIGSYGEQILDTLSSRTNNTGTASFSEIVSGRPKFEIARTFSALLQLGIAVSAGCREDSTDVTGSPAPAAPKNGLGERPESLDVRGVAAKPGASSNAVRAGKTRAHAAVPKVNGGKSAVADVEHETVTVPSSVPRTFYNQLPDWSMLLAAITTIFLAAEKQWTMLDWKPRRPDMLTDTFGFGRIIHDGLMFKQNFSIRSYEIGADRTASIETMMNHLQETALNHVKTAGLLGDGFGSTPEMSKRNLFWVVSQMQAIVERYPCWGDTVEVNTWVSANGKNGMRRDWHIRDSMTGHTILKATSKWVMMNKLTRKLARIPDEVRTEIEPYFVGRSAIVDEDNRKLPKLPEGQSTSAAKYVRTGLTPRWADLDINQHVNNVKYIAWILESAPITIFENHELASIVLDYKRECVRDSVLQSHTSVHEDCNIESGETTLHCEHVLSLESDVRDGDFGSKLSGRRSEWIVEDEPVVQMKMLPSVFAMNLMVSKTVRDLSQDSGPLPDNWTVRACAGAAEVVGDGLDLAPRRDPVGEERS

SEQ ID NO: 51626 - protein, 203 aa, Zea mays
  Coding DNA Sequence Number=SeqID_8251
MVGTSAATARRQSSYTKEHRVPCFRVWLTLEAHPLQSGWRSLGSETIGFRTDDTTDDTTEAVAMKTLATFCGYHPLEMVMHPLGLFPAEKKDDPMWCNRVSHVKDVWAMYPDLVGRITVQCMSVLYRLQALQSDAMEHIANLAQTTKLTLDSREDFVVDLSSELVEKDLQVERLSQRITTLEQQVEIRDNTIDVLENQLHDVQ

SEQ ID NO: 51627 - protein, 289 aa, Zea mays
  Coding DNA Sequence Number=SeqID_8252
MAHLRHTARKSIIPFLFSRLVEHPLRRLVTGQSSHLERLHHHLHEEQERRRQELEQQGSSSSLQQERSRSRRDGLLDPSLVTPPTGVTFMMCSTPCYARHLTGVPGLLSIVVLSSSTVVGFTRTAGRRLAWCAVWRTVFGVWRFAQSTTLSLSGTQLRQPCKMSHGVRFRHYCSMLSGVADGLNLRYYPHRPSGSTGGVVVSPIGEDNPRLSSTVNLAAVLNTELDHALDEMSRARAEIAQLRAERAERRHLEDGSPAPVVTQHPYRSPQHGYHAYGNSDCRTRINLEP

SEQ ID NO: 51628 - protein, 174 aa, Zea mays
  Coding DNA Sequence Number=SeqID_8253
MAQTKTTQRKATGPHGVPRHQLAPRHEGSSSGSNDPIGDLEARVERLMSELCHGSRELEVNRLQQEITERDTTIDWAINSRSFSWDCEAKALARVAELSASLENLQAYCNTLHEEVHVLYDRLHPNVPPEVAAMGAGPSGAANGGPDGELDLFGAPPSMNLADERSPEAGSGAA

SEQ ID NO: 51629 - protein, 121 aa, Zea mays
  Coding DNA Sequence Number=SeqID_8254
MKTNSLEETVPKVMRGGGLSTAVADSDRRTNGDEQLPPTGNRILPRIGFYTCGGAFHCSQDTFEAALAVWVGIDVGGNPDLVLSLGFLEMWRVHGGLKAWRARPRRSSIIYAPWSSGWGHT

SEQ ID NO: 51630 - protein, 236 aa, Zea mays
  Coding DNA Sequence Number=SeqID_8255
  Subcellular localization annotation: CTP_CleavageSite=57; ConfidenceScore=5.44e-01
MKRDLRPSYTNSFSRRSLLPRRPSATKHRPNSKRDPGVNLAGRRDANPSKRRLGAGVGEMESELGRRLATTTNGSWGELRARKHHDGVTAGNDGTLRARRGSRKPRQGSSVAIAMATSEQRRSTARGWGKSRGTRVLGRGWACVASRGSWAAEHQRPARGARRASGKARRERDELEMEADPRNDGHGQAEPGAMGGLRQGKKRVWELHGAQQGKKTASLEKSKWRAAGFSSCVRWR

SEQ ID NO: 51631 - protein, 84 aa, Zea mays
  Coding DNA Sequence Number=SeqID_8256
MTSTGNRRRACDYRVKLVRVIYLILFILMLIHMHRASHEILWIEVVLCVYALFDFLRNDGFCLKGTGAMVGSTAKSTNQADSSE

SEQ ID NO: 51632 - protein, 522 aa, Zea mays
  Coding DNA Sequence Number=SeqID_8257
  Gene Ontology: Mol. function=4 iron, 4 sulfur cluster binding; Cellular component=cytoplasm; Biological process=metabolic process
  Homolog annotation: Hit_ID=Q6YZX6; Match level="QueryCoverage=49%, HitCoverage=31%, E-value=1e-102, Identity=67%"; Hit description =Putative aconitate hydratase, cytoplasmic
  Pfam annotation: Domain name=Aconitase; Domain location=52-474; Score= -113.8; E_value=3.6e-09; Accession=PF00330.11; Description=Aconitase family (aconitate hydratase)
MEGVSRATWMLLHIIAGSQCSGESDLVQLHLESVLLVALGSSTTDLHHTCSTLEDLSLGAFSTQEEAEAYDITTIKVRGLNAFTKFDMSRYNIKSILDSSALPFGGTAKRLKETEAAASARDHTGVLSYDIGGDAHSAVRVGTQRLLQRSEAHRATLVEMVSLQIGAQGVGGMAHTIFDEMPLNSGEEEIALFSGGYSNYSVFDEMPLGDVIWDEEYGHHDLLDQLAPDAYYLAAKRTPYDSVPMNLLNDVAVSAPKYDDLTNVGQAKGIVSMIEAYLRANKMFVDKHELEMERVFSSYLEMDLSEVEPCVLGPKRPHDRVPLKEMKSDWHACLDNEVGFKGYAVPKEQQGKVVKFDFHGRPAEIKHGSVVLAAICSSTNTSNPSVMIGAGLVAKKAYELGLEVKPWVKTSLTPGSVVAIEYLKHSLWSTLAHTDIVAATVLSANRNFEGRVNPLTRANYLASLPLVVAYALADTVDIDFEKEPIGVGKGGKEVFLRDIWPSNQEIDEVVESSMQTHLIIQE

SEQ ID NO: 51633 - protein, 89 aa, Zea mays
  Coding DNA Sequence Number=SeqID_8258
MERLLKLRQYPRSLVSLLLSFGFDFDILYESKYARLQEGNSCAPRSYQGTEVTMSSYDFVKVINFTFDMFEGTRQVFNRRSKFFTAGSN

SEQ ID NO: 51634 - protein, 131 aa, Zea mays
  Coding DNA Sequence Number=SeqID_8259
  Subcellular localization annotation: CTP_CleavageSite=36; ConfidenceScore=5.27e-01
MKPPLLGQGPPRSLHASTVVRPSLGGRASSPGSAARAQGLFGLPWLDWWLGALEFLAGGRTSPRIRPLPWLARNVHDQRRPRTIRLWVGRAGLPDLCVPVNYNTAVGSSAAGIRYLQNWVMIIQEHGQDEA

SEQ ID NO: 51635 - protein, 445 aa, Zea mays
  Coding DNA Sequence Number=SeqID_8260
  Gene Ontology: Mol. function=aspartate kinase activity; Cellular component=chloroplast; Biological process=amino acid biosynthetic process
  Homolog annotation: Hit_ID=Q5JK18; Match level="QueryCoverage=50%, HitCoverage=52%, E-value=2e-92, Identity=63%"; Hit description =Aspartokinase
  Pfam annotation: Domain name=ACT; Domain location=370-429; Score =19.4; E_value=0.013; Accession=PF01842.16; Description=ACT domain
  Subcellular localization annotation: CTP_CleavageSite=46; ConfidenceScore=5.58e-01
MACVGAASPTARASTPPHCGSTRGTRARWPSMLPPRRLWLPQGPPRAAPPNRARRGVHQDPRQEGTPNHKVQPGPGPHLLQQPCICHATFSCPPWFSSGARKIIKHIIDPNPDLAKQWACYNLLKEHRDIQVLYHNDRVKDSPSTNGSKEHQGRRPTLDCKRARFAMKDTGSFLDECVGRACVHQCHQCSILDPDLDLHGAADVNACEGMKRNAQPSTVAKRLHGDWIQDPAIPVVTGFLGKGWKSGAITTLGQGGSDLIAITIGKALGLREIQVLHPQSMRPAREGDIPVMVKNSYNAKAPGTIITRQRDMDKVVLTSIVLKSNVTMLDIVSTRMLGQYGFLARELDHVVEELEKIAIVRLLQQRAIISLIGNVEQSSLILQKMGHVLRKSGINVQMISQGASKVNMSLIVHDSDAKELVEALHQAFFKDDVLAQVEAENLLVG

SEQ ID NO: 51636 - protein, 117 aa, Zea mays
  Coding DNA Sequence Number=SeqID_8261
  Subcellular localization annotation: CTP_CleavageSite=79; ConfidenceScore=5.29e-01
MDFASPDPRARTQPRLRNTMDSTSPDPRAQTQLRLRKTTVSASLDPGLGLNLDAGRRTLPRPTPGLGHNLILGRRSPPRPTQGSDSTSTLEDGLRLARPQGSDSASTPEDGLNLDAG

SEQ ID NO: 51637 - protein, 172 aa, Zea mays
  Coding DNA Sequence Number=SeqID_8262
MGSGEAELPMSPEAGLSCCQPHSVEWHNSRSDAGGAVFLSGDRPFSVAFRSSVCARAHPPGVAPEASEEWFDSFEVLARFVMLRPGLVVPSCELAIVRVHSRVPSSRAGMLTLSTVWPEPGLREQPPSLRTEREDGQGQTRLFSYAPLSPFRKEEGGMRHVALGGRRTWCLQ

SEQ ID NO: 51638 - protein, 317 aa, Zea mays
  Coding DNA Sequence Number=SeqID_8263
MEHRPRLEKLLETTHLELDGKLFVNTQQAPTWRANCRRFDPGGPWTDELTPTPGVERGGVRLPRSRSSSSPRSGEAETVFRGRGCVRALGSGEAELCPSPECRARRTPSSSVEVESESYSGEAETIVFRSEAESLPWGRASRSPSSSGAEAESEPWGRARRSPSSEAGTGAEPWGRPKRSILCRSRLNLAAVSLTLSSGTAVRATQRHCFLVRSVSGAAKPLQLCADGGYQLRLGVLGGPGGHPAMHDSVEQLGEVLEVAKVGEGGNVEGQRVRVPRVEPECRGIEALAVRLVAPTHAAEVGHESERGVRVGRPGDA

SEQ ID NO: 51639 - protein, 100 aa, Zea mays
  Coding DNA Sequence Number=SeqID_8264
MPTAALLPTLRLFLVVGCSRYSLRERSRRLFLQSGCYTILALNAPAIRSVGVAILPRLLLGVGWASGEPKIYADGGYQLKLGVLGVPLIMVPDNNANANL

SEQ ID NO: 51640 - protein, 88 aa, Zea mays
  Coding DNA Sequence Number=SeqID_8265
MPTAALLPTLRLFLVVGCSRYSLRERSRRYGEGYRRQRSPLYPVREAECAEIGTEAERPAHRARFSSESAGLRTQLTSRAQTEATRRI

SEQ ID NO: 51641 - protein, 371 aa, Zea mays
  Coding DNA Sequence Number=SeqID_8266
  Subcellular localization annotation: CTP_CleavageSite=79; ConfidenceScore=5.52e-01
MGGSNWAQNPRLAHFSTPAAYFRAALPGADRWARPGSHPGRVRSLFCGAQSSSSSPSVFFQQNAIPSSPLGRDLMRPPSCSDSVSRLRLCLRGLLESKLVDALNLANSLVECRDGFYYRELGLHGVRHLKHAESPFNTPSCPASLPSPATTLTRQTRSVYLLVAGAAESKLTRCGIRGMAAIAARHRIWTSPLHNRRAALPGADRWARPGSHPGRVRSLFCGAQSSSSSPSVFFQQNAIPSSPLGRDLMRPPSCSDSVSRLRLCLRGLLESKLADALNLANSLVECRDGFYYRELGLHGVRHLKHAESPCNTPSCPASLPSPATTLTRQTRSVYLLVAGAAESKLTRCGIRGMAAIAARHRIWTSPLHNRR

SEQ ID NO: 51642 - protein, 162 aa, Zea mays
  Coding DNA Sequence Number=SeqID_8267
MVTTSSMVGRSKPGCGLCPALSFKDLHHPCWGGGRAEPELYLPYGPAGHLFLQHSGERALTGLAEGVDFDNAGPVSRKRRQLQHAWLVGSAGFGAASGATSHRWGGVWLFARRTDGCCVVRTGRPPKTSHAARAAFVFLGCPTLAPARRLCTEVGARPSGRT

SEQ ID NO: 51643 - protein, 144 aa, Zea mays
  Coding DNA Sequence Number=SeqID_8268
  Subcellular localization annotation: CTP_CleavageSite=50; ConfidenceScore=5.47e-01
MAKARATLPRAGLTTAKSSLRRNRKLRLARPWVSVSEGGLRLARPQGSAPASASEGGLRLARPQGSAPASASEDGLRLARPQGSASTSGGIASSLGLNLDLGGVSASPDLGLGPTTPQGGSSLPYPYLAQVTGNKTGVPSSSPR

SEQ ID NO: 51644 - protein, 189 aa, Zea mays
  Coding DNA Sequence Number=SeqID_8269
  Gene Ontology: Mol. function=heat shock protein binding; Cellular component=membrane; Biological process=protein folding
  Homolog annotation: Hit_ID=O65160; Match level="QueryCoverage=61%, HitCoverage=28%, E-value=3e-46, Identity=78%"; Hit description=DnaJ -related protein ZMDJ1
  Pfam annotation: Domain name=DnaJ_C; Domain location=46-167; Score= -32.2; E_value=0.0008; Accession=PF01556.9; Description=DnaJ C terminal region
MESCELCLLSKLVRMDGDSSQELHEISCGHHFHCTCIDKYLYIIATCPRAIGIMQSVKKGWVKVTDYNSYQTVKGSLKFKRKGQDLFYEHTLSLTKALCWFQFVLTHLDNWQLLIKSIPSEVVKPGRFKAINDDGMSIMKGKLYIHFTVKFPDSLVLEQCKALESVLPPKLSSNLIDMEIDECEETTMH

SEQ ID NO: 51645 - protein, 333 aa, Zea mays
  Coding DNA Sequence Number=SeqID_8270
  Gene Ontology: Cellular component=integral to membrane; Biological process=peroxisome organization and biogenesis
  Homolog annotation: Hit_ID=Q85V22; Match level="QueryCoverage=84%, HitCoverage=63%, E-value=1e-119, Identity=75%"; Hit description =Histidine amino acid transporter
  Pfam annotation: Domain name=Aa_trans; Domain location=1-333; Score =269.7; E_value=6e-78; Accession=PF01490.9; Description=Transmembrane amino acid transporter protein
MVGAGVLSLPYAMSQLGWEVGVTVLVLLWAITLYTLWQMVEMHECVPGKRFDRYHELGQHAFGERLGLWIVVPQQLVVEVGVNIVYMVTGGTSLKKFHDTVCGDSCTDIKLTYFIMIFASCHFVLSQLPSFHSISGVSLAAAVMSLCYSTIAWVASAHKGRSPDVHYGLRATTAPGKVFGFFGALGDVAFAYAGHNVVLEIQATIPSTPERPSKKPMWKGAIVAYAIVAACYFPASLVGYWAFGNQVNDNVLVSLSKPKWLIALANMMVVVHVIGSYQLLAPVRRQTLGMYFVVVLSVGAWTFYSAGSATSLQEHLLSTSHRTVCAQGSYVLQ

SEQ ID NO: 51646 - protein, 472 aa, Zea mays
  Coding DNA Sequence Number=SeqID_8271
  Gene Ontology: Cellular component=integral to membrane; Biological process=peroxisome organization and biogenesis
  Homolog annotation: Hit_ID=Q85V22; Match level="QueryCoverage=90%, HitCoverage=96%, E-value=0.0, Identity=77%"; Hit description =Histidine amino acid transporter
  Pfam annotation: Domain name=Aa_trans; Domain location=54-459; Score =533.5; E_value=2.3e-157; Accession=PF01490.9; Description =Transmembrane amino acid transporter protein
MAAVQPSVEMTTQQGPPAASYSPARDGGGGRSAEDEEKEKAAAIDNWLPISATRNAKWWYSAFHNVTAMVGAGVLGLPYAMSQLGWGAGITIMLLSWVITLYTLWQMVEMHEMVPGKRFDRYHELGQHAFGDRLGLWIVVPQQLVVEVGVNIVYMVTGGTSLQKFHDVLVCGDAACEGGRKIRLTYFIMIFASCHFVLAQLPNFDSISGVSLAAAVMSLSYSTIAWGASVSKGRVPDVDYGLRATTPPGKVFGFLGALGTVAFAYAGHNVVLEIQATIPSTPEKPSKKPMWKGVVVAYLVVALCYFPVSFVGYWAFGDSVDGDILVTLNRPRWLIALANMMVVIHVIGSYQIYAMPVFDMIETVLVKKLRFPPGLTLRLIARTVYVAFTMFIAITFPFFDGLLSFFGGFAFAPTTYFLPCIMWLAIYKPKRFSLSWFTNWICIILGVLLMVLAPIGGLRQIIISAKTYKFYQ

SEQ ID NO: 51647 - protein, 543 aa, Zea mays
  Coding DNA Sequence Number=SeqID_8272
  Gene Ontology: Cellular component=integral to membrane; Biological process=peroxisome organization and biogenesis
  Homolog annotation: Hit_ID=Q85V22; Match level="QueryCoverage=82%, HitCoverage=98%, E-value=0.0, Identity=69%"; Hit description =Histidine amino acid transporter
  Pfam annotation: Domain name=Aa_trans; Domain location=116-530; Score= 488.5; E_value=8e-144; Accession=PF01490.9; Description=Transmembrane amino acid transporter protein
  Pfam annotation: Domain name=Trp_Tyr_perm; Domain location=116-524; Score=-273.7; E_value=0.04; Accession=PF03222.4; Description =Tryptophantyrosine permease family
  Pfam module annotation: Pfam domain module=Aa_trans::Trp_Tyr_perm; Domain location=116-530::116-524
MMRQSCSKDWMISIPPLPIRLGSPSPLRQPGTKQPMELEEVCTDAWTMYSFKNSPNNQPKSCISLIKIISKRSSAKGANLARIVVILVSGLEKDERSGEGAEDQAIDDWLPITSSRNAKWWYSAFHNVTAMVGAGVLSLPYAMSKLGWGPGIAVLMLSWVVTLYTMWQMVEMHEMVPGKRFDRYHELGQHAFGERLGLWIVVPQQLIVEVGGDIVFMVTGGRSLKKLHDVVVCDAAGRCSEGGGDIRLTYFIMIFASCHLLLSQLPNFNSISGVSGLHRRRCHVTQVRTYSTIAWGASVHKGKLPDVDYEVLAAAATASEKALSYMAALGDVAFAYAGHNVVLEIQATIPSTPETPSKKPMWRGVVVAYAMVAACYFPVSLLGYWAFGNQVDDNVLVTLSKPRWLIALANAMVVVHVIGSYQIFAMPVFDMMETVLVKKLHFPPGLALRLIARSTYVAFTTFIAITIPFFGGLLGFFGGFAFAPTTYFLPCVMWLAICKPKRFSLSWFANWACIVLGVVLMVLAPIGALRQIILSAKTYRFYS

SEQ ID NO: 51648 - protein, 478 aa, Zea mays
  Coding DNA Sequence Number=SeqID_8273
  Gene Ontology: Mol. function=transporter activity; Cellular component= integral to membrane; Biological process=transport
  Homolog annotation: Hit_ID=O64909; Match level="QueryCoverage=63%, HitCoverage=75%, E-value=1e-130, Identity=77%"; Hit description =Glucose-6-phosphate/phosphate-translocator precursor
  Pfam annotation: Domain name=DUF6; Domain location=112-248; Score =4.4; E_value=0.038; Accession=PF00892.11; Description=Integral membrane protein DUF6
  Pfam annotation: Domain name=DUF6; Domain location=266-402; Score =17.9; E_value=0.0065; Accession=PF00892.11; Description=Integral membrane protein DUF6
  Pfam annotation: Domain name=TPT; Domain location=257-402; Score =180.2; E_value=5.2e-51; Accession=PF03151.7; Description=Triose -phosphate Transporter family
  Pfam annotation: Domain name=UAA; Domain location=98-408; Score= -133.0; E_value=0.00094; Accession=PF08449.2; Description=UAA transporter family
  Pfam module annotation: Pfam domain module=DUF6::DUF6::TPT::UAA; Domain location=112-248::266-402::257-402::98-408
  Subcellular localization annotation: CTP_CleavageSite=61; ConfidenceScore=5.65e-01
MQAAAASVKSSTTAAAAAATCKAGFKPLHLPPLPAAGSRPLSLSVSARPLYRQDHVLATTVAMAAAGRSDRAASPAPPSATADGARPVVEVAAPAETARRAKIGVYFATWWALNVIFNIYNKKVLNAFPYPWLTSTLSLAAGSAIMLASWATRIAEAPQTDLDFWKALTPSSRGRGRPAEQVAIAHTIGHVAATVSMAKVAVSFTHIIKSGEPAFSVLVSRFFLGEHFPAPVYFSLLPIIGGCALAAVTELNFNMVGFMGAMISNLAFVVRTIFSKKGMKGKSVSGMNYYACLSIMSLVILLPFAVAMEGPKLWAAGWQQAVAEIGPNFVWWVAAQSVFYHLYNQVSYMSLDEISPLTFSIGNTMKRISVIVASIIIFQTPVQPINALGAAIAILGTFIYSQAQGSMAVPDGKRRAICTLRSSRWIQRWSVADLSLCALADCSFGSAHFCCSAWAFGRADMPSSQAGATFGALWAVAF

SEQ ID NO: 51649 - protein, 191 aa, Zea mays
  Coding DNA Sequence Number=SeqID_8274
MQPSCSLLPVVIYKDDHQPRGEENIWRRRMFTSLAEEANFGYAGSAGCMRHQLPRVWLLGLDGFGAASSAASRRQMGRDCPSTARATVASCAGLPHQWRSPRNRPHCSDAGTSPRGLYKTSYATEVAAAFLDEVAAIVGAEVVAAAGEAARCRRGCLHWLDVSRLDTSVSERVVNNSREAASARIWICTQL

SEQ ID NO: 51650 - protein, 168 aa, Zea mays
  Coding DNA Sequence Number=SeqID_8275
MAAASLRAERSSPPSSYGGEDKTIQERGRHLRGMTTGRRLQLGCMMKILEAERWQKSANPHEVALLQRQQEDKIGSTTAQETKSASSPAHLRTSLQHRTSWPEVRRRRIVAQGAWNRPAVTRPSTFAATSGQEGEPPHKERATVLRLFDLPSSPQPAVKEANRRTRSM

SEQ ID NO: 51651 - protein, 287 aa, Zea mays
  Coding DNA Sequence Number=SeqID_8276
MTLELGTQQSCAAIACNTLLFLRLQSHYLYLYVRKLTSRQPSHLAETDHALRRHRARPWRGRHGQGRHNGHHRLAHDKGAGLHQGGGAAGSRGRGRGRPTAEAPRRPGLGAVWRHHSPEAHAEEELVRRLQQQQQQQNRPRGHRRGVQAEEGLADEHLRLTDAAARRRRAGGPGPERRQGEEEGDERGRARRRGPGGGRQVRQPDEHEQPAQEARLLQAVADVCVASILCSGAWRGAEGKGPAPASELKGLLAAALSLRASSALEDICHVLDLVQQSFTNSVQEHLD

SEQ ID NO: 51652 - protein, 251 aa, Zea mays
  Coding DNA Sequence Number=SeqID_8277
MAAGRGFSADEIAGAAHGLTSNSTAFCSSSPPEWGCGRGLYGSSIRPEVIAAVVWPLGAEVVVTAAGAGDAPPVGLLLLRRPPNRVGLFVPAEESLSSVSLTARGFSCLVKGNPQPLFDEPEPEAAVSAWTEAELARKEDFVGRSLTGPSAGGTDTGVELPRPWAGLMSSGDSRLRLRGDRPSRLLEPDSWKRPWRRWPGRGADVVLRSGDPPTASPSEARSDLAKGVVDAEGAAAPFNRQGPSLQDRVIL

SEQ ID NO: 51653 - protein, 137 aa, Zea mays
  Coding DNA Sequence Number=SeqID_8278
MSKNNKCKREPTPPSEDFGDSEYSEEFSFESEGSPAPVPPPASSNDSDDSQGIATEVWTYIRAVERSGLTGSDESEYSSDEEDSSKEDGGGDGEGDDDDDDDDDGGDGGDDGGRGGNGGGRGDNSGGSNKGSNKASG

SEQ ID NO: 51654 - protein, 172 aa, Zea mays
  Coding DNA Sequence Number=SeqID_8279
  Subcellular localization annotation: CTP_CleavageSite=95; ConfidenceScore=5.19e-01
PSPSPGVGRKRKFAVFRVFSPESEALGSGRSGVRRLPVGVAQAALSFCQTGQWSGGVTAVTSALPGARVRIEVSGHLCVKCPCNLVSRCGDLVKVASERSQGLGRAGDVSAIKRGPRARRKSLEVGCLRPRLGSGEARSSHSCGLIPDLIVPIRPLQLYADGGYQLRIRRLE

SEQ ID NO: 51655 - protein, 257 aa, Zea mays
  Coding DNA Sequence Number=SeqID_8280
  Gene Ontology: Mol. function=nucleic acid binding
  Homolog annotation: Hit_ID=Q67VD5; Match level="QueryCoverage=66%, HitCoverage=56%, E-value=7e-18, Identity=33%"; Hit description =Putative uncharacterized protein OSJNBa0052G07.38
MPLRQSAFPSGASRCGDRGETHGGLDVDVKNEGPSKDACTYIIKRGVRQTRYNLKRKYFDESLTKEQLLAMQPPPKMKKEDWTGLVEYWCDPKNQEKSIKNKANRGNVQLHQRTRARSYIAHRYSLEQMVAEKERELEEGEAQKSPSKIVADSLSQISRSSTFLPNIGVPTTSKTGRSTSLAAQARMQAQFEEKLQAEREEAARKQEELQAQLQAQQAALEENQSLLRQTQEEVKGMHTKFDETNALLRAVLKLQKD

SEQ ID NO: 51656 - protein, 232 aa, Zea mays
  Coding DNA Sequence Number=SeqID_8281
MQESLAGPPSQQNPPEGLPRNPLQDRHHSKILPRAFPGIPCRTAITAKSSRGPPYTDHSPTALAPFGVHVKTETLNDEEYYYKILETGMPSLAPEFYLVLDRIKSVTEPPKSLGPPTVVLVQPTSDNPAGVPESLDKFGICFPYLPKSVLPVTQTLQIIEIQKCGSGYINLPLFKRNKTLSMELLSKTYPTKEKTLKGMLVIRESRDSKESNQIQGRFPKFHRKRKGKKLEQ

SEQ ID NO: 51657 - protein, 63 aa, Zea mays
  Coding DNA Sequence Number=SeqID_8282
MDLPLNLTKLDPNLLNCNLAEGEYVLIPEQGVVHEEDQEQAPETATEDLPAAPAIEGKPRFYA

SEQ ID NO: 51658 - protein, 151 aa, Zea mays
  Coding DNA Sequence Number=SeqID_8283
MAYWIARSTRGGGRPKSGEGDLGPPVKFCQVRGLGKLHGLMVKLTEWLARLGRDWRELATVAEARKAWRAVARRARGEFRLGTESCSVTKVPVSECLVPRSNSAKTVPNEFGLSSNFSRACSRKFGTTLIFGLLGFEFLKTENAIDLWKGF

SEQ ID NO: 51659 - protein, 278 aa, Zea mays
  Coding DNA Sequence Number=SeqID_8284
MNSPTPASGGDTRFSSDFLSHDGFPSILWEVLDFAGYPTPPLYTVQLYEEHRVPRCRVWLTLEAHPLQPGWRSLDSETIGFRADDTTEAAAMKTLTTFCGYHPLEMVMHPLGLFPAEKKDDPMWCNRVSHVKDVWAMYPDLVGRVTVQCMSALYRLQALQSDAMAHLANIAQTTKLTLDSREDFVVERLSQRITTLEQQVEIRDNTIDVLENQLHDVQRELEEANDHLDMHHLEMEANEARSEGEEAPEELGPAPGANGTTSVMPPSPASSVASTAQG

SEQ ID NO: 51660 - protein, 99 aa, Zea mays
  Coding DNA Sequence Number=SeqID_8285
MAYWIARSTHGGGRPKSGEGDLGPPVKFYRVWGLGKLHGIMVKLTEWLARLGRDWRELATVVEARKPWQAVARRARGEFRACSRKFGTTLIFGLLGFEF

SEQ ID NO: 51661 - protein, 211 aa, Zea mays
  Coding DNA Sequence Number=SeqID_8286
  Gene Ontology: Mol. function=carboxyl- or carbamoyltransferase activity; Cellular component=ornithine carbamoyltransferase complex; Biological process=amino acid metabolic process
  Homolog annotation: Hit_ID=Q8SA97; Match level="QueryCoverage=27%, HitCoverage=10%, E-value=3e-11, Identity=62%"; Hit description =Ornithine carbamoyltransferase
MEMGRHLSAFRDRGVPKPTSECAACPSPDGSSAWASAKGGSEVAGDGRERGGNPVAFVRKERIQVYNGGVAECYVSSEGRASALSTCQCGSRRDLGTLLGLRGAIIAYLAELARWDTGLVLCGPSQLGVGGRPAEARAESEPWGRAKRSSSSSGAEPESERWVGRSGVRRLPGLSPSPSPGSGGAEFAVFRGLARVRALGRAERSSPSSGA

SEQ ID NO: 51662 - protein, 149 aa, Zea mays
  Coding DNA Sequence Number=SeqID_8287
  Homolog annotation: Hit_ID=Q6QP54; Match level="QueryCoverage=30%, HitCoverage=17%, E-value=4e-08, Identity=56%"; Hit description =Putative kinase
MARSVRAQGRARRRLLLRPRSGEDAIPSKVEVEAEPWGRVRQRPSSEAEVEAEPWGRARRRPSSEAEPWGRARRRPPSEAEAGAEPWGRARRSFLLRLRLNLAVVSLTLVGGTAIGAGQAALFSCRVGQWRGEVIAVTSALPTEERVSG

SEQ ID NO: 51663 - protein, 101 aa, Zea mays
  Coding DNA Sequence Number=SeqID_8288
MGETLLGKLAPRHDDSSIGSNDPIGDLEAQVNRLQAELCRRTDIWVADGDRINELRSGVRHLRDQLADRGFSARLGSSISFACLGQGGKSSSSSGRAQLGH

SEQ ID NO: 51664 - protein, 118 aa, Zea mays
  Coding DNA Sequence Number=SeqID_8289
MVNLVVVLITELDHALDELGKVRAEVAELRAECAAHHYLDGGSPAPIGIQHPYRSPPRGRFDYVKMMSENRRRGARRAQPEQQAPQEEAAPQQQLPPPPPMTIEQMFLMQTQAVQAIG

SEQ ID NO: 51665 - protein, 101 aa, Zea mays
  Coding DNA Sequence Number=SeqID_8290
MMLVDYTTGLLQQPGCPKVVQGASLAEVQGKATSQTPPPAEARGKSPATPAPAPGVGAPAPRAGDDVVSLGDWTDLAPCDAGDAPPGEKAKRGSQTYVQCT

SEQ ID NO: 51666 - protein, 113 aa, Zea mays
  Coding DNA Sequence Number=SeqID_8291
  Subcellular localization annotation: CTP_CleavageSite=3; ConfidenceScore=5.02e-01
MARMAHRSCSGPPETLSPSFSPLCPWIHGLFPAIEFAVASSSPLPNSGDPGATLARACLNSSDFTAAESSGATSRTTVFPGLISPSDLDRTTRTPSDPLEPPRIPSDLPPVRS

SEQ ID NO: 51667 - protein, 110 aa, Zea mays
  Coding DNA Sequence Number=SeqID_8292
  Gene Ontology: Mol. function=nucleotide binding; Cellular component =microtubule
  Homolog annotation: Hit_ID=Q9LQ55; Match level="QueryCoverage=56%, HitCoverage=6%, E-value=2e-10, Identity=55%"; Hit description =Dynamin-2B
  Subcellular localization annotation: CTP_CleavageSite=53; ConfidenceScore=5.13e-01
MRLDASLPTGDDPSDETASRRPSTLLNAVALRNIGTSKSAVWNSLTGHPVLPRGKTTRRGPLGTQAQRSLAWWSAGKAGITNQSQLVALHPRVYRGQQLLLYNRWKYRLQ

SEQ ID NO: 51668 - protein, 21 aa, Zea mays
  Coding DNA Sequence Number=SeqID_8293
MAAGESAWLSGDQPLLIPVAL

SEQ ID NO: 51669 - protein, 344 aa, Zea mays
  Coding DNA Sequence Number=SeqID_8294
  Homolog annotation: Hit_ID=Q6J9V9; Match level="QueryCoverage=24%, HitCoverage=42%, E-value=5e-07, Identity=37%"; Hit description =Putative uncharacterized protein
MQAACDRAKWVHPFDSNLPSMEAQAHTSCNRRAGCYVRATTPPLAPLPRLLDCGTSTATRGNPTYDPTVPARHVGHGSVSCGRRRDGQYGQKWAGSNGGGRRAEDRRHLWQEKRATLRLRHNDRVKKGIGKGDTPKGILPREGNGPRAPLLIRGSKAGPSEGFNSRLRALGLRAHYWSEVRRPAPRKGSTVASGHSGSAPTTDQGFVGWASKDSGSAPEDDELRLARPRARTRAQPRKTTNSTSPDPGLGLGLSPGRRRTPPRPTHGSDSGSAPEDDELCLARPQGSDSALASADGLRLARPKGSDSTSASEDRLDLDLGGASASPNPGLEPTASQEGPSLPYP

SEQ ID NO: 51670 - protein, 83 aa, Zea mays
  Coding DNA Sequence Number=SeqID_8295
MALSCLGAIKGTPRRMEERPKQPKSILDHPHSVFAHSFVILSDSSSVLGERLQVVEIPRKREKIKVKKNTVVFKLIIGSLERS

SEQ ID NO: 51671 - protein, 28 aa, Zea mays
  Coding DNA Sequence Number=SeqID_8296
MVGFDGEDFRDPSLAAAERKGHMKRFQI

SEQ ID NO: 51672 - protein, 118 aa, Zea mays
  Coding DNA Sequence Number=SeqID_8297
MAGKRPRIRGQRGKNGGEEASGRLEELRCGIPATGRGLRRAKAWDSFSRGRGTIGTNTVALDRAKLADHRAGAADRHGRAPAMPKLAEHRAKLGKLSTGKGVSPRGGAQGGLARSPAR

SEQ ID NO: 51673 - protein, 320 aa, Zea mays
  Coding DNA Sequence Number=SeqID_8298
MAHIRCTAQRPLRCTVPSKSSYLERPHRRLYEEQDQDQEQQDSSPSPQQEVESKRPPSLAPQLKMPHAPPQVIPAAGGDPDRDKDRDDDDAGGSSSHGTELLEEPEPEGWIARPITRDAASGCHFHDALGTLLRRSFDRHTWSIEYHCVVYHHRHGLYPDQWEATCLVRRPDDDLRGAEAFSEHYSITERDIAEAAMQDAARRALSQYCSLFSGVADGLDLKYYPRRSTDSAVGVIVSPVGEGNPRLNSMVNLAAVLNTELDHALDELGKVRAEVAELRDECAARHYLDGGSPAPVEIQHPTFHRLVVASTMVPQTAGPE

SEQ ID NO: 51674 - protein, 130 aa, Zea mays
  Coding DNA Sequence Number=SeqID_8299
MGATGILCDSTHDAVTKECVAPVSNKTFAEWYSTENEDGLPGCSDAGIDFLLAGCSDGTTAVAEKTASSTATASSDTDASAGAGELALMVEFGCLSSEDGCYSQPEVHQSCCWGPSASEGPQKQNLTVFL

SEQ ID NO: 51675 - protein, 101 aa, Zea mays
  Coding DNA Sequence Number=SeqID_8300
MQYNGSSSLISCEKQTIQIEFLSLQVIALVPTITGMGDHVSGRVRRAICCQVQSGLAFQSWGRQILWCRLWCWIRGYLLSNSLLRHEDVFSVYEVTIYRMQ

SEQ ID NO: 51676 - protein, 289 aa, Zea mays
  Coding DNA Sequence Number=SeqID_8301
MTSHGSSDEGNAQSHTDGLAREGFPRILWEVLQGAGYTTPPQYAVQQFEKHRVPRCRGRMTLEPHPLQSGWRSLNSVSFGYRAEDTIEAIALHGLTTFCDFHPLELSTHPVGLFPTEKEDDPMWKDRVEHAKDIWAIYPGQTAHLTVRCMNALYHLQVMRGEEMSHLMALLEATKITLDNREKLVVDLSTEMVEKDLQVEQMSNEIQELEELVGTRENTIEVLEDQLINTQQQLAEANQHLDMHHQEIQDMEANEDVDIEGGEEPASSLDTTGSGRPPSPESSVASFAH

SEQ ID NO: 51677 - protein, 72 aa, Zea mays
  Coding DNA Sequence Number=SeqID_8302
MPRNMINRRLPFSHGLRRGLPFRLWWVQVRSLHDGSRGSLEDMVAGVTWPSILPPGWTVEWDPTSAEDEHEE

SEQ ID NO: 51678 - protein, 174 aa, Zea mays
  Coding DNA Sequence Number=SeqID_8303
  Subcellular localization annotation: CTP_CleavageSite=93; ConfidenceScore=5.63e-01
MLLASSDLLVAQLCQDSPRPVFPPQLLVLLARSSSPSAMALAVCPSAGRSSLLALQLELAARPPARCSPARFSLRRARSVIPCCDPAVELPCSASLFPCCCSCDGSACVARLVLDEKLEHETVIDPAVVHLANIDFVSNIISTLRQQSDVSDVALSLFRVPRRLVYLHAKASPR

SEQ ID NO: 51679 - protein, 118 aa, Zea mays
  Coding DNA Sequence Number=SeqID_8304
MTGKKTTTSCDGGTPKKAKVVVEDEEEAGLEDEEEATVTLSVEKDALELQHDVLLCVKSVQERAFWMCKVLHPHGRKNYMLRFVGAFILIVRNDLFSIEDLCSTISKDPWVIFVTYLT

SEQ ID NO: 51680 - protein, 271 aa, Zea mays
  Coding DNA Sequence Number=SeqID_8305
  Gene Ontology: Mol. function=protein binding; Cellular component =nucleus; Biological process=regulation of transcription, DNA -dependent
  Homolog annotation: Hit_ID=Q8W514; Match level="QueryCoverage=100%, HitCoverage=74%, E-value=1e-142, Identity=78%"; Hit description=MSI type nucleosome/chromatin assembly factor C
  Pfam annotation: Domain name=WD40; Domain location=174-213; Score =28.6; E_value=2.3e-05; Accession=PF00400.23; Description=WD domain, G-beta repeat
  Pfam annotation: Domain name=WD40; Domain location=218-257; Score =25.6; E_value=0.00018; Accession=PF00400.23; Description=WD domain, G-beta repeat
  Pfam module annotation: Pfam domain module=WD40::WD40; Domain location=174-213::218-257
MPKAGSGVADEEDFRAEVDERLINEEYKIWKKNTPFLYDLVITHALEWPSLTVQWLPERTEPPGKDHWVQKMILGTHTSDNEPNYLMLAQVQLPHEDTEADVRHYDDEHSDNGLFGAATGEVQIVQQINHDGEVNRARYMPQNSFIIATKTVSAEVYVFDYSKHPSKPPLDGACNPDLRLKGHNSEGYGLSWSIFNEGHLLSGSEDAQICLWDIKANSRNKSLDALQIFKVNCLAFNPFNEWVVATGSTDKTVKLFDLRKIHTSLHTFDCH

SEQ ID NO: 51681 - protein, 84 aa, Zea mays
  Coding DNA Sequence Number=SeqID_8306
MEHGIHLFHHCIATISIVDSLAELLKDEERRRTSPFPEVVDQAGCYTAAVGGGHRIVAHHDGADRASWRPSPASWDSRGVVESI

SEQ ID NO: 51682 - protein, 197 aa, Zea mays
  Coding DNA Sequence Number=SeqID_8307
  Gene Ontology: Mol. function=hydrolase activity; Biological process =lipid catabolic process
  Homolog annotation: Hit_ID=Q6ASS6; Match level="QueryCoverage=100%, HitCoverage=43%, E-value=7e-52, Identity=60%"; Hit description =Patatin-like phospholipase domain containing protein
MGNPADAAITHVLHNKQELTLANGVHDILVLSIGAGASSAAVCDGSSTPVPARSPSPRELARVTAEGVADMVDESVATAFGNACGRSYVRVQAGKAPAPLHAATASTAAAAMLAQRNVESVLFRGRRLSERTNAEKVDALAVELVKEQERRRRSPLPNVAIKQVPTPRLSSATATSGTATARTASAMPSPASCDSRR

SEQ ID NO: 51683 - protein, 43 aa, Zea mays
  Coding DNA Sequence Number=SeqID_8308
MEEPLPKPAPSAAAEEVAERFRSLVDPDDVASIRQTQHLICCA

SEQ ID NO: 51684 - protein, 78 aa, Zea mays
  Coding DNA Sequence Number=SeqID_8309
MASSSNLWHQRLKRMYEDEQVVHMLHASNVADEEEKLHVHRGSVPDESIEQQKAQHDQTCHKLEPLASTYPRTNIRAT

SEQ ID NO: 51685 - protein, 433 aa, Zea mays
  Coding DNA Sequence Number=SeqID_8310
MQVVELVPCARNKWGNWNEFWFYVAEGAVEGHEGLPVSEMCSHFYSAYPPFEVAEEDADEGALRCAAGLSSGRDLVEEFVAYRKVDEDVRGPGGKDVFARAPGVFGSDAEGSGEGQLAMVAPAAATTTAAAVPKAKGGALSVGGEVSALAVVRDEAGAASRRLKEVTEALNQVADFASRTASGALTAAVAAEVERLRTQHADAVREKSAADSKCRKLADKVATLEGEKADLRRQLAEERRETNEALVKAQAVQTEANLARAEGNLARERAEQLQERLTALESRVERAEAMSRAEAERTRQLLIDTYRGLGAGTGDFEVPDREPGLRCLEWVQEELQALPTVVEGFMAYASLVTCEGAMNALSCEGCWHFEVFDQADEDFERDIFKVEDPVVKESAGAIYDRMWGLHGREVVRERAETARAQAARGERVDDFGR

SEQ ID NO: 51686 - protein, 675 aa, Zea mays
  Coding DNA Sequence Number=SeqID_8311
  Pfam annotation: Domain name=MAP7; Domain location=381-525; Score= -78.9; E_value=0.049; Accession=PF05672.2; Description=MAP7 (E-MAP -115) family
MEVVELVPCARNKWGNWWDFWFYVAEGTVEDHPGLPVAEMCSHYYSAYPQFEVAKEDADEGALRCGPWRVAWRWAKVFELNRLPYDGYPGQDDVDRRGKKLAAETEDDPASAAAPSAKKRRLGTAMGGLGVSDSFAMELMGTCAAPGRRMSSPELWESLARMLKVTGGWWPKNVPIPRVAYEDFFTSRMVHDMRVFPYGRNIAAVVSAVMDKDRQEAAQKRRAVVRLPEARPKRARGTANSAAPGGNQSTLAAKTAAPGSRKVPEVLKAAGVGGTKSASAGAMKTRELPSPARRVADFATNISVDDYLVGSGEGQLVVVPPAVATAVSDAVSGTKGIAHSTGGEIPALAAVKDEAGAVSRRLKEALQRLSQAADFADRVASGSLTAVVSAEVERLWAQHAEAVREMSAADSKCRKLAEKVAALEGERTELRRQLAEERREANQALAKAQSAQAEANVARVEGSLARQRAEEWEEWFNALQARLERAEASTRSEAERTRKQLMDSYHELGARTADFEVPDRESGLRCLEWLQEELLALPTIVEGFMSYASLVTCEGAMNALSREGCRHYEVFDRSDEDFKREIYKVEDPVAARDEKVEDFEALNSARPEAESNPMAAGPEGASAPPPRNHRRLLRCPRSYCGRWWVVANRCAEGLRIPRRRATELAAEDPTAAGSS

SEQ ID NO: 51687 - protein, 156 aa, Zea mays
  Coding DNA Sequence Number=SeqID_8312
MTFVWRSLYLKGDNVSKDEGLNNCVALFLMYSIREQGPIMAFVYVLEHVFNSLDAPTCLNIDVIVEETKEVWVVRDNPSIVQFTPSDLFFIFIITTSVNRFRVLWLGISAEIKRSYCLGHKMAMPQTPLLKLHDIDVGSDLTKNILVGDLFSNAKS

SEQ ID NO: 51688 - protein, 207 aa, Zea mays
  Coding DNA Sequence Number=SeqID_8313
  Subcellular localization annotation: CTP_CleavageSite=73; ConfidenceScore=5.42e-01
MASDPYRRRKGVNPVALHSVVFSAQTASGNKLAHLPFFSSRSIFLTAVKILPLARSTTPLDCGWYTEAKATLVPMEKQKSLKSWLSNCLSLSTKHGYWCPPVFGHNKVDYAVALAVIGYLEPFGASDGWRADNVVEYVGGQGLASGGILGQCVGFFILSPPNVGTCSPVQVDPTGECSNAIRVFARDGNSSVNLASQGHRAGVFIGI

SEQ ID NO: 51689 - protein, 281 aa, Zea mays
  Coding DNA Sequence Number=SeqID_8314
MAPKSRGSHGVRLELNRTQVEHPYDQCHTLVIQRLGDCLPQHSEHPRGSACTQRWRSHGAEPFRHYSALTLVLTPAEWNWHVGKHRRRVHTDSRRANVPVHDAAEMVLVGDEIDDGRSSECARRSGRMPHGAQLPVIPELGGGGIVPSQLMARGCGDWLRCLGLRERMEEGKYSHSATSAPNCRQGIDAQLPRERPWYRHGSSPAAWPRITCGGDGDYGRHTLKPQSRNSRLVAALAKIRKGGEGGCGRLLWARRDRHEFNATTPLSTQRRPWSSARRLTS

SEQ ID NO: 51690 - protein, 237 aa, Zea mays
  Coding DNA Sequence Number=SeqID_8315
  Gene Ontology: Mol. function=protein serine/threonine kinase activity; Biological process=protein amino acid phosphorylation
  Homolog annotation: Hit_ID=A7P2X0; Match level="QueryCoverage=45%, HitCoverage=7%, E-value=3e-34, Identity=70%"; Hit description =Chromosome chr1 scaffold_5, whole genome shotgun sequence
MASNVVSLRSAAWPLLYHFLLFVAETAVVACFSLAVHHNVNVILRAPINHSSTDLLRKPNWLIQIEEGSVWLKRSKNFGDTSGLATNLKSEFYLMDVFISVPYVIHLYNHSYASGISDRLTSATVCPAFAMYLNLLEDDAWACTTLDSIVVCLAHDNDHRKVEQALLKKEAIQNLVKFFQDCPEQFFGHILDAFLKIITKSSRLNTAMATNGLATLLIARLDHSNLVVAKVWRLKFI

SEQ ID NO: 51691 - protein, 95 aa, Zea mays
  Coding DNA Sequence Number=SeqID_8316
  Subcellular localization annotation: CTP_CleavageSite=26; ConfidenceScore=5.64e-01
MAKSAQFGHDHPTTSPRKPKVTTTVRQSTVTRSLRAAAQDCPGGNNGESWSGCQTVEILGLTNPTPLNIKSCPRDFLVELVVVVEVVEDWESIGI

SEQ ID NO: 51692 - protein, 257 aa, Zea mays
  Coding DNA Sequence Number=SeqID_8317
MDCGQRSMGMLVYETEIGIRIKVCYGGYKCSHCTTAVGVNEALADDTIEATALHVLTTFCGFHPLEMSTHRIGLFPAEKEDDPMWKDRVEHAKDVWALYPGYTAHLTVRCMSAMYRLQGLRGAAMSQLMGLVESTKITLDNREDLVVDLSTELVEKDLQVEQMANHIQELEDQVEARENTITIEVLEDQLQNTQQQLEEANQHLDLHHQEIEDMEAEGANEDVDIEGGKEPEPASSLDTAGSGRPPSPESSVALFAR

SEQ ID NO: 51693 - protein, 155 aa, Zea mays
  Coding DNA Sequence Number=SeqID_8318
MQDAARHALSQYCSLFSGVADGLDLKYYPHRSIGSAGGVIVSPVGEGNPRLSSMVNLAAVLNTELDHALDELGKVLAEVAMSENRCRGARRAQPEQQAPQDEAAPQQHLPPPPPMTIEQMFMMQTQPRQGPTRQSNPVARWTAKSLQQPFPLENL

SEQ ID NO: 51694 - protein, 148 aa, Zea mays
  Coding DNA Sequence Number=SeqID_8319
MATGRRERGLTEIWSADTPPAAERDSMARNPGVLRTTPASLLNAKRSSPNHARLLHAVKGTKVRQSILPDYAAKAPTMRAAGFVIPAIFSRRSRLKTLVPDARPSQRLPAINRMRKEAERTRLQDPRNPRNPVAVCYKSWPSKSVLLA

SEQ ID NO: 51695 - protein, 351 aa, Zea mays
  Coding DNA Sequence Number=SeqID_8320
  Subcellular localization annotation: CTP_CleavageSite=45; ConfidenceScore=5.03e-01
MAPAALILYPSLVSILHCRRFPSSDGVHLPIPPWLRRACSVLPARAAASSSDPGAVESRPPLLGDDMFGRRLAAILRDNGEREFMFYHNPASCRSVLQQHPAGCRVVRRACLDISCRVPSLRAAVLPLAGHGSVLRSPRSSPLNRWSRSTRQSHLGRLLILYSPWYNTAVRSDLQTVMAFIVLWSQPDPSMHSLFVHRASRVLAFVVELLNPSSLAHDFIIARALTRFVSSSARSRHDLVVVLCVIKQSQESGEDEASSMIFTKCSTTARTSCRASFSSTPSREDTLVLATRHQLNKRNPKDNWSRIEIVYIARQTCVINDVNRKSTSCFRLSHRISQGLSNIDISVSTKI

SEQ ID NO: 51696 - protein, 82 aa, Zea mays
  Coding DNA Sequence Number=SeqID_8321
MKLWKETSRSSKITTSSRCGLAATPSRLPVKAALSTFLFRTLIYWHEPQQLTLGHELDNVPHAGAIALKHKLLFGPLALEHS

SEQ ID NO: 51697 - protein, 96 aa, Zea mays
  Coding DNA Sequence Number=SeqID_8322
MTQKRWCAVEGTKTPRTGAEPPLARLRKQGREGDSTARHWSMGVRSSLLPCLKGAPRGEMELSPAPAPWEKKQQGATGREPWLLGAPAPGEPDHGC

SEQ ID NO: 51698 - protein, 58 aa, Zea mays
  Coding DNA Sequence Number=SeqID_8323
MRLSQNTLNTKQPAKVSKDDGGGPLGECDGCAASNFNMAGLSRGIGEFQQAMVSKVAV

SEQ ID NO: 51699 - protein, 509 aa, Zea mays
  Coding DNA Sequence Number=SeqID_8324
MKVVELVPCARNKWGNWYEFWFYVAEGTVEDHLGLPVAEMCSHYYSAYPQFEVAEEDADEGALRCAADLSSGRDLVEEFVAYGVWPLVHGWALGEVCPRQMPSRGGMLVRSPSFALDQHSRDPTAFVREAEDGAVRIVGRVFELNHLPYGGYPGQDDVDRRGKKPAAETGNDPAPAATPSSKKRKLGTATGGLGVSDGFAKELMRTCAAPGGRMSSPELRESSARMLKVTGGWWPKNVPIPRVAGKDFFTSRMVRDWRVFPYGRNIAAVVSAVMDKDRQGAAQKRQAVVRLPEARPKRSRGTAKAAAPGGSQPTLAAKSAAPGSSRVPETVKAASAGRTMPAPAGAAKARELPLPGKRVADFATKISVDDYLVGSGEGQLVVVPPAVATATAAVMPRARGSDLSAGGEIPALTAVKDEAGAVSRWLKEALSQVADFADRVASGALTAVVSAEVERLRAQHADAVREKSAADSKCHKLVDKVAALEGERADLRRQLAEERREANEALAKA

SEQ ID NO: 51700 - protein, 232 aa, Zea mays
  Coding DNA Sequence Number=SeqID_8325
MDIVVEEGNTDVGNTVEPSYEVVARSGCSAQLSTNDTNEHELDIESEDSKVSVGNAAKQSHDVVGVGIDCIFNHVKVSTEADLGTQPDVIHLTSLDVPNESSQISSEQNKQDALDTLIRISQHKKPKKLNVARVVSEDYKCTPEDVQLIEYIKTLPGKQVVVDIDSAWLNRNDMECLFHGDIQVSGEALSAYIHCIRNEEHLLHREGGKVFIPMNIENFHWYLAVLNAKKNE

SEQ ID NO: 51701 - protein, 279 aa, Zea mays
  Coding DNA Sequence Number=SeqID_8326
  Gene Ontology: Mol. function=voltage-gated anion channel activity; Cellular component=mitochondrial outer membrane; Biological process =anion transport
  Homolog annotation: Hit_ID=Q1KSB8; Match level="QueryCoverage=91%, HitCoverage=79%, E-value=1e-130, Identity=92%"; Hit description =Putative voltage-dependent ion channel
  Pfam annotation: Domain name=Porin_3; Domain location=17-272; Score =179.9; E_value=6.6e-51; Accession=PF01459.13; Description=Eukaryotic porin
MYARPLLVSFLYANCKADLSYLAIYLLYKDYNFDQKFSLSTSSGSATGVKINEDFIGDIRTQHKSSRTTIDVTVDSDSKVSTTVTVDEALTGLKTSFAFKVPDHKSGKLDLQYAHNRFSLNSTIGLTSAPLVELAATVGTSELSIGAEVGFDSTSAAVTKYNSGIGYNKSDFSASLLLADKGETLKASYVHLFNPTNGATVAAEVTHKLKTRENYFTVGSSHALDPSTLLKMRFSNSGKVGLLCQHEWRPKSLVTLSAEYDLKVVSAPSRIGMAISLKP

SEQ ID NO: 51702 - protein, 88 aa, Zea mays
  Coding DNA Sequence Number=SeqID_8327
MTEKKTTTSSDGGTPKKAKVVVEDEEEAGLEDEEEATVTLSMEKDALECDICCLPFQSEVFMASQITMHCKNGHSGCAKCCIRTDESH

SEQ ID NO: 51703 - protein, 99 aa, Zea mays
  Coding DNA Sequence Number=SeqID_8328
MACPSLGRLLWASDSTRPLHVDGSGTATWPEKMIYSKVSIVSSDPHGKVSDPCIYRSGLRVRSRTPTGANQTPRMGRCAASAFNEPCPFRWQAMCRLRI

SEQ ID NO: 51704 - protein, 52 aa, Zea mays
  Coding DNA Sequence Number=SeqID_8329
MTTDRPLELLHMDLFGSIAYISIGGRKISYPIDPKGILETGSKRVRLKDKKD

SEQ ID NO: 51705 - protein, 142 aa, Zea mays
  Coding DNA Sequence Number=SeqID_8330
  Subcellular localization annotation: CTP_CleavageSite=63; ConfidenceScore=5.21e-01
MAANLLCPLAVPPLLPQASAFPDHISMTEQQLCSPPSFFFPLCSSKKPLLVALASNFAAQRCRSKTAAPDPLRTACFTGSAQPQHRRCSPRREPRVLRGEGKPLDARRMFGAMHKSESPSFLQTPFGFVYGELMHVALDRLD

SEQ ID NO: 51706 - protein, 1171 aa, Zea mays
  Coding DNA Sequence Number=SeqID_8331
  Gene Ontology: Mol. function=binding; Cellular component=nuclear pore; Biological process=NLS-bearing substrate import into nucleus
  Homolog annotation: Hit_ID=Q10EF8; Match level="QueryCoverage=80%, HitCoverage=90%, E-value=0.0, Identity=75%"; Hit description=HEAT repeat family protein, expressed
  Pfam annotation: Domain name=HEAT; Domain location=367-403; Score =11.7; E_value=0.48; Accession=PF02985.13; Description=HEAT repeat
  Pfam annotation: Domain name=HEAT; Domain location=409-444; Score =29.5; E_value=1.2e-05; Accession=PF02985.13; Description=HEAT repeat
  Pfam annotation: Domain name=HEAT; Domain location=450-485; Score =4.2; E_value=6.3; Accession=PF02985.13; Description=HEAT repeat
  Pfam annotation: Domain name=HEAT; Domain location=491-527; Score =10.2; E_value=0.8; Accession=PF02985.13; Description=HEAT repeat
  Pfam annotation: Domain name=HEAT; Domain location=689-726; Score =2.2; E_value=13; Accession=PF02985.13; Description=HEAT repeat
  Pfam annotation: Domain name=HEAT; Domain location=744-781; Score =4.4; E_value=5.9; Accession=PF02985.13; Description=HEAT repeat
  Pfam annotation: Domain name=HEAT_PBS; Domain location=158-186; Score= 0.6; E_value=84; Accession=PF03130.7; Description=PBS lyase HEAT-like repeat
  Pfam annotation: Domain name=HEAT_PBS; Domain location=388-413; Score= 0.2; E_value=97; Accession=PF03130.7; Description=PBS lyase HEAT-like repeat
  Pfam annotation: Domain name=HEAT_PBS; Domain location=429-466; Score= 13.2; E_value=0.99; Accession=PF03130.7; Description=PBS lyase HEAT -like repeat
  Pfam annotation: Domain name=HEAT_PBS; Domain location=512-544; Score= 3.9; E_value=27; Accession=PF03130.7; Description=PBS lyase HEAT-like repeat
  Pfam annotation: Domain name=Hydrolase; Domain location=901-1109; Score=10.6; E_value=0.0071; Accession=PF00702.17; Description =haloacid dehalogenase-like hydrolase
  Pfam module annotation: Pfam domain module=HEAT::HEAT::HEAT::HEAT::HEA T::HEAT::HEAT_PBS::HEAT_PBS::HEAT_PBS::HEAT_PBS::Hydrolase; Domain location=367-403::409-444::450-485::491-527::689-726::744-781::158 -186::388-413::...
  Pfam module annotation: Domain location=429-466::512-544::901-1109
MDPQSDAGAAVVLGADPAALTALLADLTSPANEARSRAEQQFHAFRRSHPDALALSLAHLLLSPAHPSAPIAAVLLRRLIAPSSQSFVYPALSPATQSSLRALLLSAASAPALPRSVSRKLSDAVAELASFLLPANAWPDLLSFLYKSIDSTSSPPGLQESALNILARLASHLAASFPNLHGLLHAALSHPSSADVRVAGLNAAISLIQSLPSAAARDQFQDLLPAMMRALAESLNCGNEGSAQEALEMMIELAGAEPRFLRRQLPDVVASMLQIAEAPGLEDGTRHLAVEFVVTLAEARERAPGMMRKLPRYVGRLFAVLMSMLLDVQDEPAWHAAVSEEEDAGETGSYVFAQECLDRLSIAVGGNTILSVAAELLPSFFSSEDWKRRHAALVTIAQIAEGSAKMMIKNLEQVVGMVLNSFQDPHPRVRWAAINAIGQLSTDLGPELQNQLHHVVLPSLASAMDDVQNPRAHAASAILNFSENCRPDILTPYLDVIVGKLLLLLQTGNQMVQEAALTALASAADSSQEHFQKYYDAVMPYLKAILMNATDKSNRMLRAKSMECISLVGMAVGKQKFKDDAKQVMEVLMTLQGSQMEADDPITSYMLQDFLPYMSVVMPPLLQSAQLKPDVSVTSAGPEDENGESDDEGVETITLGDKRIGIRTSLLEEKATACNMLCCYADELKEGFFPWIDQVTTTLVPLIKFYFHEEVRKAAISAMPELLRSAKLAIEKGQAQGRDKSYLKQLSDYIVPALVEAMHKEPEPQICASILESLNESIQLSGTLLDQNQVRSAVEGVKEVIVASTNRRIERTERARAEDFDSEEEELLREENEQEDEIFDQIGDCLGTLVKTFKTSFIPFFDELSMYLTPMLAAVYGIGICAECGGSAFRPHTGEALSRLYNVIKHPNALDLDNAMAYDNAVSALGKICRFHRDIIDVSQAKLGVSADEAAATRAELFRAHGSSLAGLIALGYDVHPDEYHSYVHGRLPYDRIARDPQLARLLQSIPQRKVLFTNSDRAHMERALERLGVDEAAFDAVVCFETMNPHLFGDDGGDRRPAVVLKPAVDAIVAGLRAAGSNPRRTLFLDDSERNIAAGKALGLRTALVGKRARSKEADYAVESIGALRRAIPEIWGEAAERSSDKLPVPAVSVVRSTTSDLDSIIIQPTSIHA

SEQ ID NO: 51707 - protein, 278 aa, Zea mays
  Coding DNA Sequence Number=SeqID_8332
  Gene Ontology: Mol. function=isomerase activity; Cellular component =integral to membrane; Biological process=post-Golgi vesicle-mediated transport
  Homolog annotation: Hit_ID=Q53RC1; Match level="QueryCoverage=82%, HitCoverage=81%, E-value=3e-80, Identity=66%"; Hit description =GNS1/SUR4 family
  Pfam annotation: Domain name=ELO; Domain location=4-278; Score=7.2; E_ value=1.8e-11; Accession=PF01151.9; Description=GNS1SUR4 family
  Subcellular localization annotation: CTP_CleavageSite=20; ConfidenceScore=5.12e-01
MAAASLLSRARWLLVEHPAVASFRWQPGRTVGATPSFAAAVICGYLAAVLVLRRLVLPRLPALPPPALRALSAAHNAVLLALSAAMAGGCALSTAATAPAPRWAWAFCFPPRGATEASGPVFFWAHVFYLSKVYELGDTLLILLARRPLTLLHVYHHALVVAMCYLWLATRQSLMPVALVTNAGVHVVMYSYYLSCSVGLRWPGRWKRAVTELQIAQFLFSFAASVVMLWLHFAAGGCEGMAGWVFNAVFNASLLALFLNFHGAAYKGAAKANKGKAE

SEQ ID NO: 51708 - protein, 57 aa, Zea mays
  Coding DNA Sequence Number=SeqID_8333
MTWQGAPDCPVCTGLSAAPSLFLSSPFAAALYPLHDFLLPLDLPHAARIEKRRSTLN

SEQ ID NO: 51709 - protein, 203 aa, Zea mays
  Coding DNA Sequence Number=SeqID_8334
MELLEKQEPEGWIARPITRDAALGCHFHDALDTLLRRAFDRHTWSIEYRCVVYQHHRGLYLDQWEATCLVRRPDDDLQGADAFLEHYSITKMDTVEAAMQDVARRALSHAGGVIVSPVGEGNPRLSITVNLVAVLNTELNHTLDELGKARTEIAELRAERATRHHQEGGSPAPVGIYHPYRSPPRGRYAYGTPDCRTQIDLEP

SEQ ID NO: 51710 - protein, 412 aa, Zea mays
  Coding DNA Sequence Number=SeqID_8335
MDHQRLRADLPLARPSGPHGRIVRPCPVPQMVLNICPSLLGKLSELKTDDNPIKGLTSVLSVEQVLNAKLTGFNTKTTDQAKDGGKKSFEVPSAREKVKDTKNPKPGVKKKTCKVKVDRVKKSYAKSGLGRHRKLRLARPQGPDSASAPDDDELRLARPQGPETASTPEDDELRLARPRARTRPWPRKTTNSASPDPGLGLGLGPGRQRTPPRPTPGSDSAMAPEDDELRLARPQGSALALSRRSPPRPTQGLGLDLDLGRQTRPRPRRSLCLARPRARTDHVAGGAIIALPLASSGYGEQDRCPVWLASAKQIMMAPRVLHDDGSSQPPYGSKETSARTRQPRQLSFRQAPALLRRPRHLMNRVPKPLQLPRQHGPPGVETPTVGAPGRGLLRVGEQLPVKLQMDSLQQPF

SEQ ID NO: 51711 - protein, 43 aa, Zea mays
  Coding DNA Sequence Number=SeqID_8336
MALLSTVETCSVSNLSWCCLIVLLGCWGDGVRVGMGGEVRLPP

SEQ ID NO: 51712 - protein, 144 aa, Zea mays
  Coding DNA Sequence Number=SeqID_8337
MDRGYGPSTARRSCRVGPGTIKCVVRQTRPIWPPHDNNEGIGACASSPYSSDTSPDTDSRSGYCTSTRTFHIMCAPSFSPSSGVPFVFPAFAMFFLPNLLSPPTVATDVRRRGYGVSRSCSWPFSVCAVEEDMVAPATLRLSWR

SEQ ID NO: 51713 - protein, 150 aa, Zea mays
  Coding DNA Sequence Number=SeqID_8338
MPDGEWGPMVAKSIQCQPYMEQLSQEEMTPEAKMEGHPEVPLVKCLEGCHVLDLVRVEVLHLNLIMVEKPYQNAMMRHHETTLVEVVERDQKSCRRLRDALRTRKPIIPLMKKPTVNGMERDCESGMATERFRPVDFLEWNGSGSKENIP

SEQ ID NO: 51714 - protein, 108 aa, Zea mays
  Coding DNA Sequence Number=SeqID_8339
  Homolog annotation: Hit_ID=Q7XBD4; Match level="QueryCoverage=95%, HitCoverage=10%, E-value=8e-10, Identity=38%"; Hit description =Cinful1 polyprotein
MADNIGFLNLKAMLSTMSSEDFSNCLAYTHLKGMFLSKALENRKNVEGEVAQRGIVKLRSKVSELRYNCGEKEKFFKILEKDFIKSRTKVQTLSEEKTNIRKQWKIKY

SEQ ID NO: 51715 - protein, 129 aa, Zea mays
  Coding DNA Sequence Number=SeqID_8340
MTGKKTTTSSDGGTPKKAKVVVEDEEEAGLEDEEKATVTLSVEKDALECDICCLPFQSEVFMASQITMHGIELRGMLRSTFLILVGWKNYMLRFVGAFLLIVRNDLFSIEDLCSTISKDPWVIFVTYLT

SEQ ID NO: 51716 - protein, 57 aa, Zea mays
  Coding DNA Sequence Number=SeqID_8341
LIRIRGVVRFAVVPSMGHGRYFGTGGYEIDGFSYDYGAGEDEAVEGDFQEFQDYDEF

SEQ ID NO: 51717 - protein, 148 aa, Zea mays
  Coding DNA Sequence Number=SeqID_8342
MKEEKVNPRWFLTDGLTSHKPTTPPMSACTPPSWSCPTIELAWIRNPPDLVGAVRVCESGLEGHGRGFSPHISRSPRGRSPRRSCMAGRRLLRRVFRGVVQGVCELGDRVKDAGAGFATVELGPVEGDNYKEIPGEIRGARERLGVDA

SEQ ID NO: 51718 - protein, 163 aa, Zea mays
  Coding DNA Sequence Number=SeqID_8343
MVCFGLGGRRRHTLQDNPTLQARVLTLEGGSSTLGIDDTFGEGLLREPGPSRRLGRSPRGLGQPSSKDVSPTRGLGWSTPASVPLTDDPARLRPTRFHFRANSAPVHADTAAPGLGSSKSGQGVPLTKLEKPRTTRPTEPRDSYASGIRIPHSSPLHGVTHAW

SEQ ID NO: 51719 - protein, 84 aa, Zea mays
  Coding DNA Sequence Number=SeqID_8344
MADEAIKKNEKESHDTLEEAKRAEEAAEWARLIAELSPPPEPYDPETDPYVKEALDIIKIANDAINEAVDKLLNESADKVLKED

SEQ ID NO: 51720 - protein, 101 aa, Zea mays
  Coding DNA Sequence Number=SeqID_8345
  Gene Ontology: Mol. function=kinase activity; Cellular component =ornithine carbamoyltransferase complex; Biological process=amino acid metabolic process
  Homolog annotation: Hit_ID=Q6QP54; Match level="QueryCoverage=82%, HitCoverage=31%, E-value=7e-17, Identity=54%"; Hit description =Putative kinase
  Subcellular localization annotation: CTP_CleavageSite=57; ConfidenceScore=5.01e-01
MEPGGGIAVGVVGSLLTSSCFPWGRVMMAPPVDVAGLRPRLGDVEAPPKPRSSLSSVAEAESEPLGRARRRPSAEARAESEPWGRAKRSSSSSGAEPEFEP

SEQ ID NO: 51721 - protein, 238 aa, Zea mays
  Coding DNA Sequence Number=SeqID_8346
  Subcellular localization annotation: CTP_CleavageSite=30; ConfidenceScore=5.09e-01
MSSRSIMHRVFPPPKPPDGGYPPSFRLIVGGTQLRGSWYLSAIIRLQGFSSASPAAPLHRRSPKTVTSSPWMGRGKPGCDLGPALSLEGVHHPRWGGERGEPGLYLPRGPAGHLFFQLLVVENILRPCGGDVLQPCQGGRTVAAQLGCNIPPSSSLSRRGRQRGPAGALWSGPLFGFNSWFASLEREREREPSGGRVRPGTMAAAAEVTGGSPGIRRPAGSPVRRLFVPAGTEPEFCL

SEQ ID NO: 51722 - protein, 106 aa, Zea mays
  Coding DNA Sequence Number=SeqID_8347
MGCFMLCWHKSPKRGRLKGKCAFGPFLSILVIECQHKCLNVNLCPWMNKVQITSKVELSPPLEPFDPLADPETKKAIEIINMAESIVDEVVNKLLNEVAEKVMKED

SEQ ID NO: 51723 - protein, 190 aa, Zea mays
  Coding DNA Sequence Number=SeqID_8348
  Subcellular localization annotation: CTP_CleavageSite=80; ConfidenceScore=5.55e-01
MPSRRSSVRARPSHDARIPRQGHHLNPNVPLTSRFSLSFLHSQPSSLSCSPLLTTATVAPHVHHSRCRVLACWSVVELVLAACVRRRRAVPGQPRCAITPCFRDPPFTTPAPSELVPNIRVLVRASPCCLDIRRRPSVITTFVGSSRQVTQRYLIRDVRITGGDENDGFGIDYGNGKEGEKGVDADLQEF

SEQ ID NO: 51724 - protein, 109 aa, Zea mays
  Coding DNA Sequence Number=SeqID_8349
MPSSSSSSDTTPPAAASSEETLSSVMVEELRAGDSVDFGVSRMTSARVEDMQRLGYFGGGVARAPGTEEVPEPEEVGGGDISYKAAVKLTIAEATHDHVEGTHLNCFPP

SEQ ID NO: 51725 - protein, 547 aa, Zea mays
  Coding DNA Sequence Number=SeqID_8350
MGTEHGVSGELQAATGALVARRVGLGLQAGVSEVGEARPPGAVACRLHGWGIACNSWAVVCTARGGLASSASELGESPLKGGRPLSEGNHVFFLPYASCLSIFQAPGWGYPPSFLLLVGGTQLRGSWYLSAIVRLQGFSSHSLVAPLRRWSPKTVTSSSWMGRGKPGCDPVLSIGGVRHPRWDGERGELGLYLLRGLADHLLFQLLVVAIALPCCDGDVLQSCRGRRTVAAQLGCNIPSFPSHSRRGRQRGSVGALGSGPLFGFDGWFASLERDREREPPGGRVRPEPWLLLQRSLTSLPMFVAPQARGRSYPRGRNRSSACDGTLNASSSSLVKGTPWPLFDEPRPGVAISVRTEAELARKWEPGWLEPSRVARQRGSTSESISRGLGSGWRPWKMLGRGPRGNRPSRLLGPDSRRSPWTASPSEAGSDLAEGVVDAEGATAPFSVKTRACRIRSSCSVCLLRPPRPENTPSLRCKAASPFLLCRASGLSVGNRDVCVGESCFSRKVMSEKVMSEVSVSRRRRSPSARSALAAYVYSVVSRIRFSK

SEQ ID NO: 51726 - protein, 231 aa, Zea mays
  Coding DNA Sequence Number=SeqID_8351
MGKINGKRKRKRHFQLAGPGALAAQLAQLRGSDDGERRRGAGPHAREREGADGVDGNRGRGGLDRSPAGGESRGGSPPLVRSFGAEAVAKHGRVQGITGVGLIGPAGAYGGRFAARWRVSVAVWSPVRQLGAIGGGEGCLVTMIVWRSSSASSIVQRITRKGKRTSPERRGRHGGASLIGSGESSGDGQSWCGEDGARAGPFIGARGKERDGGDGEHRRARHDGGNGANAD

SEQ ID NO: 51727 - protein, 374 aa, Zea mays
  Coding DNA Sequence Number=SeqID_8352
  Subcellular localization annotation: CTP_CleavageSite=51; ConfidenceScore=5.72e-01
PAAAPARPGPVAAPARPRSSPARAQRGPGAAPVAPARRRGPGAASGPWRVPGAAPADSAAPGRFNRPGPGSAARSPVPASPDRGYEIDGFGHDYDTASPLQPNRMLAEYVDMARLRHTARKSVIPFLPSRLAERPLRRPVAGQSSHLERLHHRLHEEQERRRQEQQGSSFSLQQEIESVRSCSPVLSLEAPPAPPQGALAPGVAAGGDLDDGGGDDSSSHDTDFSANHELEGWFARSITRDAARGCHFHDALDTLLCRALNRHTWSIEYRCVVYQHCRGVYPDRWEATCLVRCPENSLQGAEACSEHYSISERDSAEAAMQDAARRALSHYCSVFGGAADGLDLKYYPRRPSGSTGGHQSYGNPACKTKITLEP

SEQ ID NO: 51728 - protein, 154 aa, Zea mays
  Coding DNA Sequence Number=SeqID_8353
MRASRSSAVTVEKGHGSRGGTMVTRSTISKQKRWRRKGLGERDRERGYPERDPSPRRKRALSPLLIRGSKAGPSEGFNSRLRALWLRAHYWSEVRRPAPRKGSTAASSHSGSAPTTHQGFVGWPSKGFDNRLRRRARDDSGYVRYITKARATLP

SEQ ID NO: 51729 - protein, 202 aa, Zea mays
  Coding DNA Sequence Number=SeqID_8354
MTSLAKEKRKIRPQIRAEAKAGSHIIVFIVVFIIVVVIRRLRRRLPREPIPLLPTTELFQGAPSPHPLAGPSLLRVLFLLPLLRGNPPRSSVYRVLRDRWQERLVMLYLLETDEKSRLREPRAIRRKEKEGADTHQGHTPAVRTHQGLGKGAGVRLPQRDGYPPVEVIDGKGSEDIRKPSKSASGVISQSGSRCSIKGSTLR

SEQ ID NO: 51730 - protein, 156 aa, Zea mays
  Coding DNA Sequence Number=SeqID_8355
MVGRSKPGCGLCPTLSFKDLHHPCWGGGQAEPELYLPYRPAGHLFLQHSGERALTGLAEGADFENAGPIGRKRRQLQHAWLVGSAGSGAASVTTSHRWGGVWLSARRTGGCCAVRTGGPPKTSHAARAAFVFLGCPALAPARCLRVEVGARLSGRT

SEQ ID NO: 51731 - protein, 199 aa, Zea mays
  Coding DNA Sequence Number=SeqID_8356
MQHLVVRCREAAEAIFVNSFDAIEPEAVEAEPNGGGSADVDFLQREEAERRERGDGGRESYRERECESDEMVDDEGSNDESASLKSRSTRSTPQPPRTPGSKGGVAPPWSRRRCLRLDRRTSTRQANWRGSARARDGGSARYQDLVGAGDGIDEGTRGRTGDRVAGQGRGEAGALCRCGGVYGREISTRGSGDARAEAR

SEQ ID NO: 51732 - protein, 92 aa, Zea mays
  Coding DNA Sequence Number=SeqID_8357
MARVRRDIDVVRQCSNTRPNKARSWARDEDAVEVGLAYARRDERRERRAKEAYLVTEGLARSGSEDETRGYATARDIFIEKRGCERRLQNLS

SEQ ID NO: 51733 - protein, 226 aa, Zea mays
  Coding DNA Sequence Number=SeqID_8358
  Homolog annotation: Hit_ID=A1Y2B7; Match level="QueryCoverage=36%, HitCoverage=15%, E-value=3e-22, Identity=61%"; Hit description =Leafbladeless1
MVVRWGTNVLAGACVALGRRHAGEKGRLGGREGGGSGAREKGRRAWSSAGAGKRLALVTAGGEVEGAGRGEGGLQRELELAGCGVAAAGSRDGNGYPKSKTRWVFTPLGYEFGSIFITMGLLMGINLYPMGLWVRWLENDGETSRNILTPPLATGWQWQSRPCPFGSEVKKDDAPPSSSDPEVENVDGNNTSDDADDDLSDDYDFDASEKSFETRKMNKWFKEYGL

SEQ ID NO: 51734 - protein, 411 aa, Zea mays
  Coding DNA Sequence Number=SeqID_8359
  Subcellular localization annotation: CTP_CleavageSite=55; ConfidenceScore=5.07e-01
MHPGYGQAAWGNDQAGQGTTKSIKTSEESNHSSDASGATPGGSRPRLPRDAISPRPSPASGGNSSPGRIHASPEGLLRWSAHPRLDRSSARAGFVEKQPWPNRLTSRPYHRRIQWEDRLTPYPNTRVSVGKVEDPASASASGGTASSPDPGLGLRRSLRLARTWAWTDRPSRAGAPRRGQGTAHHGRAEARTGERGAGAGTARRPGVHAEPVAPGSSERATPGHRGQAARAAAGRQPSRPRGKRRRRREREASSPQGRRRRERGSSGATPGDSEEREANSAREKKAGVVGEMNRDGFGTYRRAPHGAAAAGQPPNAHACGESGASYWGRLGHAPAGRPKTGGGGPRVGGGSAGQRHNAELGHEPASRPRRGGGARGPREKGWRQMGRQRGKHRPKKERGEREGKRKGFFPF

SEQ ID NO: 51735 - protein, 104 aa, Zea mays
  Coding DNA Sequence Number=SeqID_8360
MMKCYGLVVREEESVPPKDVVVAEAEPSVAEADSDDEDNDDIMSLSKPSHIEYGKYTIKTEDLVFESRIEGEEQRIEFGFTVAKVKLIQEQIASRERQTDMTDG

SEQ ID NO: 51736 - protein, 81 aa, Zea mays
  Coding DNA Sequence Number=SeqID_8361
MVRGNWLSRRRGRRSWTADEADQQQATQQDDLVQQQAAPQVDDDQQQDDNDQEQDASGSGASGFDDEKLQLQSAPVTNGNP

SEQ ID NO: 51737 - protein, 219 aa, Zea mays
  Coding DNA Sequence Number=SeqID_8362
  Subcellular localization annotation: CTP_CleavageSite=53; ConfidenceScore=5.04e-01
MSTGKQHNGVTTQKSGRISITGSIYSPKAGRSRWSFLWKAIIAFCPWAHRTVQCPTGQGTVCDFLPFLAKLTVAAAALVAHRTVRCGLVTIGEVHASPANCVVDRWRGRCWLTGQSAIGKDKKGQGSPRRSGDKRKREPSPSSEDFGDSEYSEEEFSSESEGSPEGSGGDGYDEGDGGDGDDGGDDDSKGGGGDGSGKGGDDGKGSSSSSKVGGKAPLA

SEQ ID NO: 51738 - protein, 327 aa, Zea mays
  Coding DNA Sequence Number=SeqID_8363
MVTSSSMAGESKLGRDLCPSLSLKDFHHQGWGGDCRVPGSRTRVASEPLSALASATAAGRGSSADEIARAAHGPTSNSTAFCPSLPHEFGHGRGPPGNSIRPEVIAAAVRPPGAEVVVVIAAARAGDGAPFVGLPLLRRPPPSSGVESLGSVGLVVRGFPCLVKGTPRLLFDEPRPGVAVSAWTEAELVRKEDLVGRSLAGSSASRTDAGVDLPRSRAGLMSSGDSWPRPRGDQPRRLLEPDSRRRPWRRWPGCGDDAVLRSGDPRTASPPDARSDLAEGVVDAEDLALTVGQLVRSGLQNFGDDEQPLPGGRELVPPSGVLSQPKH

SEQ ID NO: 51739 - protein, 165 aa, Zea mays
  Coding DNA Sequence Number=SeqID_8364
MTAQTTHELITASFMHLILWRTAQLPSAHARGVAAIWAHSSAYLFAQAGYCVVGSAGQLLPRENRSVRETTGIDRNGAGSTARENLARIPIPQPFSSGVRSAVGSAFNHRDRLQRSLPWPPGSGLTVVSRAVDGERFSGKEMVALCFDSAGRTERERSTASVQDL

SEQ ID NO: 51740 - protein, 124 aa, Zea mays
  Coding DNA Sequence Number=SeqID_8365
MKIFGNSWQKAKLICAIAEADRDASDYLKNYWEKTIVKLRSSKERCYEKSIECVGKIKTSFRQRRRILQRVQLPELSPPPEPFESLADPKAKKEDEITKMAEAIMDEAVNQLLNEVVEAVLKEE

SEQ ID NO: 51741 - protein, 114 aa, Zea mays
  Coding DNA Sequence Number=SeqID_8366
MRNRARPSPLLLLLLSCWNSIPLVRPTRWQGGRPSHTINHILKHTCKNYATSKAEYTNTQLDLPGYKGSSSLISCQKQMIRIEFLNLARAVGDLLWQARELAPALPRGQLLARE

SEQ ID NO: 51742 - protein, 132 aa, Zea mays
  Coding DNA Sequence Number=SeqID_8367
  Subcellular localization annotation: CTP_CleavageSite=53; ConfidenceScore=5.52e-01
MAKARATLPRYPKTFPRPAGTENNTIHPVPTTVPTTRVRLTTVSHCLSRVQPQAQQGASPRPIPGLGLSLGLRRRSLPRPIPGLGLSLGLGRESQPHPTSASASGEVTASLDLDLGLGPTTLQRIHHYPTSS

SEQ ID NO: 51743 - protein, 223 aa, Zea mays
  Coding DNA Sequence Number=SeqID_8368
RHAIIHRTVRCTPDSVRCSKEARPLELASLGNAQQPLRYNSPDMSGVPILAHRTMNRRCPVCTGHPGGPTSQELQRSESNGSDDVAGAPDMSGTISKKEVSDSMRSLSATPKARSVQGKDLSVVELLLPLVLLCSMSSEDDIDLPCPYASTGCTTGSSDGWSGGLYLLTRPLLPAPVSLLVRIAPWHEWCRFRSSDEVLGPLVGGDVEVCLSKQLFEGGGRFL

SEQ ID NO: 51744 - protein, 88 aa, Zea mays
  Coding DNA Sequence Number=SeqID_8369
MGSLMLGAGRGRQERGHLASSYSSGSIRLDTGIVPKALPCSLDYKLVTILAHICYAPDSALRNGCDTLALITNVLGTRNGEEEKRSKR

SEQ ID NO: 51745 - protein, 568 aa, Zea mays
  Coding DNA Sequence Number=SeqID_8370
  Gene Ontology: Mol. function=oligopeptide transporter activity; Cellular component=integral to membrane; Biological process =oligopeptide transport
  Homolog annotation: Hit_ID=A2Y8S9; Match level="QueryCoverage=91%, HitCoverage=64%, E-value=0.0, Identity=63%"; Hit description =Putative uncharacterized protein
  Pfam annotation: Domain name=OPT; Domain location=77-568; Score =167.4; E_value=3.7e-47; Accession=PF03169.6; Description=OPT oligopeptide transporter protein
MAGAAERDGLSVGLVGAVGGSPSRYSCYIVVFSVQPSSRRPHGSAEEKEAEAGDDNGSPIEQVALTVPAWDDPATPALTFRTWVLGTASCAALSFLNAFFGYRKEPLTVTAVSAQVAVLPVGRLMAAALPERAFFRGRPCEFTLNPGPFSVKEHVLITIFANAGAGTVFAKNLVTSVRVFYGQHMSFLIALLLILTSQVRDERSLLVLLQTSGSLHELAGWVPSSGDGVRLGGSFPAVSGGAGGDVVALQPRAGLPLQVQSLQASNNGRLKITSCKKDQALHEKERRRKGSMTRNQFFTVAFICSFAYYIFPGYLFQMLTSLSWICWVFPSSVIAQQLGSGLHGLGIGAVGLDWSSISSYLGSPLASPWFATANIAAAFFIVVYIITPINYWFNVYKARNFPIYSDGLYTVAGQKYNISSIMDSHFYFDTDAYEKSGPLYISTFFASSYGLSFACLTATVSHVLLFHGSEIWQLSKSAFEDKKMDIHTKLMRRYRQVPEWWFICILVASVSATMLTCEYYIEQLQLPWWGVLLACALAIFYTLPIGILKATTNQVWTPNKHECRCKTT

SEQ ID NO: 51746 - protein, 273 aa, Zea mays
  Coding DNA Sequence Number=SeqID_8371
  Subcellular localization annotation: CTP_CleavageSite=28; ConfidenceScore=5.14e-01
MAAVIASTQNCRVRVPALIVFTAVLLVTAAAATVEPASATGWSSVTDSRSGGYSAFSLQGARKLLLQDLCIPQGERVLFLPLLSACCAVLALVSVWCSRPPPPIVWFRLPLTPRGVDPLAVLGVEEAATGCGSAGSLLSRAQKNEKLGMEAMGIGNPPPPPPSSGSQGSPNEKPEPPKAEEAEQGGGAGSVMNAENDDLQTAANVGEQQVASSSPPPLHAMGPRVSKLTSLLRDANGVEKEHEPAPSRWRPVSWHCPHESCGSACSCIHGCSA

SEQ ID NO: 51747 - protein, 206 aa, Zea mays
  Coding DNA Sequence Number=SeqID_8372
  Pfam annotation: Domain name=IQ; Domain location=48-68; Score=28.4; E_ value=2.7e-05; Accession=PF00612.18; Description=IQ calmodulin -binding motif
MGDLWTNIRADLAKMQATLQKVEQGLLQIKVAVQHEQQQLALSTQLQTSAAVGIQAVARGFLARRRVREMRRQMLEAALVTVDLGTRGHDLALSDDHQQRLRAAISKCEHGTCPEGDELQLYGSGGKEGTPLVIGKGALFSATTFRYRPPRGRLRWLLLRPIPGARPCAPLSSRWRPWDPGGCTRASPMRGGCPPYLMGSKKSDSE

SEQ ID NO: 51748 - protein, 415 aa, Zea mays
  Coding DNA Sequence Number=SeqID_8373
MPHLAAGGSVGGGTKAIKAKEMEPHHDSLPTPKTPRVEPGGQAPPTAARRKMGSVEPTRWEFGNKKHKLFSGNVTERRDPSTSPPGKYRHIPSKQAVYRFEHSLSLGVLEMKSQGHGKLRQREVETLKAKGRRELGVERTPRVEEKQVMAATRGVNPFLKADFPARAPKRHGQGLPRCAPGFPPYDMGVRPHMSYKLARSAKKANCRTRSVQVPCGYTPFHLHRDKEANRRTRSVQPPRGCASPRLRRNQRSNLWHEGPGPHVMHLAHRFLHTEKSHRHPHQYHASSGPPQKTEKLNFQNQCSDSRHPVHGPTKPLSAEVTGQPAAGTGVAVSRRTPPRGRLKGHHVARKDDTSREVSVGPNLREGAPDPCTHNPDPRLRPRTPKQACRPPLDGVHIPPSKVQATTRSRDRETLA

SEQ ID NO: 51749 - protein, 133 aa, Zea mays
  Coding DNA Sequence Number=SeqID_8374
MGKSKKGGSSSHHSGDKRKREPTPPSEDFGDSEYSEEEFSSESEGSPAPAPAPSDDSDDSQGIAAEVWTYIRAVERTGLEGLDESEYSSDEENSSDSSEEGGGDGGDGGGKGGSGDGGDSSKGSSRGSNKASG

SEQ ID NO: 51750 - protein, 117 aa, Zea mays
  Coding DNA Sequence Number=SeqID_8375
MSGAPGGLDSNSPPSEISKGDSAIIHRTVRCTPDSVRCAKGGRPQELASFGKLQRLVHYNSPDCPVCTGLSGVHRTVRCDSGATATSAPTALCAAINARAARADGRRAHTGTPDKEQ

SEQ ID NO: 51751 - protein, 45 aa, Zea mays
  Coding DNA Sequence Number=SeqID_8376
MEWLAEASSRAGTLAEGLAVAIGSAQSAQAVASQQRARAAGFDGS

SEQ ID NO: 51752 - protein, 16 aa, Zea mays
  Coding DNA Sequence Number=SeqID_8377
MAVARLLPGAFEKSGF

SEQ ID NO: 51753 - protein, 155 aa, Zea mays
  Coding DNA Sequence Number=SeqID_8378
  Subcellular localization annotation: CTP_CleavageSite=53; ConfidenceScore=5.74e-01
MGAIQVKAPSTQGTLSRLARAQPRAKAADPGGFTSRPRVPSSNGRTFGSPKAQASRRSNLGQTATPTDRLGLSLDLGRRTPPRPTPGLGLNLDLGRRTPPRPTPGLGLSLDLGRRSPPRPTPRLGLSLDLGGASASPDLGLGPTTSQGGPSLPYS

SEQ ID NO: 51754 - protein, 199 aa, Zea mays
  Coding DNA Sequence Number=SeqID_8379
MAGSRSCLLAGCPRWINVGKLRILVTGLVRWALLFWNLCAALLQPRASLDRVLTHSPRVIPHNLGTVLPASTPAVFTNEVAVHNRLASALVDGSGVLLGAALPASTSPGLLAGFLEPHCVGEVNDPGVDQFQNSKASFSNDQVDLVEQLARHFSRPLTKEQMEAIMELATQGKEKEGIKKKGSKVTPLKAPIIEASEML

SEQ ID NO: 51755 - protein, 221 aa, Zea mays
  Coding DNA Sequence Number=SeqID_8380
MSGRVENPGGGCPERRIGESRPSRPAAVRGGRGEGHAGLLGSGSRGSSRSGISGARGEGHAGLLGGGSRSGSQGVVGRRRCRHYGSLLGEKIHEGAAEPGEGGAWRSPPHSFSFRVAQTESGQGRADAGRGHAGGGLPAPRQGRAVAGSGHTWRWTASTTSVSAPADPRRVNEGHRRMLRAGLLQTEEALDVVPRRGLGWRLAHGGDGRRRLEVTAGGGWR

SEQ ID NO: 51756 - protein, 600 aa, Zea mays
  Coding DNA Sequence Number=SeqID_8381
  Homolog annotation: Hit_ID=Q6QP51; Match level="QueryCoverage=11%, HitCoverage=31%, E-value=3e-07, Identity=49%"; Hit description =Putative growth-regulating factor 1
MHEESAKTWLPSKGVTLLLKATLPTCVLSYRGLSHHQHAPRSSPYDTGAGSYASCKLAQDKRSQTAARGAHNCPAVTSTPPLLPIPAGERADRHACGMQPHQGAHPFDFDVPSMEAQAHTSCNRRASYYVRETAPPHAPVTRLLDCGTGAATRGNPAHGPTVPTEHIGRGSVSRGRKRDSRYGQKWAGSNRGGRRAEAAVKSTSDTFGRRSGRRFTSAIMTASKKPPQSTRAPRLLLIRGSKADPSEGFDSRLRALGVRAHYWSEVRRLAPQKGSTATSDHSGSAPTTDQGFVGWPLKGSTDALEHAERGMTLGTSDTWPRLGLRSRGTLGHFRDQQERFCNEIPSEGGIEPSDPIKRDRVRQITCRSRLRPLKGHDLASPEPSLGQRQPTQEDSRLARGLDLGRRTPPRPTPGLRLNLDAGRWTPPRPTLGLGLSLDLGRRTPPRPTPGLGLESRLEGGRALNALQSTVAREVVVAPLAHRTVLCAPDMSGLNLDLGRRTPPRPTPGLGLSLDLGRRTPPHPTPGLGLSLDLGQRTPPRPTPGLGLSLDLGRRTPPRPTLGLELSLDLGRRSPPRPTPGLGLSLDLGGASASPDLEVNE

SEQ ID NO: 51757 - protein, 323 aa, Zea mays
  Coding DNA Sequence Number=SeqID_8382
  Gene Ontology: Biological process=heat acclimation
  Homolog annotation: Hit_ID=A2Z9N5; Match level="QueryCoverage=26%, HitCoverage=32%, E-value=6e-34, Identity=84%"; Hit description =Putative uncharacterized protein
  Pfam annotation: Domain name=DUF623; Domain location=53-112; Score =72.4; E_value=1.5e-18; Accession=PF04844.4; Description=Protein of unknown function, DUF623
GCSGAPWGTAPPGEAAPAGEGLRRGRGRRRGGKRAGRKGARRVEESVAVVKESTDPLGDFRRSMLQMIVEKEIVGGAELQQLLHRFLSLNSPHRHHLILRAFAEIWEEVFAGLDRAPDFLASSRRRKKPQHLGNARHASAELQGAASVHSRASGRGCPGREEEPPGGGGGGSEAQASSWCRCEGGASAAVYRGERGGRRRCGGAGVAGGGRGWCWCAGAQVRQQHHHSPAQVLKNFSSIHNLRMELPVCDVGTNDDDVLRWKVVFGSTLQSCVILGGAKVDQATAGPRAPTGTDADAEDTSDGGGGGSILESYTNGGLKLRVV

SEQ ID NO: 51758 - protein, 92 aa, Zea mays
  Coding DNA Sequence Number=SeqID_8383
  Subcellular localization annotation: CTP_CleavageSite=49; ConfidenceScore=5.20e-01
MSDPTEKATAATDPDRKTRSSQRDGGSSRKGRSNVDPAGKAVTAADPTKAMKGWATGRVQPGRALRRTWQGVLAAPATGEVRRVALLGDGAG

SEQ ID NO: 51759 - protein, 212 aa, Zea mays
  Coding DNA Sequence Number=SeqID_8384
MATSGLMVGESEPGCGLCPSLSLKDFHHQGWGGESAELGVGPCVGGPLAAPASATAAGRGSSAGAATGTGHGLTSNFSAFCPSLPQNFWHGRGTKISGIDPEVSAAAVRPPGAEVVVVAAAGAGDGAPFVGLPLLRRPSPSEWGRSCLRRGNRSSVRNGTSNASVFCSLRLSGPEHESLGPFGLVVWGSSSLVKETPRLPFGGPRPGVAISV

SEQ ID NO: 51760 - protein, 187 aa, Zea mays
  Coding DNA Sequence Number=SeqID_8385
MEFYNSSHKAPKMVTSSSWPGATVGRGHRGLGRVAAEAWRHRGAGASHWEARARKATRDAGAWARGHQATGARARRGVGAQGRGRGGRRGRGVDGEQGARDGEKEGEVKGKRERERERGGRYKPISLKRISPSRFKSQESALASLYRSSPPGPPGLPLTTALLAHADTSSTETRGRHHAPLTIPLAD

SEQ ID NO: 51761 - protein, 71 aa, Zea mays
  Coding DNA Sequence Number=SeqID_8386
MRVEWDALSLIIKGTGEVVRFAVVLLMGLGVCGSLCQGGDEDDVYDYGNGCPRCNHYLGEDEAVEEDFQEF

SEQ ID NO: 51762 - protein, 92 aa, Zea mays
  Coding DNA Sequence Number=SeqID_8387
MGMDMDINFYPRDNSRARRRAGLRGDSSQIWPLSAPTLSGPLQRQYPSLLADMQRKIADELDRTPMPVALFGEDCQGGRLEQARAALISDRA

SEQ ID NO: 51763 - protein, 114 aa, Zea mays
  Coding DNA Sequence Number=SeqID_8388
  Subcellular localization annotation: CTP_CleavageSite=78; ConfidenceScore=5.20e-01
MTAFSTNFWNYHIPTGLMKIKKKKFLSLKQGGTSAGHFANYCPNRAAYTTPAPMKQGQASGGKSQALSVNHGQVNHVEAEAESSEPENPEEVQVEGEEASEEAMSNKIRVYILE

SEQ ID NO: 51764 - protein, 91 aa, Zea mays
  Coding DNA Sequence Number=SeqID_8389
MATVEERGGGAYRRRDCSSEVVEGVREVLRVTTMCELGKLHGPLAKLTEGQAQLGRGWSELAAVAEAWAVVAGGGAACSRQNPVNFVLGKT

SEQ ID NO: 51765 - protein, 177 aa, Zea mays
  Coding DNA Sequence Number=SeqID_8390
MRVHVSGKADRAKGLLPLRDTDTSLITFRENGVLKTTRVHVSGKADRAEGLLRLWDTDTSLITFRENQGLRKSSGPSRRLGWPLRSLSQMSPEDLSSAHGLGSVTPGLVPLVDNLAKLQPPLLHLLGQGSHVLPGRRSLFSSQLRLCPRRHRYLWVSFFFSLSLITIPLSLRILLFG

SEQ ID NO: 51766 - protein, 266 aa, Zea mays
  Coding DNA Sequence Number=SeqID_8391
  Homolog annotation: Hit_ID=Q6QP51; Match level="QueryCoverage=30%, HitCoverage=29%, E-value=1e-17, Identity=59%"; Hit description =Putative growth-regulating factor 1
MLDASVHLTGARRSAVDVASEALGGLRAINLGEIVEHLEEEFEVEVEEDPVTTSEASPTEVVAEGPLEGQGFVYPRDAISPRPSPALGGNCSPGRSYISPEGLLRRWAHPRHARGPTRTGFLEKQPWPNHLTNRPYRRRIQCGNRLTANPDTVAHPTPTIVSATRARLTTASSASGATGSSASLDLRPRPRKEVSASPDPRAQPQPRPWKVVSASPDPKAQPQPRPREESRPHPTPASASGEVFASPDLGLGPTAPRGIHHYPTPS

SEQ ID NO: 51767 - protein, 23 aa, Zea mays
  Coding DNA Sequence Number=SeqID_8392
EQAIEDPGPQLVESAEQELVEGK

SEQ ID NO: 51768 - protein, 826 aa, Zea mays
  Coding DNA Sequence Number=SeqID_8393
  Homolog annotation: Hit_ID=Q6J9V9; Match level="QueryCoverage=9%, HitCoverage=37%, E-value=2e-07, Identity=40%"; Hit description =Putative uncharacterized protein
MNKTPALKVPLQTELRFYLREYEQPPHRGACGATSSGRLANDLCSSSYGGADGLDGGEASSSCHHVSTDGGVRLSTNAAPANAGRSKAHWQDASSAELEDGFHHQKLEEEVARRPVREVEPRLTSLSAPARMMNILEAEGGTKIAARLASPHPGAGGHRLGAEEAKPPRAVHATAQRLQAFLHFRPYQWVKGRTTMHSACNRAKWAHPFDSNAPSMEAQAHTSCNRRAGCYVRATAPPLAPLPRLLDCGTSTATRGNPAYDPTVPARRIGHGPAGGSSGHIVGQAHVPSWDSERTLSHGVKTARPYSVPRTARARATAAPRTTRPVALTPRRDRRHLWQEKRATLRLRHNDRVKKGTGKGDTPKGILLREGNGPRAPLLIRGSKAGPSEGFNSRLRALGLRAHYWSEVRRPAPRKGSTTASGHSGSTPTTDQGIPSEGGIEPSDPVKRGPGPADHPQLVTPISTKLQRPDGCDQVKDRSTQGTRSRLARAQPRARAADPGGFTSCPRTPSSNGHTFGSPEAQSSPRSNLGQVATPTDRIAGAFNAKGLDSGSAPEDDELRFARPQGSDSGSAPEDDELRFARPQGSDSGSGPEDDELCFARPQGSDSGSASKDDKLRFTRPQGSDSGSTPEDDELRFARPQGSDSGSAPEDDELRFARPQGSDSGSAPEDDKLRFARPQGSNSALASADILRLARPRGLDSTSALEDRLDLDLGGASTSPNPGLGPTTSHEAPSLPYPKLTQATGNKTDVPSGSSRLQRSSDGHDTTRTGCQNLSGCHDGMALLQRVGRAGKDGTAPADPPGFETPTPGEADGEARQVSEGQRAYP

SEQ ID NO: 51769 - protein, 262 aa, Zea mays
  Coding DNA Sequence Number=SeqID_8394
GKLDPAVALRLLFGDKPCSSLAAQSKVWVPKERAWWGVGQWGIVASVRENGGLARAEDTMEAMALHGLTTFCGFHPLELSTHPIGLFPAEKEDDPMWKDRVEHANDIWAIYPGQTAHLTVRCTNALYRLQVMRGEAMSHLMALLEATKITLDNREELVVDLSTEMVEKYLQVEQLSNEIQELEELVGTRENTIKVLEDQLINTQQQLAEANQHLDMHHQEIQDMEANEDANIEGGEEPASSLDTAGSGRPPSPESSVASFAH

SEQ ID NO: 51770 - protein, 148 aa, Zea mays
  Coding DNA Sequence Number=SeqID_8395
MRWNGESSRQLLGGTIYQQALWTASSMSFWHSLRETGQCYNTDEKKRDRFRRGLNTKLRDRLNIVRANSYNELVNMAISQEDCIRARQAEKKRKTPVAGPSAQPQRFRIVSDTQNRGPQQQQGRWVIRPQQQQQAPNRTQFPVQRNNQ

SEQ ID NO: 51771 - protein, 152 aa, Zea mays
  Coding DNA Sequence Number=SeqID_8396
MGKPVPSLIMLLLSRGRIPLDCPTRWQDGRPSHSSNHVLQRTCKRYATSKAEYTNTQLDLPGYNGSSSLISCEKQTIRIEFLSLQVTALVPTITGMGDHVSGRVRGKVYCQVQSGIRTLILIPISSRRPRIPMDLCPQTKHQYDMKVRTTNS

SEQ ID NO: 51772 - protein, 293 aa, Zea mays
  Coding DNA Sequence Number=SeqID_8397
MKHLRASPQHTLSQFCIREQIGRISEARLPPTWLMQPGYWEKPTKQTFTWVCVGTLKEGYPLLQCEGTVPHAAISSHLDLHGRKPDPWDGSRTPLCGVRVTHSKVPGFWDKEYRGLNQGQAGVWSRHVSGPYRVRICSPLRRRPDAVTWPIARDVSQRTEPDIRSLGRAVAAFIADKARRLSIPLAGDVSPRHLMSPIHSTGRRCVASAFNVPCPLRWQAATRPSRSGVPVHSIGRQYARAAAYTVPIVTRALPRKQLRDINTICTTYIMALGDLLGDTGIGYFYNVFPPFCP

SEQ ID NO: 51773 - protein, 362 aa, Zea mays
  Coding DNA Sequence Number=SeqID_8398
  Homolog annotation: Hit_ID=Q6JAD6; Match level="QueryCoverage=88%, HitCoverage=45%, E-value=1e-116, Identity=66%"; Hit description =Putative uncharacterized protein
MAIEGLNECEYSEYGDGICTGCNGRINAFPSEKRLRTRGRYVKEWVRVFYATVWIDPDHQWMRFRFEREDVTIHASQIRQLFGFHESSTRLHSLCYGTSDPPRRPHGGVAPGTAHVAALFRPPFLDGSRRSPADFTTAAKFLYQLMGRTLLPRMGYKEAATHIQLWLLSALVSHSEFDVVDFLICEIEDIVLDGLRARRQLPYAHYLCHIFAQLIRPPQFQGTLEASRLLFGSYRPATEDPVPAPAPVFDTQAEDTALHQFKAQDAAVDDDDDDFGIPPPPPPPMPPRLHDHEAGSSSATPAAPPAIDPALASILQTLTQQQAHLAAEQALQATAHQQLSERMLSMFQTIQDRQDSLQQQLL

SEQ ID NO: 51774 - protein, 206 aa, Zea mays
  Coding DNA Sequence Number=SeqID_8399
  Homolog annotation: Hit_ID=Q6JAD6; Match level="QueryCoverage=25%, HitCoverage=9%, E-value=5e-15, Identity=68%"; Hit description =Putative uncharacterized protein
MAPARAEPETLCFLPLSGSLPSSGDQALLSGDHLLAGGRAPVEVLLLGLPSPLVRMPRTKNVSAPGGGDDEDPRRPFRQAELGDQPQTPSDQIVYRVRRLASRPRSSTPTTASTPPPSLPAPVTPDAPSTTSTTPASTAPPPAPVSAPPIPSARFRERDETEVRPLAADPRLFDLQRATTAQRDPAAVDLFSTRIQESFFRAQMSA

SEQ ID NO: 51775 - protein, 61 aa, Zea mays
  Coding DNA Sequence Number=SeqID_8400
MLSVTVARAPYLVLDAIRLGEMIKNTRKKWKPLKSKYHHPWKLRLRVVSTSIFVDLSLTHP

SEQ ID NO: 51776 - protein, 31 aa, Zea mays
  Coding DNA Sequence Number=SeqID_8401
MLQSLTQLLLDAMTCSAKTYNLRINGHSINL

SEQ ID NO: 51777 - protein, 37 aa, Zea mays
  Coding DNA Sequence Number=SeqID_8402
HCGTDGNEIDGFGYDYGAGEDEAVEGDFQEFQDYDEF

SEQ ID NO: 51778 - protein, 228 aa, Zea mays
  Coding DNA Sequence Number=SeqID_8403
MTAAPWKEIENPLRDRRLSWACPPVRQTLSPPAPRRSRCPPCDSRVFTTHGVTLYADGGGELHDHLLRPVSFKDPCVLDPDRVVELCWPMRIDVDVLRFARDPDSARVHRCLRRLLTGGLRGSDPTSLDPHDEDLSEKIIKLYWLSVVYADHVLGNALDDNPIKGLTSVLSVEQVLNAKLTGFNTKTTDPTKDGGKKSFEVPSAWEKVKETRNPKPGVKKKTCKVKVD

SEQ ID NO: 51779 - protein, 157 aa, Zea mays
  Coding DNA Sequence Number=SeqID_8404
MGKSKKGGSSSHRSGDKRKCEPTPLSEDFDDSEYSEEEFSSESEGSPAPASPPTSSDDSDDSQGIAAEVWTYIRSVERAWLTGSDESEYSSDEENSSDSSEEGGGDGDGGDGDGGDGSGDGGEGDGDGGGKGGSGDGGDSSKGGSRGSSKGSNKASG

SEQ ID NO: 51780 - protein, 120 aa, Zea mays
  Coding DNA Sequence Number=SeqID_8405
MNKDRNLQNGIGIQMGQIQAIEIKETAEKRRNGKSKAAEEKRNVDDGFVSVLYWNSDPTADPPGTELLRRKNPDRYKMEKVGFRDNRHMVTCQRQLTVGSMGRMTATDELEAFRLGAIST

SEQ ID NO: 51781 - protein, 155 aa, Zea mays
  Coding DNA Sequence Number=SeqID_8406
MDIYIPAGTRYPTGMGMGTIFCPQLPSRKILELVDSRPVQGAGFAICQNRLGNSFAVKGSVGWSTYFPVPHLTYGGLRGHFFVGSSRGGQNVTSTRRGKKTAQEEAQRAEESECVGDAGSSNEGPVIGVIGWLHEMAYIILAQFASPHGVVYGCN

SEQ ID NO: 51782 - protein, 612 aa, Zea mays
  Coding DNA Sequence Number=SeqID_8407
  Gene Ontology: Mol. function=oxidoreductase activity; Cellular component=chromosome; Biological process=nucleosome assembly
  Homolog annotation: Hit_ID=Q10E49; Match level="QueryCoverage=28%, HitCoverage=63%, E-value=2e-74, Identity=76%"; Hit description =Phytanoyl-CoA dioxygenase, putative, expressed
  Pfam annotation: Domain name=Histone; Domain location=507-581; Score =80.9; E_value=4.1e-21; Accession=PF00125.15; Description=Core histone H2AH2BH3H4
  Pfam annotation: Domain name=PhyH; Domain location=1-182; Score =156.1; E_value=9.8e-44; Accession=PF05721.4; Description=Phytanoyl -CoA dioxygenase (PhyH)
  Pfam module annotation: Pfam domain module=Histone::PhyH; Domain location=507-581::1-182
MPRATNDLRPHVGDVDVAAVPCGLGRAIGNKVPALHELDPVFKKFSFSESVASLFSSLGYKRPAVIQSMYIFKQPGIGGEVVPHQDNTFLYTEPRTCTGLWLALEDATINNGCLWAIPGSHKKGLVRRMVRDENGTHFDRPSPVYDQKEFVPLEVKSGALVVIHGDLIHQSFENLSPASRHAFSLHVVDTEGCKWSEDNWRKQATPTKEASALYAAQSHLVQGESSFNAHTSLLARDKLYDGEQPLSAELGEELGKTQPLSGYYSSLLTDGKDRIEDGNRSMDRSTSYKRSNRNSLNKDLSGCCLIVMYIRCFYMFLGQQTERNFELWQVLPPPVNSTKSSAPQKPSAPRPDSDIGDPHIFLSFKYLRRLQLFCRYFMYTTKDLEEWSENHDSFRHEQNLVQWTEKKRPYVEALFIVVYIQYVHSHFCSYGPADLVVLKWFHLIRLVSNQIFARVVLEDGISLTEVGGLLQEWDGREEPAGQHALEDSLASEDLGSMLESIKVERAKYSLMCFQFPIGRIHRQLKQRTQANGRVGATTAVYSAAILEYLTAEVLELAGNASKDLKVKRITPRHLQLAIHGDEELDTLTKGTIAGGGIIPHIHKSLVNKSSKE

SEQ ID NO: 51783 - protein, 57 aa, Zea mays
  Coding DNA Sequence Number=SeqID_8408
MESHDLRAERESRLVGGNETDGFGYVYGAGCQHCNHCSGEDEVVEGDFQEFQDYDEF

SEQ ID NO: 51784 - protein, 91 aa, Zea mays
  Coding DNA Sequence Number=SeqID_8409
MGLGVCGSLCQGGNETDGFGYVYGAGKWYSFRLERVVSIATTAQEKMKLWKETSRSSKTTTSSRCGLAATPSRLPVKAAFIYVSFPHFDLL

SEQ ID NO: 51785 - protein, 265 aa, Zea mays
  Coding DNA Sequence Number=SeqID_8410
  Homolog annotation: Hit_ID=Q6JAD6; Match level="QueryCoverage=90%, HitCoverage=59%, E-value=2e-64, Identity=85%"; Hit description =Putative uncharacterized protein
DLACPRARLLSYLDLFSLKSTKVKMVQMKNVSSLGGGNDEDPPRPFRQVKGKTVYLEQQEGRKKRHMDKPLVQHLQREHDETEVRLLAANPCLLDLQRATAARARRFRHIALRAHRVLDLPTFLLAIGAESDESTTRLHSLCYDTSDPPHRPHGGVAPATAHVAALFRPPFTDGSRRSPADFTPAAKFLYELMRRTLLPRMGYREATTHIQLWLLGALISHSEFDVVDFLIYEIEDTVLYGLYARRQLPYAHYLYHIFAQLIRPP

SEQ ID NO: 51786 - protein, 154 aa, Zea mays
  Coding DNA Sequence Number=SeqID_8411
  Subcellular localization annotation: CTP_CleavageSite=70; ConfidenceScore=5.68e-01
MCTLLSHGRRGASLRAPSPQHAGPSSALPSARSSAAPVHQRALPRATGSSASTLPASSQRSCTRHRIPARLQHRYASLSVLSSYSIAGGSSHRSVWSLSRLPGRSLVLSLAVLLDHSAISSLSGFNLRNSASCSTLQVFNSASFRTLSRNLESG

SEQ ID NO: 51787 - protein, 136 aa, Zea mays
  Coding DNA Sequence Number=SeqID_8412
RTEPDFAMVQCYGSDRQRGNLTVDDRSSAAIHVTGVWIRARGRWITSRGRKIFAAGELDASPASRGAPTGLSEVRWTRTTIGGPNYLGGFRHTIPPEAEVEAKPWGRARRRPPSKAEVEAEPWGRARRRPPPEAEA

SEQ ID NO: 51788 - protein, 171 aa, Zea mays
  Coding DNA Sequence Number=SeqID_8413
MVQIIPNSDDERMANASHGDAVDVPRHMAQGREAVVSGELIRIRCGLLEDCEARGSIHTVVLGVRDTLRNEQRIDGIVRPSVRNCRYRGCSLHPAMRLLRATRSSECPGPCIEDIGAASAWIDLCGISQRAGPAAPAPRFARMVPAFIHTGGSGLRTIPPAWAHQITTDAH

SEQ ID NO: 51789 - protein, 104 aa, Zea mays
  Coding DNA Sequence Number=SeqID_8414
  Homolog annotation: Hit_ID=A2XFR6; Match level="QueryCoverage=97%, HitCoverage=29%, E-value=2e-15, Identity=43%"; Hit description =Putative uncharacterized protein
MKYRHLSLRLRGESQTSIVLGEVGEDRLNTLIGVVAGLNTDLDSATLDLSRVHLELEDAHARIAALEAQLEGRDPLEAQVPAMALSPPRKRISYGEPGSITMLL

SEQ ID NO: 51790 - protein, 138 aa, Zea mays
  Coding DNA Sequence Number=SeqID_8415
MTKEASFRGHNTAHNLQDSSKAPSGHQLQGAEAVGASEEDMGISLGKSIAYSVVKTRATRQECVRLPFKSKNRSPKQKPGRISRSMSYILLRATLPTYQSMWAINLQLLLLRQAIHKLPGLSFHRHHHCNLLIPEASS

SEQ ID NO: 51791 - protein, 65 aa, Zea mays
  Coding DNA Sequence Number=SeqID_8416
MEHFPNLLQNVLHALETYVRPMYETRTLSAHESLTPLSTYTALVNVGAKAKTPPFARRLSLQSLV

SEQ ID NO: 51792 - protein, 434 aa, Zea mays
  Coding DNA Sequence Number=SeqID_8417
  Gene Ontology: Mol. function=sequence-specific DNA binding; Cellular component=nucleus; Biological process=regulation of transcription, DNA-dependent
  Homolog annotation: Hit_ID=Q2QYD3; Match level="QueryCoverage=23%, HitCoverage=31%, E-value=9e-26, Identity=60%"; Hit description =Expressed protein
  Pfam annotation: Domain name=Homeobox; Domain location=56-110; Score=- 6.2; E_value=0.043; Accession=PF00046.20; Description=Homeobox domain
MAAAWAGLAVLLVAAQLASAAQVTAPAFLWAPKNYGVTYLKMGRAISLWKHMQTMVKEKAPVMVPLESLSFLSICAHPDDIQRRQLNESTGLSVHQVKFWFENKRTHVKHLSGREENYRLKAENEMLKEENNRLIRQEQSNAPAPAPCPRCINDAGHLLLEKEVERLKALNQMLQQELQLQGTDGETHRHSSLSDLVYWSIKVSTAYNPLCFYQLSFTRSEFSMAFPYVSTSVNEKLEDSLLSSFAENYNNGFGRNRITYTDTCTGQDLKKYHNMDAINDLVVSGVASRRVNHPSGQTDIIVFCSGGFENPGTAKSKGLRTWVPRTYCAVLADSRRTHKFDDHVAPSNLTVRTWVPSNLWEKIRRPPSNLKTHVLNVKFDGTHILNVKFDGTHFLNVKFDGAVELTSLSSSKNRRRLYSSVNPRSYGKFDGLLH

SEQ ID NO: 51793 - protein, 42 aa, Zea mays
  Coding DNA Sequence Number=SeqID_8418
MHILESLLLCRVKKQQTFVASVPRWYRKKRIKTKAAGGRALR

SEQ ID NO: 51794 - protein, 317 aa, Zea mays
  Coding DNA Sequence Number=SeqID_8419
MSTGKRHLDQIELLSVRRLLLNHLIISCGGGGVRQQGTGFLADRHRSKINQGPPRTDLSPTALAPFGVSLAKVSGEGVLCYLGRWINSGRPGLDLTTPEPRNQFWPSDPPNGHDLMQQDAIRADGSKIYGVGLIARTEGKGAIRRWGQSERDEGYLTSDSGAEAPGDDMVRLRGGIATPASNSRRAGARLHGPSARMGSPDTGARVDHTPRPSFSANKRTPAAALPSSLVGEVSLDLGYGGRKGQRGKGYEVESVRLCSLRGTESCRDPADAVAINLACTVRRSRLREDKQDFVNGHWREDPIWQRASASRGNAHTR

SEQ ID NO: 51795 - protein, 288 aa, Zea mays
  Coding DNA Sequence Number=SeqID_8420
  Gene Ontology: Mol. function=phosphoglycolate phosphatase activity; Cellular component=mitochondrion; Biological process=metabolic process
  Homolog annotation: Hit_ID=Q4F886; Match level="QueryCoverage=80%, HitCoverage=99%, E-value=1e-118, Identity=87%"; Hit description=DT -related protein
  Pfam annotation: Domain name=Hydrolase; Domain location=59-257; Score= 122.9; E_value=9.6e-34; Accession=PF00702.17; Description=haloacid dehalogenase-like hydrolase
MAVARLCAAAAAARLQPALAAGARGLGTAAEVAAGARWEPMGAREYYDYRRAMYGDITHKAILVDAAGTLLAPTEPMAQVYRTIGQKYGVDYSEDEILMRYRWAYAQPWGRSRLRYVNDGRPFWQYIVSSSTGCSNLEYFEELYQYYTTEKAWHLCDPDAGRVFEALRKAGVKTAVVSNFDTRLRPLLQALKCDRWFDAVAVSAEVAAEKPNPTIFLKACELLGVKPEEVVHIGDDRRNDLWGARDAGCDAWLWGSDVYSFKEVAERIGVEHIKFMDLMIQYAKFNDR

SEQ ID NO: 51796 - protein, 172 aa, Zea mays
  Coding DNA Sequence Number=SeqID_8421
MLAFCVRFLASQLTAEEWLQCSPISRSGERHPLPSLAALFSLTPDAGDDCSRPLASFARTVPAAPDYGNFAFHLASPRPLRGRAILRGDAATDLPSAGGVGPGPPRLRRRGRRVRHHAEPFATEDEEESNPLPATNVATDWLGSISDNRRRHQIHTETLRFGVLGPRSPLLK

SEQ ID NO: 51797 - protein, 240 aa, Zea mays
  Coding DNA Sequence Number=SeqID_8422
  Homolog annotation: Hit_ID=Q10L85; Match level="QueryCoverage=84%, HitCoverage=79%, E-value=4e-39, Identity=47%"; Hit description =Expressed protein
MPGNGLPLRRWLVACVRPARREARLAVWGGGGTRGAEPGQAAGEVMVEHLGHVVCRADGFRVGRPAPVLGIGDRLEAGRTYLVVPADRLPCAAGGTGGVVTAASLATLSRGKRQAPAGPRNCPFEYAKDGDGRTVIRVAEEFLVRAVAGGANAGRNGKPRGGDGDGDGDGCGSAALCSTPELRKHYEQLVGAVRGRPWSPRLDTIAERKGRRRLADVVSPGRLSPARLLGMGKDKGLSFS

SEQ ID NO: 51798 - protein, 76 aa, Zea mays
  Coding DNA Sequence Number=SeqID_8423
MGAPDSPVHTGHVRCASHVILSVEIGAGRPLEALSSCGTGQSGAAPDSPSRPLRADDRCSAGTPDSPVYTGQSGEF

SEQ ID NO: 51799 - protein, 1545 aa, Zea mays
  Coding DNA Sequence Number=SeqID_8424
  Gene Ontology: Mol. function=nucleic acid binding; Cellular component= chromatin; Biological process=chromatin assembly or disassembly
  Homolog annotation: Hit_ID=A7PQX9; Match level="QueryCoverage=96%, HitCoverage=82%, E-value=0.0, Identity=57%"; Hit description =Chromosome chr6 scaffold_25, whole genome shotgun sequence
  Pfam annotation: Domain name=Chromo; Domain location=193-246; Score =11.6; E_value=0.021; Accession=PF00385.15; Description='chromo' (CHRromatin Organisation MOd
  Pfam annotation: Domain name=Chromo; Domain location=262-317; Score =60.8; E_value=4.6e-15; Accession=PF00385.15; Description='chromo' (CHRromatin Organisation MOd
  Pfam annotation: Domain name=DEAD; Domain location=355-528; Score= -7.1; E_value=0.00014; Accession=PF00270.20; Description=DEADDEAH box helicase
  Pfam annotation: Domain name=Helicase_C; Domain location=796-873; Score=54.5; E_value=3.7e-13; Accession=PF00271.22; Description =Helicase conserved C-terminal domain
  Pfam annotation: Domain name=ResIII; Domain location=351-522; Score= -4.5; E_value=0.00012; Accession=PF04851.6; Description=Type III restriction enzyme, res subunit
  Pfam annotation: Domain name=SNF2_N; Domain location=357-712; Score =391.2; E_value=1.6e-114; Accession=PF00176.14; Description=SNF2 family N-terminal domain
  Pfam module annotation: Pfam domain module=Chromo::Chromo::DEAD::Helic ase_C::ResIII::SNF2_N; Domain location=193-246::262-317::355-528::796- 873::351-522::357-712
FLLDYLTSGTLNSQDKFMDSENSDGDDDDDLELSDDEDDFVENRRQPKRLKIVATKTSKGGQLPMPVQPKRGVSHSDEEYFSGKDSDVPSDSDFKHIPKKPDRLHQKPVGRSDVAPISSHNELRTSGRRRTVKKISYAESEESDDSEEKSNKRQKLIKEEPEEEDGETIEKVLWHQPKGVAEEAIRNHRSAQPTVASLTSDFDQQWDELEFYIKWKGQSYLHCQWKILSELQSVSGFKKVINYTKRVSEEQRYKRALSREEVEVERIFADRVSKADGDDLVPEYLVKWQGLPYAESTWEKDTDIDFAQDAIDEYKAREAASAILGKTVDFQRKKSKASLRRLDGQPEWLKAGKLRDYQLEGLNFLVNGWRNDTNVILADEMGLGKTIQSVSMLGFLHNAQEINGPFLVVVPLSTLSNWAKEFRKWLPNMNVVVYVGNRASREMCQQHEFFSDKKGGRHVKFHTLITTYEVILKDKAVLSKIKWNYLMVDEAHRLKNCEASLYTTLLEFSTKNKLLITGTPLQNSVEELWALLHFLDPVKFNSKDSFVERYKNLSSFNETELANLHKELRPHILRRVIKDVEKSLPPKIERILRVEMSPLQKQYYKWILERNFQNLNKGVRGNQLFQLAHLGIECNLAVSDLDWNNVTILSHLLLLGQAVPHLLLLAQEVSHLAVHYLSNWSMGKATRQDLAVVSLLNIVVELKKCCNHPFLFESADHGYGGDSIGDRNKVERIVMSSGKLVLLDKLLVRLRETNHRVLIFSQGLFSVVWFGSNPHYGCPKRESKKMVKMLDILAEYLSLRGFQFQRLDGSTRADLRHQAMEHFNAPGSDDFCFLLSTRAGGLGINLATADTVIIFDSDWNPQNDLQVLDHLVIQKLNAEGRLEKKESKKGGPIFDKNELSAILRFGAEELFKEDKTDEETKRNLESLDIDEILERAEKVETKGGEGEEGNELLSAFKACDVANFSSVEDDATFWSRLIQPDPADIVQETLAPRAARNKKSYIEDPQLDKNNNRKRRAVETQEKPRRLSGRTVETVNSLPLVDGAVAQVREWSFGNVPKKDASRFVRAVKKFGNATQIGLIVDDVGGVLAKVPHEAQIELFDLLVDGCQEAVKENTDIKGTVLDFFGVAVKAYELLARVEELQFLAKRIARYKDPIKQYRIQLPYKKPQWSASCGWTETDDARLMVGIHWYGYGNWEKIRLDPKLGLTTKIAPATLGERETFLPRAPNLDNRASALLQKEYAKFSGKSLKVKGNTRQTVNNDSNSGVRSMRGRQKDVPEKDDNKPNKDDIQKRRVIVEAEAREEGEISESEAETRYRQDKEEKWLEWCSEVLDEEQETLKRLDRLQNTSVNLPKEKVLSRIRKYLLIIGDKIGEVVRQHSESYRQSRMVMRLWNYVATFSNMSGEQLHDLYMKLSQDQLEGGVGPSHGGNFTSIPPNKGGNSNQLHPSRNQRPTRSLQYNSESFHNESSGSSEAWKRRRRADTDNQFDTQPLCQPPIMTNGNRLQESSSSAGILGWGPVEIRRYGNERPKRAVHPSHFPTGHGPLL

SEQ ID NO: 51800 - protein, 143 aa, Zea mays
  Coding DNA Sequence Number=SeqID_8425
MNKTPAFKVPSQTELRFHLRRYEQPHTIGGHAEQQKADRWLTVARSSSSDDDDFCSGGSNSSSNDLRADAAAIRPSPMPSLERQGRAEGRRVGGTGKGGYPERDPSLRRKRARAPLLIRGSKAGPSEGFNSRLRVLGLRAHYW

SEQ ID NO: 51801 - protein, 293 aa, Zea mays
  Coding DNA Sequence Number=SeqID_8426
  Gene Ontology: Mol. function=kinase activity
  Homolog annotation: Hit_ID=Q6QP54; Match level="QueryCoverage=31%, HitCoverage=38%, E-value=9e-10, Identity=44%"; Hit description =Putative kinase
  Subcellular localization annotation: CTP_CleavageSite=21; ConfidenceScore=5.15e-01
MQRWGRGRRTKAAPPPNVVTVLANVAGLNIGPKGRGNDGASFDVVGPSPGLGEVEAPPRSRSSLSSKAEVESEPLGRARRRLSAEARAESEPWGWRSGGRHLPGAEPRVPKPWGRGEAEFVVFPGLSPSPSPGVGRSGVRRLPGLSPCPSPGVGRSGVRRLSGVEPVSEPWGRAKRSSSSSGAEPVSEPWGRAEWSFLWRLRLDLAAVSLTLSSGTAVRAAQAALSSCQASQWSGEATFALNAPAIRSVGVVIWPRLLLGEDWASGEPKLCADGGYQLRFRSLEGTANYGPRQ

SEQ ID NO: 51802 - protein, 198 aa, Zea mays
  Coding DNA Sequence Number=SeqID_8427
  Homolog annotation: Hit_ID=Q75ID7; Match level="QueryCoverage=21%, HitCoverage=46%, E-value=2e-11, Identity=81%"; Hit description =Expressed protein
  Subcellular localization annotation: CTP_CleavageSite=55; ConfidenceScore=5.11e-01
MEGGGSNTPFYRGNSTALATNPSAAAAAAAAVFLFLAFSSPNLHAGNLCYAVWLCAIAYSTPLALGDSRNSGSRHEPFMLIITAKGVTTVYLSEISILVSFVNLCERDSRGEQNGAQKGDREAAIDAEIVRVNDLPAHSSYAIHRMKVLNKLRHLLSIKARKEPEGSRIGRGSAGKERGRKGTPKSQAGTGAGYIEVG

SEQ ID NO: 51803 - protein, 521 aa, Zea mays
  Coding DNA Sequence Number=SeqID_8428
  Homolog annotation: Hit_ID=A2XKU0; Match level="QueryCoverage=50%, HitCoverage=55%, E-value=1e-69, Identity=56%"; Hit description =Putative uncharacterized protein
  Pfam annotation: Domain name=GRP; Domain location=387-511; Score= -14.9; E_value=0.0025; Accession=PF07172.2; Description=Glycine rich protein family
  Subcellular localization annotation: CTP_CleavageSite=14; ConfidenceScore=5.40e-01
MATSPAASSSSAPTASAVAAATMAVEATDGPVLSVVSKRLRALRKKYNRITQMEESLAAGKTLNREQEEVLRSKPVVAALIDELERLRPPLASALAEELSSRPAPAPSAASSSDSDSSVQDLLALVYFGSLFDVKQQSDFVSLVYTRELERSSCLTYDYVGDDPEDSLAETDLNAVSALASLAALRPPAAAGVSHRDALQACAHHARLWLCRADEPIHPDSTITYAGVRAKLDRIMASGYFTAQLEMRTPLDLAAAVASFGAGGVQVQESMVVSPQAPEAVEESQAVEGHKELAGSVLALEAAGAGGGRGEGALGRWRRWSAVGAIGECRGGGGPGSAGGWRVQRRRGRHEAVDGQSWRRWRREASDGVAGAGREEEAGYAAQEDEVLVHPTDEVPPAETEQEQETFDADVKDQEQKDQQFIQRRSYQNQRGGGRGGSRRGYPNGRGGRGGRGGGYQNGRGGYQNGRGGAGGYYYESGYYQPRNYNRGRGGRSGGGNSYYNSHGGGAQGHHPGSVELGANA

SEQ ID NO: 51804 - protein, 215 aa, Zea mays
  Coding DNA Sequence Number=SeqID_8429
MAERYQLPRSCVPPTTRRKDGGYPPSGGLEGGKTRCIREREDRSPSKGGHPPFKGDSPYLRPQPSRAEPSPTHSKVLPCGAGARSRTSCKPAQSRRSQTAVRGAYNRPAEKRATLRLRHNDRVKKGPGKGDTPKRILPRGGTRLRASLLIRGSKAGPPEGFDSRLRSRGPYTHYWSEVRRPAPRKGSTAASGYSGSAPITDQGFEGWPPKGSQPP

SEQ ID NO: 51805 - protein, 429 aa, Zea mays
  Coding DNA Sequence Number=SeqID_8430
  Gene Ontology: Mol. function=carboxyl- or carbamoyltransferase activity; Cellular component=ornithine carbamoyltransferase complex; Biological process=amino acid metabolic process
  Homolog annotation: Hit_ID=Q8SA97; Match level="QueryCoverage=13%, HitCoverage=10%, E-value=3e-13, Identity=69%"; Hit description =Ornithine carbamoyltransferase
MAPPVDVAGLRPRLGDVEAPPKPRSSLSSVVEVGSEPQVRARRRSPADAEAESEPWGRAKRSSSSSGAEPKSEPWVGRGGDRRLLGLSPSPSPGSGGVRRLPGLSPSPSPGSGGVHRLPRLSPSPSPGSGGVRRLPGLSPSPSPGSGGVRRLPGLSPSPSPGSGGVCRLPGLSPSPSPGSGGAELPMVPSAGPDCLSVSLCQVAPHSEWRRRRCPSVRPLYADGGYQLRIRSLEGDQPLSVAFCSGGCARAHPPGVAPEASEEWFHSSEVLMPRVMLRLVWSSLMRAGRSPGVRSGPKFSGWYVDAVNGSAGFARAAPEPLHRARGRSGTDSTFLYTPLRRLSARRRGKAPCCPRWAPNMVSPVSCKRVIRVDVRAPFVGGRLGAQGHAQKYMRVICRTRSPGDGVRGLDASLRWDSVTRSFPLVSEMS

SEQ ID NO: 51806 - protein, 113 aa, Zea mays
  Coding DNA Sequence Number=SeqID_8431
MELPLDAQSSGRRLDVDERVEQCRAVVGVLHVLARFVQVLQMQHLRGKEKDWKRVGYVQPTAAQSGCTGLSGGAPDSVWCARLDSGELATLGNSSAAYDYNSPDYPVVHRAVR

SEQ ID NO: 51807 - protein, 42 aa, Zea mays
  Coding DNA Sequence Number=SeqID_8432
MGESRGFIGSVSGTIIRGTLKAPKSQLVTPISTKLQRPDGCD

SEQ ID NO: 51808 - protein, 135 aa, Zea mays
  Coding DNA Sequence Number=SeqID_8433
  Gene Ontology: Mol. function=phosphoinositide binding; Cellular component=multivesicular body; Biological process=cell communication
  Homolog annotation: Hit_ID=Q5N7G9; Match level="QueryCoverage=68%, HitCoverage=34%, E-value=1e-33, Identity=58%"; Hit description =Putative sorting nexin 1
MDEETICKNQVEQSLLITGFGYEHDDAWMTNINLFKEFTVLSRADNLLFNFEEPLKDYVRAVQSIKLKGDSEDATKKFEHIVRLMNEELAHFQEQKTADTGLAFHEFAKGQAKLAKDIADAWRNVLPKLEACSTS

SEQ ID NO: 51809 - protein, 135 aa, Zea mays
  Coding DNA Sequence Number=SeqID_8434
  Homolog annotation: Hit_ID=Q6QP51; Match level="QueryCoverage=95%, HitCoverage=51%, E-value=6e-13, Identity=38%"; Hit description =Putative growth-regulating factor 1
  Subcellular localization annotation: CTP_CleavageSite=25; ConfidenceScore=5.50e-01
MMIVSKKENSAARPSLSAVPPARVRLTTAESSLRRNRKLRLTRPWASAASLDPRARPQPRPRKGVSASPDPRGRPPPQPRKVVSASPDPRARPRPRPREESRPRLTSASGGVSASPDLGLGPIAPQRIHHYPTPS

SEQ ID NO: 51810 - protein, 43 aa, Zea mays
  Coding DNA Sequence Number=SeqID_8435
MSVLLLLLLRKCQCLNLLKLIPMGVTHLTLIPMGRKTCPCYFS

SEQ ID NO: 51811 - protein, 90 aa, Zea mays
  Coding DNA Sequence Number=SeqID_8436
MSEERPVEEVVIAGFAATPEGTKDLMLSCPCDAEGAVLRVPLVEEGPRKNDLAIYWALGPFVRSFISLVDPGDIYPPQAPDLWVDLERLA

SEQ ID NO: 51812 - protein, 85 aa, Zea mays
  Coding DNA Sequence Number=SeqID_8437
MDELFTKLKSIEIDHQTRAKIENPVHPPWSWSRWRASGMRSGTSGQSVHKILQQPPELAAWQIEGWKLQLQQTVVPKDGTVAPAS

SEQ ID NO: 51813 - protein, 190 aa, Zea mays
  Coding DNA Sequence Number=SeqID_8438
MPWRRRKDDAVERAPMPEEGGLTAWHGDGGEREPAGVRLPVESRGGSLPGVQFCDGEVVARHGRGDGRTELTGAKGGRGGAGSIELGEGEGEVAEAGVGKAELGRSFLYAPGEGKGMRDDKRRRARHDGGDGANGDGTARAGGEVKGRLGHSERGRMAPIGLVSALMARRRGGWWLAANAPVKTWAGRGV

SEQ ID NO: 51814 - protein, 417 aa, Zea mays
  Coding DNA Sequence Number=SeqID_8439
  Pfam annotation: Domain name=Extensin_2; Domain location=11-337; Score=-140.5; E_value=0.086; Accession=PF04554.4; Description =Extensin-like region
  Subcellular localization annotation: CTP_CleavageSite=9; ConfidenceScore=5.28e-01
PGPARQSPRLAHVFTGVFATDHSPPRLLAINALTSPRLLSLLPFPSPGAYKKDRPSSAFPTPASATSPSPSSIEPAPSRPPFALVSSVLPSLVAFGQIALALKVRHSVTSLAHTCSSLIAPGGLAGDFTTASARHPPWTGHPRPPPVKLTPPLWPPTPARASPPLPRRKTGLPAENRRGIPPAVEPRPAPSPPSLCHAVTPLPLACGPMPLRHPCVVPTPSPRWWAACPRGRAHARARPGRNLHHMKHMEGSWVIRTSYCSEEEGFPHLLRSCTLHMGIRKKPKYVWKEYRENGVENNKNTPTWRKRLQALSGRDPIEDDPTIVYMAGYLHTLDNHYDDLFSHCTHLNSRVESLEQQVKELKKEKASLQECLDIVEGEEANTREAYRTLKMDYDKKLKKLAPHEENPKENQEPRMPG

SEQ ID NO: 51815 - protein, 486 aa, Zea mays
  Coding DNA Sequence Number=SeqID_8440
  Gene Ontology: Mol. function=phospholipase A1 activity; Cellular component=host cell nucleus; Biological process=lipid metabolic process
  Homolog annotation: Hit_ID=Q6BTJ4; Match level="QueryCoverage=69%, HitCoverage=36%, E-value=1e-17, Identity=31%"; Hit description =Similar to CA1621|CaIFF6 Candida albicans CaIFF6 unknown function
MAAPRTTRPIALTPRRDRRHLWQERRATLHLRHNDRVKKAGTGKGDTPKGILLREGNGPRAPQLIRDSKAGPSEGFNSRLRALGLRAHYWSEVRGPALRKGSTAASGHSGSAPTTDQGGNDLVTESHQREASSPRTPSKGDRVWQITRSSLETPCSAPSKGNMALPPPPPCGKATQGPDPGGFTSRPRTPYGNERAFGSPEAQSSPRSNLGQIATPTDQIAGAFNAKGSDSGSAPEDDELRFARPQGSDLGSSPEDDELRFARPQGSDSGSAPEDDELRFARPQGSDSGSAPEDDELRFARPQGSDLGSAPEDEELRFARPQGSDSGLALEDDELRFARPQGSDLGSAPEDDELRFARPQGSDSGSAPEDDELRFARPQGSDSGSAPEDNELRFARPQGSDSALASADGLRLARPRGSDLTSASKDRLDLDLGGATTSPNLGLGPTTSQEAPSLPYPKLTQATGNKTGVPSGSPRQTSNDGAPHAK

SEQ ID NO: 51816 - protein, 327 aa, Zea mays
  Coding DNA Sequence Number=SeqID_8441
  Subcellular localization annotation: CTP_CleavageSite=2; ConfidenceScore=5.19e-01
MAAGRRRHLLPMALGTHLAGTTPSLLSVFLELKRRKPCPPSPQHSAPSSLASLAHGAEASMAGLLWCRRPSSALLCSEDEARCSSAPLLLSTEPPFSTASSSREQSLPFSQHQKLPLPWRAPLLMPSWSSTPSTSRSSREATWVPSASRPRRARRNDAASSSHEIPSVSPASTRSAQRCRSTAAAPCCAVDLRGSTVFASRFAESAQRRRAIVGTRALVVVTPRALLIGKEPSPMARMCNSNRNNPRVVNVGDNHEAPLLNDGQRDAVALDRVQVVASRELVVHSGACDHVGLLLEVELTVAKLLLVIDKRHQRECLLLMVFVWGFK

SEQ ID NO: 51817 - protein, 130 aa, Zea mays
  Coding DNA Sequence Number=SeqID_8442
MSDEDRDRERDRDRVWFARRERLAQVSNASIVEKQRAEGVIRQRKKKSSRFRQQLRVDEAARTHFGDDEYEDELKATLYQSRVEHEFSQRAGARYDRGGGSSSQRVPERVRDYNLAQASGLRQQRIDIGP

SEQ ID NO: 51818 - protein, 211 aa, Zea mays
  Coding DNA Sequence Number=SeqID_8443
MKLWKETSRSSKITTSSRCGVFELNSLPYGGYPGEDVIDRRGKKPAAVTEDDPALEAAPATKKRKLGTTVGELGVSDSFAMELMGTCAALGGRMSLPELRESSARMLEVTGGRWPKDVPIPRAAAEDFFTSRMARDLRVFPYGRNIAAVVSAVMNKDRQEAAQKRRAVIRLPEARPKRAWGTAKATAPGGSQPTPGGEARPPLGPAGWPRS

SEQ ID NO: 51819 - protein, 740 aa, Zea mays
  Coding DNA Sequence Number=SeqID_8444
  Gene Ontology: Cellular component=integral to membrane
  Homolog annotation: Hit_ID=A2WMA4; Match level="QueryCoverage=82%, HitCoverage=88%, E-value=0.0, Identity=61%"; Hit description =Putative uncharacterized protein
  Pfam annotation: Domain name=C4dic_mal_tran; Domain location=370-635; Score=284.2; E_value=2.7e-82; Accession=PF03595.8; Description=C4 -dicarboxylate transportermalic acid transport protein
MARCSTCDRFSRFMETTDEFAVPPRPALVHPDADGVRTPSALGPLSPEDPPPAFMERDWRHGGDNTAAYPGCSPFQPSAAGRPVSISLPASPTGGFDISSRTEAELQRDAAAVTDAPPPRMMMLPPFAPAPAMALEQPGKVVFRSQPIPAAPPVGDGGHDDEFGRSAPAAMALEQPGKVVFRSQPIIPGAPPEGDGAARGHDDFGRSAPAAKTRRDSRDTSYDSFKTWSGKLEKQIATHLLGSSLQQQPEHGEEPEEDDAASDRRNSSMPKVQRFFAALEGPELDKLRVLTPMTPSIRYTSTTSAVDANARWRAFVSFVAAVLLWPAHVPLAVADADEEADVVLSYWWQSSEELILPSDKTWPFLLRFPVSAFGMCLGMSSQAILWKRIAISASTRFLHITVKINLVLWCASVALMAAVSALYGCKLVLYFEAVRREYYHPIRVNFFFAPWIACLFLAIGVPDVVAATLPHWLWYVLMAPIVCLELKIYGQWISGGQRRLSRVANPSNHLSIVGNFVGALLGGIMGLKEGPMFFFSVGLAHYMVLFVTLYQRLPTSETLPRDLHPVFFLFVAAPSVACLAWARITGEFGYGSRVAYFIAMFLYASLAVRINLFRGFSFSLAWWAYTFPMTSAAIASIRYSSEVKNAFTQCMCIGLAAAATLAVAALFLATLLHAVVYRDLFPNDISIAITERRRSKPLVGEKMLLRLRSGKKVQQALSTAPADAAADLEAARAATTTSYT

SEQ ID NO: 51820 - protein, 87 aa, Zea mays
  Coding DNA Sequence Number=SeqID_8445
  Subcellular localization annotation: CTP_CleavageSite=67; ConfidenceScore=5.03e-01
MSIGGQLGNGRAADSYLLRHAGIGASRKWRSVAHGSVQSLSDRQPEPSCVREELRRFQMNSLGAVPLQKLVSEVPFISFRFEELEFY

SEQ ID NO: 51821 - protein, 129 aa, Zea mays
  Coding DNA Sequence Number=SeqID_8446
  Subcellular localization annotation: CTP_CleavageSite=27; ConfidenceScore=5.02e-01
MMENFGSKTVQIAMNAVVTSQLLVSLYSAAVDRKDQTVTLQGGTDTRSEVGSFLRNELREGVFWTFGFPKLKRLFSRVKLVTKNDLAPRKGLLLGSCFGAPKVSHEEAASAEVVSKKWPKVPFHGASAF

SEQ ID NO: 51822 - protein, 159 aa, Zea mays
  Coding DNA Sequence Number=SeqID_8447
MGKNNKRKREPTPPSEEFGDSEYSEEEFSSESEGSPAPVSPPASSDDSDDSQGIAAEVWTYIRAVERAGLEGSDESEYSSDEEDSDGGDEGEDDDDDDDDDGDDGDGSGSGRGGGDGSRDSTKGDSSRSSTKGSSRGSTKGSSRGSTKGDGGGRGRASG

SEQ ID NO: 51823 - protein, 244 aa, Zea mays
  Coding DNA Sequence Number=SeqID_8448
  Gene Ontology: Mol. function=catalytic activity; Biological process =nucleoside metabolic process
  Homolog annotation: Hit_ID=Q9LWK9; Match level="QueryCoverage=93%, HitCoverage=79%, E-value=2e-92, Identity=66%"; Hit description =Putative bark storage protein
  Pfam annotation: Domain name=PNP_UDP_1; Domain location=1-228; Score=- 29.6; E_value=1.4e-05; Accession=PF01048.11; Description =Phosphorylase family
RRFRFGTIGSQNVVMVMTGLSMLNAGLTTQLLLSLFRVKGIVHWGIAGNANEDLQIGDVTIPESWAHLSLWNWQRHGDGPENELPLENAGDYTREYGFLNFSDYTVGQDAGNPELAANTLNSVWYQPEEIFPISGTPEERQHAFWGCSANIYTDNASYRQFIRSHFGCTPVEMESAAVALVAHQHGVPFITIRSLSDLAGGGSSISNEAATFLDIAAQNAVDVMLKFVPLIARRGGEQEHAADM

SEQ ID NO: 51824 - protein, 429 aa, Zea mays
  Coding DNA Sequence Number=SeqID_8449
  Subcellular localization annotation: CTP_CleavageSite=51; ConfidenceScore=5.14e-01
MAATSTAYDVLYDPLDSVGTVRPTTRGTSWMWRTCARRDRRPCGGRTAMPRSAAGDSVGGDTKAIKSKEMETQHGSLPTPRYWGARGMEPWLSPLPTSTRLEEAGKNVASTDIPAEVGDDGRLKDENRAPWVELGGQAPPTAARRKMGSTGPTRWEFGNKEHKLFGGKVAERRGPSTSPPGKYRRIPSKQAVYHFEHSLSLGTLGMKSQGHGKLWWHKAETLKAKGRRELEGGRISPLAPRSVTGKVSPDAHQGSHPMTWGQTSHVIQAGPKREEGESSHKERATAVRLYAPPSSPQPAVKEANRRTRNVQPPHDCAPPRFLCNRWSNLWHGGPGPHVMHPTRRFLGAEKSHRCSRQYRASSSPSQKTEKINLQNQCSDSRHPAHGPSKTLSAEVTGQSAAGTCVTVDVTMGGPAVIASTGAEEQRSNR

SEQ ID NO: 51825 - protein, 579 aa, Zea mays
  Coding DNA Sequence Number=SeqID_8450
MSGATPEQRLVGANGYLQRIRCARSARRSQARPYWHTGQGTVHVRCAPDTQAGPQVRSSNGSGEGQLVVVPPAVATTVSAAVPRVKGSALSTSGEISAVTAVKDEAGTVSHRLREASQQLSQAADFADRVASGALTADVSAEVERLRAQHADAVREKSAADSKCRKLAEKVAALEGERTDLRRQLVEERREANQAIAKAQAAQAEAKLARVEGSLASQRAEEWRCGSTLCRPAWRGSRPLHAQKLSGHANSSWTHTTSWARGLLTSKCPTERRALRFPRVAARGIVGAPDHRGGIHVLFLPRHLRRDVERAVPRGMARAEDVEDLGPLNSAQPEAEANPVVAEAEADPAPPPKTGEGSLAAPAAAVSGGGSSPATAPMVENPPKAATEPAAEDPMSAAGSSQVQDFGPAHATANFVAASTVVAGNESDESTSKFSDFGDSGSSVEWTKESSDEDLDYFAALDVAAAKASPRVTDTEVLPGYPSIWSYKSCGSGNLGSGTREWALVSWGGLVPSRGYLLGPIANSFLGSLTSGGDHLYSERPPLHQRLASDGGHLRPGGLPATAAITVRTKRSSLPSCGG

SEQ ID NO: 51826 - protein, 26 aa, Zea mays
  Coding DNA Sequence Number=SeqID_8451
MADIHRAVISDQQFIFPTPNRFPSFE

SEQ ID NO: 51827 - protein, 45 aa, Zea mays
  Coding DNA Sequence Number=SeqID_8452
MEAAPAKERSPNMEQRPVGGGGDDGDRRRGLVAVGTVEVMMEMTS

SEQ ID NO: 51828 - protein, 117 aa, Zea mays
  Coding DNA Sequence Number=SeqID_8453
MAAASPPHQNNQLLPAQGLKMIVYERNVVREIRVLDAKIGKLELQLNDEMEKISSCSGLLKEIIAKPQGSTCSWLRAELDRARAKRERAYHKFQRQEMQIQGGDEDGGAPNSRDASN

SEQ ID NO: 51829 - protein, 258 aa, Zea mays
  Coding DNA Sequence Number=SeqID_8454
  Subcellular localization annotation: CTP_CleavageSite=62; ConfidenceScore=5.21e-01
MGLGVCGSLYQGWFAPWAGVVTRMMVMIMLMVMMARLRHTAWKSVIPFLPSRLTKRSLRRLEVESVRGCSPVPPLEAPPAPPIGVPTTGVAAGGDPDDGEDSNSNSSPLGKSRGNSTIIHRTVRCSKEERPQELASFGKLQRLLRYNSPDMSGTSGTPILAHRTLYSICPVRHRTSRRAQKTELQRSNPNGFGDMAGAPDMSGDRWPRSKSFAPQLHRNSPVYTRNMFGEIIAGAAVAVSPKLARFLEGRSFLGSTAT

SEQ ID NO: 51830 - protein, 117 aa, Zea mays
  Coding DNA Sequence Number=SeqID_8455
MAAASPPHQNNQLLPAQGLKMIVYERNVVREIRVLDAKIGKLELQLNDEMEKISSCSGLLKEIIAKPQGSTCSWLRAELDRARAKRERAYHKFQRQEMQIQGGDEDGGAPNPRDASN

SEQ ID NO: 51831 - protein, 39 aa, Zea mays
  Coding DNA Sequence Number=SeqID_8456
MEARMMAEQEARLHSAKKLTKDPSSGPFAKCRLMNTQQR

SEQ ID NO: 51832 - protein, 76 aa, Zea mays
  Coding DNA Sequence Number=SeqID_8457
MVGGWLRRRRGRRSRTTEEALQDDNVQQQAASQDDDDQQQATQQDDDDTQQDASGSRNVCLRGPASLPQRPILRSG

SEQ ID NO: 51833 - protein, 341 aa, Zea mays
  Coding DNA Sequence Number=SeqID_8458
  Gene Ontology: Mol. function=molecular_function; Cellular component =membrane; Biological process=auxin mediated signaling pathway
  Homolog annotation: Hit_ID=A7QBC8; Match level="QueryCoverage=88%, HitCoverage=93%, E-value=4e-72, Identity=42%"; Hit description =Chromosome chr4 scaffold_73, whole genome shotgun sequence
  Pfam annotation: Domain name=DUF6; Domain location=176-305; Score =45.5; E_value=1.8e-10; Accession=PF00892.11; Description=Integral membrane protein DUF6
  Pfam annotation: Domain name=DUF6; Domain location=18-130; Score =16.1; E_value=0.0083; Accession=PF00892.11; Description=Integral membrane protein DUF6
  Pfam annotation: Domain name=TPT; Domain location=167-305; Score= -21.4; E_value=0.01; Accession=PF03151.7; Description=Triose -phosphate Transporter family
  Pfam module annotation: Pfam domain module=DUF6::DUF6::TPT; Domain location=176-305::18-130::167-305
MAACAGVGPVVGMVVFQIIFAFVNIFYKLAVSDGMDLRVLIAYRYLFGSAFLGPLAYFVERGTMAQNLYIAGMKFTSATFASATTNLLPACTFVIALVFRYEKFAIRSLASQAKVAGTLLGVGGAMLLTFYKGVDITPWHSNLNLVATLTQHHHHHTTTTTTNYAMGSLLCVCSCFFYALWIVVQAKLSNEYPFHYSSTALMCIMTTLQSSIFALCFDRDASQWRLKFDIRLLSCAYSGIFASGVALVIMAWCVQQRGPLFVSVFSPLMLLIVAVLSSLLLGEKLHLGTAMGAVLIVMGLYAVLWSKGREAAAEAARVSVNDHPTTSNSNSSEEDDDKKRH

SEQ ID NO: 51834 - protein, 112 aa, Zea mays
  Coding DNA Sequence Number=SeqID_8459
  Gene Ontology: Mol. function=protein serine/threonine kinase activity
  Homolog annotation: Hit_ID=A9PGJ5; Match level="QueryCoverage=78%, HitCoverage=20%, E-value=1e-08, Identity=38%"; Hit description =Putative uncharacterized protein
MKNKLDLKMMMKETAYLPFLSVEKGAGSLDKELAASGFTRKEQVDMEKYTEEVVEGHDSSSDDENDEVGDVVPLVSLKIDQDSSDEPDCDLTQVIQRRLELFLKRLVVFPSE

SEQ ID NO: 51835 - protein, 105 aa, Zea mays
  Coding DNA Sequence Number=SeqID_8460
MAVTYTCKNFDGFDVPSYFSGSRVLPCGVHISSAWHWAIGNCGVEEVASSSTRKSVEVSVWCSTICTIILGQGNKQKPNAYPLPGAPNVREQISGRVVECTCPKS

SEQ ID NO: 51836 - protein, 48 aa, Zea mays
  Coding DNA Sequence Number=SeqID_8461
MASGGWARRVWSSGGWARCPLAAGRRDLLQAEDTRKPLFATAQGYVVI

SEQ ID NO: 51837 - protein, 66 aa, Zea mays
  Coding DNA Sequence Number=SeqID_8462
  Subcellular localization annotation: CTP_CleavageSite=55; ConfidenceScore=5.10e-01
MEPGGGTAVGAVESLLTSSCFRKGAESRRRHRVGRCGSSSEAEVESVFRGRGRVRAPGSGEAETVG

SEQ ID NO: 51838 - protein, 66 aa, Zea mays
  Coding DNA Sequence Number=SeqID_8463
MEPGRGTAVGAVESLLMSSCFRKGAESRHRHRVGRCGSSSEAKVESVFRGRGRVRAPGSGEAETVG

SEQ ID NO: 51839 - protein, 162 aa, Zea mays
  Coding DNA Sequence Number=SeqID_8464
MDEDGGGGLIEGGGELGARVGELGEEELLDPLAPSKWTKLMTESLIVEVKSLSTILPHVQAHPLLNTTSFEGAVGLGAIHAIDEDPWYALGVELVDVVELLDERLTAKDVMVADHRFVPMTSLIWCLARDVIWFGKYPSESGFEDGEHWFGWNFRIFGLFFG

SEQ ID NO: 51840 - protein, 293 aa, Zea mays
  Coding DNA Sequence Number=SeqID_8465
  Homolog annotation: Hit_ID=Q6J9V9; Match level="QueryCoverage=25%, HitCoverage=30%, E-value=7e-12, Identity=50%"; Hit description =Putative uncharacterized protein
MQVACNYTTETHPFDFDASSMEAQAHTACNRCAGYYVRKTAPPLTPMPRLLDCGTGAATRGNPAHGPTVPTKRIGHGSASRGRRRDGRYVQKWAGSNGGSRRAEAAVKSSVGSRPLLEQQGSPLPRREHDAPMFHPSNGSHNGCPANHPSRRINFAAGQATPLAGTRKGDTSKGILPREGSGPRALLLIRAASEHSGSAPTTDQGFEGWPPEGFDSRPRTRRARDDSGYVRYMAEAQATLSRGSGAALANSALAKPLTASTYQPENSEPDHAPGLRSDRMREQPDRPRRHKRH

SEQ ID NO: 51841 - protein, 389 aa, Zea mays
  Coding DNA Sequence Number=SeqID_8466
MHCALPPSEPPDGERPRCFRLAAVGGAQLRGGWHLSAIARLQGFSSGSPAAFPHQWSPRTVTTSSMVGRSKPGCGLCPALSFKDLHHPCWGGGRAEPELYLPYGPAGHLFLQHSGERALTGLAEGANFDNAGPIGRKRCQLQHAWFAGSASSGAASGATSHRWAECGYLPAVRAAVAPHAPGDRPRRRTPLGRRSCSWVVLPSLRHDASARRSVLARSGGLEWGSAGGQVAAVVGAKVVAAGEGFSADETEYLGLVGLATQGFSCSVKETLGRSAMSRSRRQRCQRGQRRSRLEKKLRRPRSRLGADIFLRGGDPPPVSPSEAGPDSAEGGDDAKGAAAPSVDDLFVDSRIAYPSESYLSRKVMSEESLSSVSLAAYVYSVVFRIPLSK

SEQ ID NO: 51842 - protein, 194 aa, Zea mays
  Coding DNA Sequence Number=SeqID_8467
  Subcellular localization annotation: CTP_CleavageSite=94; ConfidenceScore=5.21e-01
MVPIRGGRTAPPVEAAISVDSVAAAGSTAGASTPVWAAAACAPAWSAVSVSAPIRAAATRAPMGMRGCPLCRLLSRCFPRQPELVVGVVVDRSRAASSTAAAELRALLPPHVQHPPPPLLLLPLSPLPVPPPPTVLPSPLSLQPLLLLARVLVPRRPRPPAGAAHSKWPSVGTWWASEGLLRVEEAVSDERLLV

SEQ ID NO: 51843 - protein, 215 aa, Zea mays
  Coding DNA Sequence Number=SeqID_8468
  Homolog annotation: Hit_ID=Q6QP54; Match level="QueryCoverage=56%, HitCoverage=34%, E-value=1e-07, Identity=38%"; Hit description =Putative kinase
MGRRETEHKEGKTAASCCPAPRVDALAVGGYKRSQGRESLFVSPSSRAATSSYEGPGPSFYRCKERVQPKVGRGGDSSEVEVEAEPWGRARRRPSSEVEVEAEPCSRARRRPSSEVEVEAEPWGRARRRPSSEVEVEPEPWGRARRRPSSEVEVEAEPWGRARRRPSSEVEVEAKPWGRARRSFLWRLRLDSAAVSLTLAGGIAVGAGQATLFSC

SEQ ID NO: 51844 - protein, 174 aa, Zea mays
  Coding DNA Sequence Number=SeqID_8469
MEAEMGGWGPGQRCGGAGRGGIPARRGRAQRDPAQGGRCGRASRRDGAEGTHGAGLGAGRGALACLGSSATGSRRQAAGRAGSGPVGPRQGRRPPVMGTGRGGAARAATRAAGGLGKGRSRAPPVEGPGGGGRQQGGRRPERDARRGSSPAAEGGRKKKFGFGTKLKWKPLTLE

SEQ ID NO: 51845 - protein, 816 aa, Zea mays
  Coding DNA Sequence Number=SeqID_8470
MQVVELVPCARNKWGNWNEFWFYVAEGTVEGHEGLPVSEMCSHYYSAYPPFEVAEEDADEGALRCAAGQSSGRDLVEEFVAYGVWPLAHGWALGEVCPRQMPFHGGRVVRSPAFALNLRNRDPAAFVRDAEDGAVRLVGRYVPRTEGQRSFDIRGSNDRLNRVFELNQLPYDGYPGQDEADRRGKKPTVETGDDPAPAAAPSSKKRKLGTAMGGLGVSDSFARELMRTCAAPGERMSSPELRESSARMLRVTGGCWPRNVPIPCAADEDCFTSRMVRQWRVFPYGRNIAAVVSAVMDKDRQGAAQKRQAAVRLHEARPKRQRGAAKAAASGGGKPPLAAKSGASAPSKAPEATAGAGGSKSTRVVPPASGVAEASKAARALPLSGKRVADFGTDITVDDYLGGSDEGQLAIVAPAAAIATAAIVPKARGEALGAGGEVSALAVVMDEAGVATRRLKEVTKALSQVADFASRTASGALTAAVSAEVERLRTQHADAVREKSAFDSKCRKLTDKVAALEREKADLRRQLAAKRREANEAIAKEQAAQAEAKLARAEGNLAKELAEHLQERLTALESRAKGAEAAMRAEAERTRTQLMDTYRELGARTGDFEVPDREPGLRCLQWVQEELQELPTVVGGFMSYASLITCEGAMNALSREGCRHFEVFDQADEDFERDVYKVEDPVVKESAGALYDRMWGPHGREVVRERAETARAQAARGERVDDFGALNSALPDPEPTPAEAESGVALEPTPETAAIATAAPTSAAAGEDLPPKVAEGAPDAPAAAVPSAEDPAAVAAETTAEPTAEAPAASGPSQVA

SEQ ID NO: 51846 - protein, 370 aa, Zea mays
  Coding DNA Sequence Number=SeqID_8471
MAPYDVVGPSPGSGEAEAPPRSRSSLSSEVEVESEPRVGRGRDHRLRPRRSSSSSGAEAESEPWGRARRSSSSSGAEAESEPWGRAKRSSSSSGAEAESEPWGRAKRSSSPEAETGAEPWGRARRSFLWRPRPDLAAVSLTLSSGTAVGATQATLSSCQAGFLSDRHRSKINQGPPYTDHSPTALAPFGYQLAFQMTRVLTLVVAIQTNMGLFSINVEAKGYGPKTGHDGARTVPRWRFAGARSMCHPGAPTPNQRVHKVPEWSPRQIRWAITHWFRQQGPDRGTSVSAAAKIPPMRNCVYRSDSNTSLDGPTRIWEGFEENKHAYHWFGATTQASRGTRNPAVVIPARMAPESRYQRLSMVAAMVGDSR

SEQ ID NO: 51847 - protein, 54 aa, Zea mays
  Coding DNA Sequence Number=SeqID_8472
MDSVVLSWLNGIITIELQNIIRDQADIARQVWLTLEGQFLGNLEARALHLGESA

SEQ ID NO: 51848 - protein, 32 aa, Zea mays
  Coding DNA Sequence Number=SeqID_8473
MVVRGGCVGQGEVGWLTTFEGRQMRRSFWGEV

SEQ ID NO: 51849 - protein, 296 aa, Zea mays
  Coding DNA Sequence Number=SeqID_8474
  Gene Ontology: Mol. function=translation initiation factor activity; Biological process=translation
  Homolog annotation: Hit_ID=A2X8Y8; Match level="QueryCoverage=63%, HitCoverage=14%, E-value=6e-76, Identity=73%"; Hit description =Putative uncharacterized protein
  Subcellular localization annotation: CTP_CleavageSite=33; ConfidenceScore=5.44e-01
MAAGSGPAPPAEAQLRRRSTTAAGRAPQRAAPPATARRRRVPPRLAPLPRDPLAAAPRAAPHPAPPPPPPLAPRRRRLQAEETRELRTINKWGEMMYEKIKKLDKELARYVHNNIFFSFAVDSNFEDISKDHKLDCQNGSSRSTKVSSPDVITKPDANHGKSAEVVDSKSEEAQLADREQATYASANNDLKGTKAYQEADVSGLHNLAMAIVDYRGHRVVAQSIIPGILQGDKSDSLLYGSVDNGKKISWNETFHSKVVEATKQLHLKEHVVLDGSGNPVKLAATVECKGIVGSDD

SEQ ID NO: 51850 - protein, 47 aa, Zea mays
  Coding DNA Sequence Number=SeqID_8475
MAMMDSTSEKMYLCQVRKHQTFAILVLRWCPKKNLNSEAAGGCWPPT

SEQ ID NO: 51851 - protein, 162 aa, Zea mays
  Coding DNA Sequence Number=SeqID_8476
MLVDYTTVLNGPSVSVEGLTQPGVESIVEVTPTSGVMSDGSCDPSLRLLRELYVVARTATSVVVQPGCPVVAQAACLAEVQGKASSQTPPPTEARGKSPTAPGLAPDPAPGVGAPAPRAGDDVVSPCDWTNLAACDAVDTPLGEKAKRGSLTLVSTRVRVEL

SEQ ID NO: 51852 - protein, 234 aa, Zea mays
  Coding DNA Sequence Number=SeqID_8477
  Gene Ontology: Mol. function=DNA-directed DNA polymerase activity; Cellular component=epsilon DNA polymerase complex; Biological process=nucleobase, nucleoside, nucleotide and nucleic acid metabolic process
  Homolog annotation: Hit_ID=Q0E0Y5; Match level="QueryCoverage=35%, HitCoverage=3%, E-value=3e-39, Identity=96%"; Hit description=DNA polymerase
MDGLGIQASNDLAFADGNMPFNMHMNFMFDKYCFMFLSVGQVVLSIQKGAHLLIVFGQSRGTFNVSYRTLFLTLIIVLYHHNQKLAVLLPVSICSSGLQQQAVTKAKLGYDPLEVNPEDMVRFAMEQPHTMALYSVSDAVATYYLYMTYVHPFIFSLATIIPMSPDEVLRKGSGTLCEMLLMVQEKVMWFVKGVLIKGRRPSTTEFVVSCRVFQDRRLCPLRRLGLRVDRERDG

SEQ ID NO: 51853 - protein, 116 aa, Zea mays
  Coding DNA Sequence Number=SeqID_8478
MAACAVDLVPESGGVEVEGGAVGSTDVEGDVLGAKDLVHGCLRGGHELGGEPELAVGAEHCEGGDVAVAARPGRGRGGGAARSRWRGGGAAARGGAAAARAAAALVEDIPHNNYGD

SEQ ID NO: 51854 - protein, 253 aa, Zea mays
  Coding DNA Sequence Number=SeqID_8479
MTSHGSSEGGNTQSHMDGLAREGFPRILWEVLHRAGYTTPPQYAVQLFEKHRVPRCRDTIKAIALHGLTTFCGFHPLELSTHPIGLFPAEKEDDPMWKDRVEHAKDIWALYPGQTAHLTVKRGEAMSHMMALLKATKITLDNREELVVDLSTEMVEKDLQVERMSNEIQELEELVGTRENTIEVLEDQLINSQQQLTKANQHLDMHHQEIQDMEANEDVDIEGGEEPEPASSLDTAGSGRLPSPESSVASFAH

SEQ ID NO: 51855 - protein, 115 aa, Zea mays
  Coding DNA Sequence Number=SeqID_8480
MQDAARRALSQYCSLFNGVADGLDLKYYARYSTGNAGGVIVSLVGEGNPWLNSMVNVAAVLNTELDHALDELGKVRAEVAKLRADCAARHYLDVGSPAPVGIQHPYRSPPRGHFD

SEQ ID NO: 51856 - protein, 133 aa, Zea mays
  Coding DNA Sequence Number=SeqID_8481
MQQGVESVVEVTPARGVASDGSSDPSLRLRLLRELRDVARTATGVIAVSVSIRVSSSSRDAMWWCRGHLWLRCIGSLPPSPAAPAPGDDAPAPRAGDDAVSPCDWTDLALCDAVDAPPGEKAKRGSLTYVQCT

SEQ ID NO: 51857 - protein, 162 aa, Zea mays
  Coding DNA Sequence Number=SeqID_8482
MTLPPRLSRRWSLGGSLPLHLSQRCPPAPPQGIPAAGGDPDGDDDDDGGSSSHDTELSEEQEPKGWNTRPITRDTARECHFHDSLDTLLRWAFDRHTWSIEYRCVVYQYCRGLYLDQWEATCLVHRSDDDLRGAEAFSKHYTITERDTAEAAMQDVAQRVLS

SEQ ID NO: 51858 - protein, 188 aa, Zea mays
  Coding DNA Sequence Number=SeqID_8483
MEGSWIIRTSYCSEEEGFPHLLRSCALRMGIHKKPEYVWKEYRENEVEKCSMAVYLGESRSYPNHPPFQVTFKGHHFPDTCQNVARKALRQQREGEEANTCEAYQTLKLDYDKKLKKLAPTKKIQKKTKSQGCQTERKKKAPPAPPPSRIENLSDVEDMSLASIDDLLKEFGDTLEKEFGSTSESARV

SEQ ID NO: 51859 - protein, 234 aa, Zea mays
  Coding DNA Sequence Number=SeqID_8484
MSKPDKTFPLLILPVLPSLLNPGVGPHEFGLSDCPHSLEWLYDKGVQHGRRLAILRVGSIRPERVGRGLPTGRGRSFAAGIAAGGLWVGNRDWEVVLRVRGLVRELLGSLNFLLDQRRGRGRRRKGLTGEEEDDGASRIVLGGGEERDGRGWCEEEGARGEPFIGARGKWGRWSFLAPASYTVPPINAAQRRRGDTMAGRYRRGRWSRGGEDGAVPNFPVRREGGGEDGGDGRR

SEQ ID NO: 51860 - protein, 313 aa, Zea mays
  Coding DNA Sequence Number=SeqID_8485
MSSDSDLFVDAHDLWTRIKIKYSESKCTTSTPYVACGTNLSKGEEKRWQPNDESTSPTGLSSTSYKCLIDNNDSGDESDDEEEYEDDSEDGSSSPQGTFSCIASTNNNDNETDDVKEEEIRRFYTHLNKEDKVLLVKLLRRNKEQGEMLLRLEETLIKTNDSLEKMTKEHEELLLKNALSCVLMMIWSNGSKEKLLINKERNKKAKQLRRRHIAQPPQDIHGRVVKKLEMGETAASVKLHKKDVPKAINEAINMSKEKETTDQAKDGGKKSFEVPSAREKVKETRNPKPGVKKKTCKVKVDRVKSHGASRITT

SEQ ID NO: 51861 - protein, 218 aa, Zea mays
  Coding DNA Sequence Number=SeqID_8486
MVNQQLLFRRDHLGHSVIYLNKYLKASVTLSKKFSLVYVGTLNQGYPLMEHEGIAPMRRPLAARRTAPDPTGWAGQRKPRGRERHHTPDMGVGKIVRITGFDSLFAIEAGQVKIKGKLEDLGSFINNLLGKMGLGTHSYIMLIKSIEVQEADKLRRIVLDAPSTGHTLKLLSASDWIEMFLTLSIKGINVASSMSSFNMYLADVQVIGSVQQFPVDFF

SEQ ID NO: 51862 - protein, 119 aa, Zea mays
  Coding DNA Sequence Number=SeqID_8487
MELLGSGELHSAAHKCRTAPPRGHHGGAVPTRNAGQGEGRTERCPKFPVRREGGGEDGGDGRSAAKKIVSSHNIVVTDINIVEGSICRTDRSKQTEEGVEIDSKPRPYKDFNNLRTMPS

SEQ ID NO: 51863 - protein, 217 aa, Zea mays
  Coding DNA Sequence Number=SeqID_8488
MTVGLVVGRSKPGCGLCPTLSFKDVYHPRYGGGRAEPGFYLPHGPTSRLFLQHSGERALTGLAVGANFDNAGPVGRKRCQLQRAWLAGSAGSGAASGAASCRLVRAWPSVHRAGDCCAMRTGGSSKMSYVARVAFVSLDCLVLTPARRLRAEAGAGVSCSGTGKIYTQVLTDRPAPASARRRRAEVRTRQSKDTNATRATYDILERSPGSAWTQQVA

SEQ ID NO: 51864 - protein, 53 aa, Zea mays
  Coding DNA Sequence Number=SeqID_8489
MATSRTTRPVALTPWRDRRRLWQEKRATLRLRHNDRVKKGTGKGGYPEKDPSP

SEQ ID NO: 51865 - protein, 228 aa, Zea mays
  Coding DNA Sequence Number=SeqID_8490
MGARAHESYSLGVGSRVQKSGIKAPRAWPDETIRRGGHGLVSSPEVGPGATVGTLKLGYPLLQYEDVATHSRVPGFWDKEYPGHNQGQAGDHSRHVSGPYRVHFCSPLRRSPDAATWHGARDVSQRAEPDVRPLGYAGSAFIADKARRLPIPLAGDVPPQHLLSPVHSTGKRCVASAFNETCPFHGQAATSPFHRRRACPFPWKAVRPCCRVHYAHHYSRVTKEAATA

SEQ ID NO: 51866 - protein, 212 aa, Zea mays
  Coding DNA Sequence Number=SeqID_8491
MGPMAVLLTLSCQSYVQIQVPVETTSWGPGHHLSLKYAGILPRQQQPAQELQGSPAGAPWPPCSLPWPGVPSSGAPKHLPALSLSDSASLQQASSAPPLPPLGQPWRDALLPMALMPPVLGARLLHVGWPVWVVAAAMRAMSAPCSPCRWAAGSRVLLLYAGRPTSLRLPPRSPPHGHLPLLLPFSIGAELLLPAAGAPCSSLSATREFQLA

SEQ ID NO: 51867 - protein, 341 aa, Zea mays
  Coding DNA Sequence Number=SeqID_8492
MASVAPSPLLVDRLGPIGRDAARPTGPKFPLAQVMKAGEHQEDKEGECFVRFGHGSGLTPSGITVKVRTWKALGSLGHPSTQRRKDSLISYGVVRYAWGSARSRNMSGKNTAKTKLRSALWQSTWEKAKVTQTTLPSKSPSSGTASQTLAKMLPEKSFDSYAKTTTDSNKNTPTWRKRLQALSGRDPTEDDPTIVYMAGYLHTLDNHYDDLSSHCTHLNSWVESLEQQVKELKKEKASLQECLDIAEGEEANTREAYRTLKMDYDKKLKKLTPTKKIQKKTKSQGCQTERKKKAPQAPPPPRIENLADVKDMSLASLDDLLKEFGDTLEKEFGSTSESARV

SEQ ID NO: 51868 - protein, 105 aa, Zea mays
  Coding DNA Sequence Number=SeqID_8493
MGDATRRREEGTSRDGGEDYGRAGGGAGGSPGRSSEDDRDVPVHAEPWRRTGHRSATSMFPPSDPALFHTPGQIWGGIQQPSGRVQPNAAPIEPPTSMSVMFFSV

SEQ ID NO: 51869 - protein, 90 aa, Zea mays
  Coding DNA Sequence Number=SeqID_8494
  Gene Ontology: Mol. function=sequence-specific DNA binding; Cellular component=nucleus; Biological process=regulation of transcription, DNA-dependent
  Homolog annotation: Hit_ID=A7PXH2; Match level="QueryCoverage=61%, HitCoverage=7%, E-value=5e-10, Identity=54%"; Hit description =Chromosome chr12 scaffold_36, whole genome shotgun sequence
MGLQCITEAFGGSIYLYTRKDVMRYYKQNADETWVDISLNSLLPGSVLNCQRQLSGCLIQEKPNGYSNVCCLSMIEIFSFHTFSVQYLMV

SEQ ID NO: 51870 - protein, 131 aa, Zea mays
  Coding DNA Sequence Number=SeqID_8495
MASGGGGFSDDFGEDEAAGVGDSSDDFGTTAIALRHGGDGGFGWSVDGKAIPRSFLSDRVPPRRRDLGSLEVLCAITNGSLPTCGRSTRLQRRSGALCVVMDDLAIYCGRSVLPQREPKGPARRTQAVWFI

SEQ ID NO: 51871 - protein, 437 aa, Zea mays
  Coding DNA Sequence Number=SeqID_8496
  Gene Ontology: Mol. function=P-P-bond-hydrolysis-driven protein transmembrane transporter activity; Cellular component=mitochondrial inner membrane presequence translocase complex; Biological process =intracellular protein transport
  Homolog annotation: Hit_ID=A2YPB2; Match level="QueryCoverage=52%, HitCoverage=74%, E-value=1e-93, Identity=67%"; Hit description =Putative uncharacterized protein
  Pfam annotation: Domain name=Tim44; Domain location=143-291; Score =11.4; E_value=0.00016; Accession=PF04280.6; Description =Mitochondrial import inner membrane, translocase subunit TIM44
MDLCNREREDSYTRFHFGFRDYHASVSRPFAPTHTGVCVRGFASLTYNASSMIGHNLEGPLPVHIVKVLDLVVHMNHARPMSTAAASKVPVGARKVGLKVAMMSPGFVYEPYSPRERIPFWKRWFTLSGWRRTKEDIILEMKNAYAVSRLRKKTGYTKNQFYDQALKIYKEVNTLMAHGDTSSLRKILTERMHSTIKNELKRRQSMWNSVHWELVEPAVSIRTLRARMIGLDKNDLDKAFIQLTLEFVTKQVSFSQTSSLSPTLATTTGAKSLTQATADVETGPKLRKHHRREPLGEDVGELGGGRDVKDANSSTGDPFADEVKIDLDMFRALVLDGVGGEVDGADVVAEDQGARGQWTVELLEQLTEPGRLSHAVGHGSIIGLGAGAGDDRLALRRPGDEAIPEEHDIPRGGSACVGTACPLGIGVDAKLCGRGPA

SEQ ID NO: 51872 - protein, 103 aa, Zea mays
  Coding DNA Sequence Number=SeqID_8497
  Homolog annotation: Hit_ID=Q53RB7; Match level="QueryCoverage=42%, HitCoverage=5%, E-value=1e-07, Identity=55%"; Hit description=HEAT repeat, putative
MVGQFDPRLQRTPLHHGTFPAVEASTQRPGGCHPEPAGGRAPGTPLAYDVSGSAVLEMMRKLPRMACHSAEEEDAGETRSYVFANECLDRLSIAVGGNMIVYA

SEQ ID NO: 51873 - protein, 103 aa, Zea mays
  Coding DNA Sequence Number=SeqID_8498
MGRKKEEVHIRYSLNQFGGNKVHEFRQRWEVPVKGKGLPKRMGPPSQQNPPEGLPRNPLQDRHHSKILPRAFPGIPCRTAITAKSSRGPPYTDHSPTALAPFG

SEQ ID NO: 51874 - protein, 196 aa, Zea mays
  Coding DNA Sequence Number=SeqID_8499
  Subcellular localization annotation: CTP_CleavageSite=19; ConfidenceScore=5.18e-01
MAEVKRRPLRLPKVTSEVSVSRRRRSPSARSALPPKASLAQLKNPQLLCNEPELEAAVSAWTGAESAREEASLAQEHVASLVEEVQQRRLEPGQVVRWRDRPWSQAAEAMSRADVLGGQLAEATERPVEVFARVGTLTEISTMMARAWCWPPPSRWRSFRPRHRPRPGQIPAKVETTLRVLLLPLLMSEPAGRVCL

SEQ ID NO: 51875 - protein, 102 aa, Zea mays
  Coding DNA Sequence Number=SeqID_8500
MEADPRVRVATPEQRRATLQTEQRSAGAGERCGGRDGGWRAQRSAGAGGQCAVVATAAGRAHRRAQEMAATTAGGGRAATAAGDARAATMARKLGNPNRNLL

SEQ ID NO: 51876 - protein, 178 aa, Zea mays
  Coding DNA Sequence Number=SeqID_8501
  Gene Ontology: Mol. function=ubiquitin-protein ligase activity; Cellular component=ubiquitin ligase complex; Biological process =protein ubiquitination
  Homolog annotation: Hit_ID=Q84VE7; Match level="QueryCoverage=52%, HitCoverage=14%, E-value=2e-21, Identity=55%"; Hit description=Arm repeat protein
MVGQFDPRLQRTPLHHGTFPAVEASTQRPGGCHPEPAGGRAPGTPLAYDVSGSAVLEMMRKLPRLLVPLLLSEDSALQLNVVTTLLNLSILEANKKRIMHTESAADALCHVMGSSATWHAKENAVATALSLAAVHAYRHRLGRNPCVVQLARTAPPKLRMRSCAPVPVSRARERHKDR

SEQ ID NO: 51877 - protein, 79 aa, Zea mays
  Coding DNA Sequence Number=SeqID_8502
MKKSEKDIHDSREAAKKAKKAPELERHIAELPPPPEPFDPLANPETKKAIEIINMAKAIIDEVVTNLLNEVAEKVMKEE

SEQ ID NO: 51878 - protein, 48 aa, Zea mays
  Coding DNA Sequence Number=SeqID_8503
MADELSLGEAEPSRPTQWTVQLLVDGGLLERQCGQLEADGGNLKRSGA

SEQ ID NO: 51879 - protein, 105 aa, Zea mays
  Coding DNA Sequence Number=SeqID_8504
MEQAAMGRAEEAPTEEGDEDASSKKSEEGEDRDGTPSGTKIRKQMICCCAGKSHLAGKKKELDDFSRFSSAAAGDNHGWNLSIARKRRRDLFTSLSGIKKNPTRG

SEQ ID NO: 51880 - protein, 105 aa, Zea mays
  Coding DNA Sequence Number=SeqID_8505
  Subcellular localization annotation: CTP_CleavageSite=48; ConfidenceScore=5.71e-01
MGKNLGAQSSTASQASRRNQQRARPGTGRRKRLGWARRAAGQGRGQARSEQRSSGQGRAIGRRWSRRPWEGQRKRRQRRGTLAAKNQRRERIGMARRHEQKSGSR

SEQ ID NO: 51881 - protein, 112 aa, Zea mays
  Coding DNA Sequence Number=SeqID_8506
MCTDPGEGLGPVLKNGCPFHRVVRMCDRSSPRLPIGGNNEAIKAKEPEVRRQVALTVSPAEATTSVVGSLTSGGDHLSTDDNDHLRTSAVPANGGHSNARAKRSSLPSSLRE

SEQ ID NO: 51882 - protein, 68 aa, Zea mays
  Coding DNA Sequence Number=SeqID_8507
MSKTPAEPLRARAASPPSSDVFGTRINMGRRRCDATVKMLIGGMDRLILWKHMLVVMESRMDDEFIIS

SEQ ID NO: 51883 - protein, 117 aa, Zea mays
  Coding DNA Sequence Number=SeqID_8508
MAEGSSSTLGIDDTFGEGLLRESGPSRRLGWSTPASVPLTDDPARLRPTRFPFRANPASVHADTATPGLGSSKSGRGVPLIKLEKPRTTRPTEPRDSYASGIRIPHSSPLHGATHAW

SEQ ID NO: 51884 - protein, 226 aa, Zea mays
  Coding DNA Sequence Number=SeqID_8509
  Gene Ontology: Mol. function=kinase activity; Cellular component =ornithine carbamoyltransferase complex; Biological process=amino acid metabolic process
  Homolog annotation: Hit_ID=Q6QP54; Match level="QueryCoverage=32%, HitCoverage=26%, E-value=2e-26, Identity=83%"; Hit description =Putative kinase
MGRRSCSLRPESARGRVMMVPPVDVAGLRPRLGDVEAPPKPRSSLSSVAEVGSEPQVRARRRSLVDVGAESEPWGRAKRSSSSSGAEPKSEPWVGRGGDRRLLGLSPSPSPGSGGVRRLPGLSPSPSPGSGGVRRLLGLSPSPSPRSGGVRRLPGISPSPSPGSGGVRRLPGLSPSPSPGSGGAELPMVPLAGPDCLSVSLCQVAPQSEWRRRRCPSVRPISGAAK

SEQ ID NO: 51885 - protein, 30 aa, Zea mays
  Coding DNA Sequence Number=SeqID_8510
MAQRRSQKNKNTTRKEAQLRYNSPDCPVRH

SEQ ID NO: 51886 - protein, 186 aa, Zea mays
  Coding DNA Sequence Number=SeqID_8511
MGRTTIGGASQSTLRQHMLEQEDKPMDGWVFLILRLILGRRRGRQSTSSSSQSFHSRSSAQEIEIAVLHQQIECHQSVLRQQMEYQRQQAEYQKKKDKYYSILQAHNQALLSQLAQQAGVPMPTYGMPPLDFALPPPMLSPPPPPQFPVLLKFIMSDGLTQAIGHKTSVCSTAYHMPSDIILPYVQ

SEQ ID NO: 51887 - protein, 362 aa, Zea mays
  Coding DNA Sequence Number=SeqID_8512
MVGTSAMTARLGPREWNLVSKGSGPDPLLEDRWGRLTCVGTECPYMSCCLGLPRKAKNSIQIVCFSQLMRLLDRYAASNNSQLVEPEGVAGEDPEQQLVVTRMMVMIMLMVMQEVESVRSCSPVPPLEAPPAPPLGVPATGVAAGGDPDDGDDNSSSSHNTDLSEEQEPEGWVARPITRDAARGCHFHDALDILLRQTLDWRTWSIEYCCVVFQHSRGVYPDRWKATCLVRRPENSLRGAEVCSEHYSISEQDSAEAARQDAARRVLSHYCSVLGGVADGLNLRYYPRRPSSSTGGVVVSPVNEDNPRLSSTVNLVAVLNTELDHALDEMSDNRRRGGRRAQQKQAAPQDEAPQQQLPPPPQ

SEQ ID NO: 51888 - protein, 32 aa, Zea mays
  Coding DNA Sequence Number=SeqID_8513
MGKPVPSLLMLLLNRAQFHLLLNVAAWIKQSH

SEQ ID NO: 51889 - protein, 307 aa, Zea mays
  Coding DNA Sequence Number=SeqID_8514
  Subcellular localization annotation: CTP_CleavageSite=51; ConfidenceScore=5.32e-01
MSSRFLMHRVFLPSKPPDGGYPPSFRLVVGGTQLHGSWYLSAIVRLQGFSSASPAVPLRRWSPEMVTTSPWVWRSKLGCDLGPTLSFKDVHHPRWGGGRAEPELYLPRGFVGRPLLRRSRERALTGPAGGPDFDNAGPVDGGRRQPQRVGLFGLAPGAPSCRKAAAAPCAREDRPRCRALPGRRSCSGAVLPLHRYGASVRRDPWTTSPSKARSGLAEGVVDAEVEKARRIALAEELPNVKTCSVRGITYPNVSYLSQKVMSEPKHQVTHLEVSGPDPSGVVASQGLLALVLGEPYSKSVGKMASAP

SEQ ID NO: 51890 - protein, 74 aa, Zea mays
  Coding DNA Sequence Number=SeqID_8515
  Homolog annotation: Hit_ID=A2Z9P4; Match level="QueryCoverage=100%, HitCoverage=21%, E-value=4e-14, Identity=57%"; Hit description =Putative uncharacterized protein
MSLTTIGSQPMPVNDEDEWSFGFCEIGSRVFSCPARKNPMYTYWERIVLRETERGILDPTGLSREWSDHSYNHL

SEQ ID NO: 51891 - protein, 191 aa, Zea mays
  Coding DNA Sequence Number=SeqID_8516
MVPAMFPRVQHPTFQSLATEGTSYSRHLSTPSACELFCKEVGKCTGACLGEEESRALLPGYLQLAANPNGTPSGGPSATTSVGEVSDGGTDSPSTSTSNSSSSCQLKEKGKTAIVSRPKPTAWPTNAEKSALRWYYCAKAPVDSVNLLIGQALFPLLTDNRIENPRFLCFHKVSSLAVTLAVPGRTPGCSR

SEQ ID NO: 51892 - protein, 67 aa, Zea mays
  Coding DNA Sequence Number=SeqID_8517
MPRQASTPSLRARRDRASELCRPGPPAQGSRVFNQDTSDWDWEEDEETIWCYQGQAPSPRNGPSSFA

SEQ ID NO: 51893 - protein, 91 aa, Zea mays
  Coding DNA Sequence Number=SeqID_8518
MEIKERKTNNGNLCHPKTLVNCPLKSIEAIPIHCNNLKENLILKDCNLADGEYILVPEQGAAQEVAPDPAPEPAPEDLPTTALEGKPRFYA

SEQ ID NO: 51894 - protein, 208 aa, Zea mays
  Coding DNA Sequence Number=SeqID_8519
MNHYAPSIINPKVQINSERLRDASRCLRVTEWSSRPGTEAVGNDGEQPDEATSNGRRGVKQWRGGLAAACVPPRTAVSPGRTVPDCLAAVPHGAWTTWFNCVLPHWQRLKLGHNYVRGRPGQITERDFHRGSRQRDADDVSAAPILEIRSPESSADCALRSTKRHKGRFLTVTATGMELDDDDAQVVPRREAPALDKQPSEATKLQQR

SEQ ID NO: 51895 - protein, 124 aa, Zea mays
  Coding DNA Sequence Number=SeqID_8520
MTKTKGPNIGIFVKKAQSMKMNGTAIFIMDRMVGIRPGKDERLRATLLLSTVVKSPELRQARARVAPGSPRLGREGENATTNSVAGKKATNPRTERGERRGEGHGWTGGTPTRDSSHGEGLEAR

SEQ ID NO: 51896 - protein, 244 aa, Zea mays
  Coding DNA Sequence Number=SeqID_8521
  Gene Ontology: Cellular component=Golgi apparatus
  Homolog annotation: Hit_ID=A2YP62; Match level="QueryCoverage=63%, HitCoverage=54%, E-value=5e-39, Identity=45%"; Hit description =Putative uncharacterized protein
MSFTGTLSFLGFRPRDVETRETAIAGSRVDFPGKHCGSCAGLGHQESSLRCALEEAIFLDRPHIKKYVPVILDNPRSWYQIISRSTKLGEDGLVVHVQGVSRAELKQNANYPGAFLINRTASPLACLPFSASKFVCPPQMKEIIGDYDAIHVRREILTVSSSRKELQSGFDEVALFSLPQMKGPHASFHLCQTRLPQRTYSLAPVSHTYLSVAELPELFQLKCLSPALEAGPHLNGNNPSIPRI

SEQ ID NO: 51897 - protein, 71 aa, Zea mays
  Coding DNA Sequence Number=SeqID_8522
  Subcellular localization annotation: CTP_CleavageSite=28; ConfidenceScore=5.36e-01
MTRAIFTGHHPQCHEFLNSFTLPSSAPRSMAPSSVPRRRHDVRLCQRNTYLGAIAYGAELCYLGAIGYGAE

SEQ ID NO: 51898 - protein, 190 aa, Zea mays
  Coding DNA Sequence Number=SeqID_8523
MNKLTGIRSAIANGTPVPPPQVRTTPLRGGRPAEQWKADELCAVTRSSSGDDDAFCSEGPSSGNADLRLDAAARRPPPVPKLVRQGRAEGHRVGGTEKGGHPERDPSPRRNWAPSPPLLIRGSKAAPPRVQQSPQIAWARHPLLVRGSKASPPKGSMAASGYSGSAPITDQGFEGWPPKGSQSPQTLSEG

SEQ ID NO: 51899 - protein, 615 aa, Zea mays
  Coding DNA Sequence Number=SeqID_8524
  Pfam annotation: Domain name=TSC22; Domain location=134-194; Score= -0.7; E_value=0.049; Accession=PF01166.9; Description=TSC-22dipbun family
  Subcellular localization annotation: CTP_CleavageSite=57; ConfidenceScore=5.46e-01
MKPAAPLPSKASASAKAAATGGSKPPLGGLVKGRRSPSPARRIADFGTDISVKDYLVGSGEGQLAVVPPPVTTTSPTTVAGAKGAARDPWATFCVSGKILSAATAKDVVGSMSLRLREASQQLSQQLKQAADFADLVASGALTADVAAEVERLRAQHADAMREKSAAESKNRRLSEKVAAMEAEKMDLRRQLAGERREANKAIADAQAAQAEAKAARAEGSLACQRAEELEARFNALCSRVDKAKTSTRVEVERTHAQFVDTYRELGARTADFEVPGQEAGLEWLQEELLVLPTIVTGFMSFASLVTCEGAMNALSREGCRHYEVFDQADENFECEIFKVEDPMVKQSAGALFDRMWSPHGREAVRERSERAIEQMARDEDVEDLVGLDGALLEAAEVDPLPPSAAAGEDPAPAPASTGEDALKVVAEPAAEPAAEDPTAATGPSQVLGFGPAHATATDNAIFVVASTVAADDDSFDSVSKCFESDDSGSSIAWSEESSDEDMDYFAALDVAAAEPSPRVEGSEEPPGASTGYRRRRAVAKRRVSGLSRSGGHQRGEMESGRLRVDGTGKRELLSSPIGVSVGEGELRNLFEGEELRIMLFNYREMGIIPKVEPM

SEQ ID NO: 51900 - protein, 265 aa, Zea mays
  Coding DNA Sequence Number=SeqID_8525
MEVVFGRRLRSGAEEEAAPIPLPHMLSHAHQFISERSQLERDRKEYKKDLQKVYARVLEVHYREKKVAKREEALTQREALTTELWAKLNALDQTLEAQWVQQHELEAEKKEKELEEQICQFNAAQAVQGSQAVEATRKALEDLQAVHRTGVQHIVAWAGEASTTLVPLGMSPILVSEQPVSISNALPVLDSTADRLRCLDQILGARLEAEGSKLYRTVIEYVLTCFWRHDPAISLAAIEDAARERIQDAVELVAECFQRDPADDE

SEQ ID NO: 51901 - protein, 111 aa, Zea mays
  Coding DNA Sequence Number=SeqID_8526
MVGFTRKGGNRAPDKLLFMSDGALDCPVHHPTDGKDSFPNGIPTAPSAVKKVVSSHDGVVTNINIVEGSICRTDRSEQMEEGVEIDSKPRNFNPAATYSKGPPFYCDPAFE

SEQ ID NO: 51902 - protein, 339 aa, Zea mays
  Coding DNA Sequence Number=SeqID_8527
  Subcellular localization annotation: CTP_CleavageSite=56; ConfidenceScore=5.19e-01
MQAACNRARWTRFSDSQRASMEAQAHASRNRRARCCMQATAPPLAPPSRLFGCGTNAATRGDPAHDPAAPAWRDATALPTTHPVALTTRRDRRRFWQEKRATLRLRRNNRAKKEVRRLAPRGVQQPPQIVWALHPLLVRGSKAGPPKGFTAASGYSGSAHITDQGGSDPVTESHRREASSPRTPSSGDRVRQITRSSPETPCSVPIEGNMALSPLLLAERRRRGSRSDCSHFAASLTGLTEGQRRLRRSDCCATQQSEADTQSGPASGTIGNSALPDLGLGLGLSPGRRRIPLHPTQGSDSGSAPEDGELRSARPRARTRAQPRKTTNSCGGTARIIPT

SEQ ID NO: 51903 - protein, 57 aa, Zea mays
  Coding DNA Sequence Number=SeqID_8528
MGLGKARLAGLRLQWLGWPRTRRARANGGELSSGEVMKHTTTFIFGPSHDHKVYMTF

SEQ ID NO: 51904 - protein, 80 aa, Zea mays
  Coding DNA Sequence Number=SeqID_8529
MDQSFILGCIVGGWKQQLEGIFEVLASSFSEPSKYIRHTSAVSGLSGPLGYSANGFLVVKNIPYWKTSDYYDFVVVKVVT

SEQ ID NO: 51905 - protein, 77 aa, Zea mays
  Coding DNA Sequence Number=SeqID_8530
MQPSRRRRHRSRLVAVTPPPPPQGCSTTAQAQPVPDDLPSRPDAQPEHDATDATGAAPTQPAAAGASAPVPDASYQT

SEQ ID NO: 51906 - protein, 111 aa, Zea mays
  Coding DNA Sequence Number=SeqID_8531
  Subcellular localization annotation: CTP_CleavageSite=28; ConfidenceScore=5.18e-01
MTRCGITVARRFRRVISRGPTTKSPPVRAYSSPVCHGFSPRPRSQTWFIVDAYLRPHHGSLVRGGTRDSSELMEEMPRFQISNSNLNPYLNFLISTLKDNSNVKVLQILPP

SEQ ID NO: 51907 - protein, 77 aa, Zea mays
  Coding DNA Sequence Number=SeqID_8532
MPPWIGRSTRRRRARPPAHVDRAIPAIPDDESYLDVIARPSPSQPYPSPDLPRRRTKTYYHQRMPTKITFRTEPTPN

SEQ ID NO: 51908 - protein, 466 aa, Zea mays
  Coding DNA Sequence Number=SeqID_8533
MDAATGRLSFAFPLKGREPAIKAKERAAPKRTGSNSSPSPAWLEDASSTELEDGFHHQKLEEEVASRPAREVEPRLASLSAPARMMNILEAEGGTKITARLASPHLGAGGHRLGRRGLSLLQHAPRSSPYGAGAGSRASCKLAQGRRSQTAARGACNRPTVTSVPPLSPRLAGERAGSHVGGMQPRQVGTLLRLPTRPAWRPRPTRHATGAPDATCEQLHRHSRHCHASSTAEPVPRLEATLRMTQQRQPGATVNTAKNGPAVMVVAGGQEQRSRRQPSLHPIRGQRENPLSRREDDAPVFRSSNCSRTRNGYPANHSPRRINSAVGQAAPLAGEGPGKGDTPKRILLREGNRLRASLLIRGSKAGPSEGFNSRLRARGLHTHYWSEVRRPAPRKGSTTASGYSGSAPTTDQGGNDLVTESHQREASSPRTPSTGDQLTGDTMFGALRGQHGTFPPSSLRKGDVGA

SEQ ID NO: 51909 - protein, 296 aa, Zea mays
  Coding DNA Sequence Number=SeqID_8534
MCPEKVIYPKASTVSPDPHGRVPDPWIYSPDLQGWSRTSTCASRTPGMGSGPRHMGSGPPTMGSQGGVHSPRYAGRAVIYHYSYVSAINYSHNVFLMLCSWARMSGLSILDHQLVLGQVGARPTLDPTDVVHAGEPATQARPPLQRRDPTLQEVTDHMHQRQAARSQALDPVQYGQELRRQGRLGPPLLAIESRPIGRQDEAVVGLGAGDHPVASPVLPPHSTKGGDVDDGRIWPRLEVVGPDVVPSLPRLDQHEEVAKERSVGSHPYEHLTEVDEDGRLEDGVGHEVLKLKPELL

SEQ ID NO: 51910 - protein, 410 aa, Zea mays
  Coding DNA Sequence Number=SeqID_8535
  Gene Ontology: Mol. function=kinase activity; Cellular component =ornithine carbamoyltransferase complex; Biological process=amino acid metabolic process
  Homolog annotation: Hit_ID=Q6QP54; Match level="QueryCoverage=19%, HitCoverage=28%, E-value=6e-19, Identity=63%"; Hit description =Putative kinase
MAPPVDVVGPCPRLGDVEAPLRSRSSLSSEAEVESEPLGQARPRPSVEARAESEPWGRAERSSLSSGAEPESEPWVGQSGEVLQGAGYTTPPQYAVQQFEKHRVPRCRVRMTLEPHPLQPGWRSLDSESFGYRAEDTIEAIALHGLTTFCGFHPLELATHPIGLFPTEREDDPMWKDRVEHAKDIWAIYPGQTAHLTVRCMNALYRLQVMRGEAMSHLMALLEATKITLDNREELVVDLSTEMVEKDLQVEQLSTDIQELEELVGTRENTIEVLEDRLINTQQQLAEANEHLDMHHQEIQNMEANEDVDIEGGEEPASNMVLSMYVVFQMAGRQRRGQNERVPPPPPPPPTLQELMAQQNEILRQLAQRQPPPQHYGGRDHQRPPAALPTRSSSVLNVILKAEDPLDADV

SEQ ID NO: 51911 - protein, 254 aa, Zea mays
  Coding DNA Sequence Number=SeqID_8536
  Gene Ontology: Mol. function=carboxyl- or carbamoyltransferase activity; Cellular component=ornithine carbamoyltransferase complex; Biological process=amino acid metabolic process
  Homolog annotation: Hit_ID=Q8SA97; Match level="QueryCoverage=77%, HitCoverage=24%, E-value=3e-21, Identity=39%"; Hit description =Ornithine carbamoyltransferase
MAPPVDVVGPRPRLGDVEAPPRSRSSLSSVAEVESEPLGRARRRPSAEVRAESEPWGQAKRSSSSSGAEPESEPWGRAKRSSSSSGAEPESEPWGQAERSSSSSGAEPESEPWVGRSGVRRLPGLSPSPSPGSGGADSRSDAGGTVLLSGRAVERRSVCGHFGSVDWRTCVRIKLCADGGYQLRIRSLEGTPNYGPRQNLRILFLRGTQNFTDEINRMLHWVGMSFFCSLDYQRGAYHVSHARDIQQQIFSWLS

SEQ ID NO: 51912 - protein, 75 aa, Zea mays
  Coding DNA Sequence Number=SeqID_8537
  Subcellular localization annotation: CTP_CleavageSite=36; ConfidenceScore=5.24e-01
MVGTSAATARRPVGVSGALYAKALVLLATKPPQPNSCMSRGSLEEMVAGITWPTTLPPGWTVEWDPASAEEEHEE

SEQ ID NO: 51913 - protein, 57 aa, Zea mays
  Coding DNA Sequence Number=SeqID_8538
MAGGKELAGAKEGRQAGDDSKGRRRGWCDYVPVSLGRQSGKLDLKNSSVSQVASSSE

SEQ ID NO: 51914 - protein, 113 aa, Zea mays
  Coding DNA Sequence Number=SeqID_8539
  Gene Ontology: Mol. function=pectinesterase activity; Cellular component=cell wall; Biological process=cell wall modification
  Homolog annotation: Hit_ID=Q2R2C9; Match level="QueryCoverage=100%, HitCoverage=39%, E-value=1e-17, Identity=36%"; Hit description =Pectinesterase family protein
  Pfam annotation: Domain name=Pectinesterase; Domain location=2-113; Score=-244.2; E_value=0.0041; Accession=PF01095.10; Description =Pectinesterase
MALRSNSNKSVVYRCSMEGHEDTLYEENGIQFYMQTLIWGTVDLICVWQCPGHVPELPAAAAPGMDLDGVETYLSLPYRNISHITFIKSYLSRVVSTNCWVTWNKTKVVEDTT

SEQ ID NO: 51915 - protein, 315 aa, Zea mays
  Coding DNA Sequence Number=SeqID_8540
MRLHILRGMKAEVILAFADICTHEMTSHRSSDEGNAHSQTDRLAREGFPRILWEVLQGAGYTTPPQYAVQLFEKHRVPRCRVRMTLEPHPLQPGWCSLDSESFGYRAEDTIEAIALHGLTTFCGFHPLELSTHPIGLFPADNEDDPMWKDRVEHAKDIWALYPGQTAHLTVRCMNALYRLQVMRGEAMSHLMVLLEATKITLDKREELVVDLSTELVEKDLQVEQMSNEIQELEELVGTRENTIEVLEDQLVNTQQQLAEANQHLDMHHQEIQGMEANEDVDIEGGEEPKPASSLDTAGSGRPPSLESSIALFAH

SEQ ID NO: 51916 - protein, 137 aa, Zea mays
  Coding DNA Sequence Number=SeqID_8541
  Gene Ontology: Mol. function=pectinesterase activity; Cellular component=cell wall; Biological process=cell wall modification
  Homolog annotation: Hit_ID=Q2QZJ9; Match level="QueryCoverage=88%, HitCoverage=23%, E-value=1e-12, Identity=40%"; Hit description =Pectinesterase family protein, expressed
MSALLQDMCHQGNHRLHLGSAKSFYEECKIVSVLKEVVALPMAPPEQERSRNPIKIAPGKSGLAYKTCTIEGEGEKIYLGRVGTIVIYSYTDIGKEIVGIISDRQDVQTVERGYYCATFKCYGPGMSPMVTSTLTYV

SEQ ID NO: 51917 - protein, 195 aa, Zea mays
  Coding DNA Sequence Number=SeqID_8542
  Gene Ontology: Mol. function=metalloendopeptidase activity; Biological process=proteolysis
  Homolog annotation: Hit_ID=Q9FNU9; Match level="QueryCoverage=31%, HitCoverage=12%, E-value=2e-10, Identity=59%"; Hit description =Mitochondrial processing peptidase alpha-chain
MRLHILRGMKAEVILAFADICTHEGPSDSVGVYVDYGSEQILRLKAELAKSSSDLETFLLKALRSTAYSGALANPLITIECLASRLNADVMEKFILVIYLFYYQTGSSKDKSINLDRWTIGVSIEKLRKGWRTAQSCAGAAGRARPWLMVPSDSNQNHSGGSTNNTKIDEVPKLRARELRHDSRKGNRLKGEKTI

SEQ ID NO: 51918 - protein, 344 aa, Zea mays
  Coding DNA Sequence Number=SeqID_8543
  Gene Ontology: Mol. function=cysteine-type peptidase activity; Biological process=proteolysis
  Homolog annotation: Hit_ID=Q8S456; Match level="QueryCoverage=95%, HitCoverage=35%, E-value=9e-84, Identity=55%"; Hit description =Putative uncharacterized protein 163K15.6
MPPTNDPVSTPTVPTPDKQQHDQESHVPSDHIKVSDDAPTTDKPAAPKLTPDINSEGQKSVTHDTPVSGAPLFDKTPLTDATTDLVAKDSSYKAAVAEHPHVSREDCARNLLKFILSGKLDPSMSIINFGGFGGSVLDVIQSFGPNKCLENTFMQGFIDCIRQDDVLYNPDSVINTLILNVNVGTVLNIEEFEQHSSNPQPFTTSLLKEHLELTLPSDDVLNQIKLIPWSRLIMRRLSIALHEARPESTVPKFGNYKIGLLPNCPTMTPGSNDCGFFVANFLRYYDFDDGDLSEFYTPDEPLDQRAFVLHYLTFHRNNMVAPLPAELLPFKYSPRRRRCLEAKT

SEQ ID NO: 51919 - protein, 168 aa, Zea mays
  Coding DNA Sequence Number=SeqID_8544
MGEPRTALVVLAAMGEPRTALVALATMGEPRATTDAQTRIATKKKGGWGGEGEGGSTSAGAARSANHVARNREKKRRKEMQKTWLGTTEVQLGLAHRTVRGAPDSVQCARLNSGEQAALGKCLAAYDYNSPDCPDERLQVVEIPRKQEKRRRKKVVVFKLIIGSLERG

SEQ ID NO: 51920 - protein, 62 aa, Zea mays
  Coding DNA Sequence Number=SeqID_8545
MGSRHSACSAEAGCRGSFDLLLLVTLLRGEVAFGAIYAQVKKKENGVEAVLQEFQDFDEFND

SEQ ID NO: 51921 - protein, 101 aa, Zea mays
  Coding DNA Sequence Number=SeqID_8546
MGEPRTALVVLAAMGEPRTALVTLATMGEPRATTDAQTRIATKKKGGWGGEGEGGSTSAGAEKLEVAHWTSARGKGIDRKGEIILRPSKGKGNNKTYRIGA

SEQ ID NO: 51922 - protein, 267 aa, Zea mays
  Coding DNA Sequence Number=SeqID_8547
MELGGGTAVGAVESLLTSSCFRKGAESRRRHRACGAPSLPIWRSEPDGTPVLFPAARVSSGRVMMAPPVDVAGRVRAPRSGEAEIAGWCRGGVRALGSVEAEFVVFWGRAQVRALGRARRRSLSSGAEPKSEPWVGRGRDRRLLGPSPSPSPGSGGVRRLPGLSPSPSPGSGGVCRLPGLSPSPSPGSGGAEFAVFRDLARVRALGRAKRSFLWCLRQGLTACQSYSVQWHCSRSGAGSAVLLSGRSVERRSEGGHFGSAGWGRALG

SEQ ID NO: 51923 - protein, 71 aa, Zea mays
  Coding DNA Sequence Number=SeqID_8548
MTIKKDESKRRPKFDSCARKVMSSPHSRTKAIWVPKSLLANLDGPIMRWPHRKNEALENELKRLYLALERI

SEQ ID NO: 51924 - protein, 141 aa, Zea mays
  Coding DNA Sequence Number=SeqID_8549
MTGDKQRQKLKQKPSSKITNTYIKKVNKKDATPYLIKKKKNGKVIAIKANKQANKGKGAKRIWVPKEIISTMKSTKKVWIPKGNLLPSGLVKTLDPNFPPMTKIYKWPFKWFWLFGPKIGIHRLRRELDQGNEDATPQKKT

SEQ ID NO: 51925 - protein, 843 aa, Zea mays
  Coding DNA Sequence Number=SeqID_8550
  Gene Ontology: Mol. function=helicase activity; Biological process =proteolysis
  Homolog annotation: Hit_ID=Q1EPC6; Match level="QueryCoverage=27%, HitCoverage=23%, E-value=8e-68, Identity=79%"; Hit description=DNA helicase homolog, putative
  Pfam annotation: Domain name=DUF889; Domain location=96-269; Score= -11.1; E_value=9.9e-11; Accession=PF05970.5; Description=Eukaryotic protein of unknown function (DUF889)
  Pfam annotation: Domain name=Peptidase_C48; Domain location=292-468; Score=18.8; E_value=5.8e-06; Accession=PF02902.10; Description=Ulp1 protease family, C-terminal catalytic domain
  Pfam module annotation: Pfam domain module=DUF889::Peptidase_C48; Domain location=96-269::292-468
MAGKIAVATATSGVAASIMSGGRTAHSRFKIPLTIDDGAICTFTKQSGTSKLLQKASLIIWDEASMAKRQSIEALDNSMRDIMGRPGLPFGGKTIVFGGDFRQVLPVVRKGSRAQIVAASLRSSYLWESMCHLKLVRNMRAKSDPWFAEYLLRVGGGTEEVNNDGDVRLPDEHAGMRVFLPRIPLCPSDDEMFPFHFKRKQFPVRLSFAMTVNKSQGQTIPNVAVYLPEPVFSHGQLYVALSRATTRLNVKGDLALIDWIKEIPCEPRVEVVLIDDAFVERKWMECLFQPDAYLGDEVIDCYINLIKAQEHLKCRSGGRVHIENAFQFNFLKRDGDVETKTDELYPSKDMAQISSAERRVLLYLDHDMVFIPINIREMHWYLAVINARNMEIQVLDSLGTSSGRNDLIATIKGLQRQIDMVSQPPRVASFLLNYIEYWTGDELSDNFTQDDMSHFRKKLAAILLSSDINKRKGCPLYKYDKEVDAGCSSDVQILDSPTNPKKRKLPCVSEENKVLMEDGDGPITQADLERWFVHDWDKRTPIKIPTDECTNEFLLSGLSTKDMPVTKADLIDVLCDYIMTIQDDTTLEMTWVRSFNPFKIEISVKDLQNVLRVNLDMTLKCFDMAVRLLAIKESHMSKDEMIKDKKHYMDMRFWRMVGFGKLAKYHQDPTTEELAKTLDCWPSLNYYITGCKYVLMPWKFNGCYALFIIDHGKKHVTFMDFTPTEDWCKHMPYKRFAEAIIMASKKYKIAYNKKRSGWAHDIFKWEHTIRSGLPLDLKGVNTSYFVLQAMVMWGSGRRMEFNRDTKILRRNFVIDLLSYEENSCRYAIPPNIQQRLISIAKKD

SEQ ID NO: 51926 - protein, 668 aa, Zea mays
  Coding DNA Sequence Number=SeqID_8551
  Homolog annotation: Hit_ID=Q6JAD6; Match level="QueryCoverage=81%, HitCoverage=78%, E-value=0.0, Identity=69%"; Hit description =Putative uncharacterized protein
KAARSGVRTERLVQQQQLQQPLRRQHLEISPDVPSDQIAFRARRLASRSRSSTHTSASTPPPTLPAPVTPIAPSTSTAIPTTSTTPASTATPAPAPASAPPVPPPRFRERDETEVRPLVSDPRLFDLQRATAARVRRFRYVPVESWLPAQRDPAAGVLFSTRIQESFFRAQMSAQIALRVHRLLDLPAFLLAAGAESEAHLTYLPGLLTLLTISGRYVEEWVRVFYASVWIDPDHHWMRFRFEREDVTITASQIRQLFGFPESTTRLHSLCYGTSDPPRRPHGGVAPGTAHVAALFRPPFTDGSRRSPADFTTAAKYLYELIRRTLLPRMGYREATTHIQLWLLGALVSHSQFDVVDFLICEIEDTVLDGIRARRQLPYAHYLCHIFAQLIQPPRFQSTLEASRLVFGSYRPAPEIPVPASASVFDTPAEDAALRQFDTQGTTDDDDDDFGVPPPPPPPMPPRSHDHEAGSSRAAPAPPPALDPALAAILANLAAEQARLSETMLSMFQSMQDRQDALQQQLLQDRAENRAFMALMLQHSGISAPPVQSAPPPPLHAPVVPSILSGPPAGTSPLRPVTLAFTSPALSSICPQPPVPPASAVTTTAVAVSVTASVPVAPAARPPSESVPAPASTADPGSETDSDPPSAFALLPRPRPDAPPPPPPASDV

SEQ ID NO: 51927 - protein, 131 aa, Zea mays
  Coding DNA Sequence Number=SeqID_8552
MAENGEESEVIEEKTPPPLESQAGTWLYFDNCESKPDSPTNKGKPRSGLKNPGGGLTYARVKCYICRVIGDPQLSIIDSDRRTFAHTLESLFLSRVRKRQIFVAFAPRWYQMRKNKTEVREDLVLHIGSFA

SEQ ID NO: 51928 - protein, 50 aa, Zea mays
  Coding DNA Sequence Number=SeqID_8553
  Homolog annotation: Hit_ID=Q6QP57; Match level="QueryCoverage=52%, HitCoverage=8%, E-value=7e-07, Identity=96%"; Hit description =Putative zinc finger protein
MVTLAPILCCALWGKLAAEILECEQGVLDKESLYLKTGGYKKLEWLFEGF

SEQ ID NO: 51929 - protein, 89 aa, Zea mays
  Coding DNA Sequence Number=SeqID_8554
MHDRGMSIIKDEAKARIITGKGENETKVRIGKTPFSNRDGKDDDSKGRHKITSWKDLEITKVHDKHQGKDRGMTEVKVIMDKHTTKDVF

SEQ ID NO: 51930 - protein, 104 aa, Zea mays
  Coding DNA Sequence Number=SeqID_8555
MRKRITYTLHFISKKQQKSATSSPKNNEGINPEYGILSKSYPTKEKTLKGMLVIWESRISRGGNQDQGRLGSTNVEVETIPGLSVQRWLHLLFGDFYLFFTFYS

SEQ ID NO: 51931 - protein, 110 aa, Zea mays
  Coding DNA Sequence Number=SeqID_8556
  Homolog annotation: Hit_ID=Q7XBD4; Match level="QueryCoverage=76%, HitCoverage=9%, E-value=2e-07, Identity=33%"; Hit description =Cinful1 polyprotein
MKSLIQNPIEITFRVKRPVCYMDFEAQVIQRCDNLAFNTWHLEIEWSMLELKDNIASVDEHELIRWRYTYKFESIFGDPCDEWLEAIEESHISEEVIEIPILDQTPLAKM

SEQ ID NO: 51932 - protein, 312 aa, Zea mays
  Coding DNA Sequence Number=SeqID_8557
  Gene Ontology: Mol. function=glutathione transferase activity; Cellular component=chloroplast; Biological process=response to stress
  Homolog annotation: Hit_ID=Q9FQD0; Match level="QueryCoverage=72%, HitCoverage=100%, E-value=1e-121, Identity=93%"; Hit description =Glutathione S-transferase GST 9
  Pfam annotation: Domain name=GST_C; Domain location=110-209; Score =39.6; E_value=1.1e-08; Accession=PF00043.16; Description=Glutathione S-transferase, C-terminal domain
  Pfam annotation: Domain name=GST_N; Domain location=3-78; Score=33.5; E_value=7.7e-07; Accession=PF02798.11; Description=Glutathione S -transferase, N-terminal domain
  Pfam module annotation: Pfam domain module=GST_C::GST_N; Domain location=110-209::3-78
MAAGLQVFGQPASTDVSRVLTCLFEKKLEFDLVRIDTFKTHHKLPEFIRLRDPNGQVTLKHGDKTLVDSRDICRYVCTQFPNDGNKSLYGSGALERASIEQWLQAEAQNFGPPSSALVFQLAFVPHLTHLGVRQDPAVIAENEDKLKQVLDVYDEILSRNEYLAGDEFTLADLSHLPNSHYIVNTERGRKLFTNKKNVAKWYEKLSKRETWKQVAKMQKEHPGELRIIILREEKGPKWTKTPSPQDDDAVNASSFGFVHLLTHLPPPLSKRYLNRNRRKISKPQRCKNAMPKLSSKDATAKEMLDILRLLIT

SEQ ID NO: 51933 - protein, 833 aa, Zea mays
  Coding DNA Sequence Number=SeqID_8558
MAGRWAKCALARCPPMGGSCRDPAAFVREAEDGAVRIVGRYVARIEGQRSWDIRGSNDRLNRVFELNRLPYNGYPGQDDVDLRGKKPVVESGDDPAPVAAPSSKKRKLGTAVGGLGVSNGFARELMRTCAVPGGRMSSPELRESSARMVRVTGRWWPRNVPIPRAAGEDLFTSRMVREWKVFPYGRNIAAVVSVVMDKDRQGAAQKRQAVVRLHEARPKRQRGAAKATAPGGGHLPKAAVTASSRAPELAAAAGGSKAAKAAPASGRVTEAVKSARGLPPPGKRVADFATDISVEDYLVGSDEGQLVVVPSAAATTAAAVMPKAKGGAPSAGGEMPALAAVRDEAGAVSRRLEEMKEALSQQVPQAGGQGGRAGGGKSGLRRQLVEERREANEALAKAQAALAEANLARAEGNLARERAAQLEEQLNALQSRVERTETATRAEAERTRKQLVDSYHELGARTGDFEVPDREPGLRCLEWVQEELQALPTIVEGFMSYASLVTCEGAMNALSHEGCRHFEVIDQADEDFERDIYKVEDPIVKESTGAIYDRMWGPHGREVVRERAETARAQAARDERVDDFGALNSALLDPESNPAEAVPEAALEPPPETAEGAPDAPAAAAAGGGPPLETAESVPDAPAAAAAGEGPPPTAVPRVEDPATVALEATAEAPATAGSSQVQDFGPAHATATTSFLAASTVDGVNKSDGSTSKFSNFGDSGSSVEWTEESSDEDLDYFAALDVAAAEASPHAADTEDVPGPSTGRRRRRAVAKRRVSGAEGGRLRVSRASRQELLSLPAAASTGEGELRSLFAGEELRIMLFNYREMGIIPKVEPM

SEQ ID NO: 51934 - protein, 137 aa, Zea mays
  Coding DNA Sequence Number=SeqID_8559
MGKNNKSKREPTPPSEDFGDSEYSEEEFSSESEGSPTPILLRESSDDSDDSQGLAAEVWMYIRAVERSGLEGSDESEYSSDEEDSSEEDGGGDGEDDDDNDDDDEGGGGGDGDGSGGGSNRGGGGGGSSRGSNRASG

SEQ ID NO: 51935 - protein, 187 aa, Zea mays
  Coding DNA Sequence Number=SeqID_8560
  Subcellular localization annotation: CTP_CleavageSite=51; ConfidenceScore=5.45e-01
MSVDHGSPVNLSPASIRSSSPSVGRNTLILLPIRPVTVNRSIQRPLGEIDRGETVGVAPRLCPLLGSAGLGPLRPVLLVGVELSVLSTVEGQSVKRNRNPGTILQTVSDCVKQLMNLLRFSQLDRARTILASRIPWKWDRHTLESLFLSRVRKRQIFVAFAPRWYQMKKNKSEDAGGRGPPLRIFCL

SEQ ID NO: 51936 - protein, 293 aa, Zea mays
  Coding DNA Sequence Number=SeqID_8561
MYAACSVEGGLPLGEECGDNEDDGFDYDYGYGFCVPLRHSVTGQSSHLERLHHRLHEEQECWRQELEQQGSSSSPQQEVESMRCCSPVPPLEAPPAPPLGVPAAGVAIGGDPNDGGDDSSSSYNTDLSEEQEPEGWVAQPITRDAARGCHFHDALDTLLRQALDRCTWSIEYRCVVFQHSRGAYPDRWKATCLVRRPEDSLRVFGGVADGLDLRYYPHRPPGSTGGVIVSPVGEDNPRLSSTVNLVLVLNTELDHVLDELSRARAEIAQLRAERHLEDGSPTPVETQHPYRSP

SEQ ID NO: 51937 - protein, 89 aa, Zea mays
  Coding DNA Sequence Number=SeqID_8562
MNDDEPTGGLNYAEKDGHGSSHVEAGAPIHELHAHAVSAAIPPGAVFVGGEIVANPGDNEDDGFNYDYGYEEDEVVEEDFQEFQAYDEF

SEQ ID NO: 51938 - protein, 108 aa, Zea mays
  Coding DNA Sequence Number=SeqID_8563
MSGGAPDCPVRQATKGKNCLLEMLSTAPSYLGAIKGTPRRMEENTKQPLSIVDHSHFILAHLFDILSDLSSILGERLQVVEIPCKWEKSKVKKNTVVFKLIFGSLERS

SEQ ID NO: 51939 - protein, 73 aa, Zea mays
  Coding DNA Sequence Number=SeqID_8564
MARRWPGATVADLRGCTGERRCPTQVPKCKKVDKVQIKDKVLETGKIQLEMSWLEQPRLCSVWEHRTVRWCTG

SEQ ID NO: 51940 - protein, 102 aa, Zea mays
  Coding DNA Sequence Number=SeqID_8565
MKDAKPIKTPMGTNGHLDLDTGAPDNVRWRTGLSGVPAEQRLLRANGRLQKALNALQCTPESEQSQMAHRTLNSACPVHHQTVRWPRRQKLQQSESNGEVTW

SEQ ID NO: 51941 - protein, 408 aa, Zea mays
  Coding DNA Sequence Number=SeqID_8566
MELMGTCATLRGRMSSPEFRESLVRMLKVTGGRWPKNVPIPRAAGEDFFTSRMARDLKVFPYGRNIAVVVSAVMNKDRQDTAQKRRAVVRITDPMRETKRARGSAKTAAASGSSKPVLAAKPVVPGPSKVSARAKTAASSGTKPPLGGPAKGRELPSPGRRVADFGANISVEDYFVGSGEGQLVVVPPSAATTPPTAVVGAKGAAQDPWAAFCASGEILSAAAAKDVAGSMSQQLMQQLKQSSLRAKHADAVWEKSAAESKNRRLAEKVAAMEAEKTDLWRQLVEERREANQAIAEAQAARAEAKVARAEGSLASQRAEELEARFNALRSRVDKAEASTCSDVERMHAQFVDAYRELGARTADFEVPDRELGLRFLEWLQEELLVLPTIVEGFMSFASVGDLLSNSMN

SEQ ID NO: 51942 - protein, 353 aa, Zea mays
  Coding DNA Sequence Number=SeqID_8567
MDQCVVLCGVIGCWKQELECVLELLTSKSDKGNPCPCSLQSQRAIEVHSPYFSNFSAFQDLRGPLPLGCLQQEPDVADTLNVEGSGSALSALFVHQPPLGNFRAFVPHAGDCVFRGRALDPARFAAGIEAGGREAAVRRGICRRRARNPWNRGGATHHNRRSKPASPCSSPESRHRQKASSSADFVEGSRQKEEKLLVAVVFVFDSVHRARSAKSEMQYITAMDSENEKLRKALATLLRVVQKRSCDIVDVVTSAFQPFNSPLVDELNRALVEIDDLVKDLEDVAVQTQWEVENMAKSEVKEHPQQEEAVEDLLIHDGSEDELLIDEESPINYEDLVGYDDGRDYSTDDTYPY

SEQ ID NO: 51943 - protein, 371 aa, Zea mays
  Coding DNA Sequence Number=SeqID_8568
MPSSSSSVADTPPVGASSEGTLSNVAAEELHPGDTVEFGVSRMSSIRVHDMQQLEYFGGGVARVPGVEEVPEPEVMNKDRQDAAQKRRAVIKLPDPRREAKRARGSAKDAALGGSQPTLAAKAAAPGSSKVSESTKAVVAGGTKSTPGGAAKVRGLPSPGRRVADFGTNISVDDYFVGSGEGQMVVVPPAVATTASTVVVGVKGDAFCASGEISSSAAVKDEAGTMSRRLREASQQLSQQLSQAADFADRVASGALTADVSAEVERLRAQHVNAVREKSAAESKNHRLAEKVAALEAEKTDLQRQLVEERREANQAIAEAQAAQAKAKLARAEGSLASQRAEEWEVRFNALRGRVDKADASTRSEVERTRA

SEQ ID NO: 51944 - protein, 160 aa, Zea mays
  Coding DNA Sequence Number=SeqID_8569
  Homolog annotation: Hit_ID=Q53JX0; Match level="QueryCoverage=39%, HitCoverage=10%, E-value=2e-07, Identity=40%"; Hit description =Retrotransposon protein, putative, Ty3-gypsy sub-class
MDAEDWLHTVERELHTAQCKDREKVLGLDDSEEREFLALKQGSMSVSEYRDRFLQLSCYASEDAIHPSSSSKVTPRDTSIKVNINSSIRGSFLSSSSNSSSAARTINQEGTNTRGRTTRHLAFLPQQLIRMVRQPQCKEEVEDVFTMENKATGRRIAQRK

SEQ ID NO: 51945 - protein, 89 aa, Zea mays
  Coding DNA Sequence Number=SeqID_8570
MMKHLRTSPQQTMNLPCKGRNLPSVMPDDEETNAETCDDIMKPGNGIQHSPCPGTKPRKWEKLPTNEYTEKDVTPAVVIADRLRIGSES

SEQ ID NO: 51946 - protein, 380 aa, Zea mays
  Coding DNA Sequence Number=SeqID_8571
  Homolog annotation: Hit_ID=Q9FVG4; Match level="QueryCoverage=39%, HitCoverage=25%, E-value=1e-09, Identity=25%"; Hit description =Transposase DOPA
MRVNTSQREQYRDTVHLFIGTGRSLCGFTFMSFITDYNYDTGPSATKQTPNIIEITFAGNKPLVLVFFECKWMLLKSKKSVKGLFKGLGLFQGSLSSSRRRELLSAAHGDEELGGSAFDGEGHHTQVNLTLGSLCRLHYPGIVKVSDGDSVDEVLVNTWDEYKLKKNETTPTDRDLCVMTFGEDYMGHAERVFQNNAKKLVKDTIYYVRIQATNLHFQNHPEEAGPLNKNEGSSKKYLTEDQYREVMVSWMAPVPDAYYAWKLRVAKSLVTLRSTRRATKDQTLTTLTSSAARRPRIGWRYMRRRWFGAMALTSTDDMNRWIPRWCTQVVGESAWTIHTLSTGFIDSSSVRSQRTGLSSRSSCSHRSNEQELEIMRIREE

SEQ ID NO: 51947 - protein, 97 aa, Zea mays
  Coding DNA Sequence Number=SeqID_8572
MPAPACSPRDLRGSSCRWVAEVSDHRHGRFVPKMPVRPQDENRGVARACYVDLGPGGAKIVTGGAWISRRDITTSFDLLCALGGTILAPTRVALNSF

SEQ ID NO: 51948 - protein, 418 aa, Zea mays
  Coding DNA Sequence Number=SeqID_8573
MDKDRQGAAQKRQVVVRLHEARPKRQRGAAKATAPGGGLPPLAAKSAVPASSRASEAAAAAGGSKSAKAASASGRVPEAVKAARGLPPPGKRVADFATDISVDDYLVVSAASWRTRWPALEGEKTDLRRQLAEKRREANEALAKAQAAQAEANLARVEGGLARERAEQLEDRLRALQSRVERAEAATRTEAERTRKQLMDSYHELGARTAEFEVPDREPGLRCLEWVQEELQALPTIVEGFMSYASLVTCEGAMNALSREGCRHYEVFDQADEDFERDIYKVEDSVVKESAGALYDRMWGPHGREMVREWAETARGQAARGERVDDFGALNSTLPDPESNPAEATLEPLPETDEGAPEAPAAAAAGEGPPPEAAEGVPDAPAAAAAGKGPLPTAAPRVDPATVAAEATAEAPATAGSS

SEQ ID NO: 51949 - protein, 210 aa, Zea mays
  Coding DNA Sequence Number=SeqID_8574
MKSWKETSRSSKTTTSFRWLVLYTLHRPLHRTVSGQSSHLERLHHRLREEQERRRQHGEQQGSSSSPQQEVGTVRPRSSVAQLEAPPAPPRDVPAVGGATGGDPDDDSDHSTESSEPQEAEGWVARPITRDAARGCHFHDALDTLLRQAFDRHTWSIEYRCVVYQHSRGRYPDRWEATCLVRRPEDDLRGAEAVSEHYSISERDTAEAAM

SEQ ID NO: 51950 - protein, 260 aa, Zea mays
  Coding DNA Sequence Number=SeqID_8575
MQSAEKSFARVLPVCADGLRQMDQLILSATHIILLLVIAEDDTADVRRRWVGAAEQAAGRPWMRATDASGAWGHEIGAGGKLWRRRRLRAGSNEEAAGNDEKDEKKEKGSFPRRCPRRPGQPRPTGSVRSSTAALGSRRPATTELSSCHYSAVVAELFPIQRARYNGPDRTWASELDEAALWDAFVAGLRLVPIKRRVSLPALSVRAAAKQRRLRAKGGVSAFAPTSALRGTSSTKSPGAEDVARWRRRCPRSKWFRGGF

SEQ ID NO: 51951 - protein, 549 aa, Zea mays
  Coding DNA Sequence Number=SeqID_8576
  Gene Ontology: Mol. function=cytokinin dehydrogenase activity; Cellular component=extracellular region; Biological process =cytokinin metabolic process
  Homolog annotation: Hit_ID=Q5Z620; Match level="QueryCoverage=95%, HitCoverage=95%, E-value=0.0, Identity=72%"; Hit description =Putative cytokinin oxidase
  Pfam annotation: Domain name=Cytokin-bind; Domain location=245-529; Score=592.4; E_value=4.3e-175; Accession=PF09265.1; Description =Cytokinin dehydrogenase 1, FAD and cyt
  Pfam annotation: Domain name=FAD_binding_4; Domain location=62-213; Score=92.2; E_value=1.6e-24; Accession=PF01565.14; Description=FAD binding domain
  Pfam module annotation: Pfam domain module=Cytokin-bind::FAD_binding _4; Domain location=245-529::62-213
MTARAAYLASFLIVTSFLPTSSSHSHVPAVTDALDIVSKISTEHDATIKASMDFGHIVRAIPSGVFHPTSPSDIAALIRLSLSQPKPFAVAPRGRGHSARGQALAVGGVVVDMRSLHDHDHDHRAGHGRYRMNNAVPGAWVDVGGEQLWIDVLHATLEHDLAPRVWTDYLHITVGGTLSNGGIGGQAFRHGPQISNVHELDVVTGTGEMVSCSPGKNSDLFYAALGGLGQFGVITRARIALEPAPRRVLWVRLAYSDVRSFTSDQELLISKRPAGGCGSGFDYVEGQVQLNRTLTEGRRSSSFFSAPELDQLARLAVATGSAAIYYIEGAMYYDDDTTTASSVNQKLETLLEELSFVPGLAFVRDVSYVDFLDRVGRDEQKLRSAGVWDVPHPWLNIFVPRSRILDFDAGVFKGILKGTRPVGLILMYPMNKDRWDDRMTTATPDEDVFYAVGLLRSAVAAADLEQLERENAAVLEFCHREGIGYRQYLPSHASLDGWRRHFGEKWSRFAALKRKYDPRAILTPGQGIFFSAGHDLTDQQTGSDSRNVL

SEQ ID NO: 51952 - protein, 237 aa, Zea mays
  Coding DNA Sequence Number=SeqID_8577
MRYNVDEEPPVSDLKILQWRGTSTSKGTFYHLSMDERMSALLYMYSNMEEMEPYFITFSRYDVNGFLFVQTNLKSLILVQPDEEEDKEEEVQHHEEEEVQGHEEEEVVGIDAEADNDTIEAPIVRQRGTRKGHFVLPPSAPAQSEARVLIILVGDRRYCVEPDAQEHADGVLEKNAKKVRKDAFSNARLQVVNEYMKRRGHSINNFRQYSDVYLTVDQYMEMQETYGQKMVRKYGDD

SEQ ID NO: 51953 - protein, 116 aa, Zea mays
  Coding DNA Sequence Number=SeqID_8578
MEDAMREQQERFCEELRQQQMIFLKQQSEYMVAYNAQAQQAMNMSVLFILNMAWFPEQAQQQPFVFPQFQPPMPQSRLHALPPPPQGSRVMGHDTPPPVIPTPGGAEREMSIKHFL

SEQ ID NO: 51954 - protein, 90 aa, Zea mays
  Coding DNA Sequence Number=SeqID_8579
MSGGDGPPPVFDGDDFPYWKIRMEAYLEAIDIGVYKAATQGFPEPRDRTNLVVTTPTQMLGKINSHEMYMHINDKDESSSKRKDLALKAN

SEQ ID NO: 51955 - protein, 452 aa, Zea mays
  Coding DNA Sequence Number=SeqID_8580
MDKDRQGAAQKRQAAIRLVEARPKRQRRGSAKDAAPSGGKPPLAAKSGVLASSKAPEAAAGAGGSKPSRVVPPLSRVAEAAKAARALPSAGKRVADFATDICVEDYLGGSDEGQLAMVAPAAAIAMAGIVPKARGEALGSGGEVSALAVVRDEAGTATRRLKGVTEALSQVTDFASRTASGALTAAVSAEVERLRTQHADAVREKSASDSKCRKLTDKVAVLEKEKADLRRQLAAERREANEAIAKEQAAQAEAKLARAKGNLAKELAEHLQERLTALESRAKGAEAAGCRHFEVFDQADEDFDRDVYKVEDLVVKDSAGALYDRMWGPHGREVVRERAETAMAQALRGERVDDLGALNSALPDPEPTPAEAVSGVALEPTPETAAIATAAPTSAAAGEDLPPKVVEGAPDALAAAVPSAEDPAAEAAETTAEAAAEPAAEAPAASGPSQVA

SEQ ID NO: 51956 - protein, 172 aa, Zea mays
  Coding DNA Sequence Number=SeqID_8581
MNALSREGVPTLRGLRPGGMKDFDRDVYKVEDLVVKDSAGALYDRMWGPHGREVVRERAETAMAQALRGERVDDLGALNSALPDPEPTPAEAVSGVALEPTPETAAIATAAPTSAAAGEDLPPKVVEGAPDALAAAVPSAEDPAAEAAETTAEAAAEPAAEAPAASGPSQVA

SEQ ID NO: 51957 - protein, 185 aa, Zea mays
  Coding DNA Sequence Number=SeqID_8582
  Gene Ontology: Mol. function=phosphoprotein phosphatase activity; Cellular component=nucleus
  Homolog annotation: Hit_ID=Q2QM47; Match level="QueryCoverage=64%, HitCoverage=11%, E-value=4e-50, Identity=80%"; Hit description =Serine/threonine-protein phosphatase BSL2 homolog
  Pfam annotation: Domain name=Kelch_2; Domain location=79-155; Score =18.7; E_value=0.022; Accession=PF07646.6; Description=Kelch motif
  Subcellular localization annotation: CTP_CleavageSite=67; ConfidenceScore=5.20e-01
MDVDSRMTTESDSDSDAAAAAAAHGGSAGGSGSGSETSSSSAPSTPGTPGTPGAAGPRPAPGYTVVNAVIDKKEDGPGCRCGHTLTAVPAVGEDGTPGYIGPRLILFGGATALEGNSATPPSSAGSAGIRLAGATADVHCYDVSSNKWSRLTPLGEPPSPRAAHVATAVGTMVVIQEDCTPKLIH

SEQ ID NO: 51958 - protein, 107 aa, Zea mays
  Coding DNA Sequence Number=SeqID_8583
  Gene Ontology: Mol. function=oxidoreductase activity; Biological process=negative regulation of transcription
  Homolog annotation: Hit_ID=A2Z7Q5; Match level="QueryCoverage=39%, HitCoverage=8%, E-value=2e-11, Identity=71%"; Hit description =Putative uncharacterized protein
MDAAGYLRHWTQEQTSLGPRSEAVAGYDDDNVRCKIDNVYLTKLQGGFQLLHYPLVTELSYAEDSWMTITQIAHHRMLFIPIGYTFGSDMFDMDDIREGNPYGVGVK

SEQ ID NO: 51959 - protein, 390 aa, Zea mays
  Coding DNA Sequence Number=SeqID_8584
  Gene Ontology: Mol. function=phosphoprotein phosphatase activity; Cellular component=nucleus; Biological process=termination of RNA polymerase II transcription, poly(A)-independent
  Homolog annotation: Hit_ID=A2ZMT0; Match level="QueryCoverage=100%, HitCoverage=42%, E-value=0.0, Identity=95%"; Hit description =Serine/threonine protein phosphatase
  Pfam annotation: Domain name=Metallophos; Domain location=105-314; Score=122.3; E_value=1.4e-33; Accession=PF00149.19; Description =Calcineurin-like phosphoesterase
VVVAAETGGALGGMVRQLSIDQFENEGRRVSYGTPENATAARKLLDRQMSINSIPKKVIASLLKPRGWKPPVRRQFFLDCNEIADLCDSAERIFSSEPSVLQLKAPVKIFGDLHGQFGDLMRLFDEYGAPSTAGDIAYIDYLFLGDYVDRGQHSLETITLLLALKVEYPQNVHLIRGNHEAADINALFGFRIECIERMGERDGIWTWHRMNRLFNWLPLAALIEKKIICMHGGIGRSINHVEQIENLQRPITMEAGSVVLMDLLWSDPTENDSVEGLRPNARGPGLVTFGPDRVMEFCNNNDLQLIVRAHECVMDGFERFAQGAILVLGRDLVVVPKLIHPLPPAITSPEASPDHIEDTWMQELNANRPPTPTRGRPQAVANERGSLAWI

SEQ ID NO: 51960 - protein, 919 aa, Zea mays
  Coding DNA Sequence Number=SeqID_8585
  Homolog annotation: Hit_ID=O48967; Match level="QueryCoverage=10%, HitCoverage=20%, E-value=2e-32, Identity=74%"; Hit description =Putative uncharacterized protein
MAWKLSPCSSLWPTSAPEPPRGRAWHSAPQTRAAQSGGSGAVLRDGKKKKKDRDYQKSRSTALVVAAATGGQGDRNKHPRSQRGGSGSCPVHPNGRQSAAECPEIIDLAKRVSERREQSSKDGSPPRRRPGKEKVDDGEVAAAERDLGYQSPEGDLKDILAGGSYSDRYMQKWPQPETRAPVSNAGGNPGSGPSPTASTIPRRAPQLSPSWEGPLEVTAVHRPRDNAYVYDNPVGSAPINPSYKSCGSDNLGTGARERTLVSWGGLEPVQPLSLVRTMGLHAPPPCDKSRSRRVCLPRIVDNLFRNAGIQPQYIKPASQAGGQGKAWGPVLKNGCPFHKVVRSLCGRDNDLFSERLASSSYHLRVSATANRSSPPSSYGGDGEAIKAKGPKVRRQVALTISPTEATTSTVGSLTSGGDHISPISGSDHLCTNGQWLHQHARRGLRSHPHCGSEDKTIQERRRHPRGIRRLPRSAPAAGGSVGGDTRATQAGEPDTRQLTAPQTTGPAYPEFASSARPANVLLPRMLEEEADRQPTWKAKLPLGSPSSPARMMNILEAEGRGEAVAWLTSLHHKAAVKEADRRARSVQPSHGCAPPQLRCNWRSNSGAQAHMSYNRRPATRGSSAHGPTVPLRTMVTGQSAVGIGAAVGMAIGGPTVIAATGAQKQRSNRQSDSGPTCRLASSPKAGPGATVGTLNQGYPLLQHEDAAPMRCLLATHVTTPDPIAWVGQRAPRGKKRQHIPVTPDPLRRTLDPYTYKSGASGYVRTSAGSRNEEDPGMSRGPVLTCVRALPSTSCSGGDLLLVAHDISYRVEPDVKSCSPCIYWGEDAPPATAQTGDVPSQYLMRPVPSAGRRCQGHPAGGAPAGSAGKQCARAKRRAILILPSTRSFPYTPRIRRSQVSGHKKVSYIIAEENGIVSLAK

SEQ ID NO: 51961 - protein, 52 aa, Zea mays
  Coding DNA Sequence Number=SeqID_8586
MVKNFGSKTVQIAVNAVLIAFENKSPTITKLCAEELRHNGGKGNRLKDEKPD

SEQ ID NO: 51962 - protein, 149 aa, Zea mays
  Coding DNA Sequence Number=SeqID_8587
MPPRTRLTARKSTGPIDGDRINELRRDIRHLQDQLADRDLALDWAVQSRLLACAKEARAQARIKELSSTVDDLQVYCNTLHEEVHVLYSQLYPSAPAHPAEAEAGPSHIAGRALGGELDLFEPPPSMRLVDVWTPTPDDEAAKSNGKQD

SEQ ID NO: 51963 - protein, 38 aa, Zea mays
  Coding DNA Sequence Number=SeqID_8588
MKPWKETFRSSKTTTSSRRGFKKGSLHIQSNDDDVQEN

SEQ ID NO: 51964 - protein, 259 aa, Zea mays
  Coding DNA Sequence Number=SeqID_8589
MNVCELTLAVSHPPTGQEQVPQDEALGGCCDVFVRGQGFVYSSDAILPRPSPASGGNCSPRRIHASPEGLLKQRAHPRLARSPARAGFVVKQPWPNHLTNRPYRRHIQCKDRLAPYPDTRASVGKVEPQAQHEAQPQEEVSASPDPRARPPPRPRKVVSASPDPRARPQPRPRKVVSASPDPRAQPQPRPREESRPRPTPTSASGEVFASPDLGLGPSTPQGPPTEARRRQQGPSSPDSCASTWLKRSFDGHDTAYTGL

SEQ ID NO: 51965 - protein, 111 aa, Zea mays
  Coding DNA Sequence Number=SeqID_8590
MAERDSSALAAQELGMREERSAGSRTPWEPLDKLHVGAREEEGAAGKRREREKRNFIPPNSGCYKSNPLNRISPPRFKKKLARKQGLAANPLNRSVDTHLVKMSSTLILTD

SEQ ID NO: 51966 - protein, 321 aa, Zea mays
  Coding DNA Sequence Number=SeqID_8591
MNALSREGCRHFEVFDQADEDFERDIYKVEDPIVKESAGAIYDRMWGPHGREVVRERAETARAQAARGERVDDFGALNSVLPDPESNPAEAVSEAALEPPPETAEGTPDAPAATEAGGGPPPETAGGTPDAPAAAAPRAEDPATVAAEVTAEATAEAPATAGSSQVQDFGPAHTTATTNFLAASTVDDGNESDGSISKFSDFGGSGSSIEWTEESSDEDLDYFAALDVAAAEASPCAADAEGVSGPSTGRRRRRAVAKRRVSGADGGQLRVSRAGQQELLSLPASVSTGEGELRSLFAGEELRIMLFNYREMGIIPKAEPM

SEQ ID NO: 51967 - protein, 344 aa, Zea mays
  Coding DNA Sequence Number=SeqID_8592
  Gene Ontology: Mol. function=helicase activity; Cellular component =nucleus; Biological process=RNA-dependent DNA replication
  Homolog annotation: Hit_ID=Q5NA16; Match level="QueryCoverage=95%, HitCoverage=69%, E-value=1e-49, Identity=31%"; Hit description =Helicase-like protein
MASLKSMDYTLLPDLTAYKKHAIIQVHVSRKWSFHGATENGPLQHIDMVLSDCKGNSIYAEIPANLAEEKGVLIETNQIYDISRFRVTAAKTAYKPIDGDKMIQFTTYTIIKPASNPPPTFPLYIYRLTPFDEIESQIQHKTKFLDVLGTITEVTALKTVHIQGQLSPTIIRDVMIEDLSRKTLKITLWAKRATSFTIQDVYDPVSKKPILALFVGCLPKFYKGVYLSGGAACHWYFNPTIPEAEAYQNRRGGETIQLHLPTQPKHALQTFQPPTIEHKTLEQLLTMNPYDYPDTGYECTVTITKIDTSNTWWYPSCTKCGRKTTPHNTTYYCDWCKWDGYKFK

SEQ ID NO: 51968 - protein, 134 aa, Zea mays
  Coding DNA Sequence Number=SeqID_8593
MAQGHISLSGLTAVVVVAALWGKEYLVIAIVEGHELETPETEQCPWLKRLLETTHLELNGKLFVNTQQAPTWRANCRRFDPGGSLDRRVKCCVPQPRWVGARWNTKGGGNRGSCYPALEEDALAVGVTSVRERV

SEQ ID NO: 51969 - protein, 862 aa, Zea mays
  Coding DNA Sequence Number=SeqID_8594
  Homolog annotation: Hit_ID=Q7XHW3; Match level="QueryCoverage=88%, HitCoverage=57%, E-value=0.0, Identity=75%"; Hit description =Putative uncharacterized protein OSJNBa0008J01.25-1
MATRRGGGQRGLNRQGGDHSSGEDKRSRNVAARMWVKLDAVTKDKAHGTIEGHEVAPNKLAVVEEGMHSKPDGDGRSQEQWARQSSCVTGVKPWNRRGEFSVSELDKLYNIFFSSTACIMIILQRIALNGSEEEKTAAAKILCGASLVRGWNIQEHVVGMVVKLLSASLPSDSATSTPGSMSNYLAHMSTLNEILLGVSYGDAIHILSLYGMVPDVAVALMPICEAFGSIPPPPNHKSTILGEISVYTVFSCAFLCLLRLWKFYRPPQEYCLAGRGGSVKLELTLDYLLLMHNNHIEFSNSSASNRDSCNDMGSVNEVPAQLIYIDSFPKLRAWYFQNQACIASPLSGLCNKNPVHQVANKILNMICRKMNKGVVSSSTLSSTSSSSVSGSSVSASDDPCQRPAVSGWEFLEAVPFVLEAVLTACAHGQLSSRDLTTSLRDLVDFLPASLAAIVSYFSAEITRGIWKPVPMNGIEWPSPGASLHSIEAEVKEILASAGVQINSCYPRFVINVPNTFIPLILPYRSLEYIQGVIGQALENCAGGSSWPSMPIIGALWTQKVRRWHDFIVLSCMRSPFGRDKDAVAQLIQSCFSSFLQSSSSGSDIIANRGVGALLGDSITNQGLRLPMAPGFIYLRTCRTFHDTYFVSEVILKQVIEWAHKLANGWCFNGPPQLKSGRTPLSCAASMVQQVALLGGGLLCIAGGPLVVQVLYEETLPTLLLSARDQSLKGPGPVSSTLQGYAMANMLFYCGSLLWGADRTSPVMKLSFLSRRPRVVRTHMDFIAGVLDGHILLGCDPGTWKAYVSQFMFLVVKFVPSWLRDIKLDTLKKIAAGLRSWHEHDLALSLLERGGPQAISVVVETFL

SEQ ID NO: 51970 - protein, 106 aa, Zea mays
  Coding DNA Sequence Number=SeqID_8595
MSGAAAEAFPCVDLGASAWASLLRLEPGRARLWRPARRCLSDLPHWIPGEQPPVTKSSSRPFFSDLSTPCFVISSLPFFSDSDFEGLVYLALLFPVSHQPPGSQIR

SEQ ID NO: 51971 - protein, 666 aa, Zea mays
  Coding DNA Sequence Number=SeqID_8596
  Gene Ontology: Mol. function=nucleic acid binding
  Homolog annotation: Hit_ID=A3BNH7; Match level="QueryCoverage=98%, HitCoverage=86%, E-value=0.0, Identity=57%"; Hit description =Putative uncharacterized protein
  Pfam annotation: Domain name=RRM_1; Domain location=366-434; Score =17.3; E_value=0.0037; Accession=PF00076.13; Description=RNA recognition motif. (a.k.a. RRM, RBD,
  Pfam annotation: Domain name=zf-CCCH; Domain location=232-257; Score =23.1; E_value=0.001; Accession=PF00642.15; Description=Zinc finger C- x8-C-x5-C-x3-H type (and similar)
  Pfam module annotation: Pfam domain module=RRM_1::zf-CCCH; Domain location=366-434::232-257
MDAYEATKVVFSRIQALDPDHAAKIMGFLLIQDHGEKEMIRLAFGPEALLHTVMAKARKDLGLLPSPGPGTPTSVTAAATHSPFLLSRQNSGRCGAGTAPSPLSVSSPSSWAPPPHFSRTNSVVSNGAPAEALAADLMSPAAAGNAPPSPFFAAGEPLLDELQLQEQLAFLSDAAAGGHQLPLFDASECRSPGSGDAAGFFPYGALGWANGGPGHRRSSSVSELCLGGADGLGWKPCLYYARGYCKNGSACRFVHGGLTDDATAKMDTATLEQQCQDILLRSKSQRLAAFPYSPTGSVPGSPSAATKCLSLLLHQQQQQNENQRVAAAAAAAALMLGGDDAHKFIGRPRLDRADLASLVNPGSRQIYLTFPADSTFREEDVSNYFSIYGPVHDVRIPYQQKRMFGFVTFVYPETVKLILAKGNPHFICDARVLVKPYKEKGKVPDKKQQLQGERAVDFFSNGLDGRENHLDLHQLGARMLQHSHSANEMLLRRKLEEQQQAAAAELQQAMELQSRRLMRLQLLDLKPRASPSPIGSMPLGPTQRAVDSPPDSGREESSAGDASPNADSDQSAEHNLPDSPFASPTRSAALARDPFAAIDREMAASPGRRNGAGSFAGISSSSGVLAGHLRPSALDIPSPFFPMSMTRGCQSGGRLSSDHGAGAIGM

SEQ ID NO: 51972 - protein, 180 aa, Zea mays
  Coding DNA Sequence Number=SeqID_8597
MSFVLSDYFEKWILKTTEYTASWTGESTRKRQGRPSRGTPTPPGYGYLTHHLPREATLARTNIPVTDKKVQILETRGKETQLDNAVKARVLTLEGGSSTLGIDDNFGEVRPSLGRRRGPKTSTPKDDVITTPGPSPPGSSPGIQPGQVARPVTSGASADHLPRAPARPEASAGQLRCRSR

SEQ ID NO: 51973 - protein, 72 aa, Zea mays
  Coding DNA Sequence Number=SeqID_8598
  Subcellular localization annotation: CTP_CleavageSite=34; ConfidenceScore=5.62e-01
MGSTSPTADTSTFVLMPSKRSRRRGPTSKKDSVACATPTAVPLDRVRLTGSQALPKAPQETPLRPTQGSDSG

SEQ ID NO: 51974 - protein, 248 aa, Zea mays
  Coding DNA Sequence Number=SeqID_8599
MWGLSIQGELLVKKLVANIVEGGKQHKAFNESLHVVIAPAETTQKVEDERAVRDRLARSRKESVMPFIRRQYSVMERSLGRTVKKASRWREGEWPSRGPQAWEWRRSWWAHGEEGAPCGGVESHAVGEGSQCSGAQATAYGGTMSRGERHRLGEELAGANGEEGQYGRRRQTHPRVLEGRARVARLGAKRACMEGATSAHLGAARHGHTDARKGRHGHGRAEGGKRRCELTEDEHEGASSRCAWRGHP

SEQ ID NO: 51975 - protein, 428 aa, Zea mays
  Coding DNA Sequence Number=SeqID_8600
  Gene Ontology: Mol. function=hydrolase activity; Cellular component =nucleus; Biological process=mRNA transport
  Homolog annotation: Hit_ID=A2YQ08; Match level="QueryCoverage=99%, HitCoverage=87%, E-value=0.0, Identity=73%"; Hit description =Putative uncharacterized protein
  Pfam annotation: Domain name=GDA1_CD39; Domain location=57-428; Score= 350.5; E_value=2.8e-102; Accession=PF01150.8; Description=GDA1CD39 (nucleoside phosphatase) family
MRRYSALPNGGRQETLADRAHRYRGVVLVILAPLALVSLVLLLMPRSPAGTMGGARRSGPAGADRYAVIFDAGSSGSRVHVFRFDANLDLVRIGSEIELFVQIKPGLSHYANDPREAAESLVSLLDDAKRVVPAELRDQTPVRVGATAGLRNLGAQKSEAILQAVRDLLREKSSFKNQPDWVTVLDGTQEGAYEWVTINYLLGNLGKTYADTVGVVDLGGGSVQMAYAIAEKDAEKAPKPSDGEDAYVKKLFLKGTTYYLYVHSYLHYGLLAARAEVLKAGNGNGYSNCMLEGFQGQYKYGDNSFEASASPSGASYSKCKDDAVKALKAGFVNANAPVAKVKPSDFRQAAERACSLSVKNAEATFPGVQKDNIPYICMDLVYQYTLLVHGFGVDPDHEMTLVKKVPYSGAYVEAAWPLGSAIEVASSS

SEQ ID NO: 51976 - protein, 219 aa, Zea mays
  Coding DNA Sequence Number=SeqID_8601
MEKVVIEVDNCVLVALIRSDEGRRRLTSRRWLGSMPFYVYHCDRFNEVAVSLGALRHRWVVSWFPDKSQQQPFVFPEFQSTMPRWGLQAPTRPSQGLGVMYHNMPPSVVPTRRNFWTGGSYYTEGKISRLRGLVSKWQYIRNEFGQERTTGEVESILFFVSCSQLHQIFSAVSQARLLPHGHGVGWPLAVGHVCFGFGQLLATKSCCGLPNAQLFSQLL

SEQ ID NO: 51977 - protein, 252 aa, Zea mays
  Coding DNA Sequence Number=SeqID_8602
MNYLHTSKGRGITSPERLTSRGNRISTDGDGRLYTDDSPAAIIIPACAPLRVGPRPRLPTGGDIRPLKPKSWKPDDRQHGAQAHTPCNQRAGYRVQRNHTAAYANATSSRDYHESLKRLASSPEAGPGATVGTLNQGYPLLQHEDTVPMRRLLATRRTAPDPTRWAGQRAPRGKERRHTSVSPDPHRRTPDPYIHISLEPPGGVKVIQQAARLLVLLANSAPVPSGALYSSSLPQEASPARQGYTDLCHTRF

SEQ ID NO: 51978 - protein, 387 aa, Zea mays
  Coding DNA Sequence Number=SeqID_8603
  Gene Ontology: Mol. function=hydrolase activity, acting on ester bonds; Cellular component=cellular_component; Biological process =lipid metabolic process
  Homolog annotation: Hit_ID=Q5Z983; Match level="QueryCoverage=90%, HitCoverage=88%, E-value=5e-99, Identity=53%"; Hit description=GDSL -lipase-like
  Pfam annotation: Domain name=Lipase_GDSL; Domain location=34-367; Score=109.6; E_value=9.2e-30; Accession=PF00657.13; Description=GDSL- like LipaseAcylhydrolase
MEMRVVLLLCQVICMQAAVIGAVAAAAGARPPAMYVFGSSILDVGNNNYLRGPAVGRANSPYNGVDFPGSIPTGRFSNGYNIADYVAKSMGFACSPPPYLSLAQAPAPAPAQSSGPDLAQTALTIGINYASGGAGILDSTNAGNTIPLSEEVKYFGATKAKMVAAAGPSAVNPLISRSIFLIGMGNNDLYVFGASERARNRSDAEQRRDAAAALYASLVSNYSAAVTELYSLSLGARKFAVINVWPLGCVPGERVLSPTGACSGVLNDVAGGFNDALRSLLIGLAERLPGLVYALADSFGFTLDVLADPRASGYTDVASTCCGGGRRLGAEAWCTRSSTLCVDRDRHVFWDRVHPSQRTAFLLAQAFYDGPPKYTTPINFMQLAHSS

SEQ ID NO: 51979 - protein, 147 aa, Zea mays
  Coding DNA Sequence Number=SeqID_8604
  Subcellular localization annotation: CTP_CleavageSite=84; ConfidenceScore=5.14e-01
MTEPRDSYASGIRIPHSSPSAISNSRSDKATPWTEQVFTFGSSPAEAVLQAFSTKSGTGPHERAKVRARVFTLKGAVAPSAPTTSSAKSDPASDGDAVQGLLRESGPSRRLGRLPLGPRPTGFQGRQPDPRPRLIDFGVGSADGQHG

SEQ ID NO: 51980 - protein, 56 aa, Zea mays
  Coding DNA Sequence Number=SeqID_8605
  Subcellular localization annotation: CTP_CleavageSite=28; ConfidenceScore=5.10e-01
MGGASRDPHQTLFLHADTMQLSFRFMPSKSAKPSDNVKRSSLPFSDAESTIPIKPA

SEQ ID NO: 51981 - protein, 67 aa, Zea mays
  Coding DNA Sequence Number=SeqID_8606
MGTNEHLDLDTGELLSLGKFLEPARYNSPDYPVYTGQCPVLQEDAALELGSLEKSQRLLRYNSPDMS

SEQ ID NO: 51982 - protein, 146 aa, Zea mays
  Coding DNA Sequence Number=SeqID_8607
  Subcellular localization annotation: CTP_CleavageSite=57; ConfidenceScore=5.43e-01
MFLISWSNSSPWGVGLVAFLFWLRASQRERVSWFGSSGCRAAAPGAETFFGGMTKVNACRRWSKRFTGEMISNYKYTFDLKEEALLNHVFEDLRKTKAPNSNLADGEYVLIPEQGVAQEVVQEPAPEPAIEDLRALAFEGKPRFYA

SEQ ID NO: 51983 - protein, 146 aa, Zea mays
  Coding DNA Sequence Number=SeqID_8608
MGKSKKGGSSSHHSGDKRKREPTPPSEDFGDSEYSEEEFSSESEGSSVHASPLASSDDSDDSQGIAAEVWTYIRAVERAGLEGSDESEVSSDEGGSSNSSEEGSDSDDGGEGDGGDGGDGDGGGDGSKGDGKGDGGGGSSNGKASG

SEQ ID NO: 51984 - protein, 37 aa, Zea mays
  Coding DNA Sequence Number=SeqID_8609
MVFHGQLTIIDLSQPCTTTTMTCLGKEKIIIVNDEHV

SEQ ID NO: 51985 - protein, 182 aa, Zea mays
  Coding DNA Sequence Number=SeqID_8610
MGWFSPKLQWLHPAAAVRGTAATTEDRRAIQSPADPISTHRGLEQVRGDPPKLQGQPSGPRSSAGGTDGVPRAEHAPTVATLPSFPAAMVASVRATWRRRRDSSDPARQAGSAAARRGLSLVYPHTGPEARRPGRSTEGASRDACTVEFQRLARGHGEAGARQRSSQWDDRKFWTSSPVREY

SEQ ID NO: 51986 - protein, 286 aa, Zea mays
  Coding DNA Sequence Number=SeqID_8611
  Homolog annotation: Hit_ID=Q5GAU8; Match level="QueryCoverage=40%, HitCoverage=96%, E-value=3e-46, Identity=67%"; Hit description =Putative uncharacterized protein
MYREALWQKRGRSRELYPDVSSKDAPVPPELLLPNCDCGRLAWWIDGPDKFDPRYLLFANWLCGRTSQERFKRWVPPPPNPPPMTDAEKEVATERRIDSPPRCDCGDRAVIDEDHEKQFVCLNIDYETRKCSWESYDDKGEVMRTIESKRLVGQKMCCGSQLVDSYINDRIRDMRRDAKSAFYDSPKRAEYRMLKVADEKRAQDAREWEAARAEKQMLDNLADRLKGKIGCGVNYLADEAHARYGQDKMVMVELMEEVEDDTSRLSELIALVEAGLHGEERTTHQG

SEQ ID NO: 51987 - protein, 253 aa, Zea mays
  Coding DNA Sequence Number=SeqID_8612
MTSHLPTDGGNAHSHTDSLAREGFPHILWEVLQGAGYAMPPQYAVQLFEEHRVPRCRVRMTLEPHPLQPGWRSLDSESFGFRDEDIVESTALHVLTTFCGFHPLELSTHPIGLFPAEKEDDPMWKDRVEHAKDVWALYPGHTAHLTVWCMSALYRLQALRGEAMSQLMGLVESTKITLDNREDLVVDLSTELVEKDLQVEQMANHIQELEDQVDARENTIEVLEDQLQTTQQQLEEANQHLDLHHQDIEDMEA

SEQ ID NO: 51988 - protein, 382 aa, Zea mays
  Coding DNA Sequence Number=SeqID_8613
  Homolog annotation: Hit_ID=Q6QP51; Match level="QueryCoverage=39%, HitCoverage=68%, E-value=8e-13, Identity=37%"; Hit description =Putative growth-regulating factor 1
MAAIQGGHPLFKGDSPHLRPQPSWIESPPTLSKVLPLRHGGWVPRVIQSGPGQKKPNRRARSADQERGYSERDPSPRRKRAPSPPTDQRFEGWPLGRVRQPPQSTRALSPPTDQRLAPEGFDSRLRARRARDDSGYVRYMAEARATLPRSIQCKDRLTSYPDARSSVDKAEENSAACAALTDVPPVRVRLTAAKSGLRCHRKLHLARPQGSDSTSTPEDGLRLARPQGSDSTSTSEDGLRLARHQGSDSASTLEDGLRLARPQGSDSTSTSEDGLCLARPQGSDSASTSEESPPRPTSGSDRPRHRGPIITLPQASSGYGEQDRHPIWLALVKQVMMAHRVLHDYGGSQPLTEARRRQQGSDSPDSCTSTGLKRSSDGHDIT

SEQ ID NO: 51989 - protein, 611 aa, Zea mays
  Coding DNA Sequence Number=SeqID_8614
MPSSSSSAAATPPAAASSEETLSSLMPEELRAGDSVDFGVSRISSSRVEDMQRLGYFGGGVARAPGTEKVPEPEGELVVFEAFFAAGLRLPAHRIAQGAAQKRQAAIRIVDARPKRQKRGSATAAAPGRGKPLLAAKSGVPASSKAPEAAAGAGGSKPAKAVPPLSRVAEAAKAARALPPAGKRVADFATDICVDDYLGGSDEGQLVTVAPDAAVTTAAIVPKARGEALGSGGEAAALAVVRDEADAAFRRLKEVSEALSQVADFTSRTASGALTAAVSAEVERLQTQHADAVREKSASDSKCRKLADKVAALEREKADLRRQLAAERREANEAVAKEQAAQAEAKLARAEGNLTKELAEHLQERLTALESRAKGAEAAMHAEAERTRTQLMDTYRELGARTGDFEVPDREPGLRCLQWVQEELLELPAVAGGLMSYASLVTCEGAMNALSREGCRHFEAFDQADEDFERDIYKVEDPVVKESAGALYDRMWGLYGREVVRERAEAAMAQALRGEQVDDLGALNSALPDPEPTPAEAASGVALEPTPKTAPTPAAADEGLPPKVDEGAPDAPAAAVPSAEDPAAGAVETIAGTAAEPVAEAPAASGPSQVA

SEQ ID NO: 51990 - protein, 808 aa, Zea mays
  Coding DNA Sequence Number=SeqID_8615
  Gene Ontology: Mol. function=receptor activity; Cellular component =integral to membrane; Biological process=protein amino acid phosphorylation
  Homolog annotation: Hit_ID=A2YLM0; Match level="QueryCoverage=50%, HitCoverage=66%, E-value=0.0, Identity=86%"; Hit description =Putative uncharacterized protein
  Pfam annotation: Domain name=IQ; Domain location=672-692; Score=24.8; E_value=0.00032; Accession=PF00612.18; Description=IQ calmodulin -binding motif
  Pfam annotation: Domain name=LRRNT_2; Domain location=422-462; Score =15.2; E_value=0.023; Accession=PF08263.3; Description=Leucine rich repeat N-terminal domain
  Pfam module annotation: Pfam domain module=IQ::LRRNT_2; Domain location=672-692::422-462
  Subcellular localization annotation: CTP_CleavageSite=31; ConfidenceScore=5.13e-01
FSPSSNGTGRSEQDAVEKTRGAGQVKGRGKRASATGGAMRWRSPAVLRLQLWLLAVSASLAALGVLAADLSKEPFTIRISCGSFDDVRTEPTNTLWYRDFGYTGGRFANATRPSFIVPPLKTLRYFPLSDGPENCYNINNVPNGHYQVRLFFALLDNPNLDSEPIFDVSVEGTLFSSLLLGWSSDDEKTFAEALVFVQDSSLSVCFHSTGHGDPSILSIEVLQIDDDAYNFGPPREKGTVLRAVKRLKCGSGKPAFDEDLNGIHWGGDRFWLGLQTLSSSSDDQSISSENVIAETLLAPNFYPQGIYQSAIVGTDRQPSLSFEMDVTPNKNYSVWLHFAEIDNGVTAEEQRVFDVLINGDTAFKDIDIIRMTGERFTALVLNKTVAVSGITLKIILQPVKGTRAIINAIEVFEIIPAEKKTLPQEVSALRTLKGSLGLPLRFGWNGDPCVPQQHPWSGVDCQFDSTKGNWIIDGLGPRPVFLPIDTPLQSLTDLATITSGIGYLGFRSDPMASAANFAATSWQPASPSPWTAPHVTFVTPSWQPTSPSPWAAPHATFVTPSWQPASLSPWAASPANFVTTSWTPACPSPGITPNFITSSSLTASPSPWATPLGAATAQQSSAPSMGDLWTNIRADLAKMQATLQKVEQGLLQIKVAVQHEQHQLALSTRLQTLAAVGIQAAARGFLARQRVREMRRQMLEAALVTVDLGTRGRDLALSDGHQQRLRAAISKCGHGTFPAGDELQFYGSSGKEGTPLVIGKGALFSATTFRYRPPRGRLRWLLLRPIPASVMLQLEDELLVQEGCSARA

SEQ ID NO: 51991 - protein, 67 aa, Zea mays
  Coding DNA Sequence Number=SeqID_8616
MRPEETTYSKVATVGLDPHGKCRTPGCTARTSGRGSRHPQPVKLPLHADTTQVADIRAQGDGPGNQR

SEQ ID NO: 51992 - protein, 26 aa, Zea mays
  Coding DNA Sequence Number=SeqID_8617
MRLHTLRDDVVLYSQRCLLLIKGSGK

SEQ ID NO: 51993 - protein, 671 aa, Zea mays
  Coding DNA Sequence Number=SeqID_8618
  Gene Ontology: Mol. function=metal ion binding; Cellular component =cytoplasm; Biological process=cell redox homeostasis
  Homolog annotation: Hit_ID=Q10LG3; Match level="QueryCoverage=44%, HitCoverage=91%, E-value=3e-49, Identity=38%"; Hit description=Zinc finger, C3HC4 type family protein, expressed
  Pfam annotation: Domain name=PHD; Domain location=168-212; Score= -4.7; E_value=0.047; Accession=PF00628.20; Description=PHD-finger
  Pfam annotation: Domain name=zf-C3HC4; Domain location=169-209; Score= 41.7; E_value=2.5e-09; Accession=PF00097.16; Description=Zinc finger, C3HC4 type (RING finger)
  Pfam module annotation: Pfam domain module=PHD::zf-C3HC4; Domain location=168-212::169-209
DIICPNCSDGFIQEISEMGGVLNTYGLTEPDFEERQARRFGMMDAISSLMRQRLSEIGRDSLFDIHGRQGTGTEYGRRSTAIPTLVFGGIPSPAVGSSDINVVIREGRRAGAARPNFSSLVVGPSLEALFEQLLLQNNRQGPPPAPQSAIDSMPVVKINRRHLDEDPQCAVCKDKFEVGAEAREMPCKHLYHTDCIIPWLVQHNSCPVCRHPLPSQRSGSSTSSARVPSAYYNETACPPAVARADFDPVPSAYYNETATDPPAVTRADFDPAPGNYGSESQESHVPFSFLWPFGPSSSYQYEENVDEPAVEGRAAPVILLPLVKRGDEDLERRVASSPSPQHLPSEGPVRLSHLVPKTSLDGGDAALARSGSAGVFDVTVDGRGYAIVGVHQLTLNAVVALAKYVWAATSYGGQPSVEVFAKNYWLPAAVMCSHCYVAFPPFEVAEDDRDEGALRCAARMSSERDLVEEFIGYGVWPLAHGWALGEVCPRQMPSLGGQQVRSPAFALDLRGRDPVAFVREVEDGAVRIVGRYVPRMEALRSWDIRGANVRLNRVFELNRLPYGCYPGDDAAVAVDRRGKKPVAAAGEGSSREAAPAMKKRKLGTIAEGLRVSDRFAVELMGTCMTLRGRMSSPELRESSARMLRVTGGRWPRNVPIPPCGRRRHVYVSYGS

SEQ ID NO: 51994 - protein, 294 aa, Zea mays
  Coding DNA Sequence Number=SeqID_8619
  Homolog annotation: Hit_ID=Q6YU77; Match level="QueryCoverage=46%, HitCoverage=13%, E-value=8e-22, Identity=44%"; Hit description =Putative uncharacterized protein B1370C05.34-1
WNSSSTVGEFDGHSKRVLSCDFKPTCPFRIVICGEDILANFYEGLPFKFKHSIRMPSGRAILACGGFKICPLKCRNGRPWTQVQHLMQIDLKGWFLNYSTSLQYHSLLQILNCVAGLMTFIDHLENLAPLKTYIAKGLLHSVALRTPEINSERNLEDLGSSNTLILRMLLMQKENMKKPSNMRAREKISGRGRSYDGRLRSRSPGLKDSPRGRSRSQSRSYLPALKRKHYSSTLMCTIGYLNVYYVLGIPKSLMSEVGCEPMNLDVGRADQCAGAYVDWRENMEIEVSHALLTN

SEQ ID NO: 51995 - protein, 299 aa, Zea mays
  Coding DNA Sequence Number=SeqID_8620
  Homolog annotation: Hit_ID=A2WW19; Match level="QueryCoverage=69%, HitCoverage=61%, E-value=5e-72, Identity=61%"; Hit description =Putative uncharacterized protein
MAERRPIYREPGKPRRRPRSQDWLRRSKVSDFAEWCPLFFDPSVPAEMPMLASSDSPVFLLNSDWYSYRANRRYCGAMTMSLGAKRGSVNLSVPMWEKKFCTDACAVPWAKLCEAKRLMTLYKSVVDWDDSAALEAFNDAKARFCAVYHGQHYDIPLPDPDMFIDIINPDEYVDLELVADLEKSRRRVPRKDDGVPDVWDSFILSDKPVPVTGWGDTDTSFTHGQQLSVNWDYQLKHSVEANHKHMSANWDYSIKRPAQIVCQQNSGKQQDQTSSQGEQTNSCISHWIMRGGSPGCLEA

SEQ ID NO: 51996 - protein, 228 aa, Zea mays
  Coding DNA Sequence Number=SeqID_8621
  Gene Ontology: Mol. function=endonuclease activity; Cellular component=intracellular; Biological process=DNA repair
  Homolog annotation: Hit_ID=Q5VQJ9; Match level="QueryCoverage=62%, HitCoverage=28%, E-value=6e-76, Identity=95%"; Hit description =Putative DNA-(Apurinic or apyrimidinic site) lyase
  Pfam annotation: Domain name=Exo_endo_phos; Domain location=1-208; Score=-12.3; E_value=0.024; Accession=PF03372.14; Description =EndonucleaseExonucleasephosphatase family
MSRVWGKDKLSQAFPFKYREAASNPGPGDSARQLSPLHQACHSQCLVKPLSIKYGLGISDHDTEGRVVTVEFDDFYLLTAYVPNSGDGLKRLTYRVTEWDPSLGNYMKELEKSKPVILTGDLNCAHQEIDIHDPAGNRRSAGFTNEERESFGTNFLSKGFVDTFRKQHPNVVAYSYWGYRHNARKTNKAQYEQRGKLITWLWNYDTDLNLLRSLNYLIMCCAADGVRK

SEQ ID NO: 51997 - protein, 491 aa, Zea mays
  Coding DNA Sequence Number=SeqID_8622
  Gene Ontology: Mol. function=acid phosphatase activity; Cellular component=chloroplast; Biological process=biological_process
  Homolog annotation: Hit_ID=Q8S2H5; Match level="QueryCoverage=97%, HitCoverage=79%, E-value=0.0, Identity=76%"; Hit description =Putative diphosphonucleotide phosphatase 1
  Pfam annotation: Domain name=Metallophos; Domain location=190-392; Score=32.0; E_value=2.2e-06; Accession=PF00149.19; Description =Calcineurin-like phosphoesterase
  Pfam annotation: Domain name=PhoD; Domain location=80-463; Score= -244.7; E_value=0.034; Accession=PF09423.1; Description=PhoD-like phosphatase
  Pfam module annotation: Pfam domain module=Metallophos::PhoD; Domain location=190-392::80-463
  Subcellular localization annotation: CTP_CleavageSite=34; ConfidenceScore=5.01e-01
MQAQYMKRDPGYLGCKTAACQKRDASGACSVRTCAATVTFHVINFRTDVEFVLFSGGFRTPCVLKRSGALRFANPASPLYGHLSSTDSTATSMRLTWVSGDGRPQQVQYGGGKSATSQVATFTRNDMCSSPLLPSPAKDFGWHDPGYIHTAVMTGLQPSQSYTYRYGSDSVGWSDTNTFRMPPAAGSDETSFVIYGDMGKAPLDPSVEHYIQPGSISVVKAVAKEIQTGKVNSVFHIGDISYATGFLVEWDFFLNLIAPLASRVPYMTAIGNHERDYAESGSVYVTPDSGGECGVAYESYFRMPAVSKDKPWYSIEQGSVHFVVMSTEHKWSEMSEQYKWMNQDLSSVNRSRTPWVIFIGHRPMYSSHVGIPVNVDLAFVASVEPLLLKHQNICKGKPKKDESGIDTYDNSKYTAPVHATVGAGGFSLDKFPRIVLNKWSLSRVSEFGYARVHATRGDMLVQFVSSSTMEVLDQFRFVKPDPARRLRNKPV

SEQ ID NO: 51998 - protein, 420 aa, Zea mays
  Coding DNA Sequence Number=SeqID_8623
  Gene Ontology: Mol. function=acid phosphatase activity
  Homolog annotation: Hit_ID=Q8S2H5; Match level="QueryCoverage=84%, HitCoverage=54%, E-value=1e-144, Identity=73%"; Hit description =Putative diphosphonucleotide phosphatase 1
MAFFVVQRGSSQLTPLLALALLGLLRCAAVSCSAAAAATTLLHRESYAGKSEFRTVNRKPLGSCVDPSPYLAIDVGAAGPIPDEAFLQVTVSGVQRPDPSDWVAMITPSNSSVAGCPLSESELRGDRRPGESPAPLPLSCQASNLPDAKVQAQYLTSDPGYLGCKNAGCGKRDASGACTARTCAATLTFHVVNFRTDVEFVLFSGGFKAPCLLKRSGARRFANPASPLYGHLSSTDSKATSMRLTWVSGDGNPQRVQYGDGKSSTSEVATFTQDDMCSISVLPSPAKDFGWHDPGYIHSAVMTGLQPSQSYTYRYGSDSVGWSDTVKFRTAPAAGSDELSFVIYGDMGKAPLDPSVEHYIQPGSVSVAKAVAKEIQTGNVDSIFHIGDISYATGFLGRVGLLPSPHHATGLSSSLHDSYW

SEQ ID NO: 51999 - protein, 381 aa, Zea mays
  Coding DNA Sequence Number=SeqID_8624
MRWGRAPSPVWLGDVAWVRHLHVVEEDSRDSPEKTWHWRKQRCGFFAHASRMFIIRAREEGEPSGSFAFHVGWRSASSSSIRGRRAFAGLAEEANSGYEGPAVYGAVSCRVSGSLAWVALVPPSALPPVAGTERGCPSTARAMVAPRAGWPHPRLLPRHRSHRGVVQDVVRRGGGGGVLGWSCPYSRSETGAKTSSCVLVQPLPIGAEVVAATSGADVVASAGEAAHCRGGCLCWRDRQCHLPPDLRPFGFNGLVVTPVGGHGRGPIHSSAHPKVIAVTGEPLGAEVVVPAGAEVVAVASGAVRSQLPTRLLLYFSLGSQVVCPNPLDGGFKYYDTCRRAVEYAGSRYGTRLSGYMGGGACRPTVRDQAERLHGLRTTPGD

SEQ ID NO: 52000 - protein, 81 aa, Zea mays
  Coding DNA Sequence Number=SeqID_8625
  Subcellular localization annotation: CTP_CleavageSite=33; ConfidenceScore=5.75e-01
MPCRAHGSSPPAAAVQTAATVSACSQPNTPRIRGGGGVTESSSGRLVACLRLVVPRTSTALALRCLGRPIRFRLHWPNSSR

SEQ ID NO: 52001 - protein, 362 aa, Zea mays
  Coding DNA Sequence Number=SeqID_8626
MWAQGQNGYSTWSHSSGAISSCPDICDLRSIGLQQKFPWQRISHDDHGACAVAPPTSLRHGQKAMWQHRVSAWAGSSSVMRTGPHQAGPGHMSAPDPCLSKAWVFFAPESRDPAVGSPNPMKRGPGPVPKVRVALAGVLNLALEIQSTCTGVWHFPMGARTHCWHPGVYRLLWPHGDPGAIHVVESGAVHHVARDSRVGTASSCYRKGYPYFRVRRELGWLGRRAEMIRKSGAAHTSQGDTRLGLGAHWCLRRNRSEVLVEVATIDVLAALDDRVFDLVEVECAIPSSRSTSSHHCFMAPGEAVELGGCRNNSLAANNAPGDALDGVRDTQQARRLLDDLDAACQRMGWDTLNAERARHPSA

SEQ ID NO: 52002 - protein, 30 aa, Zea mays
  Coding DNA Sequence Number=SeqID_8627
MDTGRKRTAPEGANGAGGPKRARVHLSWAR

SEQ ID NO: 52003 - protein, 343 aa, Zea mays
  Coding DNA Sequence Number=SeqID_8628
  Homolog annotation: Hit_ID=Q6JAD6; Match level="QueryCoverage=86%, HitCoverage=55%, E-value=5e-44, Identity=47%"; Hit description =Putative uncharacterized protein
MRLRYDHLLRIPDFLTFSVLQRHGTRIQESFFRAQMSAQIALQVHRLLDLPAFLLAAGADSEVHLTYLPGLLTLLTTSDSLCYDTSDPPHRPHSGVAPGTTHVAALFRPPFSDGSRRSPADFTTTAKYLFELIRRTLLPRMGYREATTHIQLWLLGALGTLEASRLVFGSYRPAPEAPVPASAPVFDSQAEDAALHQFEAQDAAVDDDDDDDDDNFGIPPPPPPHMPPRSHDHEAGSSSATPAAPPAIDPALASILQTLTQQQAHLAAEQTRQAAAHQQLSERMLSKFQTIQDRQDSLQQQLLQDRAESRAFMALMLQHSGVSVPPVQSAPPPPLQAPVVPAI

SEQ ID NO: 52004 - protein, 94 aa, Zea mays
  Coding DNA Sequence Number=SeqID_8629
  Homolog annotation: Hit_ID=Q6JAD6; Match level="QueryCoverage=75%, HitCoverage=9%, E-value=5e-20, Identity=69%"; Hit description =Putative uncharacterized protein
MSGAPAAARSKSIFLCVVRHQVRMPHTKNVSAPGGGDDEDPRRPFRQVKGKTVHLEQQEGRKKRRMDRAARAAAAAVVVAAQAELGDQPQTPSD

SEQ ID NO: 52005 - protein, 175 aa, Zea mays
  Coding DNA Sequence Number=SeqID_8630
  Subcellular localization annotation: CTP_CleavageSite=29; ConfidenceScore=5.41e-01
MAPRTLCDDGGSQPPYGSKRTSARTRQLRQLSFRQAPALLRRPRHHTNRVSKPLRLPRWKDQGPLIEGWPRGDEDGTGARVRPLAPSPAWTLVTPYCKRTRPGRGTNTKAAGFPPLSRPSPAAFSPPFALGLAPTHLGWGTRRHFTRRPRDPLVLKRRQDPNLSGNQPAVLQIVF

SEQ ID NO: 52006 - protein, 107 aa, Zea mays
  Coding DNA Sequence Number=SeqID_8631
MPRDDDALMEKIEAVVPHVIKGVPREKAAGGSRHEFVGSCGRCVRITDATKDTKGGAVTTAGTKVGRLRPTDKEKPRTRQRWASALGIAAHTVEGGTVSAARGDNGL

SEQ ID NO: 52007 - protein, 120 aa, Zea mays
  Coding DNA Sequence Number=SeqID_8632
  Homolog annotation: Hit_ID=A2XXJ8; Match level="QueryCoverage=98%, HitCoverage=51%, E-value=2e-25, Identity=58%"; Hit description =Putative uncharacterized protein
MARYEASAAAPGVDFHLPDEILAVIPTDPYEQLDVARKITSMAITSRVSRLEADSGRLRRDLADRDHAEAELRARLADSDARLAAALDENAKLAKERDSLAATTKKLTRNLAKRCAFQWP

SEQ ID NO: 52008 - protein, 147 aa, Zea mays
  Coding DNA Sequence Number=SeqID_8633
MALLVDVAGLRPRLGDVEAPPKPRSSLSSMAEAESEPLGRARRRSSAEARAPESEPWVERSGVRRLPGLSPSPSPGSSGAEFAVFRPESEPWVGRSGVRRLPGLSPSPSPGSGGASYGAFGRDWLPVSITLSSGAAVGVAQEALSFC

SEQ ID NO: 52009 - protein, 690 aa, Zea mays
  Coding DNA Sequence Number=SeqID_8634
  Gene Ontology: Mol. function=phosphatidylcholine-sterol O -acyltransferase activity; Biological process=lipid metabolic process
  Homolog annotation: Hit_ID=A3AXD5; Match level="QueryCoverage=48%, HitCoverage=77%, E-value=1e-156, Identity=72%"; Hit description =Putative uncharacterized protein
  Pfam annotation: Domain name=LACT; Domain location=187-575; Score= -78.9; E_value=2.6e-07; Accession=PF02450.6; Description =Lecithin:cholesterol acyltransferase
MDDGVDGERWGARSTKQTHMNLHASVAVLQGCCDKASPRQTRQESTRSAGGAAPEVWAPGDLACLGGDAHGDATAATGTTSRMVGVRVEMHTQQLGRHRGWGSCARADGDGTRGGWERGHQRHPRARVHLDAGREQRSSDSASDSARAAERESNGVAGGGDYGRNGAGQEESADATTRGQETEIADGSVRWEATSAILGTREDAAARIVVYPSMEARREGQIGVGRLRSREPSKLGSRGEIIGDDTVYYYHDMIVEMIKWGYQEGKTLFGFGYDFRQSNRLSETLDRFSKKLESVYTASGGKKINLITHSMGGLLVKCFISLHSDVSTSCILDLWLRFAIFNVLRSRAILKTFEKYVKSWIAIAAPFQGAPGYITTSLLNGMSFVEGWESRFFISKWCMQQLLLECPSIYELLANPNFQWKDIPLLQIWRENLDNSGKKSALLESYEPEEAIMMIKEALSSNEIIADGMHIPVPLNLDILNWAKETYDLLCSTKLPESVKFYNIYGIDYDTPHTVCYGSEQHPVSSLSSLLYAQGKYVYVDGDGSVPAESAKADGFNAVARVGVAADHRGIVCSRRVFRIVQHWLHAGEPDPFYDPLSDYVILPTLYEIEKHREKHGDVTSVAEDWEIISPNDGKTLRPGELPPMVSTLTTSREGKEGALEEAQATVVVHPEKKGRQHVQVRAVGVSHGG

SEQ ID NO: 52010 - protein, 88 aa, Zea mays
  Coding DNA Sequence Number=SeqID_8635
MGSHALNEQQKQKMLPKSKKLVKGLFKGLGLFQGSSSSSSRRRELLSVVHGDEDEQHTEEQHNEEEQHNEAEQHNDEVEHNEEVEHVT

SEQ ID NO: 52011 - protein, 147 aa, Zea mays
  Coding DNA Sequence Number=SeqID_8636
MARGPFSLHTRNGYPANYSPRRINSATGHAAPLAGEASDASLRRNDRVKKKGPGKGDTPKRILPREGTRLRAPLLIRGSKASPPEGFDNRLRSRGPYTYYWSEVRRPAPRKGSTAASGYSGSAPITDQGFEGWPPKGSQPPQTPSEG

SEQ ID NO: 52012 - protein, 206 aa, Zea mays
  Coding DNA Sequence Number=SeqID_8637
  Homolog annotation: Hit_ID=Q8SA97; Match level="QueryCoverage=46%, HitCoverage=17%, E-value=1e-07, Identity=41%"; Hit description =Ornithine carbamoyltransferase
  Subcellular localization annotation: CTP_CleavageSite=82; ConfidenceScore=5.34e-01
MAPPVDVAGLRPRLGDVEAPPKPRSSSSPRVGPSPSPGSGGAEFAVFWDLARVRALGRADPSSSPGSGGAEFAVFWDLARVRALGRAEFAVFRDLARVRALGRAEFVVFRDLARVRALGSGEAELPMEPSAGPDCLSVSLCQVAPQSGWRRRRCPSVRPGLGRDGNMFAAEGGPRARRKSSGLCADGGYQLRIRSLEGTPNYGPRQ

SEQ ID NO: 52013 - protein, 345 aa, Zea mays
  Coding DNA Sequence Number=SeqID_8638
  Gene Ontology: Mol. function=cysteine-type peptidase activity; Biological process=proteolysis
  Homolog annotation: Hit_ID=Q5NKP7; Match level="QueryCoverage=97%, HitCoverage=50%, E-value=1e-152, Identity=93%"; Hit description =Putative uncharacterized protein 9C20.3c
MGAEPFGHCEVDKSCVAIKDSIDKIIEKQYYIADKFIELIDEVLRAESENLENETDEPQQQGNSADSAGHTVDATQPTPDMPSQASQLETQLGGTQFEEIHERQQHIRRVLETCPDESDVVSDQQRGEMATEEMEHNDSGPVFDQTPTPHDDTLKGTTNSGSDPPLTEQECVRSLWDLICSKDIDQSRVVIDYGEYGANCMDIYESFAEGKCLENVFMQCFIECVRDDSKNHRRTLTSNRLILDALLNFEEQERHSKNPQPFDQNVLQNCLHNTLPALVNLDKCKSILVPMLNKETLVHCVISSFNQPNNSRDLRAHALHQLTFHRINKALPLPLDIQRFMFARN

SEQ ID NO: 52014 - protein, 21 aa, Zea mays
  Coding DNA Sequence Number=SeqID_8639
MAALCVPLGLGPEKERWPGTK

SEQ ID NO: 52015 - protein, 88 aa, Zea mays
  Coding DNA Sequence Number=SeqID_8640
MDERNWRIAHRIARPTRGGGRPKSGDGALTVPVRQGLDPCLEKLHGSSGKLSKGSIEAQGLWKWLAAVAGAWVARAGGAEHAGAKYDV

SEQ ID NO: 52016 - protein, 267 aa, Zea mays
  Coding DNA Sequence Number=SeqID_8641
MGGFAWLRVFARGRSGGESKGLTTPILWPLAIGQRAHNGIRNAGMTEHARFARRRKRKVVLGHDDFTHPANGGDTHFSSDFLSHEGFPSILWEVLNSADYPTPPLTDDTTKAAALKTLTTFCGYHPLEMVMHPLGLFPAKKRDDPMWCNRALQTDAMAHLANLAQTTKLTLDSREDFVVEIRGNTIDVLENQLHDVQQELEEANYHLDMHHLEMEANEAGSEGEEAPEELEPAPARQRRGQNEQVPPPPPLAPTVEELMAQQNEILR

SEQ ID NO: 52017 - protein, 140 aa, Zea mays
  Coding DNA Sequence Number=SeqID_8642
  Gene Ontology: Mol. function=two-component response regulator activity; Cellular component=nucleus; Biological process=two -component signal transduction system (phosphorelay)
  Homolog annotation: Hit_ID=Q9ZQW0; Match level="QueryCoverage=77%, HitCoverage=68%, E-value=7e-36, Identity=76%"; Hit description =Response regulator
  Pfam annotation: Domain name=Response_reg; Domain location=36-134; Score=14.5; E_value=0.00029; Accession=PF00072.15; Description =Response regulator receiver domain
MATAAAAPASMAPSPAPKANDSRKAVVPVDASELEKHVLAVDDSSMDRAVIARILRGSRYTVTSVESATRALELLALGLLPDASMIITGYWMPGMTGYELLKRVKESAALRGIAVVIMSSENVPTHITLVYTIHKNKCLL

SEQ ID NO: 52018 - protein, 62 aa, Zea mays
  Coding DNA Sequence Number=SeqID_8643
MGYLRFNRERSSLVDGQGNGVAASYPLWLGGGRLHDRSNLVLIWYNHILYIRNSNKLEPTNL

SEQ ID NO: 52019 - protein, 712 aa, Zea mays
  Coding DNA Sequence Number=SeqID_8644
MGGLGVSDSFARELMRTCEAPGERMSSPELRESSARMLRVTGGCWPRNVPIPCAAGEDCFTSRMVRQWRVFPYGRNIGAVVWTVMDKDRQGAAQKRQAAVRLHEARPKRQRGAAKAAAPGGGKPPLAAKVGASTPSKAPEATAGAGGSKSTKVVPPASGVAEASKAARALPLSGKRVADFGTDITVDDYLGGSDEGQLAIVAPGAAIATAAIAPKARGEVSKSLGAGGEVSALAVVRDEAGAATHRLKGVTEALSQATEALSQVADFTSRTASGALTAALSAEVERLRSQHADAVREKSASDSKCRKLADKVAALEKEKADLRRQLAGERREANEAIAKEQAAQAEAKLARAEGNIAKELAGHLQERLAALESRARGAEAAMRAEAERTRTQLMDTYRGAARAPRCRGGFMSYASLVTCEGAVNALSREGCRHFEVFDQADEDFERDVYKVEDPVVKESAGALYDRMWGPHGREVVRERVEIARAQAVRGERVDDFGALNSALPDPEPTLAAAVTGVALEPTPETAAIATAAPTSAAAGEDLPPKVAEGAPDAPAAAVPSVEDPAAVAAETTAEAAAEPTAEAPAASGPSQVQDFGPAHATATTEFLAASTAEGGNEYGGSVSEFFDFTDSGSSVEWTEESSEEDLDYFAALDVAAAEASPHAADEPDVPGPSTGRRRRRAVAKRRVSAEEGARLRVSRAGRQELLSLPAAA

SEQ ID NO: 52020 - protein, 108 aa, Zea mays
  Coding DNA Sequence Number=SeqID_8645
MVIPAGEELRIMLFNYREMGIIPKVMELPLDEQSSGRRLDVDERVEQCRADAGVLHVLARFVQVLQMQHLRGIHTYREEAPRTELLGSRRQLGEGERWAATVSSLVAN

SEQ ID NO: 52021 - protein, 146 aa, Zea mays
  Coding DNA Sequence Number=SeqID_8646
MAPKRASSKAAPSVDEAAKAVLLAEKKGKALADNTPQEACEDEALSKRQRNNQPTPEGTLRTCSYGGQPQAPPPGFAAPEGEDATEDDEVIGVSAEEQLQLRALRIKNRNLQKQKDILEAKHQRVTAQAKVRQMIRDEEQRARELK

SEQ ID NO: 52022 - protein, 154 aa, Zea mays
  Coding DNA Sequence Number=SeqID_8647
  Homolog annotation: Hit_ID=A2WLP9; Match level="QueryCoverage=52%, HitCoverage=35%, E-value=9e-25, Identity=54%"; Hit description =Putative uncharacterized protein
MRNLLGVPNTLNVLTAYPLLLVGVPGLVLCLYDSGCFGVSLRWEASGWFLFYAGNVAAAFGSAYYHLKPDDDHLIWDRYTMFANVIDSSQVRVQRGGSSRSTARSSRRSTQDPAEVEQLREELRRHQDYLKQQATQHEYYATIQQQQTLIQESS

SEQ ID NO: 52023 - protein, 404 aa, Zea mays
  Coding DNA Sequence Number=SeqID_8648
  Homolog annotation: Hit_ID=Q6BTJ4; Match level="QueryCoverage=52%, HitCoverage=30%, E-value=1e-12, Identity=34%"; Hit description =Similar to CA1621|CaIFF6 Candida albicans CaIFF6 unknown function
MQLACNRAKWAHPSDSNALSMEAQAHTSCNRRAGCYVRATAPPLAPLPRLLDCGTSTATRGNPAYDPTVPARRIGHGPVSRGRRRSERRFAFAIMTASKKGPGKGDTPKGILLREGSGPRAPLLIRGSKAGPSEGFNSRLRALGLRAHYWSEVRGLAPRKGSMAASGHSGSAPTTDQGFIGWPTKAKSGLRRHRKLRFARPQGSDSGSAPEDDELRIARPQGSDSGSAPEDDELHIARPQGSDSGSAPEDNELCIARPQGSDSGSAPEDDELRFARPQGSDSGSAPEDDELRFARPQGSDSGSAPEDDELRFAQPQGSDSALASADGLRLARPRGSDSTSALEDRLNLDLGGSSTSPNPGLGLTTSQEAPSLPYPKLTQATGNKTGVPSASLRQTCNDGAPHAL

SEQ ID NO: 52024 - protein, 64 aa, Zea mays
  Coding DNA Sequence Number=SeqID_8649
MDTSMIGRVAAFANWDLGTSRVIFLALVRGTLQNMVDGVTWPSTLPPGWTVEWDAASSGEDQEE

SEQ ID NO: 52025 - protein, 214 aa, Zea mays
  Coding DNA Sequence Number=SeqID_8650
MEAWAHASCNRRAGCYVRATAPPLAPLPRLLDCGTSTATRGNPAYDPAVPARRDGQYDQKWVGSNGGGRRAGAARDRRRLRQEKQATLRLRHNDRVKKGKGDTPKRILLREGNRPRASLLIRGSKAGPSEGFNSRLRALGFHAHYWSEVRRPDPRKGSTAASGHSGSAPTTDQGGNDLVTESHQREASSPRTPSKGDRVRQITRWYFWSAPPGL

SEQ ID NO: 52026 - protein, 72 aa, Zea mays
  Coding DNA Sequence Number=SeqID_8651
MALAGRNWLAGVRRGLFLVVDLENEEESEVTEEKTPPPLESQAGTWFYFDICGSEPDSPINEGKPRCICHLP

SEQ ID NO: 52027 - protein, 348 aa, Zea mays
  Coding DNA Sequence Number=SeqID_8652
  Homolog annotation: Hit_ID=Q2QUG7; Match level="QueryCoverage=40%, HitCoverage=53%, E-value=3e-07, Identity=27%"; Hit description =Putative uncharacterized protein
MHDEEILARTLFAIKEKLELLQQDALEAKVQAFPEIAKYEWDDISVDPPSPSPPPTVTGPSVDEEEFYCPDVSDEWNPLGPPEVNPFPDSIPPSNTSTPLQGSNTIPSLPMNLDSDAEHSVHDINSLEKNAPPIHKPKKSKEQNFTGPEDLLLCTTWLQISSDPVVNTGQRREGLWARIEKRYNEQRGNFPCRVNRALSSRWDKIRADVSTPYAPTTENDSASAGLTGKRPRGRDFSKSERNKPASSSSPEYLSRLQEITEKQIQRSIEKGEKKEKCSEEDREMEKKRLELEAEKVIIRKRELKLQELDCAEKRLQRLEATNEEDVEPEVWIMMQKQKKEVARIHIWL

SEQ ID NO: 52028 - protein, 338 aa, Zea mays
  Coding DNA Sequence Number=SeqID_8653
MPSLEAQAHASGNRRAECFVHAAAPPLAPPPRLLDCRTNTATRGDPAHDPAAPAWRGGQCGQKWAGSNDGGRRAGAAVTSSAKLTSHPGAAREPPLTEKRAMLRLRHNDRAKKGTEKGGYPEKDPSPGRNQAPSLPTDQRFEGWPPGRVRQPPQIAWALHPLLVRGSKRLGGCSRKPGSGRTVDSVNIPARELGTRPYTRATASSHEGTTRPAEALREALRPRRSETTPPRPRGLHPAGALARTHRNKMQPRKAGPLAKKCDESLQASANTPFEARGLLSGTIIRGTLKTPNSQLKDSAACATPTAVPLDRVRLTGSQALPKAPQETPLRPTQGSDSG

SEQ ID NO: 52029 - protein, 71 aa, Zea mays
  Coding DNA Sequence Number=SeqID_8654
MDRPNLIIHNDLPIGDYYNLMIDNIDEVTDKSLMVLGEIEKDKIIVAKTYYKKVKINHPRLEIWCGRPSCH

SEQ ID NO: 52030 - protein, 278 aa, Zea mays
  Coding DNA Sequence Number=SeqID_8655
  Homolog annotation: Hit_ID=Q6QP51; Match level="QueryCoverage=57%, HitCoverage=61%, E-value=1e-15, Identity=36%"; Hit description =Putative growth-regulating factor 1
  Subcellular localization annotation: CTP_CleavageSite=28; ConfidenceScore=5.27e-01
MQAACNRTKWAHPFDSNASSMEAQAHTSCGRKQRSSRQPSSHPLLGQRENPLPQREDSAPVFHSSNGARTRNDCPDERHLWRAKQATLHLRHNDRVKKGTGKGDTPKGILLREGNGPRAPLLIRGSKAGPSEGFNSHLRALGLRTHYWLALEGFDSRLRRTARDDPGFVRYITKARATLPSRQSRSDRSHFAAPLTGLTRGQRRLRRSDCCATRQSEADSSQGSDSASAPEDDELRLARPQGSDSASAPEDDELRLARPQGSDSASAPEDDELRLARP

SEQ ID NO: 52031 - protein, 352 aa, Zea mays
  Coding DNA Sequence Number=SeqID_8656
  Subcellular localization annotation: CTP_CleavageSite=40; ConfidenceScore=5.40e-01
MSLHSPHASRLSTFRAPGWGTLVVLTPCHWRNATSRKLVPFSHRSASRIFIRQPGRIPSPVVTQDGDHQLLGGEKQAGLRPLPLPQLQGCSSSVLGRGVRRVGVGLHTGSGPLLPSAIGGKGVRRSWRWQLPRVRLSGLSGFGAASGATFRRGSRKRFLHRRDSRCRPRTADCPPTLWPSARPRPSSGDVGEGLTTAASALRSSLLLFGRSEQKSLSLLLEWAVAGHPSAFCCSVGPPIVGVESLGSVGLAARGFSCLVKGNPRPLFDEPKPEAAVPAWIEAELARKEDFVGRSLAGPSTGGTDAGSRVAEATSRADVLGGQLAEALGWPAELSARARFLEKTLAAMAQAWC

SEQ ID NO: 52032 - protein, 343 aa, Zea mays
  Coding DNA Sequence Number=SeqID_8657
MPSHSLMHRILPPSEPPDGERPRCLRLIVGGAQPYGGGHPSAIARLQGFSSGSPAALPHRWSPRMVTTSLMVGRSKPGCDLCPALSFKDLHHPCWGGGRGEPGPSFAWAGDPLLPPASGGGNHPPALRRRRPPAMWGKANCCCLARVQHSVLRPGDCGRLHRGVAQHVVRREGGTHVLRWSRSRSCGEDKSEDLPMRFGAAGARWCGVGGQVAAVVGAEVVAAGEGFSADETVGATRGLTSGSLALIACPCPSSGDVGEDLATAASALRSSLLLFSRPGRRSLSLLLQGSANPRLLCDEPEAAVLAWTEAESAREEASLAREHVASLAEEVQQRWLELGQVVR

SEQ ID NO: 52033 - protein, 122 aa, Zea mays
  Coding DNA Sequence Number=SeqID_8658
MTDSPRTRVDEYRSARGCDSGHGQQVGEEEQGEGREDERDVLRRRKRWCAHDVKRSHGRAIATVRVGVGTDVGRIRGGGACSYALCREWGGVEVEHNDIARIARNFIIKMNLFVRQIIIRVN

SEQ ID NO: 52034 - protein, 528 aa, Zea mays
  Coding DNA Sequence Number=SeqID_8659
  Gene Ontology: Mol. function=nucleic acid binding
  Homolog annotation: Hit_ID=Q69K57; Match level="QueryCoverage=100%, HitCoverage=100%, E-value=0.0, Identity=75%"; Hit description=Smr domain-containing protein-like
  Pfam annotation: Domain name=DUF1771; Domain location=371-436; Score =62.4; E_value=1.6e-15; Accession=PF08590.1; Description=Domain of unknown function (DUF1771)
  Pfam annotation: Domain name=PAM2; Domain location=20-37; Score=24.5; E_value=0.0004; Accession=PF07145.6; Description=Ataxin-2 C-terminal region
  Pfam annotation: Domain name=Smr; Domain location=448-528; Score =53.9; E_value=5.6e-13; Accession=PF01713.12; Description=Smr domain
  Pfam module annotation: Pfam domain module=DUF1771::PAM2::Smr; Domain location=371-436::20-37::448-528
  Subcellular localization annotation: CTP_CleavageSite=53; ConfidenceScore=5.40e-01
MSSLNKVVSNSGDACSVLASKVTSLNPNAAEFVPSFVKPSFGNGTVLDKSDFRGSSGKTILDRPEPSKSNNSDDEAHQFWHKQLPDDIIPDFTSFEKVEQGPELSLAGLSLNAPPFYGTTSSRFSREYHELSSPVTKGLELELEHTNMLYEDKSNWEQNYIGDLHIANGNQDLHYDSESGVSFSDSFASEYVAPSDGLFAPLEYLASQFPGFSAESLAELYYANGCDFNHTIEILTQLEMQVDATPNHTLNLPHSTPNFSTGDFPALPTAEDQNGFNQGNVDVLGMFNGRSSSAMPTGAGDFVSAVRKLASQNSGQWKFKKGPEYGNGISALSVPKQYSSSTKQSSGNKFQSISSGRVAPWLETGDAVASMYSESRGEARDFARVRNTCFEQARQAYLVGNKALAKELSMKGQAYNVQMKAAHEKAREAIYRQRNPVSSQRGGGDHLIDLHGLHVNEAIHILKGELTALKSAARAAGERMQVMVCVGTGHHTKGSRTARLPIAVEQFLLDEGLQYTQPQAGLLRVMVY

SEQ ID NO: 52035 - protein, 224 aa, Zea mays
  Coding DNA Sequence Number=SeqID_8660
  Homolog annotation: Hit_ID=A6C0X8; Match level="QueryCoverage=71%, HitCoverage=43%, E-value=2e-08, Identity=27%"; Hit description =Putative uncharacterized protein
MEVVFGRWLRSGAEQEAAPVPLPRMLSRAHQVLSDTRAAILREWEALEAEHQRLSDWRTQLEERTKMTSRQFVSERSQLERDRKEYKRDLQRVCARELEASRREKKVTRREEAVTQREALTTEYQAKLSALDQTLEAQRAQQQELKGKASDVALAEENLKVKEQSLDRRETDLARRETDLTFREEMLTRRGEMLAEHELEAEERERKLEEQIRQFNAAQAAPGP

SEQ ID NO: 52036 - protein, 237 aa, Zea mays
  Coding DNA Sequence Number=SeqID_8661
  Subcellular localization annotation: CTP_CleavageSite=41; ConfidenceScore=5.31e-01
MANWAYDMAAAGQPQGILDEPPRRAVCSRAGRAPRRASRCRAGPASAPGEPLPRRASALQRQPPRRAGELPRRASTAPGEPLPRRASRRAERARAAGARQGAARDACTRGRASVLPGRAREPVQRRRRGGERERSRTSSSSDGLAVADHDPGASGRGERWCASRRTTLLPLGLKSVDGETVPDGPSSGVGVGSRCCTPSPRTKAILSSSSEEEVASTATVAVDVDAIWPDGATARAG

SEQ ID NO: 52037 - protein, 87 aa, Zea mays
  Coding DNA Sequence Number=SeqID_8662
MTQPLSFSNLSPLGPTLTWLMTTMKGADEGGQTSVSSKGKYILSEEVDSPHIQNVGGANFGDSSSSREEDEKKTAEGEGSLGHKKAE

SEQ ID NO: 52038 - protein, 239 aa, Zea mays
  Coding DNA Sequence Number=SeqID_8663
  Pfam annotation: Domain name=RVP_2; Domain location=1-103; Score= -13.0; E_value=1.1e-05; Accession=PF08284.2; Description=Retroviral aspartyl protease
MQDVVDGVTWPTTLPPVIFGTLVIHSTVATVLYDPRTTHSFISAQFATKYGILKCPLRSRKTISAPEGKMLVNYICPNMMNPNGNEVNGANDNIPTLTTMNEKNESPRYSMNGMKNNKRNRKIFGYMISPPQPQAKVTKHTDSQTKESSQAQLYKIQTPNQSSSPVGQAKLTRKELKARGACYYRKNEGQIIFQCHKKHLDRLEKKIVKHDLSNSSEDPPFYKYDDEGRLISIHCGAKK

SEQ ID NO: 52039 - protein, 51 aa, Zea mays
  Coding DNA Sequence Number=SeqID_8664
MVGKLYGVVVVLGFNGIRLREALGGSGELLMWLSGVEHDWGGLAAVVVLER

SEQ ID NO: 52040 - protein, 219 aa, Zea mays
  Coding DNA Sequence Number=SeqID_8665
MTLEPHPLQPGWRSLDSESFGYRAEDTIEAIALHGLTTFCGFHPLELATHPIGLFPAEKEDDPMWKDRVEHAKDIWAIYPGQTAHLTVMRGEAMSHLMALLEATKITLDNREELVVDLSQEMVEKDLQVEQLSGEIHELEELVGTRENTIEVLEDQLLNTQQQLAEANEHLDMHHQEIHGGEADEDVDVEGGDESASSIDTAGSGRPPSPESSVASFAH

SEQ ID NO: 52041 - protein, 69 aa, Zea mays
  Coding DNA Sequence Number=SeqID_8666
MAWERRRRTCCSLPKEAPLTTLVLTIVSMGDPVLGQVRGKVRARLHSGFGFLLDPSPWTIIDPTNQADS

SEQ ID NO: 52042 - protein, 246 aa, Zea mays
  Coding DNA Sequence Number=SeqID_8667
  Subcellular localization annotation: CTP_CleavageSite=92; ConfidenceScore=5.41e-01
MARGSATPLPSPCVSLYSLTELLPCSRVSSSTARRDCSLCLAEASPARSPVGLLPLPGGAQLLLRSPSRALRAFLCRLSLLDMEHLPARGTSSARPSPQPRRIFLGRVVVADPLAVCPTPVEFSPTAPAAAPGRAPSPLFQAPWLDSAQFASCSPLRRARSISLFLHVLPRNSWFSSPPSRCRVRETARSRHRVRNTRAGHGETLRVLVSESARPQPRFALRVAVCRVKPEVAAFLFQFAVPHVRL

SEQ ID NO: 52043 - protein, 61 aa, Zea mays
  Coding DNA Sequence Number=SeqID_8668
  Subcellular localization annotation: CTP_CleavageSite=54; ConfidenceScore=5.49e-01
MAAMESTSGRAQLMFSMPVATAPFAWPRLPLLGPLSACSLFLAALSFSAPPAVPCALSSVG

SEQ ID NO: 52044 - protein, 223 aa, Zea mays
  Coding DNA Sequence Number=SeqID_8669
MAEDKKTVDPTLVGFYCNTPGVAMAGAHLGTQDYDHMWKNLRSKNSPSPRPVSAPGVSQLSDSPRCQEEPSEKTVHVSVKLPERGIGLCFTGEAGPRSPDFNRPPATVDRDCNLADGEYILVPEQGAAQEVAPDPAPEPAPEDLPATALEGKPRRLPSSRDLRRGLPFRLWWVQVRSLHDGQSGSVRHCSLEEMVAGITWPTTLPPGWTVEWDPASAEEEHEE

SEQ ID NO: 52045 - protein, 47 aa, Zea mays
  Coding DNA Sequence Number=SeqID_8670
MAVMGSTSDKMYLCQVRKQQTFAVFVLRWCPKKNLSSEAAGGCWPPT

SEQ ID NO: 52046 - protein, 114 aa, Zea mays
  Coding DNA Sequence Number=SeqID_8671
  Subcellular localization annotation: CTP_CleavageSite=70; ConfidenceScore=5.28e-01
MLDEAARWDDLVTGLRPMSYGAKGVPARCLVSVGPTTTTKASSEGWRLCLRPNTRSTQGTRSRLARAQPRARAADPGGFTSRPRAPSSNGHTFGSPEAQSSPRSNLGESRLEGG

SEQ ID NO: 52047 - protein, 369 aa, Zea mays
  Coding DNA Sequence Number=SeqID_8672
MGAEHGVSGELQAGPTRSEAAVEPFGGPAFDPLISRGARSPVPSRGRIPFGHPARWSRDAWAWVSRPSALGVGEARPPGAVACRLRGCPPLSPVGLGESGGSLVTAERLSAPRAAVWLLLLRVGLHGMRDPAPAPQGRALERVGEDSARDGWGRKQGESPLKGGRPLSEGDHVFLLPYALRLSTFQAPGWGIPAVFSPHRWRNATPWELVPFSHRSASRIFIMQPGCTPPPAVTQDGDLHLDGGGKRAGLRPLPLPQPQGFSSPGLGRRECRVGVGPCVGGGPLLHSVIRGKGGRRPWRWQLQRAWLSDASGFGAARGTGVCHGSWKRFLRRRDSQGRPRTDLQLYDLLPVLASQVWAWAGASWQQHPP

SEQ ID NO: 52048 - protein, 52 aa, Zea mays
  Coding DNA Sequence Number=SeqID_8673
MARVACTLHGKRLDDGVFVLSVKKQQTFVASVPRWYQKKKIKTKAAGGKIFR

SEQ ID NO: 52049 - protein, 62 aa, Zea mays
  Coding DNA Sequence Number=SeqID_8674
MDESGMKKEIGLLELAIVSHLSPRGPGHFMDVDCNRTYGVRVWPWRVAVNRGRCEHRLRAEF

SEQ ID NO: 52050 - protein, 454 aa, Zea mays
  Coding DNA Sequence Number=SeqID_8675
  Subcellular localization annotation: CTP_CleavageSite=87; ConfidenceScore=5.41e-01
MPRCSAIPASPRLHSHPRFVLPFQPPRCPPAVLPFQPLLASIPIRDSSLRDAPLFRHSSLSLTPRLPFPWQKNHRSRDWQENLTTIGSSKAAQLISWYRDCWLVVELNERASSGRGKFGEARLEVDTIAPASCEWAPSCSRSARPGCGGDDRGLDPRPGCCGDGGGLNPGLDQGHGGDEGGGRGGGRCFHSQSWGGVLGMTDESGVQWWLIDISHWHPSPAQFDDAPSVLLLHDGTTISRYRADGGKEKQAFRLHGIVEASILLLTGGSAVGLLVGIATRHVVDRKEQASNISGLPLKIVTWVGLILNFTVDWLFGKCSEKAICIRLIFSSILLRVCEIVGLYFFLDDVDCAVTIYSLFLTPCLFTCICSIRGFSALSQAPRHQPEDDEPLGRQHDATTRPTAGAEGREDEDVRHHRPFITGFAITGFIITKMTTNFTEENFKNSKFIQEHKRR

SEQ ID NO: 52051 - protein, 339 aa, Zea mays
  Coding DNA Sequence Number=SeqID_8676
  Subcellular localization annotation: CTP_CleavageSite=83; ConfidenceScore=5.34e-01
MAARPWRAPGSPACGRGAPSPDVPAQPPAALGARLHARAPDRGAAPSSAMAARPRPPGAALPRRPALPRPWRGPSSLPALACPAPARRDRDMPARRDLELGPTCLWHAALSSASTRPRAVGLGMASLSLAARNAARAQLGPGRIQGVVRLAVVPSMGLGVAMRLRVLGFDSGNGSNKKTSPGTEGQDDYLFNIRLLKQRSTSSQAPLSRFRPDFYLHGSTPSSRFNALNSGEDSPDWPRRKPAASPPGTIILLLPCECGNRESGKPNDRREVGTAVGLGRHVGRTGWPDGVPGGLGLGCDRAHPDPPMGPPLSVGMREDSETTSNSHNEHFTSCNLQSK

SEQ ID NO: 52052 - protein, 84 aa, Zea mays
  Coding DNA Sequence Number=SeqID_8677
MKYSHITDCDTLADEVEVELDMLRVLVLVGLVERYQLALQMTRVLTAKRINTDKHDWADKDLAGDGSPMIKDGFGAIRSEIGFR

SEQ ID NO: 52053 - protein, 493 aa, Zea mays
  Coding DNA Sequence Number=SeqID_8678
  Gene Ontology: Cellular component=nucleolus
  Homolog annotation: Hit_ID=Q7X9B0; Match level="QueryCoverage=28%, HitCoverage=95%, E-value=9e-50, Identity=73%"; Hit description=Auxin induced protein
  Pfam annotation: Domain name=Auxin_inducible; Domain location=109 -211; Score=12.0; E_value=2.1e-06; Accession=PF02519.5; Description =Auxin responsive protein
  Subcellular localization annotation: CTP_CleavageSite=42; ConfidenceScore=5.01e-01
SVGGPNKQTWGPRATSQHRKHSTGTGTPPDTRPHQSLIQIVLALADASCNIALAVLMALSLAQQYDPHWTELYIHVEVVSEHHHQSQLSELSTSFTAKKEPTMISTKRIAQLAKKWQRMEALGRKRRLAWGTAAAAKKADRCCASVASKGHCAVYTTDGARFEVPLACLGTEVFAELLHMSREEFGFAGGHGRILLPCDAMVMEYALCLLRRGASADLEKAFLSTMAMSCHSADHAAAPYVAACSEPQCAIVPLSFPIGNQPAAAFRVLLTVLLALGNEPLYRVLDTRHRTSLGKDTFAECQTLGKGGSRQRAVSGRPKADGRHSLPRVGIQQRGFFVECRILGTRQRTLRPSVFSRHSAKKCVKGSHLANKKTKSWIQQKSKGVNRRHLWSGAPDCPVCHRTVSGAPPDMSGAPEDSNANSPPSGISRGDSAIIHRTVRCTPDSVRCAKEERPQELAGFGNLQRLVRYNSPDMSGATPEQRLFGANGYLQRN

SEQ ID NO: 52054 - protein, 273 aa, Zea mays
  Coding DNA Sequence Number=SeqID_8679
MTSHGSTDEGNAQSHTDGLAREGIPRILWELFEKHRVPRCRVRMTLEPHPLQPGWHSLDSESFGYRAEDTTEAIALHGLTTFCGFHPLELSTHPIGLFPTEKEDNPMWKDRVEHAKDIWGIYPGQTAHLTVQCMNALYRLQVMRGEAMSHLMALLEATKITLDNREELVVDLSTEMVEKDLQVEQLSNEIQELEELVGTRENTIEVLEDQLINTQQQLAEANQHLDMHHQEIQDMEANEDVDIEGGEESASSLDTAGSGRPPSPESSVASFAH

SEQ ID NO: 52055 - protein, 54 aa, Zea mays
  Coding DNA Sequence Number=SeqID_8680
MVSTSAVTAPWQSGSVEHCTSLDEMVTGVTWSSTLPPDWTVKWDAASVGEDQEE

SEQ ID NO: 52056 - protein, 276 aa, Zea mays
  Coding DNA Sequence Number=SeqID_8681
MEGSFVIRTSYCSEVEGFPHLLQSYTLRMGIRKKPKYVWKEYRENGIEKCSMAVYLRESRNYPNHPPFQITATGHHFPNTYQNAAQKSLRQLCQNYSREVSETPLHYFPPSNKNTPAWRKRLQALSGRDRNEDDPTIVYMAGYLHTLDNHYDDLFSHCAHLNSQVESLEQQIKELKEEKAALQDSLEMAEGEEDNTREAYRTIKMDYARRLKKLAPAKKIRKRFKSQGYQTDSREEAPPALPSLGIGNFSNIEEVSLASLDDLIREFGDTLENSCA

SEQ ID NO: 52057 - protein, 662 aa, Zea mays
  Coding DNA Sequence Number=SeqID_8682
  Gene Ontology: Mol. function=triacylglycerol lipase activity; Cellular component=chloroplast stroma; Biological process=lipid metabolic process
  Homolog annotation: Hit_ID=A7PUL5; Match level="QueryCoverage=65%, HitCoverage=83%, E-value=1e-141, Identity=58%"; Hit description =Chromosome chr7 scaffold_31, whole genome shotgun sequence
  Pfam annotation: Domain name=Lipase_3; Domain location=187-350; Score= 178.5; E_value=1.7e-50; Accession=PF01764.16; Description=Lipase (class 3)
MSQRRRPRRRSCHAVAPVDKTTTDRDHATPLVMDVDRVSHPAETTSGRSDDGEGELAARWREIHGSDHWEGQLDPIDAVLRGELIRYGEFAQACYDSFDYDRFSPYCGSCRFPAKTFFQDVGLGGAGYQVSRYLYATCNDLKLPNFGGRKHSSAANDKLWSELGTFIGYVAVSTDEETARLGRRDIAVSWRGTITRLEWVADLTANQKRLSELGVPCPDPDVKVEMGFAELYTGKDAACRFCRYSAREQALAEVRKQVELYHGRGEQVSVTVTGHSLGSALAMLNAFDVAETGANASPDGRKAPVCVFSFAGPRVGNLRFRERFQRELGVRALRVFNVHDGVPKVPGVFFNDAAFPEAVLRVVDGLGAGGVYTHLGVPLALDHKVSPFLKETMDISCYHNLEAHLHLLDGYRGSGEGFQLRGRDPALVNKSADFLRDEHMVPPVWYQAENKGMVRTEDGRWVLPPRHRDIDEHPDDTDHHLQQLGVILTASTYQTPVETAAISSKCTTSATSTPLLTPLAAKNCAHQTRDCPETKATKDRMARAQPADNPRVVAHTYQQPPPPYIHAPAPHPPHHAYQHHQEVQIIPPPPPPPHQQHQNIPHPHAPKQEDFADQPYRGVIHMITGGSGADFDTKRQKRDHYSSINHVAITGPVVQTKWSPYR

SEQ ID NO: 52058 - protein, 356 aa, Zea mays
  Coding DNA Sequence Number=SeqID_8683
MTVSKKGPGKGDTPKRTLLREGTRLRASLLIRGSKAGPLEGYNSRLRARGLHTHYRSEVRRPAPRKGSTAASSHSGSAPNTDQGGNDLVTESHQREASSPRTPSTGDWVWQITRSSPETPCSAPTEGNMALSPLLLAERRHRGVCKKVESIPDRPLALCRGSGAALANPAPAKPLTASTYQPENLEPDRAPGLQPARMRERPDQPKHYARPRGLHPVGALARTHRNKTQPRKAGPLAKKCDESLQASANTPFEARGLLSGTIIRGTLKSPNSQLTRAADPGGSPSRPRPPSSGEHTSGSPEALSSPRSNPDQIVTPTDQIAGAFNAKKDSAAYAAPNAVPLDRVRLTGSQARPQAP

SEQ ID NO: 52059 - protein, 190 aa, Zea mays
  Coding DNA Sequence Number=SeqID_8684
  Subcellular localization annotation: CTP_CleavageSite=35; ConfidenceScore=5.27e-01
MGKPVPSLLMLLLSRGRIPSRLSNPVARWDGQVTPATMSSKRTYKIMPTSKAEYTKYSARLTRTMDQAVSLAVRSRRFESSFFILARGYVREESKNGAEAYPVYVHRRSGEVWRPWTGFSGEAKSDSLLGELHRGMHGLFRGSGVTGKGSAGRSTVAGDRVAAGTPFAGQTSVVSGSGEVERARRSMVDA

SEQ ID NO: 52060 - protein, 170 aa, Zea mays
  Coding DNA Sequence Number=SeqID_8685
MEDTLVSVPISFPMRVSLLSCGRSDDTTEAAALKTLSTFCGYHPLEMVMHPLGLFPAEKRDDPMWCNHVSHVKDTTKLTLDSREDFKVEIWDNTIDVLENQLHNVQEELDEANDHLDMHHLDMEENKAESKGEEALEELGPAPARQRRGQNEQVSPPPPPAPTMQELMAQ

SEQ ID NO: 52061 - protein, 98 aa, Zea mays
  Coding DNA Sequence Number=SeqID_8686
MAQMMVTLPVSCMNLGTDASSSRTALAALMKHPHYQVSKKSPGFTSNMLIVCTNWHGGKNYGGIRDSISKQTIRSDLHLKKLLNVIAKLVAVLGILGS

SEQ ID NO: 52062 - protein, 285 aa, Zea mays
  Coding DNA Sequence Number=SeqID_8687
MDQAVSLAARSRRFESSFYPCKKGAHRLGVQCLTDPDWPSCSDRTCTHHNRNGRPRLRSREEGNLRTGSLRLGCWIWGYLLSSSLLRHEDVLSVSKITVYRNAMNINRGKEKGSAAYRRRGRSGEGWGWLGETLAVTSRYGSTSEMAGIARSTRAGGCPRRRRVYRPNHGELVQSEGTVSFTGSRNDCVHKESKDGGVVYPVHVLRRGRELRRAWTGFSGEVLSDSLLEEPHGGVHRLLRGLDGVGNGSNGGLWWQRGWAAADSLRTGKRRRANSGEVWRVRGRV

SEQ ID NO: 52063 - protein, 144 aa, Zea mays
  Coding DNA Sequence Number=SeqID_8688
MGKNNKRKREPTPLSEDFGDSEYSEEELSSESEGSPAPVTPPASSDDSDDSQGIVAEVWTYIRAVERSGLEGSDESEYSSDEEDSDGGGEDKDDDDDDDGGDDGDGDGDGSGRGGNGGGRGGNGGSSRGSGGGGSSKGSNKASG

SEQ ID NO: 52064 - protein, 185 aa, Zea mays
  Coding DNA Sequence Number=SeqID_8689
MDQLPLENFENSRIELLVCQKSLIVSFVKSWPLVGRMVDYGKKGEFLKSLINFSWNNSLYVSTMLETENNQFGKDLAEQPRLCAVWVHRTVRWGTRQCPVRQAGGCQLAALGTSTTVYNYKSPDCPVVHRTVRGLERFLECLSVAMRLMVLGFDSGNDCQLCNHCSGQDEAVEGDHQEFQDYDEF

SEQ ID NO: 52065 - protein, 148 aa, Zea mays
  Coding DNA Sequence Number=SeqID_8690
MADNEQPSMDVVCTGASNKVDEDATKLEWQTTSSSSEGSGEDSSSDDNPCTPIPPRKKKTSDELDADYIPNDEEISNEEKKEDASSTRNTEDAPMPESSISHKRKRGRRGPNQMKEGAVMYVTKLNAEGFREEPLDVVTKFPISPGFC

SEQ ID NO: 52066 - protein, 237 aa, Zea mays
  Coding DNA Sequence Number=SeqID_8691
MRPLHGGSRGQLEHYDFTHPISGGDTRFSSDYLSHEGFPSILWEVLSSAGYPTPPLYMVQLVDDTTEDAAMKTLMTFCGYHPLEMVMHPLGLFPTEKMDDPMWCNRSDAMTHLTNLAQTTNLTLDSQEDFVVDLSSELVEKDLQVEQLSQRITTLEQQVEIRDNTIDILEIQLHDVQEELEEANDHLEMHHQDMVANEAGSEAEEALEELESAPGPNATPSGMLPSPTSSVASTTQG

SEQ ID NO: 52067 - protein, 290 aa, Zea mays
  Coding DNA Sequence Number=SeqID_8692
MNALSREGCWHYEVFDQADEDFERDIYKVEDPIVKESVGALYDRMWGPHGREVVRERAETAWGQAARGERVDDFGALNSTLPDPESNPAEAALEPLPETAEGAPDAPAAAAAGRGPPPETAEGVPDAPVAAAASEGPPPTATPRVEDPVTVAAEATAEAPATAGSSQVQDFGPAHSTATTNFLVASTVDDGDKSDGSASKFSDFGDSRSSVEWTDESSDENLDYFAALDVAAAEASPRATDAKDVPGPSTGRKRRRAVAKRRVSGPDGGRLRVSRVGRQELLSLPAAVST

SEQ ID NO: 52068 - protein, 115 aa, Zea mays
  Coding DNA Sequence Number=SeqID_8693
MLTPSGKKLAADSKCRKLADKVAALEGEKADLRRQLAEERREANEALAKAQAAQAEANLARVEGSLARERAEQLEGRLIALQSRVERAEAAMRAEAERTRKQLMDSYHELGRVDR

SEQ ID NO: 52069 - protein, 153 aa, Zea mays
  Coding DNA Sequence Number=SeqID_8694
  Subcellular localization annotation: CTP_CleavageSite=5; ConfidenceScore=5.15e-01
MAHRSCSGPPKTFSPLFSLLCLWIHGPFPAIEFVVAPSSSLPNSGNPGPTLARVCLNFGDLSAAERSSAARSRSPLPGLIPSARSRSHGPNRGYRFAPTRLMPWPACQRPSPLALGQLDNEQSEVPECVVGDLPEQQPGEGKCPLTYYVLHTL

SEQ ID NO: 52070 - protein, 65 aa, Zea mays
  Coding DNA Sequence Number=SeqID_8695
MEFGTSRIFSGRVLEMQWLGYFGNGVGRAPGSLEDMVAGVTWPSILPPGWTVKWDPTSAEEEHEE

SEQ ID NO: 52071 - protein, 61 aa, Zea mays
  Coding DNA Sequence Number=SeqID_8696
DSKEHRIESTIRPRHDISQHRIQQLETQLEEERRERQEMEARIMAEWEATDQRMAEMFQYM

SEQ ID NO: 52072 - protein, 124 aa, Zea mays
  Coding DNA Sequence Number=SeqID_8697
MGKSKKGGSSSHHSGDKRKREPTPPSEDFGDSEYSEEEFSSESEGSPVHTSPPASSDDSDDSQGIAAEVWTYIRAVERAGLEGSDELEVSSDSSEEGGGGGDGEGDGGEGGGDGGSKGSNKASV

SEQ ID NO: 52073 - protein, 139 aa, Zea mays
  Coding DNA Sequence Number=SeqID_8698
MAARRAGRAVLSSLARSLGLRKPKGQAGSGAKNRHRTLSGVYKDQGEDGSNVPPGPDAGFKNAKRNDRSSNGSRTRNGSPANYSPRRINSATGQAALLAGATGDASPSPKQPHRKRDRERGIPRKGSFPVKEPGSEPPY

SEQ ID NO: 52074 - protein, 248 aa, Zea mays
  Coding DNA Sequence Number=SeqID_8699
MSWASWRRTHTVTRAAGEVKLMYGGGDAMEPVWEEITMGAAAESARGREKGGWGPAADRGELEEEVAKVGDRAEMRRGRTRRDLGRRRTRPKQLWTGGRDRQRGRATPGLEEEGEANCSAAKQRRSDARATGSGAGRLGAAQDTAGRAVPGVLGDTTGWGREGTVDRPQGAGVAVGKGRARRAWSSWRAQPGRVESRAADGRAGRRRLLGGRRLGGGAARRLWGSSPMAVGGREGRENGSGTKLEWKP

SEQ ID NO: 52075 - protein, 197 aa, Zea mays
  Coding DNA Sequence Number=SeqID_8700
MARNWGKEKSMRQGNKGGGSAQGGPELLMSVSSGSARDGNGFKTCGYRDYKPVPARLMLNPYPHPLPMTAIANYPSDSGVNKAEEVWADLGHWIRFERHRLNRQSNETGCVMAIYQQLNGLARPRRSGSQRSNPAPLFPDQRLACIFLLGPHHGNASSLDSGARGTLPPAHPHHDLLQPLTPNQDKVCGGAVPRTML

SEQ ID NO: 52076 - protein, 40 aa, Zea mays
  Coding DNA Sequence Number=SeqID_8701
MAIRVQVVARACPALLVNDRRPNIVGQIVANRKKRNLKNN

SEQ ID NO: 52077 - protein, 292 aa, Zea mays
  Coding DNA Sequence Number=SeqID_8702
MKKEIGSQPEYDGREFVEHGTEKCVMTVYIGSSPHHAEWSVTAAGHRFKDTCEVVARKALRALCQIYEEESGRHTAQILSALSKRPSVWDEDAEKRNRQLHVNLTTTQARVAALESHEVIAVEALKQAKDEHVQKLMEAYLVTHNQRRALRIQEPAPSNPVQPRRAEDPQILEGHPVSIRGEKKAWELPEGAIVLEGIPVSPQVMDKQEHPESSQDPPPELFEPLTIKKIPAPSREIKEEAASTPPAPPPSEELQESVPLEEEFDPMLPSQSLPEEVINISSLLTHPGDVSD

SEQ ID NO: 52078 - protein, 261 aa, Zea mays
  Coding DNA Sequence Number=SeqID_8703
MKSRMAPGSRSSEKFQLTSGSSSSSEPAGPEVETTVSRSQVDHIWYPGRSGYALTKALTEAGSLSGSKLNLKGTGWKTEGTYWCETNARQVPRKGAGVISPPRASVLLGSDTRRCLRCEDNARHVPRRGAGVIDSLWSDSRRGAASRLAMFAPSPSPPVRRVAGLTRVFFHHREMSSPSSPPLGELSTVVVVVLRREQYHVVAAVAGHELETPEAEHRPGLKRLLKIVHLELNGKVLSTRSVPLPGAPTVGVSDTGDPQPD

SEQ ID NO: 52079 - protein, 334 aa, Zea mays
  Coding DNA Sequence Number=SeqID_8704
  Homolog annotation: Hit_ID=Q6J9V9; Match level="QueryCoverage=41%, HitCoverage=47%, E-value=1e-50, Identity=76%"; Hit description =Putative uncharacterized protein
MTHPCSIPQTTRARATDAPRIARPIALTPWQGKRHLWQAKRAPFHLRHDDRVKKGIRKGDISKKDPSQRRKWAPALLLIRGSKVAPCGVRQPPQSTQAPSPLLIRGSKAGPSEGFNSHPRARRVRDDPGYVRYMAEARAMLPRYPRTFLRPAGTICNGIPPEGGTEPSNPIKWVRVQQITCRVRLTTVSHGLSRVQPRAQQGALPRPTPGLGLSLGLGGNSLPRPTSASRRVTSAPDLSLGLGRSRRLARPRPRDRLRYRGYIITLPLASRLRLRRNKTRVTSGLLWQQGLEQPTAIHASTSSSVSGVNVCVAIRATTTQQASVTSVTDTIMSR

SEQ ID NO: 52080 - protein, 568 aa, Zea mays
  Coding DNA Sequence Number=SeqID_8705
  Gene Ontology: Mol. function=protein serine/threonine kinase activity; Cellular component=nucleus; Biological process=protein amino acid phosphorylation
  Homolog annotation: Hit_ID=Q336S1; Match level="QueryCoverage=75%, HitCoverage=43%, E-value=5e-90, Identity=45%"; Hit description =Protein kinase domain containing protein, expressed
  Pfam annotation: Domain name=Pkinase; Domain location=419-568; Score=- 79.0; E_value=0.0007; Accession=PF00069.16; Description=Protein kinase domain
  Pfam annotation: Domain name=Pkinase_Tyr; Domain location=419-566; Score=-159.0; E_value=0.011; Accession=PF07714.8; Description =Protein tyrosine kinase
  Pfam module annotation: Pfam domain module=Pkinase::Pkinase_Tyr; Domain location=419-568::419-566
MVTTPTIIFTRESKQQPPATRVLDARRSQPWSRPVDIAMDLGWKRLFDVATCFGRGMLQSTASSWQAPTVKFGPSTAEVAGAVEADDRWRVHDDGEAPCTQNWGTVSSYEELGASPRKGEDRDGLAQEDSTPKLDQPLRGDDGTVIGNMSLTLPSGFSDFPCSANLPPLDAEKSKNINVEVDSKTNKISDSEQVSLLNCIVEDSDDLQNESVLPMASHDVLVGENKNEADEDQNLVCKNSFSLINHNTKAADGIEAFDMILNQADALQYHCLGDGHHQNAPSCVQEENPLGASAYAEVCKDKTTQTLFQPSMDNKAGSIAPQMNRDVQSEILPEETTRQDGMNMNPNIVSENRDIRYLNHGRQSLNKAEVNVSKSGRDKLAVKQNKCKKNEQPKEDKDHTAKTQNDHVAPKPLPSFKGFVVEEEEGSGGYGTVYRAQRTKDGNTFAIKCPHPNAHSHHVNNELKMLERFGGKKCVVKYECSLKSGGLDCFVLEHVEHDGPEILKKDITLLELQWYGHCLFRALGSLHKQGVVHRDVKPGNFLFCRKLKKGYLIDFNLANVSARTVLPT

SEQ ID NO: 52081 - protein, 71 aa, Zea mays
  Coding DNA Sequence Number=SeqID_8706
MATEKCHLDQIECLSVRRLLFDHLFFSCGGCETTRFIGSSNAGFLPDRHRSKINQGPPYTDHSPTALAPFG

SEQ ID NO: 52082 - protein, 127 aa, Zea mays
  Coding DNA Sequence Number=SeqID_8707
MVQNVIRKKQSMHILCQRFIYNYTKSTVRNTVNYSGQEKLFGRTGQARTVRALAADRPRHKNNPRTEPMQKHKYPLRTVRRKVKDRPSPRADRPASGADRPVAVDLQARTVRTRRADRPRSAEWPNG

SEQ ID NO: 52083 - protein, 266 aa, Zea mays
  Coding DNA Sequence Number=SeqID_8708
  Gene Ontology: Mol. function=oxidoreductase activity, acting on sulfur group of donors, disulfide as acceptor; Cellular component =cytosol; Biological process=protein metabolic process
  Homolog annotation: Hit_ID=Q336R9; Match level="QueryCoverage=89%, HitCoverage=88%, E-value=1e-101, Identity=76%"; Hit description =Peptide methionine sulfoxide reductase, putative, expressed
  Pfam annotation: Domain name=PMSR; Domain location=93-253; Score =260.6; E_value=3.4e-75; Accession=PF01625.12; Description=Peptide methionine sulfoxide reductase
  Subcellular localization annotation: CTP_CleavageSite=35; ConfidenceScore=5.41e-01
MPPLLTSPASLPSASPLLVSCIGALHRPGPFLHQRAAASVHFLAPHRKTRPPPAMSWLGKLGLSGLGGSPRASEASAALAQGPDEDQPAPGNEFAQFGAGCFWGVELAFQRVPGVTRTEVGYSQGNIHDPTYEDVCTGTTNHNEVVRVQYDPAACKYDDLLDTFWARHDPTTPNRQGIDGKCQGNDVGTQYRSGIYYYNPEQEKAARESLEKQQKLLNRKIVTEIVPAKRFYRAEEYHQQYLEKGGRFGFGQSAAKGCNDPIRCYG

SEQ ID NO: 52084 - protein, 25 aa, Zea mays
  Coding DNA Sequence Number=SeqID_8709
MGTNGHLDLDTGGSKLILRKFTLGP

SEQ ID NO: 52085 - protein, 97 aa, Zea mays
  Coding DNA Sequence Number=SeqID_8710
MDLDPATKEEERQLEDHNEAMDARQALMGFGVTHLDPIELKDFAGSRTGTSTDSMSPPASTIASAGGGSRKRSKVWNNFDELTNLVNGKRVSIGEST

SEQ ID NO: 52086 - protein, 366 aa, Zea mays
  Coding DNA Sequence Number=SeqID_8711
MMMMGTFSVTDAATTIDIAAFPVGRVRRVAGGGMDDCYSSNDKHRHSTPFCRHGLGMTQSSRWVPKAKVDSLGLTDGGGSKSGSIGVDNQETSHNPTASKCKVTNTVDLTNVFATIHNSLDSVLVLNTSIPAKALAVQPIEFLGSQLLNDNQAIDYNMPAADRVGLMCASIIHDLPDPVFQPVVSDNQPDFQLVDSDNHETLRASPALRTGNSSTDNTQLLDFIAAITNPPEPPLIPSPLKSSTTTSHPLKFQNQPTTRRSSVRLAAKKCIKTGSNRDAISKAQEIILAKLNNSTVKKSDCSSSSGFTDFDDSFEQIASLFTRPLSKKQMEAIMELKNQDNVKAVRTKKKGRKVVPAIKAVKAKGI

SEQ ID NO: 52087 - protein, 65 aa, Zea mays
  Coding DNA Sequence Number=SeqID_8712
MALRRRGIGVSCWRVVGVEAAVAVGADVVAAAGEPLGASYLGALLVLVRVAKLRVWTPLGCGSRY

SEQ ID NO: 52088 - protein, 158 aa, Zea mays
  Coding DNA Sequence Number=SeqID_8713
  Subcellular localization annotation: CTP_CleavageSite=39; ConfidenceScore=5.26e-01
MTVAGGQEQQSHRQPSSRPIRGQRENPLSRREDNAPVFRSSNGSRMRSGRAANHSPRRINFAGPGKGDTPKRILPREGTRLRASLLIRGSKAGPSEGFDSRLKSHGPYTHYWSEVRRSAPRKGSTATSGYSGSAPITDQGFEGWPPKGSQPPQTPSEG

SEQ ID NO: 52089 - protein, 234 aa, Zea mays
  Coding DNA Sequence Number=SeqID_8714
MQAACNRAKWTRFSDSRHAQHGGPGPRVTLAPEGFNSRLRSRGPYTHYWSEERSCNGIPSEGGIEPSDPVARGPGPADHPQLTGDTMFGAHRGLGGCSRKPGLGRTVDSVNVPARELGPRPYTRATASSHEGTTRPAEALRKALRPRRSETTPPRPRGLHPAGALARTHRNKRQPRKAGPLAKKCDESLQASANTPFEARGLLSGTIIRGTLKTPNSQLVTPISIKLQRPDGCD

SEQ ID NO: 52090 - protein, 108 aa, Zea mays
  Coding DNA Sequence Number=SeqID_8715
MGRSKKGGSSSHHSGDKRKHETSPPSEDFGDSEYSEEEFSSESEGSPAYASPPVSSDDSDDSQGIATEVWTDKGDGDDKGDGGSGKGDGGSSKDDGSSGRASGKAPLA

SEQ ID NO: 52091 - protein, 423 aa, Zea mays
  Coding DNA Sequence Number=SeqID_8716
  Gene Ontology: Mol. function=heparan-alpha-glucosaminide N -acetyltransferase activity; Cellular component=integral to membrane; Biological process=glycosaminoglycan metabolic process
  Homolog annotation: Hit_ID=A3A7I4; Match level="QueryCoverage=79%, HitCoverage=88%, E-value=1e-150, Identity=68%"; Hit description =Putative uncharacterized protein
  Pfam annotation: Domain name=DUF1624; Domain location=72-264; Score= -110.9; E_value=0.0078; Accession=PF07786.3; Description=Protein of unknown function (DUF1624)
MGAAAANAGASPESSGSGRPGAGAMGRYELVRSDDTPAIAVDLEAGTAAPRDDYPKRRGSAPSPAPAPTRQRLVSLDVFRGITVLLMIIVDDAGSFIPAMNHSPWDGVTVADFVMPFFLFIVGVALALAYKRVPDKLDATKKAVLRALKLFCLGLVLQGGFFHGVRSLTFGVDLQEIRLMGILQRIAIAYLLTALCEIWLKGDEDVDYGYDLLKRYRYQLFVGAIVGITYMSLLYGTYVRDWEYQTSGPGSIEKSFFQCSIDSPQNGPLPPDAPSWCQAPFDPEGLLSSVMAIVTCLIGLQYGHVIVHFQKHRERIMNWLIPSFSMLVLAFAMDFLGLRMNKPLYTLSYTLATAGAAGLLFCGIYTLVDIYGYRRPTVAMEWMGMHALMIYVLIACNILPIFIHGFYWKEPQNNLLKFIGIGP

SEQ ID NO: 52092 - protein, 140 aa, Zea mays
  Coding DNA Sequence Number=SeqID_8717
MDGGDGAACFCPLLQPAEAAAAAPAAEKLAGDEGAGGLCGSLGRPEWPGRLGKARGILWRGLGRDRGTGGGRFTTKRLGGGVNQLRRGIKRSREQQRGRERAEGVPYLKAGSGDSSVAAMARRRPGSAVADLHGCSEDGV

SEQ ID NO: 52093 - protein, 88 aa, Zea mays
  Coding DNA Sequence Number=SeqID_8718
MSIDWSSFIIENAENKDIGETGDMFRICDEDEMYAFLGLGDEDEEMNRTHPEPSNFASHFSSESNSFDPSDLDAAMPVDDENAEWLPS

SEQ ID NO: 52094 - protein, 51 aa, Zea mays
  Coding DNA Sequence Number=SeqID_8719
MAHRTVRCATGAPTVRHREDTAVDQPGPTWQRVHRTVRCTPDSPVPLSQKH

SEQ ID NO: 52095 - protein, 350 aa, Zea mays
  Coding DNA Sequence Number=SeqID_8720
  Gene Ontology: Mol. function=sugar:hydrogen symporter activity; Cellular component=integral to membrane; Biological process =carbohydrate transport
  Homolog annotation: Hit_ID=Q9FRT7; Match level="QueryCoverage=97%, HitCoverage=66%, E-value=1e-134, Identity=69%"; Hit description =Monosaccharide transporter 1
  Pfam annotation: Domain name=Sugar_tr; Domain location=1-329; Score =86.7; E_value=7.5e-23; Accession=PF00083.15; Description=Sugar (and other) transporter
MAPPRWRGSLTAGYQFFLALGVLIANLVNYATAHASWGWRVSLGLAGASAVAIFVGALFLTDTPSSLVMRGRADGARAALLRVRGPDADVEAELRDIAKAVEAARRGEDGAFRRMATRREYRPHLVLAVAVPMFFQLTGVIVLAFFAPLVFRTVGFGSRAALMGAVVLGAVNLGSLVLSTFVIDRYGRKVLFMAGGVQMVVCQVAIAWIMGAKIGKGGEAAMAHPYAVAVLVFTCLHTAGFGWSWGPLGWVIPSEIFPVDIRSAGQAMNVSIGLCLTFVQTQSFLAMLCRFKYATFAYYAAWVAVMTVFIALFLPETKGIPLESMGTIWVKHWYWKRFVHDGKQSNVALT

SEQ ID NO: 52096 - protein, 199 aa, Zea mays
  Coding DNA Sequence Number=SeqID_8721
MALSPLLLAERRRRGVCKKVESVLDRPLALCRGSGAALANPAPAKPLTASTYQPENLGPDRAPRLRPARMREQPDQPKCCECIKTSKESNHSSEASGATPGGVRLTAAKSGLRRHRKLRFARPQGSDSGSAPEEDELRFARPQGSDSGSAPEDDELRFARPQGSNLGPAPEDDELRFTRPQGSDSGPATEDDELRFARP

SEQ ID NO: 52097 - protein, 152 aa, Zea mays
  Coding DNA Sequence Number=SeqID_8722
MERLTIGAEGRGLPAGFPWKKWGHAGEEGLGAMAVVLGHGREMAGRGVSLGKGAMAVEEMELLRAEEYQGEEKGRRLLSCREQAPWTEARLEQARAREKELQRWRARRSLRLPVRRPCGGEDAMGAGAELPAATVRKKGAGKKKMAARGVDE

SEQ ID NO: 52098 - protein, 38 aa, Zea mays
  Coding DNA Sequence Number=SeqID_8723
MGLHDQVARRPVAGDSGVQHEQELIEEVYGIHDRLADG

SEQ ID NO: 52099 - protein, 125 aa, Zea mays
  Coding DNA Sequence Number=SeqID_8724
MESHDLRADGNHGLWVKCTTSRYFGTGGYEIDGSGYDYDAASPLQPNRILAEYVDVYSPLLYTPTPPPQVVSIATTAQAKMKLWKETSRSSKITTSSRCGLAATPSRLPVKAAVIYVSFPHFDLL

SEQ ID NO: 52100 - protein, 98 aa, Zea mays
  Coding DNA Sequence Number=SeqID_8725
  Subcellular localization annotation: CTP_CleavageSite=69; ConfidenceScore=5.15e-01
MQAACNRAKWAHLSDFQRAQHGGLGPRVMQPAHRMLRASNYTATHATATPPRLRNQYCDSRQPYARPSSASLARRDRERGIPRKGSFSVKEPGSEPPY

SEQ ID NO: 52101 - protein, 25 aa, Zea mays
  Coding DNA Sequence Number=SeqID_8726
MEMIFPPGFFTVMVHLVVHLATECT

SEQ ID NO: 52102 - protein, 137 aa, Zea mays
  Coding DNA Sequence Number=SeqID_8727
MTSHGSSDDGNALTHTDGLAREGFPRILWEVSTHPIGLFPFEREDDPMWKDRVEHAKDIWAIYPGQTAHLTVRCMNAKYRLQVMRGEAMSHLMALLEATKITLDNREELVVDLSQEMVEKVLQVEQLSTDIQEFFFP

SEQ ID NO: 52103 - protein, 116 aa, Zea mays
  Coding DNA Sequence Number=SeqID_8728
MPSWLRVRARLAQLQLLILSEDLEEPAKRVFFKLILVCSRKIGSRFLKKGESGGSTPHEDQDLKLKKQELELCQTGPKYNKMMQIFLDNGKKEFPTLSLTVYSKVATTTTTQKVVE

SEQ ID NO: 52104 - protein, 43 aa, Zea mays
  Coding DNA Sequence Number=SeqID_8729
MTTDRPQQLLHIVLFDPIAHISIGGRKISYPRDLKGILEMGSK

SEQ ID NO: 52105 - protein, 125 aa, Zea mays
  Coding DNA Sequence Number=SeqID_8730
  Homolog annotation: Hit_ID=Q6ERZ8; Match level="QueryCoverage=35%, HitCoverage=8%, E-value=3e-08, Identity=54%"; Hit description =Transposase-like
MVRRHGPDFDWRHEPVDPSVVYASGGGKAHGRYALFDGFIDSSSLMQQQGMTSNFPPPPQWSQFANTPVPPPQFTTPPTHIPAPRDKVTPEAGGSGSDPATGTGFVDSLFAFPPPGGGGGSEIVT

SEQ ID NO: 52106 - protein, 144 aa, Zea mays
  Coding DNA Sequence Number=SeqID_8731
MAGIYCDARDCLSRRVQPPARTAAWTFLSPVGEAKSSAKKRWVHKSQWGAIPKYPSHTATKIAACEMELGGPGKGDTPKRILPREGTRLRASLLIRGSKAGPPRGSTAASDRVGPTPTTGQRFEGRPPEGFHGRLRLLGLRAHY

SEQ ID NO: 52107 - protein, 152 aa, Zea mays
  Coding DNA Sequence Number=SeqID_8732
MNVCELTLAVSHPPQVKNRYHRMRRVEDAAITTYEWGPRVDPFRGALDVLADRWDPRLGASSPQISPTEASPSNLGRHDFRVSGYITHPRHAQFSVESGHHRLIQITISALVGMKVTTAGILVGAPSFELRVRPGGSVYPGGSVRGFTAFAG

SEQ ID NO: 52108 - protein, 28 aa, Zea mays
  Coding DNA Sequence Number=SeqID_8733
MARRWPGAAVADLRGCTGNGGYEMGHLC

SEQ ID NO: 52109 - protein, 384 aa, Zea mays
  Coding DNA Sequence Number=SeqID_8734
MAERYQLPRSCVPPTMRRKDGGYPHPGAWKVERRDAKGREKTWSPSERGRPPFKGNSPYVRPQPSRAESSPTRSKALPCGTGAGSRMSCKPAQSRRSQTAARGAHNRPAVTSDPPLSPRPTGGRGRAAMQAACNRARWTRFSDSQHAGMKAQAHASRNRRAGCCIQATAPPLAPPPRLFGCGTNVATRGDPAYDPAAPAWRDGQCSRKAPVIRSSNGSRTRNGRPANHSPRRINSAAGQAAFLAGEAGDASPSPDRERGIPRKGSFPVKEPGSEPPTDQRFEGWPPEGFNSRLRSRGPYTHYWSEVRRPAPRRAPRPPQATRAPRPLLIRGSKAGPRRVHSRLRRRARDDQGYVRYITKARAALPRGPGPADHPQVLLGVPLGP

SEQ ID NO: 52110 - protein, 113 aa, Zea mays
  Coding DNA Sequence Number=SeqID_8735
MGPNAGRTPFTDISNTSIKVSFLDNYSTIDFTNFATHVITDSTQTEDVVSFDMSIEALRCTFEHGSFGLGSSPRCEEVQGIRRMAQSRSYAQGSFGMIAEKETDLKMKRLFRP

SEQ ID NO: 52111 - protein, 114 aa, Zea mays
  Coding DNA Sequence Number=SeqID_8736
MAGRNKLAGAKGKWLAGEALSRVGNGVAYCCAWIAMCLDRRWRLSRCEGGCRRCIKDSRASEFKVMDERQNTAEIVWSAGGEGGDARTAEVGDDGAGWVRGRLLRTRAPSKVVG

SEQ ID NO: 52112 - protein, 132 aa, Zea mays
  Coding DNA Sequence Number=SeqID_8737
  Gene Ontology: Cellular component=cytoplasm; Biological process =protein transport
  Homolog annotation: Hit_ID=A2ZA76; Match level="QueryCoverage=33%, HitCoverage=12%, E-value=3e-16, Identity=93%"; Hit description =Autophagy-related protein 3
  Pfam annotation: Domain name=Autophagy_C; Domain location=2-65; Score= -28.6; E_value=0.0078; Accession=PF03987.6; Description =Autophagocytosis associated protein, C-terminal domain
MANVLKNHTALAQVTIEDHPHLLAGKHASVHPCKHAAVMKKIIDVPMSGGVEPEVDNDSHTDYRVRLYNGRRPWQYKLIIGWLEGVLADVVLEFDSLDPYLELGAVKQCMEFGSLQTRGYKWRHHNPYKLVP

SEQ ID NO: 52113 - protein, 404 aa, Zea mays
  Coding DNA Sequence Number=SeqID_8738
  Pfam annotation: Domain name=zf-CCHC; Domain location=303-320; Score =21.5; E_value=0.00084; Accession=PF00098.14; Description=Zinc knuckle
MMMKIINLQHHPLRTKKMSDVSERLRIFSLTLIEKSKEREDASHEGRRATSGTAVQLWSNPQRGGAKARRLQVSKFGMTLQAKINLQGREATDPHHAHHAHHDVCTKQKAQLKTLKNKLIRSQNDYKGLLEKFETFANLNCELSTKIEQLESSAPSTATDDSLIKKNEKLKAMLASSQEAIENLLGKMKILSIHNDELTTKLENIGSTPEVFLIEIPAIIKKDASTSYFDLIDDSNPCSQVLVKNVVIETCSDEIAMENEQLKQDVARLGKALYDKKAKAKQIQPPQDNTIAGVNKPVEGETVICRLCHKEGHMSFQCKAKTGDKQKQKLKKKRTSKISNTYINKVDKKSATPYLIKKKKNGKVIAIKASKQANKGKGAKRIWVPKEIISTMKSTKKVWILRGK

SEQ ID NO: 52114 - protein, 127 aa, Zea mays
  Coding DNA Sequence Number=SeqID_8739
MPQHRQVGPAHQPAGRAFDTAGPLRGGTRYPDHLSPSPSPQGEIKRGEPLFPPYASASGIALGRFKVDSALLAAGASIIGGRRSTGTSHAAASVMVLGKKGGTTSAECKTGILAVLAVMSSSGLLHD

SEQ ID NO: 52115 - protein, 92 aa, Zea mays
  Coding DNA Sequence Number=SeqID_8740
MNAHGYRCNNDFCLHISKDMKLHHTPSRATYDAQCTETTDQAKDGGKKSFEVPSAWEKVKETRNPKSGVKKKTCKVKVDRVKKSYGASRITT

SEQ ID NO: 52116 - protein, 166 aa, Zea mays
  Coding DNA Sequence Number=SeqID_8741
  Gene Ontology: Mol. function=helicase activity
  Homolog annotation: Hit_ID=A3C4B7; Match level="QueryCoverage=36%, HitCoverage=4%, E-value=2e-11, Identity=49%"; Hit description =Putative uncharacterized protein
  Subcellular localization annotation: CTP_CleavageSite=28; ConfidenceScore=5.58e-01
MTEIIMGRSVFSSLSRCNPSSQGVSLCRSSLYGSFGVASVLIFRRCFFLQDLRRRSRPPTITIPGARISHDTKAYINTPILVVVFQKILDEETDEDIEIDGIQDESSSTDVPDLCDKVYNNLSKEIHMLKLVPDYDYCTTKKFECEPPGFCCRGGKVELAPLETPP

SEQ ID NO: 52117 - protein, 88 aa, Zea mays
  Coding DNA Sequence Number=SeqID_8742
MEQSGLGYLHKSSNWYLKLYPFGSGALNWYLNETTDQAKDGGKKSFEVPSAREKVKETRNPKPGVKKKTCKVKVDRVKKSYGASRITT

SEQ ID NO: 52118 - protein, 124 aa, Zea mays
  Coding DNA Sequence Number=SeqID_8743
  Subcellular localization annotation: CTP_CleavageSite=58; ConfidenceScore=5.33e-01
MAPKRASSKAAPSVDEAAKAALLAKKKARPLQTPPTKKPAKTTPSARDSTMINQLPMVASAPAAPEDSHRNHPQAKVRQMIRDEEQRAQELEQEIALMQREGQQDLQHGPPLQQRAPVGDLFIP

SEQ ID NO: 52119 - protein, 211 aa, Zea mays
  Coding DNA Sequence Number=SeqID_8744
  Subcellular localization annotation: CTP_CleavageSite=64; ConfidenceScore=5.45e-01
MACTPLARPAPTSARPAHVARALSKAPHTPLAHPCPTYALRPPSHSSSRGAVAPSSSPPRSAVVARLLPVLWPRSKFAAVAILQRPANWSLPVPRQVTPSPVLSDLATVEEAPQVNACAPRHWPRLTIPRGSPLRCGKYIWAVERSGLEDSDESEVSSNEENSSDSSEEGSGDDDDGEGDGDNEGDSDGDGDCKGDSSSGSGKASGKAPLA

SEQ ID NO: 52120 - protein, 75 aa, Zea mays
  Coding DNA Sequence Number=SeqID_8745
MRKILPKVEVKQRERRKKHLVCCWLVHMTVNSSMSGAQSAVKKIVSSHDIVVTDINIVEGSIYRTDRSEQTEEGV

SEQ ID NO: 52121 - protein, 272 aa, Zea mays
  Coding DNA Sequence Number=SeqID_8746
  Pfam annotation: Domain name=zf-CCHC; Domain location=135-152; Score =4.7; E_value=0.3; Accession=PF00098.14; Description=Zinc knuckle
  Pfam annotation: Domain name=zf-CCHC; Domain location=154-171; Score =11.7; E_value=0.026; Accession=PF00098.14; Description=Zinc knuckle
  Pfam module annotation: Pfam domain module=zf-CCHC::zf-CCHC; Domain location=135-152::154-171
  Subcellular localization annotation: CTP_CleavageSite=47; ConfidenceScore=5.76e-01
MCFPAPTLPSLPGASPSPPHSPTLVPSPGPAVTPSSPLALETASVPLAAGRSKAIRWRDDGSPTSSPVVSPGLHQRRPSYKEALLLPRPAPFLGREDDNGAGWVTVEGRQARRRRLRPLKSPPLLPRTMPFDLRGKCFNCFSSSHRVVVCRRLVRCFCCRLPGHRAYMCPRRRSGAPQPQRGLVWRHVSQSSGMAGSEDSLADRVEVGGEDDGGRLKKRTHCVQRRRRPGNQRDSNDQEAAVAVPSQRRADQSHDLAMGKPRRIIKHTRKIL

SEQ ID NO: 52122 - protein, 637 aa, Zea mays
  Coding DNA Sequence Number=SeqID_8747
MDKDRQGAARKRQATVRVHEARPKRQRGTAKAEASGGRQAARCRRRVGASTPGKAPEVTVGAGGPKLTKVVPSVSGVAEAAKAARTLPPPGKRVADFGTEINVEDYLGGSDEGPLALVMPGAAIATAAPAPKAGGEALGAGGEVSALALGGLTSPAAPRRGALTTALSAEVERLRAQHADAVREKSASDSKCRKLAEKVAALEKEKADFRRQLAGERREANEAIAKEQAAQAEARLARAEGNIAKELAGELQRRLTALESRAEGAEAAMRAEAERTRTQLMTAYRELCVRTGDFEVPEREAGLRCLEWVQEELQELPTVLAGLMSFTSLVTCEAAMNALSREGCRHFEALDQADEDFGRDIFEVEDPVVKESGGALYDPDAERGERVDDFGALNSVLPDPETTPAEAATGVAPGPTPETAEDAPGAPAPAAAGEDLPPKVAEGAPDAPAAAVPSAEDPAEVGAEAAAEASAEAPAAAGPSQVQDFGPAHATATTEFLAASTAEDGNEYGGSVSEFFDFTDSGSSVEWTEESSEGDLDYFAALDVAAAEAASHAVDAPDVPGPSTGHRRRRAVAKRRISAEEGARLRVSRAGRQELLSLPAAAGAGEGELRSLFAGEELRIMLFNYREMGIIPKVEPM

SEQ ID NO: 52123 - protein, 179 aa, Zea mays
  Coding DNA Sequence Number=SeqID_8748
  Pfam annotation: Domain name=SlyX; Domain location=89-156; Score= -8.4; E_value=0.06; Accession=PF04102.3; Description=SlyX
MKTLMTFCGYHPLEMVMHPLGLFPAEKKDHPMWCNRVSHVKDVWVMYPDLVGRVTVQVHELPSSLLTVGKISWSTYPRSWWEKDLQVERLSQRIATLEQQVEIRDNTIDVLENQLHDVQRELEEANDHLDMHHLEMEANEAGSEGEEAPEELGPAPGANGTTSAKPPSPVSSVASTAQG

SEQ ID NO: 52124 - protein, 103 aa, Zea mays
  Coding DNA Sequence Number=SeqID_8749
  Homolog annotation: Hit_ID=Q2QTA9; Match level="QueryCoverage=58%, HitCoverage=13%, E-value=1e-12, Identity=58%"; Hit description =Putative uncharacterized protein
MALLPPVFPTSDSGTPGMAGRVQDFITLRIGSLWLDVPLGPLHASDSAGSLCTTAASPAMIGLEQEVNSKPHDGFIPVVSKAAKRRARRMAARSRVSVSQEHP

SEQ ID NO: 52125 - protein, 42 aa, Zea mays
  Coding DNA Sequence Number=SeqID_8750
MEKCKPIKTPMPTNGHLDLDEGGISGTPQALVCGIPKELLLT

SEQ ID NO: 52126 - protein, 210 aa, Zea mays
  Coding DNA Sequence Number=SeqID_8751
  Homolog annotation: Hit_ID=Q6QP51; Match level="QueryCoverage=22%, HitCoverage=21%, E-value=9e-14, Identity=77%"; Hit description =Putative growth-regulating factor 1
  Subcellular localization annotation: CTP_CleavageSite=46; ConfidenceScore=5.66e-01
MAAAGGRRQQSNRLQAHVPSWGSKGALSHGVKTTRPCSVPRTTRTTAAPRTTRPVALTPRQGRRHLWQAKRATLHLRHDYRVKKGTEKGDTPKGILLRKGSGPRALLLIRGSKAGPSKGFDSRLRALGLRAHYWSEVRRLAPRKGSTAASGHSGSAPTTDQGFEGCPLGRVRQPPQSTRVPHPLLVRGSKAGPSEGFDSRLRPLGLRAHY

SEQ ID NO: 52127 - protein, 487 aa, Zea mays
  Coding DNA Sequence Number=SeqID_8752
MTMVKGETNLKEKRLLSPRQLALWSAVNVRDINARRLLGDPDVACRWIGQDALNAERATRHAAVAGFCLSGERRARPGHVSAPDPCLCRGPFCPGTLPRLGPHSGGPGMSPRELRARAYRGPVFLCGGPDPTVLLGTYHPSSPRGALRPAHVAGVVCHSLCDQEVSYRWGQSPIGGWLAAPVRLLIEDEGALNRGAVACPFLYDMWGLAPVSKGGNLGRSATPLELASFRHRSASRIFITQPGRNLRPVVIHKDDYQPYGGEKRVGLWPPPCPQLQGCSSSALGRRASRVGAPPFARAGGPLLPPAFGGEGRSPALLRRRTSATRGRRSEAPSAAVCLAPRPGWLWCRLRRCLLSLGRGVAVRPPHERRSRRAQVGHTHDFSRIAGRTGGSYKTSEDGSEDLFARAGAAAVRRYGNSVQVAAVVGVEVVAVAEVVATVGADVVASAGEPLGASYPTALTDVEGGGACRPTVRDQAERLHGLRTTLGD

SEQ ID NO: 52128 - protein, 371 aa, Zea mays
  Coding DNA Sequence Number=SeqID_8753
MEAQAHMSCNRRNGYYMQGNRTATHANAASTRLQNQCRDSRQPCADRERGYFEKGSFPAKETGPSPPTDQGFCNTRVLGVQSPGVNIITSKVLGARIPRPSEQRTGPRVISTEPEGFIRNKARSERMVLTGNLGVIPPGHDTRRTDGGASSTARNCGVASPQSTTERARAPPVRPPEVPRPKYETPPVLVTRVDGSGQEIGWTTAAAGLTAIVGIGRTCTGPTGLATVSSAEVHAEPLRAAGAHKTEREAESETEICYGLLRSGDEADSGPEFEGCALRGSATAPEHSGSVPFTDQGFEGWPLGRPRAQQGAPPRPTSGLSLRLGLGRRPPPRPTPGLGPSLGLGLGRSLRLARPRPRTDYATGETSLPYC

SEQ ID NO: 52129 - protein, 717 aa, Zea mays
  Coding DNA Sequence Number=SeqID_8754
  Subcellular localization annotation: CTP_CleavageSite=67; ConfidenceScore=5.41e-01
MTEPRDSYASGIRIPHSSPSAISNSRSDKVIPRTEQVFTFGSSSAKAILRAFSTESVTGPHGRVKVRVSGKADRAEGLPRLRDTDTSLITFREKQLSPAQTSLRHALQDNLILHARVLTLEGGGSTLGIDDNFGEVRPSLGRRRGPKTSALKDDVITTPGPSPLGSSPGIRPEQAARPVTSEASANHLPRAPARPGASAANPASVHADIATPGLGSSKSGQGVRTTPLDRGGPAEQQKTDERRAVTCPSSSDDDDFCSEGPNNGSTNLRADAAARRPPPMPKLVRQGWAEGRRVGGRSVASLGYLAGGRTSSSCRGRRRRRERLRSHSRLRARHGAAAGATDDDRPSLRSLSEGAGRRPRRGRLQLGTLPSPALVMKILEAEGGAEAAARLAFPHHQAGDQRAKEAGSHAGGMQPRQVDALLRLPTRPAWRPRPTRHATGAPDAACKQLHRHLRHHRASSVAEPIPRLEATRHTTQQRQPGMTVNAAESGPAVMTAAGGREQRSRRQPSSRPIRGQQENLLSRREDNAPVIRSSNGSRTRDDRPANHSPRRINSAAGQAALLAGEACDASPSPLAPRGVQQPPQIAWALHPLLVRGSKAGPPKGSTAASGYPGSAPITDQGSQETPCSAPIEGNMALSPLLLAERRRRGVCKKAESVPDRPLALCRGSGAALANPAPAKPLTASTYQPENLGPDRTPGLRPVRMREQPGQPKHCARH

SEQ ID NO: 52130 - protein, 684 aa, Zea mays
  Coding DNA Sequence Number=SeqID_8755
  Gene Ontology: Mol. function=protein dimerization activity; Cellular component=nucleus; Biological process=regulation of transcription, DNA-dependent
  Homolog annotation: Hit_ID=Q9AV47; Match level="QueryCoverage=99%, HitCoverage=94%, E-value=0.0, Identity=69%"; Hit description=Auxin response factor 22
  Pfam annotation: Domain name=Auxin_resp; Domain location=271-347; Score=120.0; E_value=7e-33; Accession=PF06507.4; Description=Auxin response factor
  Pfam annotation: Domain name=B3; Domain location=114-219; Score =116.3; E_value=9.4e-32; Accession=PF02362.12; Description=B3 DNA binding domain
  Pfam module annotation: Pfam domain module=Auxin_resp::B3; Domain location=271-347::114-219
MKEVAEERCLDPQLWHACAGGMVQMPPVRSRVYYFPQGHAEHAHGGGAADLAGARALPSLVLCSVTGVRFLADPETDEVFAKIRLVPVAPGEVEFREPDEFSVDPADAREKLSSFAKTLTQSDANNGGGFSVPRYCAETIFPKLDYRADPPVQTVLAKDVHGEVWKFRHIYRGTPRRHLLTTGWSTFVNQKKLVAGDSIVFLRTEHGELCVGIRRVKRVSCGGMECMSGWNAPGYGALSAFLKDEEGKMMKSHGGYMRGRGKVKITDVVNAASLAASGQPFEVVYYPRASTPEFVVKAASVQNAMRNQWCPGMRFKMAFETEDSSRISWFMGTIASAQHSIVHPYIERNPGTNNNIDIALVYPIRNLLFFVCPYPSTFSFLGIALVAWDEPDLLQNVKCVNPWLVEIVSSIPPIHLGPFSPPRKKLRVPHHPDFPFDGQLLNPIFHGNPLGPSNGGGALRCFSDIAPAGIQGARHAQFGLPLTDRQLNKLHLGLFQGGGFKRRLDAITPPCPISRGFVIGSAPVDESVSCVLTIGTPRAAERSDDRKKPHLMLFGKPILTEQQMSSRGSRETLSPEATGNSSDGSVQKTGNVSDGSGSSICIGSSSRGREASRLGFEFEAGHCKVFVESEDVGRTIDLSVFGSYEELYGQLADMFGIEKAEVMSHLCYRDAAGAVKRTGDEPFW

SEQ ID NO: 52131 - protein, 593 aa, Zea mays
  Coding DNA Sequence Number=SeqID_8756
MAGYPGQDDVDRRGKKPAAETGDEPAPAAAPSSKKRKLGTAMGGLGVSDSFAMELMGTCTAPGGRMSSLELRESSAQMLKVTGGWWPKNVPIPRAASEDFFTSRMVRDFRVFPYGRNIAGVVSTVMDKDRQEAAQKRRAVVRLPEARPKRARGTAKAAAPGGSQPTLAAKSAGPRSSKVLDVVKAAGAGGAKSTSAEAAKARELPPPGKRIADFGTDISVDDYLTVPVAKGGALSAGGEISALAAVKDEAGAVSRRLKEASQRLSQAADFADRVASVDRLRAQHAEAVREKSAADSKCRKLAEKVAVLEGERTELRRHLAEERREANQALAKAQSAQAEANVARVEGSLTRQRAEEWEERFNALQARVERAEASTRSEAERAHKQLMDSYHELGAWTADFEVPDRESGLRCLEWLQEELLALPTIVEGFMSYASLVTCEGAMNALSHEGCRHYEVFDRSDEDFEREIYKVEDPVVKESAGALFDRMWGPHDREVVRERSDTVRGQAARDEKVDDFGALNSVRPEAESNPVAAGPEVAPAPPTETVEGSPDAPAATAAGGGSSPTAAPTAEDPSKTAAKPAVEDPAAAGSSQVA

SEQ ID NO: 52132 - protein, 99 aa, Zea mays
  Coding DNA Sequence Number=SeqID_8757
MGPVFAHDEPTKSSKAIVNELAIQADYMDDMVERENDEADVETTPVREDVETALVRCQRHYKTEEDLIDVTPLEVVAEGKENNGLEDVCHTQFWKANRM

SEQ ID NO: 52133 - protein, 69 aa, Zea mays
  Coding DNA Sequence Number=SeqID_8758
MAIALLIWPLKGTVRGEDGGGIERRVASSPSPQHLPSEGPVRLSHLVPKTSLDGGDAALARSGSAGFLT

SEQ ID NO: 52134 - protein, 450 aa, Zea mays
  Coding DNA Sequence Number=SeqID_8759
  Homolog annotation: Hit_ID=Q6JAD6; Match level="QueryCoverage=78%, HitCoverage=70%, E-value=3e-22, Identity=61%"; Hit description =Putative uncharacterized protein
  Subcellular localization annotation: CTP_CleavageSite=57; ConfidenceScore=5.26e-01
AHCSLRSGGYLLIAGDLPSPASTVLRRPRPPAHIPSPSVILPAREPSPILPGFSPLVCQVRMPRTKNVSTPGGGDDEDPRRPFKQVKGKTVYLEQQEGHKKRHCIPSSSPRLPVSLLHSHHCFHSTTHFDCSHHPCCAIHHHSHTRYLHYTSFHCSSSRSRSRFRSSYPTTSIPGSAMRLRYDHLLRIPDFLTSACYSGTEGDPDAVDLFSTRIQESFFRAQMSAQIDLCVHRLLDLPAFLLAAGADSEVHHSYLPSLLTLLTTSGRFASYLDFTSHRLIFTAYATAPLTLLVALTVVLLRLMRRTLLPWMGYREATTHIHLWLLGALVSHSEFDVVDFLICEIEDTVLDAPEHPVPAPALVFDTQAKDTALHQFKAQDAAVDDDDDDDDDDDFGIPPPPPPPMPPRSHDHEAGSSHATPAAPPAIDPALASIFQTLTQQQAQLAAEQTR

SEQ ID NO: 52135 - protein, 231 aa, Zea mays
  Coding DNA Sequence Number=SeqID_8760
  Homolog annotation: Hit_ID=Q6JAD6; Match level="QueryCoverage=50%, HitCoverage=15%, E-value=2e-15, Identity=47%"; Hit description =Putative uncharacterized protein
  Subcellular localization annotation: CTP_CleavageSite=24; ConfidenceScore=5.59e-01
MALMIQNSGVSIPPVQSAPPPPLQASVVPAIQSGHPLPTIGLSSSPLRLVTLALTSPVLSSVCPQPSVAPASAVTTTSVVVSVTTSDPIASVAPPQSESVPAPASTADPGSETDSDPQEPPTTPAACARGQGSSDHLRRRPAHRRDRRDLPDVTDHPAGALLPPNNHPKMFKPILLDSGNYELSDCNLADGEYILVPEQGAAQEVAPDPAPEPAPEDLPATALEGKPRFYA

SEQ ID NO: 52136 - protein, 37 aa, Zea mays
  Coding DNA Sequence Number=SeqID_8761
HCGTGGNEIDGSGYDYGAGEGEAVEGDFQEFQDYDEF

SEQ ID NO: 52137 - protein, 36 aa, Zea mays
  Coding DNA Sequence Number=SeqID_8762
MAIALLIWPLKGTVRGEDSGGIERRVASSPSPQQRD

SEQ ID NO: 52138 - protein, 107 aa, Zea mays
  Coding DNA Sequence Number=SeqID_8763
  Gene Ontology: Mol. function=RNA-directed DNA polymerase activity; Biological process=RNA-dependent DNA replication
  Homolog annotation: Hit_ID=Q8W1D4; Match level="QueryCoverage=44%, HitCoverage=12%, E-value=3e-08, Identity=47%"; Hit description =Cinful1 polyprotein
MDFETKRQKRDHYRSVNHVALTGPVVQTRWSHVPLTFDARDVDLRSAPHIDAMHPMHEVSRSLSISSTWYTHLGQGSINKFEAAIHGLYLCMKILGPQGVITVYGNQ

SEQ ID NO: 52139 - protein, 182 aa, Zea mays
  Coding DNA Sequence Number=SeqID_8764
MAAGGGHHSLRKQREPPIVIPEERPHKTTCWHTKPPLMEGDETQHVPRRRVRVSPARRDHPLRPQDIREGAEQAIGNKGLQVVHRDSGRRPWVARRNDGYSAGHRQAKEVAAGRTRTGDTFGRQSGRRFTSAIMTASKKVRHVVQFSILFLFPFLSLNTWTGKRDTLKEVHLAKETGLEPSY

SEQ ID NO: 52140 - protein, 110 aa, Zea mays
  Coding DNA Sequence Number=SeqID_8765
  Pfam annotation: Domain name=Elf1; Domain location=1-59; Score=4.2; E_ value=0.082; Accession=PF05129.4; Description=Transcription elongation factor Elf1 like
MGKKAPKLDTDFTYPLCNHPDIVQCTIFFKECRLFVVASCSVCKETYATKQGSIYTPGHLGTAPRQSAWGGKTRQGTRQAFHVGDTVIPVGRRREYVIPVGQYRADGNKG

SEQ ID NO: 52141 - protein, 110 aa, Zea mays
  Coding DNA Sequence Number=SeqID_8766
MAGLAGLRWQGLGWPRARRVWANGGELSSGECSNVARGRKRANLCKSPAQTSSWHLGLSLNCETPGQIRPREGDLRVPKQVKPDVVFKEAALNSTLNLQYSKECMRIELV

SEQ ID NO: 52142 - protein, 175 aa, Zea mays
  Coding DNA Sequence Number=SeqID_8767
MAGAHLGTQDYDHMWKNLRSKSRICPGVSQLSDSPRCQEEVCAGLLQRFARLRPLATFEHWKKQTATCSTPSAAPEHARARARAAPKPSQCPAIPNPVQPSEKTVHVSVKLPERGIGLCFTGEADPRSPDFNRPPATVDRGSLEDMVAGVTWPSTLPPGWTVEWDPASAEEEHEE

SEQ ID NO: 52143 - protein, 212 aa, Zea mays
  Coding DNA Sequence Number=SeqID_8768
MAAIDEDWSRERHQGTDERGLGPWAPELSSRRSCQKRARHTRLEEERVAQSGLGAASMKLDWGEVQALVLEIQGDRYGEHTKKEVPTEEKLDSLGKKHEGKTLSKEVKISGDKHKEDKEESTDSIKSHKNKGDKKKKKMTKVVYYETDSFASSTSDAASTSSKCQVSGTIIRGTLKAPNSQLSRSDRRNFAAPLTGLTEGQRRLRRSDCGAT

SEQ ID NO: 52144 - protein, 124 aa, Zea mays
  Coding DNA Sequence Number=SeqID_8769
MGKNNKRKHEPTPPSEEFGDSEYSEEEFSSESEGSPAPIPLRESSDDSDDSQGLAAEVWTYIRAVERSGLEGSDESEYSSDEEDSDGGDEGEDDDDDDDDDDGDGDGSGSGRGGGDGDGSRDST

SEQ ID NO: 52145 - protein, 171 aa, Zea mays
  Coding DNA Sequence Number=SeqID_8770
MAERYQLPRSCVPATMRRKDGGYPPSGGLEGGKTQCIREREDMVAFQGGHPPFKGDSPYLRPQPSRAESSPTRSKGPGKGDTPKRILPREGTRLRASLLIRGSKAGPSKGFDSRLRSRGPYTHYWPEVPRLAPRKGSTTASGYSGSAPTTDQGFEGWPPKGSQPPQTQSEG

SEQ ID NO: 52146 - protein, 26 aa, Zea mays
  Coding DNA Sequence Number=SeqID_8771
MQLHTLRDDVVIYPQRCLLLVKGSGK

SEQ ID NO: 52147 - protein, 109 aa, Zea mays
  Coding DNA Sequence Number=SeqID_8772
MTTGRIRVGYNKYPHATIPTGTSHTRPQLYPREQLSTDIQELEELVGTRENTIEVLEDQLLNTQQQLAEANEHLDMHHQEIQDQEANEDALREEMSLPPVWTLLARTNL

SEQ ID NO: 52148 - protein, 752 aa, Zea mays
  Coding DNA Sequence Number=SeqID_8773
  Homolog annotation: Hit_ID=A3BQI5; Match level="QueryCoverage=39%, HitCoverage=29%, E-value=4e-19, Identity=28%"; Hit description =Putative uncharacterized protein
  Subcellular localization annotation: CTP_CleavageSite=83; ConfidenceScore=5.28e-01
MSVWQRIGPQLPPSKFSHSPAAEASLVESNISSHSGKKRRRAKRHKEVSWQSTAPVGAASTLEPSPGVGTQSRVKTCVLEFSTAMAREEAALRRALFVSIVGSRPEISGAEVRDEVARAFGIDVNSISIHQSLPEDFLLLLPDESLADRVFSGGKLFRGPLFNLQFRRWSRLAYAEAARLPALVEVEVHGIPAHAWDRSTAEYLLRDSCIITDIHPGTSLKNDLSSFRLRAWCSNTDLFPRSMKLLIVEPGTEVQEKRCLSYDIEVAVTAVMVPTNFDPPPTHSPAADGRDRHEDGGDRHSDDPNSPRPDDGRHQRPIFQRLDPRGQSTFGGRGAAFQRCALSAASPTEGIEVVASPTRLTIGAGAEEDLAAGVEEARRLHCPLPSLLVAAGVEEVPPPVRRLAVNSVAGVEEVASSMGRAVYSPSLLAAGTGTEAHIGRMLAADTGTEAHFGGMLAVSTGAEVHTGSMVAVPAMDVLAIQMELTAADMGTGLGTDCSKVGPVGCAVDAPVVQQPQMDGHRGPMWTRLAGSLKSLGSGSPRQRFVGLQRLTKTVSPRNSFNVGIELVPRLPSTQSLVGTSEADRNSPAGMSLDAQVLESPRLKVYSRLKKGRLQIPTSVSSQMEVSAPVLDLVPAGVSSQLEEATPVMKLVANITRDIDCLLPQPPIQKRRTKQLPPDFVPRRSSRLSKKREGLNSTVRQVQAELMLKLNVTNSQVVVTDEMLEEFGQLFDKPLSNSYIKAPGSFVWMAGPR

SEQ ID NO: 52149 - protein, 153 aa, Zea mays
  Coding DNA Sequence Number=SeqID_8774
MGKNNKRKREPTPPSEEFGDSEYSEEEFSSESEGSPAPIPLRESSDDSDDSQGLAAEVWTYIRAVERSGLEGSDESEYSSDEEDSDGGDEGEDDDDDDDDDDGDGDGSGSGRGGGDGDGSRDSTKGDSSRGSTKGSSRGSTKGGGGSRGRASG

SEQ ID NO: 52150 - protein, 145 aa, Zea mays
  Coding DNA Sequence Number=SeqID_8775
  Gene Ontology: Mol. function=RNA-directed DNA polymerase activity; Biological process=RNA-dependent DNA replication
  Homolog annotation: Hit_ID=Q7XBD9; Match level="QueryCoverage=30%, HitCoverage=2%, E-value=4e-09, Identity=68%"; Hit description =Putative gag-pol
MESTWFRDKCILLKYASVAHPRVNGQVEGDNGLILEASSKKVFDKNENLQGQAGDASLTLVGKAFIEGFYWSTTKRDGVDLKCILLKYASVAHPRVNGQVEEDNGMILEASSKKEIHHPSTPQDSREECKVIEHEILLVEEYPTN

SEQ ID NO: 52151 - protein, 421 aa, Zea mays
  Coding DNA Sequence Number=SeqID_8776
MAHEEKGKLAEISNLKLGYQGGGAQGSRAARHRAPRAAGKNKRAKRGKTSHWIVVGGQIRRGKPSTLALSLALCTSPGSSAAAHRSPPSSLRLARCLVEFHLVVSNSGHLSVRPQPFWFAWFTLTGVFSVQPVSATVDRRHHRVPTVPPRTHEFALESSSAPPLDRLAVFRALWCPRTDKEQPVVPECVAKELPEQQPGGGNHLERLHRRLHKEQERRCQEQEQQDSSPSPQQEVESGRQPSPAPQPEMPPAPPQGIPAAGGDLDGDRDNDDAGGSSSNNTELSEEQEPEGWIARPITRDAARGCHFHDALDTLLHRAFDRHTWSIEYYCVVYQHRHGLYSDQWELLAWCAVRTMISGGVGDGLDLKYYPHRSTGSAGGVIVSPVGEGNPRLNNMHPYRSSPRGHFDYGTPNCRTQIDLDP

SEQ ID NO: 52152 - protein, 48 aa, Zea mays
  Coding DNA Sequence Number=SeqID_8777
MYPSTYCTHLHPKSLTSKHEFRILPNPVLKHRELNPAVVSPTQVIGVA

SEQ ID NO: 52153 - protein, 82 aa, Zea mays
  Coding DNA Sequence Number=SeqID_8778
MAGGALGHSQGEGTGHTACRGYCCAGLGGSCRPCRAMGQDGLVAVAWTFRYSRPIDAILEDPLDLWVMGPHTLSLRHLDLVG

SEQ ID NO: 52154 - protein, 25 aa, Zea mays
  Coding DNA Sequence Number=SeqID_8779
LGAIDLGAELDATSTPRQLVDDCVS

SEQ ID NO: 52155 - protein, 110 aa, Zea mays
  Coding DNA Sequence Number=SeqID_8780
  Homolog annotation: Hit_ID=Q8W1D1; Match level="QueryCoverage=34%, HitCoverage=2%, E-value=2e-08, Identity=73%"; Hit description=Gag-pol
  Pfam annotation: Domain name=RVP_2; Domain location=60-110; Score= -59.3; E_value=0.043; Accession=PF08284.2; Description=Retroviral aspartyl protease
MKIKKKEFLSLKQGSISVSEYRDRFIQLSRYSPDEVAEDERKIASTRVQNKHQTPGFGKGFSNARVNQVSADATADGADIAIAILFDSGATHSFISARYANTNELPLQNM

SEQ ID NO: 52156 - protein, 55 aa, Zea mays
  Coding DNA Sequence Number=SeqID_8781
MGSHDLRAKWESRLMGNVCILYRVLETGILAKLTCSGGDAGNMEDFEEFQDYDEF

SEQ ID NO: 52157 - protein, 257 aa, Zea mays
  Coding DNA Sequence Number=SeqID_8782
  Homolog annotation: Hit_ID=A2XFR6; Match level="QueryCoverage=67%, HitCoverage=49%, E-value=2e-10, Identity=28%"; Hit description =Putative uncharacterized protein
MPPAPPQGIPATRGDPDGDDDDASGSSSHDTELLEEQEMEGWITIPITRDTARGCHFHDALDTLLRRALDRHTWSIKHRCVVYQHRRGLYSDQWEATCLVHHPDDDLRGAEAFLEHYSITERDTAEAAMQDAARCALSQYCSLFSGVADDLNLKYYPHRSTGSAGGVIVSLVGEGNPRLNNMINLVAVLNTELDHALDEVGKVRAEVAELRAKRAAHHYQDGGSPAHVGIQHPYRLPPRGRFDYGTPDCSTQIDLEP

SEQ ID NO: 52158 - protein, 94 aa, Zea mays
  Coding DNA Sequence Number=SeqID_8783
  Subcellular localization annotation: CTP_CleavageSite=49; ConfidenceScore=5.45e-01
MSVRFLAMTHAPEPFLDPALVHSPFPAQLRPQPSNLALSLALRTCLGSSAATRRGLALVLRSQSSPCRIRCLGDSGHFPEYLSIRTCSLSDHPG

SEQ ID NO: 52159 - protein, 467 aa, Zea mays
  Coding DNA Sequence Number=SeqID_8784
  Gene Ontology: Mol. function=protein kinase activity; Cellular component=nucleus; Biological process=protein amino acid phosphorylation
  Homolog annotation: Hit_ID=A2YK17; Match level="QueryCoverage=94%, HitCoverage=84%, E-value=1e-127, Identity=53%"; Hit description =Putative uncharacterized protein
  Pfam annotation: Domain name=PPR; Domain location=141-175; Score =20.5; E_value=0.0065; Accession=PF01535.11; Description=PPR repeat
  Pfam annotation: Domain name=PPR; Domain location=274-308; Score =37.5; E_value=4.9e-08; Accession=PF01535.11; Description=PPR repeat
  Pfam annotation: Domain name=PPR; Domain location=309-342; Score=5.2; E_value=1.9; Accession=PF01535.11; Description=PPR repeat
  Pfam annotation: Domain name=PPR; Domain location=59-93; Score=34.3; E_value=4.4e-07; Accession=PF01535.11; Description=PPR repeat
  Pfam module annotation: Pfam domain module=PPR::PPR::PPR::PPR; Domain location=141-175::274-308::309-342::59-93
SISVSGGARAAQTLHPLALKSGRASEARVATALAVAYARWGLVAHARRVFDEAPRRDLVLYNAMVSCYASHGLAREAWALFAAARRSGIAPDGFTFSALLRPPPRRGRHPTAGAVDDGLLLRMGALAHSLVLRLGLLADVVVATALLDMYAKCGRVDEARWVFDAMAVRNVVSWNAIVVCYGRVGGGKDAVELFRWMLRDGSCCPDELTLASVLSSCASVAAANEATQVHAYAIKRGFHRFLQVANAVITAYGKTGFAREAGQMFAMICDPDVVTWSCMVSSLAYLGLCKDAVHVFERMLQQGVQPDSVAFLGVLSACSHAGLVEEGLHYFLMMARGYNIDPNSQHLACLVDLLGRAGRIQDAYNIVIKLSCENNADIVGAFLGACKLRGKIELAKWAADRLLCLEPSEAVNYLLMSNAFAAAGAWNELAEVRSVMRHSVVDAFIGCQYRHRPWHPPRPNRGYIGLF

SEQ ID NO: 52160 - protein, 239 aa, Zea mays
  Coding DNA Sequence Number=SeqID_8785
MGGGREFGRDTRRSEVKKKHWPLIVTPGVLQFKDPAPAPAPTGEADPKVVAEPAAEPAAEDPTAMAGPSQVLGSGPAHATATDNDIFVVASIMATDEDSFGYVSKCFESDDSGSSIAWMEESSDEDLDYFAALDVAATEPSPRAEGSKELPGVSTGYRRRRAVVKRRVSEVSRSGKRYRSEVERGRLRVGGTGKRELLSSPIGVSVGEGELRNLFEGEELRIMLFNYREMGTIPKVEPM

SEQ ID NO: 52161 - protein, 178 aa, Zea mays
  Coding DNA Sequence Number=SeqID_8786
MGKPPSTRGWGGNPDGEREKRRWVAKRMVGRGPRLEMNGGTSMGGREPLATSSKKSRGLYGHQSSEVSRVIGAFSYSFHYSNYGTIHITHFHDKNASFTGENVRKLVRSPRPSMHDENVRKLCFVPALICNWMILLHSLKLLLNVAWETTSLMGFWNSDHTSTSRTPLEPQEVTHSPI

SEQ ID NO: 52162 - protein, 86 aa, Zea mays
  Coding DNA Sequence Number=SeqID_8787
  Subcellular localization annotation: CTP_CleavageSite=66; ConfidenceScore=5.56e-01
MWPGQAPSTSHPLVLAPALLTTPPTNGMPPYGVPPLTPPQLLLSGQSTMTPWSPFAAGWDPTAFASASAYSTMALAPPPSDWVIDS

SEQ ID NO: 52163 - protein, 217 aa, Zea mays
  Coding DNA Sequence Number=SeqID_8788
MGVNQAKPKSKLHSVWIMAENVPEELQNYQAICELGGKSVKEELRLENIGDMMSQGKSSGWGPELGDNNEDLNPISEDKGYDNDPINEDEEFHESEDDLLSSQDLEEFAKDDEGVIPPCQGKISKSPLGAQAEGSGKAEAEKQVMNMEVEHGEGIRRSSRLESNDDMKIANKAMARSMAKDAFMNKDRISKILSGTIGLFRLEVDQVSIFGRRKLRD

SEQ ID NO: 52164 - protein, 162 aa, Zea mays
  Coding DNA Sequence Number=SeqID_8789
  Subcellular localization annotation: CTP_CleavageSite=69; ConfidenceScore=5.71e-01
MAAGLAGSQPRKAAHRAPSGVSASTARCCLLATSRHSLATSRHSLPRHLRSPAPPLLLGAATSGHLPLPSSQVQSPPLSRPCGPPALPPRLRCCPALVAWLFATYAPAVPLDPALDATPVQPAVPGGTIPAFPEQSDSMVGSSSPCPLAPSPTLLLVSSLYL

SEQ ID NO: 52165 - protein, 193 aa, Zea mays
  Coding DNA Sequence Number=SeqID_8790
MAYISLFHCIHLDCNLANGEYVLIPEHGAAKEEAQEPAQEPITEDLPAAPAFEGPSGSDSVSSRAWIAALCAVGQGDLGSPPPVLLFVLPVSAGSRCESQYSPGSLGVDASDLGAWSALVTPEFLTIAVRPLRAAGKPGHRSDFGMNLVNTFAIVPSSYMSVPIEVREQKIEIGGHRRWRRRANVAPPRAVGR

SEQ ID NO: 52166 - protein, 71 aa, Zea mays
  Coding DNA Sequence Number=SeqID_8791
MVYLVARSTRGGGRPKSGEGDPAAPVRQGLGSCLEKLHGPRRSYPGARVRLGIYGNGGPWWPVLGWLRRVA

SEQ ID NO: 52167 - protein, 480 aa, Zea mays
  Coding DNA Sequence Number=SeqID_8792
MEKDRQDAEQKRRAIVRMVDPMRKAKRARGSAKAAASGGSKPVPAAKTAAPGHGKASASTKAVASGRSKLPPGGVVKGRRPLSPARRVADFDTDISVDDYLVGSGEGQLAVVPPPVVTTSPTAMVRAKGAARDQWATFCASGEILSAAAAKDVVGSMSQRLREASQQLSQQLKHAADFADLVVSGALTADVAAEVERFWAQHADAVREKSAAESKNRRLMEKVAALEAEKTDLRRQLVEERREANKAIVDAQAAQSEAKVAQAEGSLACEQAEELEARFNALCGRVDKAESSTRAEVERTHAQFVDAYRELGARTADFEVPGQEAGLRFLEWLQEELLVLPTIVTGFMSFASLVTCEGAMNALSREGCRHYEVFDQADENFECEIFKVEDPMVKQSAGALFDRMWGPHDREAVRDRSDRAIEQMAHAEDVEDLVGLDGALPEAAEGGPVPPSDAGEGTSAIPAPAATGECNTPGVTITKT

SEQ ID NO: 52168 - protein, 233 aa, Zea mays
  Coding DNA Sequence Number=SeqID_8793
MTLGTSVTWPRLGLRSRGTLGNFRDQRERFVMESHRREAPSPRTLSNGSGSSKSPAENSTIHPIPTTVPTTRVKLTTGAPPRPTSGLGLGLGLERRSPPRPTPGLSLSLSLGLGRRSPPRPTSGLDLILGLRRSHNLARPQPRPQEKSPPRPTLASNRLHHRGYIITLPLASCLRLRRNKTGVPSRLLQQQGMSKAFLGGRAEAKEANSDGSLQGQTLSREACNPYYEHPGAR

SEQ ID NO: 52169 - protein, 384 aa, Zea mays
  Coding DNA Sequence Number=SeqID_8794
MAGLVKRVPLVDGAEVSRTTQGAGGVNGAVHGVGRFDMAARGAGRVNGAMRGAGRMASGGIDADGAAHEGGEAALGMGNGARRGAWGTGTQIRLKEVVEIGGWGGASKGKHIFVEDDMTRDDDAMEGEIKTAIPLVVRRVAKEEVASGVGRQLVRGSGGSVGIAGTTEHQKGLCPVAGREILLEEEAVDHVGGSANHALCRAILGRGVWEREAQLDAIEDSNSNSSLSGIFGSRRAIIHRTVRCAPDMSGAPRKRGLRNSPASGSRGSRSAKIHRTVRCAPDCPVYQRSNGSFRRQRLPAVHLMRAQRAQMSDMPIPVHRTSNSTCPVCTGHSGGPRSQKLQRSESNGSDDVAGAPDCPVCTGLSRCAIAQTPPANGQVWWLGL

SEQ ID NO: 52170 - protein, 46 aa, Zea mays
  Coding DNA Sequence Number=SeqID_8795
MAPYTSHELPPLVSSCHIIPHDLLSYEREEQVIEEEPPNFEAFDLI

SEQ ID NO: 52171 - protein, 335 aa, Zea mays
  Coding DNA Sequence Number=SeqID_8796
EGMNVVEGVSTVQGRDSGFGVEQGTTRSSCCVQRSSGGVPRMANGTGSGDGHGCSGDEGHGGRLYGGARQENMRESEEQAKSRGVNGQRLVGLRSLGTACSWLVRGVGFRSGSACRGGIGAVGGSVGFEGHAAGRGRGLLGLALVPGGAVSIGSCGTRPRPASGLASCAWARCFRPAGQHPVKALPRSRPSVSSRDCRRRLPRDNHSPHDPCCTVFRFTNECGGISATQIQREGRTSHQLPAPGGHLARAYFAQRPAMCQGPYPIPDKFLNKIAPATHACSAPKGSFILIILRYLKLRGTNSTTSIEVLPVFGVNVHDPNCAISCPIFLFCQCRQ

SEQ ID NO: 52172 - protein, 60 aa, Zea mays
  Coding DNA Sequence Number=SeqID_8797
  Subcellular localization annotation: CTP_CleavageSite=15; ConfidenceScore=5.16e-01
MSAAKLAAPGSGKSSASEKTAATSGTKPPPVEAVKVRELPSPGKHVADFGTNISVEDYFV

SEQ ID NO: 52173 - protein, 72 aa, Zea mays
  Coding DNA Sequence Number=SeqID_8798
MAVGLVAFLFWLRASRRERVSWFGSNGYRAAAPVAEAFFGGMMKLISILLSWKNRNDIKLQMYLRLERSTQV

SEQ ID NO: 52174 - protein, 317 aa, Zea mays
  Coding DNA Sequence Number=SeqID_8799
  Gene Ontology: Mol. function=thiamin-phosphate diphosphorylase activity; Cellular component=cytoplasm; Biological process=thiamin biosynthetic process
  Homolog annotation: Hit_ID=Q2UVH9; Match level="QueryCoverage=100%, HitCoverage=57%, E-value=1e-164, Identity=92%"; Hit description =Phosphomethylpyrimidine kinase/thiamin-phosphate pyrophosphorylase
  Pfam annotation: Domain name=Phos_pyr_kin; Domain location=3-83; Score=-113.0; E_value=0.00027; Accession=PF08543.3; Description =Phosphomethylpyrimidine kinase
  Pfam annotation: Domain name=TMP-TENI; Domain location=108-293; Score= 318.7; E_value=1e-92; Accession=PF02581.8; Description=Thiamine monophosphate synthaseTENI
  Pfam module annotation: Pfam domain module=Phos_pyr_kin::TMP-TENI; Domain location=3-83::108-293
MPDSSDAIDVLFDGKEFTELRGQRIKTHNTHGTGCTLASCIAAELAKGATMLHAVQVAKQFVESALYHSKDLVIGNGPQGPFDHLFELKSPLYKTGSLQKFNPGDLFLYAVTDSGMNKKWGRSIKDAVKAAIEGGATIVQLREKDAETREFLEAAKACVEICKSSGVPLLINDRIDVALACNADGVHVGQSDMPAWEARELLGPGKIIGVSCKTLAQAEQAWKDGANYIGCGGVFPTRTKAANPTLGIEGLRTVCLASKLPVVAIGGINAGNAVSVMELGLPNLKGVAVVSALFDRECVATETRNLRSILENAHSRS

SEQ ID NO: 52175 - protein, 32 aa, Zea mays
  Coding DNA Sequence Number=SeqID_8800
MEGLAAVLLLYALLVFALESPRGLHPRSPGGW

SEQ ID NO: 52176 - protein, 267 aa, Zea mays
  Coding DNA Sequence Number=SeqID_8801
MARIRCTAHKSVIPLLPSRLAERPLRRTVPDGDDDDAGGSSSHGTELSEEPEPEGWIARPITRDAAHGCHFHDALDTLLCRHTWSIDYRCVVYQHCRGLYLDQWEATCLVRRPDDDLRGAEAFLEHYSITERDTAEAAMQDAARQALSQYCSLFSGVADGFDLKYYPRRSTGSAGGVIASPVGEGNPRLNNMVNLATVLNTELDHTLDELGKVRAEVAKLRAECAARHYLDGGSPAPVGIQHPYRSPPCGRFDYGTPGCRTLIDLDP

SEQ ID NO: 52177 - protein, 53 aa, Zea mays
  Coding DNA Sequence Number=SeqID_8802
MSGAPEDSNFKLVTFGKFQRRLRYNSPDCPRGNGYYGANGYLQAQLMRANARR

SEQ ID NO: 52178 - protein, 190 aa, Zea mays
  Coding DNA Sequence Number=SeqID_8803
  Gene Ontology: Mol. function=kinase activity; Cellular component =ornithine carbamoyltransferase complex; Biological process=amino acid metabolic process
  Homolog annotation: Hit_ID=Q6QP54; Match level="QueryCoverage=40%, HitCoverage=27%, E-value=1e-22, Identity=72%"; Hit description =Putative kinase
MELGRRHHCLSGGAGQMGHRSCSLRPESVRGGVVMALPVDVAGPRPRPGDVGAPPKLGSYLSSVAEAESEPLGRARRKSFGRGQGGVRRLPGPSPSPSPGVGRSGVRRLPGLSPSPSPGVGRSGVRRLPGLSPSPSPGVGRSGVRRLPGLSPSPSPGVGRSGVRRLPGLSPSPSPGVGRSGVPYGAPGEA

SEQ ID NO: 52179 - protein, 139 aa, Zea mays
  Coding DNA Sequence Number=SeqID_8804
MTVADAREQWARRQPSSRPIWGQRESPLSRCEDNAPVIHSSNGSRTPNGCPANYSPRRINSAAGQGLGKGDTPKGILPREGTRLRASSLIRGSKAGPPKGSTAALDRVGPTPTTGQRFEGRPPEGSHGRLRLLGLRAHY

SEQ ID NO: 52180 - protein, 267 aa, Zea mays
  Coding DNA Sequence Number=SeqID_8805
MVLMNGTGDGQTKQVSGQRMVVKPDRSRTILTGHMPWKWDRVGCACSRGLQASTRVREASGPKRAPIPVLVPARPTFSKKALVLPFIGRPSPSPWGRAKRRSSAEAESEPVGRAKRRSSAEAESEPLGRARRRSSAEAESEPLGSGEAEFVVFQGLSPSPSPGSGEAEFVVFRGLARVRRLPGLSPSPSPGSGGAEFAVFRGGPSPSPGSGGAEFAVFRGLARVRRLSGLSPSPSPGSGGAEFAVFRGLARVRALGRAERSSPSSGA

SEQ ID NO: 52181 - protein, 668 aa, Zea mays
  Coding DNA Sequence Number=SeqID_8806
MGVSDNFAVDLMRTCAAPGGRMSSPELLESSARMLEVTGGRWPKNVPIPRAAGEDFYTSRMARDLRGVSYGRNIAAVVSTVMNKDRQDAAQKRRAIVRMADPAREAKRARGSVKATASGSSKPVASAKATAPRPSKASASAKAAASSGGRPPLGEATKGQELPSPGRRVADFGTNIIVEDYLVGKFFFDRRYVAGSGEGQLVVVPPSVATTSPSAVVRAKGVTQDPWAAFCASGEIPTAAASKDVADTMSQRLREVSQQLMQQLKQAADFTDRVASGVLTADVAADVKRLRTQHADAVREKSAAETGGGEEGRRIRPSLRHRLRKRRPKWRGAESSLASQCVEEQEVRFNALRSRVDKAEASTRSEVERTHAQFVGSYRELGARTADFEIPDGEAGLRFLEWLQEELLVLPTIVEGFMYFASLVTCEGAMNALSCEGCRHYEVFDQSDENFERDIFKAKDPVVKQSAGALFDRMWGPHGRESVRERSDRAREQMERAEDVEDLGDLVGAPPKAEVNPVPPSSAGEGSSAAPVPTMAGEGPLPALVPTAEDPPKVVAEPAAEDPMVAAEPSQVQDFGPAHATATVNANFVAASTVVAEDDSDDSVSKCFESDDSGSSIVWTEESSDEDLDYFAALDVATMEASPRVMGDDDPPGASVGHRRRRAVAKRR

SEQ ID NO: 52182 - protein, 120 aa, Zea mays
  Coding DNA Sequence Number=SeqID_8807
MGKSKKGGSSSHHSGDKRKREPTPLSEDFGDSEYSEEEFSSESEGSPVVERYGLEGSDESEVSSDEENSSDSSEEGSGGDGDGDGDDGGDGDGDDDGSKGDGKGDGKGGSGKASGKAPLA

SEQ ID NO: 52183 - protein, 642 aa, Zea mays
  Coding DNA Sequence Number=SeqID_8808
  Homolog annotation: Hit_ID=A2XZD3; Match level="QueryCoverage=95%, HitCoverage=67%, E-value=0.0, Identity=63%"; Hit description =Putative uncharacterized protein
MADPDDLGRRLAAVAVSESPTAAAAALESSNNNLFQVMRAVEDAEATIRQQLEENSRLKDELMLKTRELHRIRSEATDQASSHGIRIHQDRALGAHTDTSSTAPIRTTATAAEAFEWGAGDAGINHKYLEANQANGIPRKSPSAPDSAFPSQLSTPSSRSLSPTRHHKETDYDSRLNLSGQGALPVSDLNSNVVIWKQDLLVKVKEQGEEIAQLRRHLSDYSVKEAQILNEKHVLEKRIAYMRMAFDQQQQDLVDAASKALSYRQDIIEENIRLTYALQAAHQERSTFVSSLLPLLSEYNLQPPVLDAQSIVSNLKVLFKHLQEKLIITEEKLKESQYQITPWHAESSNNTSAAAQSPSHPPGNALIKANLDIVPQQAYSHVHSPVSSPVQTRRDWDLLGNENRQVIRSEVATTSAEHDNVGRTSPSTSSHNMKDAPQRTDHDSRAVRFNIESKDQNPSFKDLIKSDASESLEGAEAQIPQELSAQQDSGGSPNLTSGLDDANPPYPYLPTVLEEPSSSFSEVAEDDPLPAIEGLRITGEAFPGRELQASGYSIHGTTSCNFEWVRHLDDGSINFIEGARQPTYLVSADDVDFVLAIEVQPLDDKKRKASVMDLRSMGIAVFSGEVIPLYRRLGSRVAALGA

SEQ ID NO: 52184 - protein, 192 aa, Zea mays
  Coding DNA Sequence Number=SeqID_8809
  Pfam annotation: Domain name=IQ; Domain location=105-125; Score=27.0; E_value=7.2e-05; Accession=PF00612.18; Description=IQ calmodulin -binding motif
  Pfam annotation: Domain name=IQ; Domain location=63-83; Score=25.0; E_ value=0.00028; Accession=PF00612.18; Description=IQ calmodulin -binding motif
  Pfam module annotation: Pfam domain module=IQ::IQ; Domain location =105-125::63-83
  Subcellular localization annotation: CTP_CleavageSite=40; ConfidenceScore=5.20e-01
LSPWTPGISSRLSSPPPAATPSAAATPSHPPSPTPDAFTRLEEKWDQFVVMFHRYKEKTEKELQAAVRLQAAARGFLARRQVQSLRGEKHLAVASRATPWPSSHEQAVVRLQAAVRGFLVRRAVRKLYLLISSSLHQLAACVPNHQVSSILFEPPAEVEIWLEDELVLKGGGDVMGIIGSERQQPGSDKARE

SEQ ID NO: 52185 - protein, 167 aa, Zea mays
  Coding DNA Sequence Number=SeqID_8810
  Homolog annotation: Hit_ID=A2XZD3; Match level="QueryCoverage=83%, HitCoverage=14%, E-value=3e-58, Identity=79%"; Hit description =Putative uncharacterized protein
MGIAVFSGEVIPLYGSRGEIVKVYANDQRKITCDPETKEHIKKILSLGHVSYEVLLPVRFLDMWEPAILAIKREGYSVKCNGQRGVVVMEKFQQAMTISSQSSIMVNLINIPFGRPTEFSILSADGAEYNLKPAENAPSRDAIVLILRLFRMKVISVPGKRIRDNIP

SEQ ID NO: 52186 - protein, 93 aa, Zea mays
  Coding DNA Sequence Number=SeqID_8811
MKHLRTSPQHRPDRPGTDLSWDELAVQVGGITGETFVPESLILPQNIPALCDDLGLRTAILATLPTLDQSGVAVHQTGGAGPPQRDPDFRCTD

SEQ ID NO: 52187 - protein, 359 aa, Zea mays
  Coding DNA Sequence Number=SeqID_8812
  Subcellular localization annotation: CTP_CleavageSite=43; ConfidenceScore=5.45e-01
MSFGLVNQQHRHNLLYNDAIRRFKRSLTTNSGTRDGLVLHNLRSSTGPSLGRTRRSLASALTITQSLHQFSHLAPPRHEEVAEERSAGSHPYEHLAEVDEDGRLENGVGREVLKLKPELLQQQQEEGRDWQRQPTEDVGGEQHELPSGEIAEGSGAGADSFGEPRRAPPEQAAHQVKRFLRLEMVRVTKRSHGLCCSASGEQRSKKAKGRKRLGENAKGNEVPRAWHDETTRRGGRGSVSREDRYGSWCDLRLASSPEVGPGATVGTLKLGSRVRIAGTTPSRCLLLRARPVGGPGNWRRRPSSDPGSEIAALAAAAGAPGGISPPNCGGGGGTDGGGGGGGDGPDGGGGGGTGGLMRL

SEQ ID NO: 52188 - protein, 833 aa, Zea mays
  Coding DNA Sequence Number=SeqID_8813
MATLATLPTLDESDVAVCQTGERDPHHRIRISDAPAGGPQPTGAAPSAPAVAPSPLDKGAPAAATIAVAAVARAAISLLGASSPSAPKDTPPPQVSRPTDGSGSQQQASAGSGASDPPPAATKTTPAASHAPAGGPAAAAPASGSVAAVEEAPVGGSTPPPDAGGDVGGTSSSNPLPAPEEMEVVFGRRIWSGAEQEAAPVPLPRMLSRAHQVLSDTGAAILREWEALEAEHQRLSDWELEASRREKKVTRREEAVSQREALTTEYQAKLSALDQTLEAQRGRNAYSAGRTVGRARAEAEDKEKKLEERIRQFQAAQAVEATRKALEDLQAEQHAEVQRIAAWAGEASTTLVPLGMSPIPVSELSTSISDALPVLDSAAVRLQCLDQILGARLEAEGGKLCRAVIEYVLTCFRSHDPTISLEPVIAGPEAATKDATRESEPAPKVGDSWAQAPMPETGLSVSAGAKRRTTAGSGALFTRRFAFFAHRNQRARYMTCGPGPPCHRLNRWLRRSRGGALPRSGSTLLVRRFAFLTVGRGEDEGAHYRGAVACSLCIGSPSSHSKTSAPADVHQPRGGGERAEPGFRLSHGLVTLLFLQHSEEKDDHQPCEGWRQTSATRSRPDRKHLLSPCSQLHGLDGLVLTPVGGRGQGPLRHGARAEVAAVTGKLPVQRWSPLLVRLPSAEVVASAGEPLGAEVVASAGEPLGAETSIPKKELAMAPRRPTVRDQAEWLHGSGPPQETNVYSLVPDPKAKRPHRLRTTPWNGLPLFRADPQAVGHSYFCREVLNCKPGYSIQMSSYQQAGLMRADLTGLAYMYALPSYKREKNSTPQTCSYG

SEQ ID NO: 52189 - protein, 85 aa, Zea mays
  Coding DNA Sequence Number=SeqID_8814
  Subcellular localization annotation: CTP_CleavageSite=49; ConfidenceScore=5.45e-01
MALGTQCLCSPLATEQCPSSLPCGLRSVRPSLLLCRVPASACRQPPAVRADTGRQQTTWRLARGAGDPAARIASLGWRDSPPEGR

SEQ ID NO: 52190 - protein, 93 aa, Zea mays
  Coding DNA Sequence Number=SeqID_8815
MARTATGVVVVSISIKGAYLAEVQGKAASQTPPPAEARGKSPAAAPSVGAPAPRAGDDAVSPGDWTDLAPCDAVDTSPSEKAKRGSQTYAQCI

SEQ ID NO: 52191 - protein, 221 aa, Zea mays
  Coding DNA Sequence Number=SeqID_8816
  Homolog annotation: Hit_ID=A2YGC2; Match level="QueryCoverage=67%, HitCoverage=65%, E-value=5e-10, Identity=30%"; Hit description =Putative uncharacterized protein
MELSEELEPEGWIARPITRDAARGCHLHDTLDTLLRRAFDRHTWSIEYRCLVYQHHRKLYPDQWEATCLVRRPDDDLRGAVVFSEHYSITETDTAEAAMQDATRRALSQYCSLFSGVDDGLDLKYYPRHSTGSVVCVIVSPIGAGNPRLNSMVNLAIMLNTELNHALDELGKVRAEIAELRAKCVARHYLDGGSLSPVEIQHPYRSPPHGRFEYGTPDYRT

SEQ ID NO: 52192 - protein, 517 aa, Zea mays
  Coding DNA Sequence Number=SeqID_8817
MSSSSSTASASSADPSSEDTLSDLAEMQQLGYFGDGVGRVPGIEEIPEPEGDLRLPAHRFVVEVLQRFGVQVHQLTHNAVVALANSRGEDVFARAPGNFCANAKEVSMDDCVDDYLVGGLMMFDTHTGRGLVGSKAGQLAVVPAPVAAKSVAATTEAKGSSQDPWSKFCASGKIASAAVAKDVAGSVARPLKHATQQLKHGGAFAEHVASGALTMEFAAERRRLEGRIEHLRTQHTVAVWDKSATENKSRKLMEKLSAAEDEKEDLGRRLAVEKEDADKACAEAQATHVEAKLVRAEANLALQRAAEAEANRNGLRGCLDKAETSTAQRSTERMRCSWTRTESLEELEVLPTIVTGLMSFASLITYEGAVNALSREGCRHFKVFDRSDEDFERGIFQVEDPVLKRSAGALYGRMWGPHGRDTVQERSDRAMEQIPHDEEVEDLESTLPLAVDARVGIEEQPAPPTDAGEGPVVASAPTCVGGDPVAAATSTGEDTSVAVAPAAEDPAASVGPSRVAG

SEQ ID NO: 52193 - protein, 87 aa, Zea mays
  Coding DNA Sequence Number=SeqID_8818
  Subcellular localization annotation: CTP_CleavageSite=38; ConfidenceScore=5.27e-01
MQSACNRAKWAHPFDSNALSMEAQAHTSRYRRASCCVRAAAPPLAPLPRLLDCGTSTATRGNPADRERGIPRKGSFSVKETGPEPPY

SEQ ID NO: 52194 - protein, 268 aa, Zea mays
  Coding DNA Sequence Number=SeqID_8819
  Gene Ontology: Mol. function=hydrolase activity
  Homolog annotation: Hit_ID=Q60E79; Match level="QueryCoverage=19%, HitCoverage=14%, E-value=1e-10, Identity=64%"; Hit description =Putative phospholipase
  Subcellular localization annotation: CTP_CleavageSite=24; ConfidenceScore=5.36e-01
MDTLVTESTTRATTNLQARKATCRASATSSETARTISRVSVENRLKKRFLYGFSMGGTVVLQLHRKDPLYWDGAVLLAPMCKPTVVSKEHKMRCEHKVASKNGVMEHGQEGSSQEPSAHYEMILCHSGTVDPSRLLTNLSRVTNKIFTVITELPMPPSRLGDADHQEEYVLVPEQGAAQEVALDPAPESAPEDLPATALEGKPRRLCPSRDLRRGLPFRLWWVQVRSLHDGSRGSLEEMVAGVTWPSILPPGWTVEWDPASAEEEHEE

SEQ ID NO: 52195 - protein, 114 aa, Zea mays
  Coding DNA Sequence Number=SeqID_8820
MESHLQGSPAVGNCRSSGGNGGGGRRIDLTRRSNNTIKTLPDRPAGGVYPPFCERGCKHSGLQPAAPNFFSLNGGTTFFVVFDFLLQGRRRGLGGSWLGFLRTSLGTKGSLGLT

SEQ ID NO: 52196 - protein, 102 aa, Zea mays
  Coding DNA Sequence Number=SeqID_8821
MHMRWHKDCTDRQDGLMEATSGQKPSDIEVYQEGHKGPDPNNLDQLCSQTATDRLVMELPLDAQSSGRRLDVDERVEQCRAVAGVLHVLARFVQVLQMQHLR

SEQ ID NO: 52197 - protein, 85 aa, Zea mays
  Coding DNA Sequence Number=SeqID_8822
MRAATPAMRSRSRTCRHARTEAHLQAQLPPTPVKRRTQDEKKRRDGGGRPGVQGATTGLGVATLYLAATFPVNVYCGLSWHSEQF

SEQ ID NO: 52198 - protein, 218 aa, Zea mays
  Coding DNA Sequence Number=SeqID_8823
MPPAPPQGIPTAGGDHDDDDDNASSSHITKLSEEQEPEGWIARPITRDAARGCHFHDALDTLLRWAFDRHTWPIEYHCVVYQHRRGLYLDQWEATCLVRHPDDDLQGAEAFSKHYSITERDTAEAAIGVADGLDLKYYPRRSTGSAGGVIASPLDHALDELGKVRAEVTELRAERAACHYQDGGSPSLVGIQHPYRSLPHGRFDYGTPDCRTQIDLDP

SEQ ID NO: 52199 - protein, 136 aa, Zea mays
  Coding DNA Sequence Number=SeqID_8824
MAPEAGLGCCQPHSVEWHSSRSGAGGAVLLSDRSVERRSDYGHFGSVDWRACVRIKVSGHLCIKCPCDLVGWRGDLAKVASWRRLGLGRAEVDIDLKISSGRHFREKVQWKGKGLTTCNNESPSTSKQKGILKKLP

SEQ ID NO: 52200 - protein, 152 aa, Zea mays
  Coding DNA Sequence Number=SeqID_8825
  Subcellular localization annotation: CTP_CleavageSite=52; ConfidenceScore=5.31e-01
MSVAKAFSDGTYNDHTYGSLKVFSDQLRRSSSDALCCRSSRNFEASAAKTVTAAGAEAKAKAAVEAKDVGEAEATISDIDRLISDVIKDVTIEDMATDPGKEREIDTDPPGGKDFDLRHLGGQELSEEEKSELKEFSMSCGYQPGSFALRRG

SEQ ID NO: 52201 - protein, 90 aa, Zea mays
  Coding DNA Sequence Number=SeqID_8826
MDGLAALCEGKNLSPAWDKLVFNKIKARPCGRVSYVIDPKGTSSGQESLRPLLSTSNWCIRLQHRLVEGVVDKESLYLKTGGYKKLEWLS

SEQ ID NO: 52202 - protein, 395 aa, Zea mays
  Coding DNA Sequence Number=SeqID_8827
  Subcellular localization annotation: CTP_CleavageSite=26; ConfidenceScore=5.50e-01
MSSRSLMHRVFPPSKPPDGGHPQSFRLVVGGTQLRGSWYLSAIVRLQGFSSGSPAASPRRWSPKTVTTSPWVGRSKPGCDLGPALSFKDVHHPCWGGGRAEPELSLPRGFVGQPLLQHSRERALTSPARGADFDNAGLVDGGRRQLQRVGLAGLAPCAPSRRKGGCRAARMGGLPKTSRAARAAFVFWGCPAFAPVRRPHAEVAASALRPSLLLFGHPERGSLSLLPERATASHPSAFCCSAGPPIVWGYSPVGYLNRFTKCESPRAKVMSELDQRQSWLRKEDLVGRSLAGSSAGGSDAGIELPRPRAGLMSSGDSHPEASGWPAEPSARAGFLEKTLVAMAWRGADVVLQSGDPPTASPSEARSDLADGVVDAEGAAAPFNCEDPSLQDQIIL

SEQ ID NO: 52203 - protein, 316 aa, Zea mays
  Coding DNA Sequence Number=SeqID_8828
MAPPVDVVGPCPRLGDVDAPPRSRSSLSSEAEVESEPLGRARRRPSAEARAESEPWGRAKRSSSSSGAEPESEPWGRAKRSSSSSEAEPESEPWGWAKRSSSSSGAEPESEPWGRAKQSFLWRLRPDLAAVSRTLSSGTAVGAAQAALSSCQTCQWSGEATFALNAPAIWSVGVAIWPRLLLGEDWASGEPKLCADGGYQLRFRSLEGTPNYGPRHGCARAHPPGVAPEASEEWFDSFEGLNAFRNTLAGLVVPSCELASAQGERTVKDRLDFFTYAPASPFRKEEGENAPCCPRRAPNMVFPSPFDGVRGLDASL

SEQ ID NO: 52204 - protein, 159 aa, Zea mays
  Coding DNA Sequence Number=SeqID_8829
MRAKRKPSLTHNERLDLQVYARRWCQKPVPRALTLSQVKARIMMVGDHREDKKEECFVRFGHGGGLVPSGIIAKVRMCKEGKSFDIRISRRWLSTKYSPLLICYFSEKEIIDRNLYYTDTFGLIKGGDAMAGPSVEKKTPTDGVLQTRMDGSSRKWATP

SEQ ID NO: 52205 - protein, 1077 aa, Zea mays
  Coding DNA Sequence Number=SeqID_8830
  Homolog annotation: Hit_ID=Q7XHQ4; Match level="QueryCoverage=50%, HitCoverage=58%, E-value=1e-141, Identity=48%"; Hit description =Putative uncharacterized protein P0565A07.109
  Pfam annotation: Domain name=DUF1723; Domain location=192-241; Score =6.9; E_value=0.08; Accession=PF08330.1; Description=Protein of unknown function (DUF1723)
MPLRGRSRRQDANSVMHHAGNVDDAKGENPDDFMTLVANCLGLGRGYQLVTEPAHEIIGKERKNRKRCRVPTSSRTLSTTTPDNIPFGIQKNPQEPSVSDYAGRAHILHPVLDSSKRSLDIPSSTSTLAQKMVKHPSSRWFNDCRPQLRLDVPVCRKMLIWARMMLVNHEDRSMLQKSDIYRGVLASLYCFQADPSLVAAFLTYWNVDGHTLVTSQGEMGYPLHTISDAMGIPISGRLYEEFIPPCSDVHGHLETLYAIYASLCPSELQPGPGLVSLTAWLDHFFDDKADSFGSPLLDGFADPKDPLLQKLRFHVAVQGDCLAAILGAETLSYRSIYPSTVYCAAFIAAWLCTYCIHVEAGQYIRPEVFHMAVQISEGVRRAIGVASLAFLYNCLDNIHDNIISGTRSASECSLFLPGHFIMGWFASFWKQARKSATLHCPVKFPPFVIDLTKLEQPMPITEAHHIFWDFDGDGRGLRSLDFLGRSSLRFPGGHRLVFIRDGRTKNEKQPFSISVSAMELLMSSLFGGITHRRGERSDNLVYYPHRSAHIFNYDQLIPYFDYRAADNVIDSLNFRSYSPSSRKETLQICVRRHLSYYDQPEGHALVVQPSNLGTRRSYNYIIWCNNAFRFLRDPSFFCDRIFMSAVIETTVAAPAEGDIDQPAKGTAVVKYSLLPGDSEPDREDTTPTTVSGLGQGKNISIIQAHLQDKASALNSSSELSLPGSRANTDLLDDTLSDGSLACPPDDPDFLNDFVFTGALEPFTDLFTDLPNEVMEMQASHTQVLTSGHLEQTDMVHVSQPVSSTGLMSSLDQDVLSTQPGSSQASVRKILKQLWNEVEQAISLFRAQASATDVIGEKPNYSEFDARQPVHISEPTDVPAPRFMQYAHGDLDRFQRRIRERPFNKDIVISEIADTMKWWKEWFNPAPPKIQRLIDGFNALHETLSEDPEHSTTSIIDKRKQVRQKIDDIKASQASVATACSSMISITKSLEAQINLHELRRQQHVSRAEELQAQIKKLSSQLKETEDELEASSVKSQSQLQDAEKTIAGFTDQDEEGLTNYVHSLLDFFASCTFGPYA

SEQ ID NO: 52206 - protein, 45 aa, Zea mays
  Coding DNA Sequence Number=SeqID_8831
MASKARGLKWPEGEVGASPTRDVGAETAARTAAVTKLYDSQQRCH

SEQ ID NO: 52207 - protein, 416 aa, Zea mays
  Coding DNA Sequence Number=SeqID_8832
  Gene Ontology: Mol. function=DNA binding; Cellular component=nucleus; Biological process=regulation of transcription
  Homolog annotation: Hit_ID=A5BJQ5; Match level="QueryCoverage=97%, HitCoverage=86%, E-value=1e-108, Identity=51%"; Hit description =Putative uncharacterized protein
  Pfam annotation: Domain name=NAM; Domain location=70-213; Score =186.5; E_value=6.8e-53; Accession=PF02365.6; Description=No apical meristem (NAM) protein
MNRAHSSSSKLINEKLVEHRISTAKHCPHCGEKIDSKPLCTSSASMRPGGGATCFDGINCCNCKKDWVGLPAGVKFDPTDQELIEHLEAKVKDEGSRSHPLIDEFIPTIDGEDGICYTHPEKLPGVTRDGLSKHFFHRPSKAYTTGTRKRRKIQTECDVHKGETRWHKTGKTRPVMVNGRQKGCKKILVLYTNFGKHRKPEKTNWVMHQYHLGDLEEEKEGELVVCKIFYQTQPRQCSWSSDRGAAATALAATAAAAAAQEQHRRDSGSGSCSSRDHEVSATSFPAGYTVTTAVEMQQHMKQPADHFSFAPFRKTFDQEVGIGGDQVPSNQLGRSEPHHAGLGQQPHGPVLATKTAVPATAFLISRPSNPVSTIVPPAMQHASVVLDHDQFHVPAILLHHHDKFQKNMFCYENGKR

SEQ ID NO: 52208 - protein, 358 aa, Zea mays
  Coding DNA Sequence Number=SeqID_8833
  Subcellular localization annotation: CTP_CleavageSite=36; ConfidenceScore=5.34e-01
MNAVVTSHLPACLYSTAGKKAKRRNCYTRRAVTCTRCAVDRKDQTVTLQGGTDTRSEVGSFLRNELREGVFWTFGFPKLKRLFSRVKLVTKNDLAPRKGLLLGSCFGAPKVSHEEAASAEVVSKRWPKSARLARARLPLSLLARPHLSALPLPPHSAAAVNPAVPSSVPGRRWSSAVSIATVSFAPTSATRNAHQFPLTLPISLCPRSPAVLRAAATVAPGRRRVSVATEESPEAALRSPRGPAGPPRPSSPASSPPRDERRRLSWLGKKTGASCPISAVHLRSDDPVSNSPNPASAVRLRSNGPEPFPPRPASLPTGPRLSAPAPLPARPRLSALTPPPARPPAGSNPGRPFEIQRL

SEQ ID NO: 52209 - protein, 284 aa, Zea mays
  Coding DNA Sequence Number=SeqID_8834
MTSHGSSDDGNALTHTDGLAREGFPRILWEVLQGAGYTTPPQYAVQQFEKHRVPRCRVRMTLEPHPLQPGWRSLDSESFGYRAEDTIEAIALHGLTTFCGFHPLELATHPIGLFPAEKEDDPMWKDRVEHAKDIWAIYPGQTAHLTVRCMNALYRLQVMRGEAMSHLMALLEATKITLDNREELVVDLSQEMVEKDLQVEQLSGEIHELEELVGTRENTIEVLEDQLLNTQQQLAEANEHLDMHHQEDDEDVDIEGGDEPASSVDTAGSGRPPSPESSVASFAH

SEQ ID NO: 52210 - protein, 338 aa, Zea mays
  Coding DNA Sequence Number=SeqID_8835
MGKPVPSLLMLLLSRGRQHGSSSLINCEKQTIRIEFLNLARTGLTALAYNASLTPTGRRAVTALVPTITGMGDLVSGRVRGKVYCQVQSGPPELALVLDLGLPPEQLLAPARGCTLRQQDYSLSKCNEHRRSELLGPRAQAAEVDGDACSGQTTAGEFNQWARGAPRDDTEAIRARNRKMAKGFTRSTRAGGFGNSGERDSASPVTWALGSSLSQAHGLTRKLFGCLNRTEGGWRGVGHGGGARAALAVRGEVAGGNGWLGQIRRSTDEATGEATERWGGFYSLGAGVVTGGAAGARGFAHRRALSAPPGASMRRTRGWLRLPMFNGRFERQGVHISA

SEQ ID NO: 52211 - protein, 53 aa, Zea mays
  Coding DNA Sequence Number=SeqID_8836
MGLGVCGSLCQGGNEIDGSGYDYGTGCQHCNHCSGEDEAVEGDFQEFQDYDEF

SEQ ID NO: 52212 - protein, 76 aa, Zea mays
  Coding DNA Sequence Number=SeqID_8837
MATWCFVKARVKQYHKLTMITQKVNKDESKKRYLRTRIRKGEAQKIRRLTQRRSCEAVKLRHVRRRGNRLKDEKAI

SEQ ID NO: 52213 - protein, 937 aa, Zea mays
  Coding DNA Sequence Number=SeqID_8838
  Gene Ontology: Mol. function=hydrogen-translocating pyrophosphatase activity; Cellular component=membrane; Biological process=proton transport
  Homolog annotation: Hit_ID=Q7XAC0; Match level="QueryCoverage=98%, HitCoverage=98%, E-value=0.0, Identity=74%"; Hit description=H+ -pyrophosphatase
  Pfam annotation: Domain name=H_PPase; Domain location=4-925; Score =1279.1; E_value=0; Accession=PF03030.7; Description=Inorganic H+ pyrophosphatase
  Pfam annotation: Domain name=Zip; Domain location=103-429; Score= -107.3; E_value=0.088; Accession=PF02535.13; Description=ZIP Zinc transporter
  Pfam module annotation: Pfam domain module=H_PPase::Zip; Domain location=4-925::103-429
MGSAAAADVVIPACAAVGIAFALWQWFLVSRVKMSAYAAPGNGGHHGGPVFRMEDDEEDVGMGGAGDRDEEEEETAGDGTVAVARCAEIQSAISVGANSFLFTQYKYLAAFTVVFAVVIFLFLGSVHRFSTDSRPCQYTSGRTCKPALANAVFSSVAFLLGAATSVVSGYLGMRIATYANGRTTLEARRGVGAAFATAFRSGAVMGFLLASLGLLVLYITIKVFGLYYGDDWESLYESITGYGLGGSSMALFGRVGGGIYTKAADVGADLVGKVERNIPEDDPRNPAVIADNVGDNVGDIAGMGSDLFGSYAESTCAALFVASISSFGADHNFAAVAYPLLISSAGLLVCLVTTLFATDLFKVKTVRGVAPALKLQLIISTVLMTVAALVVSLAALPAKFTMFDFGEAKQVKNWHLFLCVAIGLWAGLAIGFTTEYFTSNAYRTGAATNVIFGLALGYKSVIVPVFAIAVSIYVGFTLASIYGIAVAALGMLSTVATGLAIDAYGPISDNAGGIAEMAGMSRRIRQRTDALDAAGNTTAAIGKGFAIGSAALVSLALFGAFVSRAGVEDVNVLNPKVFVGLLVGAMLPYWFSAMTMKSVGSAALKMVEEVRRQFITIPGLMEGRAAPDYARCVRISTDASLKEMMPPGALVLLAPLVAGTFFGVSTLAGLLAGALVSGVQIAISASNSGGAWDNAKKYIEERRTGTLQADVSVHCAVDLRLLHRVWAKGCLRGASASLHGMTSRFPAVFIEIRAPAWSRRKSSRGTTTVRRSGRMRDSRVVGGRGRAQARRRICLRAKLVVGRGGEITRSLDPGSGEAEGLRPRAEPCFARGGEIAPEGQSALLVVLGVSSEGGRQRDNSDNPNYYPTLRLACASDHAKSLGPKGSDAHKAAVIGDTIGDPLKDTSGPSLNILIKLMAVESLVFAPFFAAHGGLIFK

SEQ ID NO: 52214 - protein, 208 aa, Zea mays
  Coding DNA Sequence Number=SeqID_8839
  Gene Ontology: Mol. function=binding
  Homolog annotation: Hit_ID=A2ZSP1; Match level="QueryCoverage=95%, HitCoverage=21%, E-value=1e-47, Identity=53%"; Hit description =Putative uncharacterized protein
MASLLFLLSFDNDEEDSGSGRRDKHAQNQHSKPKPKVPNGSEADDTDGASRPKSAGLVDYDDDDDEDFNPPPMEPSTPAEDDVPLNISPVKRKPVDVKHADGEGRRRQKIETRISCAKIAAVTSTIIKHTDLQNKHACYLPTSAAPSTEPNGVFRERGTNSEEHQHSVENTETSRQAGGDCIKDGGSMSPEKAVNTTTTSDSEPYSVR

SEQ ID NO: 52215 - protein, 61 aa, Zea mays
  Coding DNA Sequence Number=SeqID_8840
MWLHILRGMKAEVILAFAVICTHMFDIILLAEMCHLILVLLNAGEEQVAPEEDYYEEFDEV

SEQ ID NO: 52216 - protein, 79 aa, Zea mays
  Coding DNA Sequence Number=SeqID_8841
MSSSVVDVHLRPVSRDYELAASSVVSVYIRPLSLFQGWQLVSRLAGWRLSGRAGVRGVVAAFAGVVAGVIANRARACGA

SEQ ID NO: 52217 - protein, 110 aa, Zea mays
  Coding DNA Sequence Number=SeqID_8842
MELPLDAQSSGRRLDVDERVEQCRAVAGVLHVLARFVQVLQMQHLRGHISNSFFAEGSKMIFSAASFRSLLTASSTASSTIVIVSSPAFMAGSASGSYGLGGGESLAAIK

SEQ ID NO: 52218 - protein, 145 aa, Zea mays
  Coding DNA Sequence Number=SeqID_8843
  Gene Ontology: Mol. function=phosphatidylinositol binding; Cellular component=clathrin coat; Biological process=clathrin cage assembly
  Homolog annotation: Hit_ID=Q10NB4; Match level="QueryCoverage=89%, HitCoverage=20%, E-value=1e-43, Identity=70%"; Hit description =Clathrin assembly protein, putative, expressed
SSSANGPSPRDHDRWGSPDPYGRRSPSYSSPPRYGGYDDYHERNGGNNDDKRPPTPVRDMKPEHVLARMHHLQQLLDRFLACRPTGGAKQSRMVLVVLYQIVRESFQLYSDICEVLAVLLDRFFDMEGIEGFGVLALIALTLWLI

SEQ ID NO: 52219 - protein, 148 aa, Zea mays
  Coding DNA Sequence Number=SeqID_8844
MGKSKKGGSSSHHSGDKRKREPTPPSEDFGDSEYSEEEFSSESEGSPVPASPPASSDDSDDSQGIAAEVWTYIRAIERARLEGSDESEVSSDEENSSDSSEEGDGGDGGDGDGDGGDGGDGDGDGGGGGKGGSGDGGDGSKGSNKASG

SEQ ID NO: 52220 - protein, 69 aa, Zea mays
  Coding DNA Sequence Number=SeqID_8845
MAVEGEAWGRRLRPGRGDGGDDGVGAQRCRGAEVWGRGGVGAWRGGGRTARARERERGRCCDKNLRMFR

SEQ ID NO: 52221 - protein, 57 aa, Zea mays
  Coding DNA Sequence Number=SeqID_8846
MGSSSLRAERESWLVGGNEIDGSGYGYGAGCQHCNHCSGEDEAVEGDFQEFQDYDEF

SEQ ID NO: 52222 - protein, 358 aa, Zea mays
  Coding DNA Sequence Number=SeqID_8847
MTLEPHPVQPGWRSLDSESFGYRAEDTIEAIALHRLTTFCGFHPLELSTHPIGLFPPEKEDDPMWKDRVEHAKDIWAIYPGRMDVLAVGGYKRSRGREREREPYASARSPARPTFSYESPRPSFYRHKERVQGNDAPPVTWSVRALGRARWRLLRGRGRVRLLRSRLSPSPRVGRGGDRLPRPRLSPSPGVGRGEVRHPRSRLSPSPGSGEAELPMAPEAGLSCCQPHSAEWHSSRSDAGGAVFLSGRSVERRSDCGHFVSVDWRARVRIRCQAILALNAPAILSVGVAIWPRLLLCEDWASGEPKRCADGGYQLRLGVLGAVARVIVESQVLGLGAEHGVSNELLTGNLSGRPCPIR

SEQ ID NO: 52223 - protein, 500 aa, Zea mays
  Coding DNA Sequence Number=SeqID_8848
  Subcellular localization annotation: CTP_CleavageSite=79; ConfidenceScore=5.08e-01
MKASTEARSLGGSKLNPKGTRWESVGTFWSTGGDEVASGVDCTVVSGTRATPSKSFASVLASFVCLGLACCGETAFVFVSDARSKPDVTPLGHRHRRLARQPTRCRLLLGHGCPASSSVGEGGDRTNPDVVLPPSAVEGHELKTPETEHRPRLERLLETTHLKLDGKLFVNTQQAPTWRANYRSFDPGGSLDRRGNDAPPVTWSVRALGRARRRLLRGRGRVRLLRLRLSLSPGVGRGGDRLPRPRLCPSPGVGRGGVRRPRSRLSPSLGSGEVELPMAPEAGLSCCQPHSVEWHSSRSDAGGAVFLSGRSVERRSDCGHFGSVDWRARVRIRCQAILALNAPVIRSVGMAIWPRLLLYEDWASGEPKLCADGGYQLRLGVLGATKITLDNREELVVDLSTEMVEKDLQVEQLSNEIQELEELVGTRENTIKVLEDQLINTQQQLAEANQHLDMHHQEIQDMEANEDVDIEGGEEPASSLDTAGSGRPPSPESSVASFAH

SEQ ID NO: 52224 - protein, 152 aa, Zea mays
  Coding DNA Sequence Number=SeqID_8849
  Homolog annotation: Hit_ID=Q6QP51; Match level="QueryCoverage=32%, HitCoverage=22%, E-value=2e-15, Identity=79%"; Hit description =Putative growth-regulating factor 1
  Subcellular localization annotation: CTP_CleavageSite=48; ConfidenceScore=5.37e-01
MQAACNCTKGAHPFDFDTSSMGPRPTRHVTRVPVTTCEKLHRHLRQYRAFSTAEPVPRLEATLRTAQRCQPSTSVTGRDRERGYSERDPSPRRKRAPSPPTDQRFEGWPLERVRQPPQSTRAPRPLLVRGSKAGPSEGFDSRLRPLGLRAHY

SEQ ID NO: 52225 - protein, 113 aa, Zea mays
  Coding DNA Sequence Number=SeqID_8850
MKTLTTFCGYHPLEMVMHPLGLFPAEKKDDPMWCNRRELKEANDHLDMHHLEMEANEAGSEGEEAPEELGPAPGANGTTSVAELPKLFQLKCLSPALEARPHLNGNNPSIPRI

SEQ ID NO: 52226 - protein, 114 aa, Zea mays
  Coding DNA Sequence Number=SeqID_8851
MGKKYSKEEFSSESEGSPAPVSPPASSDDSDDSQGITAEVWTYIRAVERSGLEGSDESEDSSDSSEEGSGGDGGDDNDDGGDGGGGGDSGRGGDGGSKSGNGGGSSKGSNKASG

SEQ ID NO: 52227 - protein, 38 aa, Zea mays
  Coding DNA Sequence Number=SeqID_8852
DIVVQVAMRIDGFGYDYDAGEDEAVEGDFQEFQDYDEF

SEQ ID NO: 52228 - protein, 658 aa, Zea mays
  Coding DNA Sequence Number=SeqID_8853
  Gene Ontology: Mol. function=DNA binding; Cellular component=nucleus; Biological process=regulation of transcription
  Homolog annotation: Hit_ID=Q41821; Match level="QueryCoverage=100%, HitCoverage=98%, E-value=0.0, Identity=88%"; Hit description =Initiator binding protein
  Pfam annotation: Domain name=Myb_DNA-binding; Domain location=556 -606; Score=16.6; E_value=0.095; Accession=PF00249.22; Description =Myb-like DNA-binding domain
MESCGGGQVPEMPRVPKSARGKRSVRKKEAQSPAQMSAIDLLATVAGKLFDEGAGSLGNTSAGAPALAAFAKDALVKQEQCDEQMKLFKHEATDQDSCNESAILPHIVLQRVVNNARNEDPKAKSEVQDKESSMISYTKAELGCNFGVIADRWSPESVESGAFTGDAVARLMMTAPAGFHKNAPEMYSLLDSMDVDVKPPPLVSSDSTGEMPLHGDKIHRSTSLPRAPKGVGFFAVDRDDDDDKSSGCTHPSTATNKDFTSNCKAEYNRVRKLLTNVERKPSFRYKKMHTRQRTQRSTFKRRKLFDRHLALASEFGTANGKGNTKVAGRNSNAVSLEANKGTNSMPFQKSCGSNDCHVKLRIKSFNVPELLVEIPDSATVGSLKKTVLEAVTAILGGGLRVGVLHHGKKVRDDSKTLIQAGIGQDDMLDNLGFSLEPNCTQNPQVQAPEDVSFLENIDTTEPLARLVNFVWYRITPADSSSKLGEVDVSQELALTPLAMNYQGSDHDSVHSPGAVSSRDKDSRALFLVPAADPNAGAVVPANKTKRSPEQGHRRIRRPFSVAEVEALVLAVEKLGTGRWRDVKLRAFDNAKHRTYVDLKDKWKTLVHTASISPQQRRGEPVPQELLDRVLAAQAYWSQQQAKLQPKTPSLAEARLLTQ

SEQ ID NO: 52229 - protein, 501 aa, Zea mays
  Coding DNA Sequence Number=SeqID_8854
MARVSFGLGGHRKHTLQDNPILQARVLTLEGSSCTLGIDNTFGEVRTTPLDGGGPAEQQKTDERRAVARSSSGDDDDFCSGGPNSGSDDLRADAAARKPPPVPKLVRQGRAEGRRVGGRPVGGPGYPVDGRTSSSCRGGSRRRERLRSHSGPRARHAAAAGATDDSRPSPRSLTEGAGHHPRRGRSQLGTLPSPALVMKILEAEGGAEAAARLAFPHHQTGGHRLGGLEGGKTRCIREREDVVAFQGGHPPFKGDSPCLRPQPSRAESSPTRSKTNGRKGQAAMQAACNRAKWAHFSDSQHAQDRERGIPRKGSFPEKEPGSEPPLLIRGLKAGPSEGFDSHLRSRGPYTHYWSKVRRPAPRKGSTAASGYSGSAPITDQGFEGWPRRVHSRLRRRARDDHGYVRYITKARVALPSSPETPCSAPIEGNMALSPLLLAERRRRGVCKKAESVPDRPLALCRGSGAALANPAPAEPLTASTYQPENLGPDRTPGLRPARMRE

SEQ ID NO: 52230 - protein, 504 aa, Zea mays
  Coding DNA Sequence Number=SeqID_8855
MNRQRHSRCHYKRNSGSVPEGGADGLDGGEASSSCHHVSIDGGVRLSTNAAPASAGRSKAHRQVLAPVLATKARRRTERCILAGQHSSPSLAWLEDASSAELEDGFHHQKLEEEVASRPVREVEPRLTLLPAPARMMKILEAEGGTKIAARFASPHPGTGGHRLGRTASVPHPGLGRWKDAMHKGSAKTWLPFKGVTLLLKATLPTCVLSHRGLSLLQHAPRSSPYDTGAGSHATCKLAQGRRSQTAARGARNCPAVTSIPPLSPRPAGERADRHAGGMQPHQVDAPLRLQRVQHGGLGPHVITATRGDYAHDPTVPTRHIGHGSISHEKRRDGRYDQKWAGRNGGGRRAEAAVKLSAKLTSPPGTAREPSHGVKTAHPCSVPPTARARATAAPRTTRPVALTLRQDRQHLWQEKQATLRLRHNDRVKKGTGKGDTPKGILLRGGNGPRAPLLIRGSKAGPYGGVQQPPQSARAPRPLLVRGSKVGPSEGFNGRLRPIGLRAHY

SEQ ID NO: 52231 - protein, 111 aa, Zea mays
  Coding DNA Sequence Number=SeqID_8856
  Homolog annotation: Hit_ID=Q5NKP8; Match level="QueryCoverage=25%, HitCoverage=4%, E-value=1e-08, Identity=92%"; Hit description =Putative uncharacterized protein 9C20.4c
MAAPWGNKTISEYATPTSVHRQNQCLDIVTMVQEEEQGGYQLASDGIKHTESATAVNAITPPAALRAPGVDEQTIFEASRMTVTEGGQHLNTMRTIGDHEQDTPVILQRHY

SEQ ID NO: 52232 - protein, 341 aa, Zea mays
  Coding DNA Sequence Number=SeqID_8857
  Homolog annotation: Hit_ID=O48967; Match level="QueryCoverage=52%, HitCoverage=38%, E-value=3e-58, Identity=67%"; Hit description =Putative uncharacterized protein
MVRIVEHRAETSMDFEVEEEVVSSTPLVPNRPVPGAATVHAARQHTAAQTSRTPSRVTPGALSAARELLRHPPSSTTSPGAMKQWRDDVDRLHGMAHSTSTRSRPRSSRRQHEASASMRSPSVRGAQTNDLQAEPDRRRAREDARVSLERARERRQNIEGRNLDQDFVAAAPQTPIESRLEGVNRANLKFINLSTTTSRVENLDTMNVGGVGLIADPSSKNVASPSLCEQGVADTAASSGASKKSDQTRRATCKSITHAQRTPLAEPDKVGVDSTEDGGILPHPNGTLERQLKESANRQVQLQKGKGLGAKDLRSACCRGEFVTGEVGRYEGDSVSNCSIR

SEQ ID NO: 52233 - protein, 210 aa, Zea mays
  Coding DNA Sequence Number=SeqID_8858
MVRAFLCAVPEINLGETFSSSLCDATTPEGFGPETSRWVTWCFGYDKTPEGATSSRLPGKGPFIITKILKPGTYKLANSQGEVQTSVGGAAAPSASTPPSAESDPASDSNTVGGSPPRRKMSTLRLSHRRQDLLQEPGPSRRLDRSLRSLSQLSPEDASPAHGLGSPTPGLVPPADDPARLRPTKFSSPADFASVHAHTAASGSGSSQSG

SEQ ID NO: 52234 - protein, 331 aa, Zea mays
  Coding DNA Sequence Number=SeqID_8859
MGSARVAFVLLLLEERNFAEVGYLSAIARLQGFSSGSPAASPHQWSPKTVTTSSMVGRSKPGRDLCPALSFKDLHHPCWGGGRAESELYLSYGLAGHLLLQHSGERALTGLAEGADFDNTGPIGRKRRQLQHAWFAGSAGSGTASGATSHRWAECGYLPTVRAAVVPHAPGDRPRRRALLGRRSCSWVVLPLLRHDASARRSVLTRPGGLEWRSPGGQVAAIVGAEVVAAEEVLVADEIAAAICAPGLRLFGFDSLSSPLEWGRGRGPCRSSVYPKVITTAVWPPGAEVVVAAAGVGGGEPPGSCCSAGPPMWGVVRTCGSGTGVPFVMAP

SEQ ID NO: 52235 - protein, 272 aa, Zea mays
  Coding DNA Sequence Number=SeqID_8860
MLRQAIASPGSAHRGHGNVPCDLVKLLCHLPKPEHRRHRFGGGSPLGAHSLDVHGSLGNDNEMLTVGVLNGVRVQAGGIYALEPTRFATGKRDDDPRGALCYNSPDKSGEPTEQRTGLSGVATGEKVPTVTAPNPNGHADAAHTGYLTGDLTAEGARHLTVDRPSRAPSDQINPSTMIPYPHPFLATSPTTWNRNHGGEPPWNLVGVWFFPTPAGSPPPPSGHPTPSASPSLWHMGPHPRRRPRAVPRWRAKLGRLPRGRARALARTKSPPT

SEQ ID NO: 52236 - protein, 39 aa, Zea mays
  Coding DNA Sequence Number=SeqID_8861
MEQSSDGLPISQRRANSSTKHSSKSDEVAEDMEGYVSLY

SEQ ID NO: 52237 - protein, 138 aa, Zea mays
  Coding DNA Sequence Number=SeqID_8862
MASRACRTGSKGERYGCQWPRAKGKKKMEQGGALLGARLGEFGCGIFFFGRHGCQWPRAGSSPEETQQGRCAEKGARICGHGQGGRSAASHPSKASNSREQGSPRPPWRGAGIKEGSRGPPAMGKKGTGAWTPWIPGG

SEQ ID NO: 52238 - protein, 84 aa, Zea mays
  Coding DNA Sequence Number=SeqID_8863
MGESGAATCPEKVIYSKASTYNGSSSLISCEKQTIRIEFLNLARPRVPMDPCPQTVTILLSKWIQPIPDLARVLEKSLDFYRDP

SEQ ID NO: 52239 - protein, 96 aa, Zea mays
  Coding DNA Sequence Number=SeqID_8864
  Subcellular localization annotation: CTP_CleavageSite=37; ConfidenceScore=5.25e-01
MGTVAKTSSSVTATVDRCWVDAGTSRHLDGSTTPRIAASPGMGATGLPATGGLSAISSVDGTATDGGSVSHAQGSEGAVNVQDFLVHGSGGSGHLP

SEQ ID NO: 52240 - protein, 657 aa, Zea mays
  Coding DNA Sequence Number=SeqID_8865
  Homolog annotation: Hit_ID=Q2RAK3; Match level="QueryCoverage=78%, HitCoverage=89%, E-value=1e-124, Identity=46%"; Hit description =Expressed protein
MDAVAFPPPPAPFLDDDLDFGDFTFASAPQPQPQPPTAAFDDDWGDFVASGLGSDAGASAPTDAPAAAPSSSPWEKPRGPLPLSLFGADADDDGQEEEEGPAGPPPMDTAPQCAPSVPSNGSRPADLKDLIAGLYGYQPPHTADAVPQVKAEEDDQGFGDDDWEFTAATGQPAADQDGGGPGHADGFGKIEDISKSLSTDQEDWSSFTSADGKLNHVRLTTDGLGNHESTGEFVRASTYSPANSSAILNLYKGSKRVDDVVIAQGSAESVQSSSDLFSNNEMGAQKGSTISDENNKATAMGGDIQEIYDKLKDSSLPEGFFTEEQPWKDIYITELLNCIKEEHLKDFEQEYCLAEKIEGATEDTDIAVELYKLSISTLDLLKLASKEEQGDYVGAWYSMLLSCAQELKHGVALWQEFYHANVCDRVVSEGGHYFIALGEIYRVAQILYLSLQRFKPWVLADPGMLSKMLSCLDSCTYAWTSGLETALKMVIDSSHIDSSLAKALMESIKNITKLEVPNLQKNIPNNEMQCRLTLLPSSLLPGHSFVQVVIYNILSIVPDDVTKYSKSKGNDKFGSGRLATTANKSLEIASFQRLSSILFVFFPQFNGITAIRKIIVFRTSPALEFMVIDIRGPLRQQQVSFNAAAASSMIIRHAAEN

SEQ ID NO: 52241 - protein, 403 aa, Zea mays
  Coding DNA Sequence Number=SeqID_8866
  Subcellular localization annotation: CTP_CleavageSite=38; ConfidenceScore=5.03e-01
MDISVDDYLVGGVPIFDAHTGLGLAGSGQMVVVPTPVVAGPVAAPTVAKGSSQDPWSKFCAGGEIASAAAAKDVAASVAQQLRHASAFAEHIASGALISEFSAERQGLEGRIELAPNRKRKTRKKPAPRPRLPVLRPASPSSAPPTRSWGKGVCTALRTKRRPPPALGRPSTRVARGRVPSAWCAYRPFDTSGKEVGLRFLGWLQEELELLPSIVMGIMSFASLITCEGAANVLSREGCRHFEVFDRANEDFDRGIFQIEDEVLKRSAGALYDRMWGPHGRDTIRERSNRTLEHMMNDEEVDDFGGLEILLTQAEDARMGVEEQPAPQTDPGGDSAAAAASTREDAPAAAAPAGEDPAAVAAPLQVAGSSKKATRTGCTRQCPVRQAGSGEKAALGTSSAAYD

SEQ ID NO: 52242 - protein, 246 aa, Zea mays
  Coding DNA Sequence Number=SeqID_8867
  Gene Ontology: Biological process=intracellular signaling cascade
  Homolog annotation: Hit_ID=Q2RAK5; Match level="QueryCoverage=25%, HitCoverage=12%, E-value=4e-24, Identity=77%"; Hit description =Expressed protein
MGHDEGQARRWGTTRGGAAMGHDPSSEVQEREQHLNHLPRDHVSMEGERNPRARPCPAAGSQLPSASSPDPEVGTRQAAAMLPGSPVKRLLRRAAKGRREKAELAGLAAAAAALLLLCAASLRCSATARGRLWAGGVSIAAAGSGGEEECDLFDGDWVWAGGGGGYPLYDSRDCPFLDVGFRCAENGRPEASYTKWRWQPSRCHLPRFVSLLSSSSLPSSPVRHLKNVEIGLLSLSERKKRARAYY

SEQ ID NO: 52243 - protein, 258 aa, Zea mays
  Coding DNA Sequence Number=SeqID_8868
MPWKWDRHILESLFFSQMNQQEAPTGVGEFLRDFGIPMVLWQLLQEVGYIEAPKKPSWPHWMFHAEGMTPWEGAQVTALEVLTTICYQKWEEIQATSMRLFPAVALSDPVVYHHQARLMENIPIGQDSVESASARVLMVVLELQLTRGHSRQMWQQLYTGSYAAFKMMEMAKNRACTQAQEQLEETKIQAKRIIGLEHQVTELQTQHQVDQHRIKELEHQLTNAHSKSKVLSQQQEEIRSYAVTIREELKETMGFLSH

SEQ ID NO: 52244 - protein, 48 aa, Zea mays
  Coding DNA Sequence Number=SeqID_8869
MAGGRELARAKEWCLASEEGLVRHDFVNGSIRIRAKDQGEHARFWFKG

SEQ ID NO: 52245 - protein, 117 aa, Zea mays
  Coding DNA Sequence Number=SeqID_8870
MTSPWRLSVGKSHPVEYILLLGIGVESDQGATGGKRTGRKYGCAHMKWTDGSVTWPKRRKDIQSRSNSQDCNLADGEYVLIPEQGAVHEEDQEQASETAIEDLPAAPAIEGKPRFYA

SEQ ID NO: 52246 - protein, 57 aa, Zea mays
  Coding DNA Sequence Number=SeqID_8871
MKLGQSVYRMDWQLCLESGDKWRWHHQFLDVPGMFGFLYSDIVWFNIFKLERQVSNN

SEQ ID NO: 52247 - protein, 101 aa, Zea mays
  Coding DNA Sequence Number=SeqID_8872
MCAPDDFCKNSKQLGIMARSGFRELRIWGAWLRKGRTGREGSRHTWWVIVSGNEVEKRGSVRPAVVGGTGEDPTVAVAVAWLFVAWREIASEVKERTLGLG

SEQ ID NO: 52248 - protein, 123 aa, Zea mays
  Coding DNA Sequence Number=SeqID_8873
MVMHPLGLFPAEKRDDPMWCSRALQSDAMAHLVNLAQTTKLTLDSREDFVQELEEANDHLDMHHLEMEANEARSEGEEAPKELGPASWYQSRKCRGQNKQVPSPPPPAPTVQELMAQQNEILR

SEQ ID NO: 52249 - protein, 65 aa, Zea mays
  Coding DNA Sequence Number=SeqID_8874
MAYLQMNAPHGPTVAPPVLAAVAVSWCTLLGFRDHVKIDRPAEQQAHFSVTPWFFSRGACICVHP

SEQ ID NO: 52250 - protein, 94 aa, Zea mays
  Coding DNA Sequence Number=SeqID_8875
  Pfam annotation: Domain name=zf-CCHC; Domain location=42-59; Score =28.4; E_value=2.7e-05; Accession=PF00098.14; Description=Zinc knuckle
MALVSGEEQVESLGDEEVALVARRFTRFHNNRMSPRRGRSKDGCYNCGDPDHFVASCPKKGKEESGPCDHHFGRRKGKYSFGKYKSKGGFNKEA

SEQ ID NO: 52251 - protein, 141 aa, Zea mays
  Coding DNA Sequence Number=SeqID_8876
MARVRELTQLAGETIDYMFSRFQSIVNKICANKAQLPYNDHERALKLLHALDRRVWEVKVSVIIESPDYETLIVDELFSSSSPQRLTTRLGPRLRTLVSAFRPRGVPGPTSKLSLRVPAQMGRREMEHKGEREPLLVLSCA

SEQ ID NO: 52252 - protein, 165 aa, Zea mays
  Coding DNA Sequence Number=SeqID_8877
MMLVDYTTVLDGPSVTVEGPTQLGIESAVEVTPASGVSSDGSSDPSLRALAPLKALCHGSNCHWASSSSPSPSRVSSSSRDALKWCRGASLAEVQGKVVSHTPPPAEARGKSLVAPAPGVDAPASRAGDDAASPADWSDLTPCDAGDAPPGGKAKRGSQTYVQCT

SEQ ID NO: 52253 - protein, 336 aa, Zea mays
  Coding DNA Sequence Number=SeqID_8878
MDKDRQDAAQKRRAFTRVGDPMREVKRARGGAKSIAPGGSKPPPAAKPAVPGPSKSSAGSRAAASGAGKPPSTEPAKERRPPSPVRTDKAAAGGANFDTDICVDDYLVGLDAEQLAIVPSPVVAPSPVAAVGAKGTSQDPWSKFCASGKISLAAAARDVAGIVSQQLKHEELEVLLTIVTGLMSFASLITCEGAVNALSHEGCRHFEAFDQSDEGFEHEIFQVEDPVMKRSAGALFDRMWGPHGRETARERYDWAMDQMAHDEEVEDLGDLDSTLPEASGVELAPPSDVGEGPSATLAPTGAGEDPTPATALTGADALKVVAEPAAEDPGPSQVAE

SEQ ID NO: 52254 - protein, 15 aa, Zea mays
  Coding DNA Sequence Number=SeqID_8879
MDLFGPVTYLSIGGI

SEQ ID NO: 52255 - protein, 157 aa, Zea mays
  Coding DNA Sequence Number=SeqID_8880
MGKNNKRKREPTPPSEEFGDSEYSEEEFSSEPEGSPAPVSPPASSDDSDDSQGIAAEVWTYIRAVERAGLEGSDESEYSSDEEDSDGGDEGEDDDDDDDDDDDGGNSGRGGGDGRGSTKGSSRGSTKGSSGGSGDSTRGSSRGSTKGGGGGRGRASG

SEQ ID NO: 52256 - protein, 152 aa, Zea mays
  Coding DNA Sequence Number=SeqID_8881
MAPKRASSKAAPSVDEAAKVALLAKKKGKALADNTPQEVCEDEALSKRQCNDQPTPEGTLCTCSSGGQPQAPPLGFAPLEGEDAIEDGEVIGVSAEEQLQLRALRIKNRNLQKQKDVLEAKRQRVTAQAKVRQMIRDEEQRARELEQEIALM

SEQ ID NO: 52257 - protein, 199 aa, Zea mays
  Coding DNA Sequence Number=SeqID_8882
MPATRLRRSLAERETKDICEPSKSTPGIISESGNRRSAKGSTLQRWMAATTPATVGPARRDHPLRLWVTREGTEQTIGNEGLQIISSTVTVEKGHGSRGGTTVTRSAIAKRRGWWLSGQGAQFSFSGYSLRLRKPKQETSSRVKNHRRSLFWVYKGPSKTRSTLRSNPPRNSNSKAKRPFLERLAHAQRSPREPPVPSH

SEQ ID NO: 52258 - protein, 43 aa, Zea mays
  Coding DNA Sequence Number=SeqID_8883
  Homolog annotation: Hit_ID=Q7XBD4; Match level="QueryCoverage=74%, HitCoverage=3%, E-value=4e-07, Identity=84%"; Hit description =Cinful1 polyprotein
MAQEIIQRSEKGIHDARKIAEAAEKSAEPEGQNRLCLRFVLVI

SEQ ID NO: 52259 - protein, 146 aa, Zea mays
  Coding DNA Sequence Number=SeqID_8884
METKSHHQPNQGGTCKNCATSKAEYTNTQLDLPVTALVPTISRMGDPVSGRMRDKVCARLHSGTRFTGYHFSRHVFSTFKRLTQILSKVELCKNNRSVQVGQIQTCDFKNSQLQVQTSKQIDPRLSGKITKKSDPRLFEKLSKSTT

SEQ ID NO: 52260 - protein, 351 aa, Zea mays
  Coding DNA Sequence Number=SeqID_8885
MGRRETEHEGGKKEIGKRGNLRPFVLSCAQVGRGGGSSEVEVESVFRGRGRVRAPGRARRRPSSEAKAEYEPWARARRSSSSSGAEAESEPWGRARRSSSSSGAEAESEPWGRVRRSSLSSGAEAESEPWGRARRSSSSSGAEAESEPWGRARRSFLWHPRLDLAAVSLTLSSGTAVGATQAALSSCQVGQWSDELTAVTSALSTGARVRIRCQAILALNAPAIRSVGMAIWPRLLLGEDWASGEPKYNGSSSLISCEKQTIQIEFLSLQVTALVPTVTGMGDHVSGRVRGKVCGQVHSGTRLIDLPYFSACAQYVQKLDTDHASPWIRVHRPSSFYYQGGYNQFPTSREC

SEQ ID NO: 52261 - protein, 295 aa, Zea mays
  Coding DNA Sequence Number=SeqID_8886
MAPRTLCDDGGSPPLTKARGRQQGLDSPDSCPSARLQRSSDGHDTARTGCQNLSGCHDGIRSQPVSGARFCRGAPCIPPASPSPGNLGARPSGNLGVPATISLPRGNPAVPCGNLALPRAILCPIPRFGVRAPVALSYLHAPAHYTRLLMPRHGEKSGSGTDQHPYAPTSPRVPPPHALTAVPRHPSRATSVRCREKGAGVGNIRPPRECALSGVGQTIRLSPSSIKNYTKQKGSCSRTILGSGCVQCALSGVGQTIRLSPSSIKASVGVSHSSLFTMDTDARPMDSRRSSTGNQ

SEQ ID NO: 52262 - protein, 85 aa, Zea mays
  Coding DNA Sequence Number=SeqID_8887
  Homolog annotation: Hit_ID=A9PGP1; Match level="QueryCoverage=70%, HitCoverage=19%, E-value=8e-15, Identity=68%"; Hit description =Putative uncharacterized protein
  Pfam annotation: Domain name=SAM_1; Domain location=21-77; Score =35.9; E_value=1.5e-07; Accession=PF00536.21; Description=SAM domain (Sterile alpha motif)
MASSSASSRHQVTITLGRSGQAEAPLTVTGLLNSLGLEKYIVLFQAEEVDMAALRQMGESDLKDMGGPRKKILLAVGPQSKQRQI

SEQ ID NO: 52263 - protein, 296 aa, Zea mays
  Coding DNA Sequence Number=SeqID_8888
  Gene Ontology: Mol. function=protein dimerization activity; Cellular component=nucleus; Biological process=regulation of transcription, DNA-dependent
  Homolog annotation: Hit_ID=Q41735; Match level="QueryCoverage=46%, HitCoverage=36%, E-value=2e-56, Identity=86%"; Hit description=G-box binding factor 1
  Pfam annotation: Domain name=bZIP_1; Domain location=96-159; Score =88.2; E_value=2.6e-23; Accession=PF00170.12; Description=bZIP transcription factor
  Pfam annotation: Domain name=bZIP_2; Domain location=96-150; Score =37.0; E_value=7e-08; Accession=PF07716.6; Description=Basic region leucine zipper
  Pfam module annotation: Pfam domain module=bZIP_1::bZIP_2; Domain location=96-159::96-150
MGSFGLVATLHVATAMLWLDVEVGLLHSPMTLERAPNHTLGNATILPQHCFSAPVIKPSATNVANSRAIGTTLSPPPGVMVPVHNAVPSDLSVKDERELKREKRKQSNRESARRSRLRKQAETEELATQVESLAAENTSLRSEIGRLTESSEKLRRENSALMAISCQSAFPLTRGALSLIRSQPKSKLMHYQRNCLRFQVSQVSAKGQVDALSKELFALSTVTDNRCTSYDTVYHESNGSSGVYNLFIRALSSYPTDVSESWTENADYIMEECELLGSWGPGECPHSRVVTAIALC

SEQ ID NO: 52264 - protein, 406 aa, Zea mays
  Coding DNA Sequence Number=SeqID_8889
  Gene Ontology: Mol. function=protein transporter activity; Cellular component=cytoplasmic vesicle; Biological process=intracellular protein transport
  Homolog annotation: Hit_ID=Q5VQ78; Match level="QueryCoverage=10%, HitCoverage=4%, E-value=2e-19, Identity=100%"; Hit description =Coatomer subunit beta'-1
  Pfam annotation: Domain name=WD40; Domain location=49-89; Score=20.7; E_value=0.0055; Accession=PF00400.23; Description=WD domain, G-beta repeat
MAELKVVLARLLSKFSFSVSPGYQHSPMFRLTIEPESGMPLVIWSLGSPDPNFTLDGHQKGVNCVDYFTGGDRPYLITGSDDSTAKEVGRASTPSPRPRPDVAQAPLPACPRKFHPHRAPDRLPIVTAASTSSPRLTMPPSIYRLCPPSSLGLPLILYRGLLLGKIHGRVSSSARSTAGQAHPAHAALHGIAVPADLLSPAVHSPNELLSMEHRGRGLLLGEIHGWRPLLLSPPPASLIEVRYLRLIFEEVSAGTQIHGAPNARKQSLQAANVVVREDKRLLTVLFPDGRDGRTFTLKAARPGLRHHRKLRFARPRARTRAKPRKTANSAPPDPGLGLGLSPGRRRTPLRPTQGSDSGSALEDGELRFARPQGSDSALASADGLRLARPRGSDSTSTSEEPPHRPT

SEQ ID NO: 52265 - protein, 286 aa, Zea mays
  Coding DNA Sequence Number=SeqID_8890
MNKRPALKVPLQTELRFHLRCSDNDPRYGWSNCSSDGLRADAAATLPSPTPTLEGRGQGPSALWQIPTQILPDEWGTDLRVEAPYRCKGRTAPEHERRPGSARHLGRSSRAHGATTAFAAGGGTGSQAGEPNALRLTTPAVDQPRVVEVRPSRGAGERPLPRTLKERLTHELAWEVELRLSPASTPARMMNILEAEGGTKIAARLASPHPGADQRVKGRAAMQAACNRAKWAHFSGFQHAHASCNRRAGRYVQATAPPLAPLPRLLDCGTSIATRGDPAHDPAAPA

SEQ ID NO: 52266 - protein, 131 aa, Zea mays
  Coding DNA Sequence Number=SeqID_8891
MELKSLSQRIECVKLESWSLRMFLTTVAALGQLAHRTLSGAPCRLLARATRRPRIARPTVALETVGSPDSLAIRPDLRHHRKLRSARPRARTRAKPRKTANSAPPDPGLGLGLSPGRRRTLLRPTQGSDSG

SEQ ID NO: 52267 - protein, 67 aa, Zea mays
  Coding DNA Sequence Number=SeqID_8892
  Subcellular localization annotation: CTP_CleavageSite=40; ConfidenceScore=5.10e-01
MAAPRTTRPVALTPQRDKRRLWQGKRATLRLRHNDRVKKAASERVGSTPTTGQRFEGRPLGRVQRPP

SEQ ID NO: 52268 - protein, 213 aa, Zea mays
  Coding DNA Sequence Number=SeqID_8893
MEYHVVTAVEGHELKTPETEHRPGLERLLETAHLELDGKLFVNTQQAPTWRANCRRFETGGSLGRRVGRCGGSSEVEVESEPLGRARRRPSAEARAESEPWGRAKRSSPSSRAEPESEPWVGRSGVRRLPGLSPSPSPGSGGAEFAVFRGLARVRALGRAKRSFLWCLRPGLAACQPRSVEWHSSQSGAGGAVLLSGRSVERRSDCGHFGSVN

SEQ ID NO: 52269 - protein, 434 aa, Zea mays
  Coding DNA Sequence Number=SeqID_8894
RRTSELSLETIDDGDRAGTLGYSKAALGTPGIHPRRQSANRHGLTTQDTFPSPDRREDPAEEVPAPARRGDPVPGLHPLDPVPVPSPGLATISPAPARPRRRPLAPARPAALPAPPPRAVAIPPPSSAAMAGSAAPAPCPVPARLGRPHARPARPPLAGGYEIDDSGYDYGAGKCRPPAPPLGAPASGVAAGGDPDDGDGDDSSSHDIDFSANLEPEGWVARPITRDAARGCHFHDALDTLLRRAFDRHTWSVEYRCVVYQHSRGVYPDRWEATCLVRCPENSLQGAEACSEHYSISERDSAEAAMQDAARRALSHYCSVFGGAADGLDLKYYPRRPSGSTGGVIVSPVGEGNPRLSSTVNLAVVLNTELDHALDELSRARAEIALLRAERAERRHLDGGSPAPVGTQHPYRSPQRGHQSYGNPACKTKITLEP

SEQ ID NO: 52270 - protein, 25 aa, Zea mays
  Coding DNA Sequence Number=SeqID_8895
MENHPEKQCYHKCGVWGLINSVANG

SEQ ID NO: 52271 - protein, 118 aa, Zea mays
  Coding DNA Sequence Number=SeqID_8896
  Subcellular localization annotation: CTP_CleavageSite=88; ConfidenceScore=5.22e-01
MKPRRRRKIMHWSVRRQRKRPRTPRGRRRPSELVQPPPLQPNLLPSRRTGPNLRHLLPIPRLCPNRRPLWPQRRLGRRGGGCGNGRMRGAALKVGQMLSIQDESLVPPPVLMLCQGSS

SEQ ID NO: 52272 - protein, 241 aa, Zea mays
  Coding DNA Sequence Number=SeqID_8897
  Subcellular localization annotation: CTP_CleavageSite=63; ConfidenceScore=5.66e-01
MAGHQQQQQQQQQQQQQQQQQQQQQQQRSPRFQGRWKVQGPNRCSDSASGFSCSSRGPTAAVLASGGVKAIEEVPAGGSAPASDIAPTPDVGGDTEGASSSNPPPAPEELEVVFGRRLQSGAKEEATPIPLPRMLSRAHQVLSDTGAAILREWEALEAKHQCLSDWRTQLEERTRMVSLQFISERSQLERDRKEYKEDLLKVYARELEAHRREKKVARREEVVSQWEALVIEFWAKLSALD

SEQ ID NO: 52273 - protein, 70 aa, Zea mays
  Coding DNA Sequence Number=SeqID_8898
MKCLKPDHRPLQGLVLMESAEHVQQLMKEHEGLKEKINPNGYDSENLDNSEAWEVEEGYDAWKDEEGYVP

SEQ ID NO: 52274 - protein, 248 aa, Zea mays; identical to SEQ ID NO: 47384
  Coding DNA Sequence Number=SeqID_8899
  Subcellular localization annotation: CTP_CleavageSite=35; ConfidenceScore=5.05e-01

SEQ ID NO: 52275 - protein, 95 aa, Zea mays
  Coding DNA Sequence Number=SeqID_8900
MQDAARCALSEYCSLFSGVVDGIDLNWIFVMIVIKAVQAIGQILAAMQQVQQQPPPPQPQVQVQMPQVPRDKWTKFMRGHPPVFAHSADSMDVED

SEQ ID NO: 52276 - protein, 107 aa, Zea mays
  Coding DNA Sequence Number=SeqID_8901
MQDAARRALLQYCSLYSGMTDGLNLKCYPCRSTGSTGSVIVSPVGEGNPRLNSVVNLVIVLNTELDHTLDEVSRARGEIAELKAEHAKCLHKDYNSPAPAKTQHPYL

SEQ ID NO: 52277 - protein, 165 aa, Zea mays
  Coding DNA Sequence Number=SeqID_8902
  Homolog annotation: Hit_ID=Q5WMY5; Match level="QueryCoverage=44%, HitCoverage=56%, E-value=1e-10, Identity=49%"; Hit description =Putative uncharacterized protein P0431G05.3
MSALDATVPYQPLTRVSAGAEAAPAIGAADYRGGQAREHAGVHGGAGGHAAAVLARALPPVRRPLPPVLPPEHGAPTPHRFLPLFFSTSLCAATVLAKPRGARSVHGVVARQVHARDFMEAAKKLQSYFISLQREDQPTAEEMLRKFILVTFVDGHLGRFYGWLL

SEQ ID NO: 52278 - protein, 422 aa, Zea mays
  Coding DNA Sequence Number=SeqID_8903
  Subcellular localization annotation: CTP_CleavageSite=65; ConfidenceScore=5.60e-01
MLDASESKGCASLVRLHAACMAVRPFTRWSGRKWRSASIARLQGFSSSSPAASPRRWSPKTVTTSSMVGRSKPGCDLCPAFSFKDLHHPCWGGGQAEPELYLPRGFVGHLLPQHSEERVLTGLAEGADFDNAGPSGRKRRQLPRARFAGSAGSGAASGATFHRWAERGYLPDVRAAVAPRAPGDRPRCRLLLGRRSCSWAVLPLVWYDAPARRSVFARPGGLEWGSAGGQTAAIVGAEVVAAEEVLVADEIATTIRAPGLWLFGFDSLSSPLEWGCWRGPYRSSVCPKVIAAAVWPPGAEVVVAAAGVGGGEPPREFLGSVGLAARGFSCSVKETFGRSAMSRRQRCQHGQRQSWLEKKHRRPEPGRAVHWLDQLQSRVAEAMSRADVLGGQLAEATERPVEASARAGFLEETLAAMAPARC

SEQ ID NO: 52279 - protein, 297 aa, Zea mays
  Coding DNA Sequence Number=SeqID_8904
  Subcellular localization annotation: CTP_CleavageSite=16; ConfidenceScore=5.16e-01
LAVALAPARSLPWRPPLQAVVELLFLPIAALQLARSWLSCSLLRPSSPRSSTSPAAGAASPSARPSAHPARLHLPCCRRPRALLAGSEVVLVSSPSPVAVTPNSPPLLMHMASTVEFAECRRPAARLLLSPSLADAASDVDLPVAWRRLPVSSPGSRTGVENRSVLLAVSSSRPCSLSSSSLRPRAPSNPILPCSATPSSLILGPSPWPQFPPRLPNRRASLALLNVGCRSPSALSPPAANSPECVASFPFILPCDLTCACSLLVLTRIRIYRWPKSTRPVSPARSPLFKPGPSPAR

SEQ ID NO: 52280 - protein, 83 aa, Zea mays
  Coding DNA Sequence Number=SeqID_8905
RIWGVVRFAIVPSMGLGVCGSLCQVRPCLLTLGVFKGPYNLRRKVNHGSWVAMGLMVLGSDSGNGEDEAMEGDFQEFQDYDEF

SEQ ID NO: 52281 - protein, 207 aa, Zea mays
  Coding DNA Sequence Number=SeqID_8906
MTGETLLGKFSPYGDMPPHTRKTARKSTGPIGVPRHQLAPRHEESSSGSNDPIGDLEVQVEQLRTELHHRNRVWVEDGQRMNELRADVRHLQDELAERDLTIDWAVNSRSIAWDREAKARARVAELSVAIDNLQVYYNNLHEEVHVLYSRLHPDVPADPVAMGVGPSGTAREGLGGELELFKPTPSMNLADEQSSTTDSEATKDDKY

SEQ ID NO: 52282 - protein, 71 aa, Zea mays
  Coding DNA Sequence Number=SeqID_8907
MAISIVLLSVTAVVLLHLCGQRIKACQDGVECDNEQSEVPECVVGDLPEQQPGGDAGNMDDFEEFQEYDEF

SEQ ID NO: 52283 - protein, 46 aa, Zea mays
  Coding DNA Sequence Number=SeqID_8908
MAMMGSTSEKMYLCQVKKQQTFVASVPRWCPKMKIKTKAVGGRVLR

SEQ ID NO: 52284 - protein, 205 aa, Zea mays
  Coding DNA Sequence Number=SeqID_8909
  Pfam annotation: Domain name=GRP; Domain location=111-194; Score= -18.2; E_value=0.0055; Accession=PF07172.2; Description=Glycine rich protein family
MTAIAAKSSQGPPYTDHSPTALAPFGYQDDLQMTRVLTAKRSNTDIHGTAAYVAVARAGQPPYLPAAVHGANKSSSIGTSSSNTAHTRIAQDCWVPSTATVALGYYGGAANQRFTLASISSVVAKPYADPVFTERSATNAARKTAPEVAQSYPGDGDGGKGGGEGDGGSGGRRDDGGDGGDGGGKGGSGDVGSGSGKASGKAPLV

SEQ ID NO: 52285 - protein, 187 aa, Zea mays
  Coding DNA Sequence Number=SeqID_8910
MIKIFLETEVGENPEKGLAQMYENGNLHNGIRVQMRQVQLIEIKETAENGGDGKSKPTNEKRNVNDRFMGILYWNGDTAANPPRAELFWKQNPNINEMKEVGFRNDKHMVTSEWKLVVGVVGEDDCSSGALPLPLWCHRDLSGGTSRSEILGKQRSGSKGKSEVRAQKAKKHVDASINGVSWVGHYF

SEQ ID NO: 52286 - protein, 85 aa, Zea mays
  Coding DNA Sequence Number=SeqID_8911
MPTLVRGYLFTHCTTEILLDPVFEDLRTPKVPNNHQEPNCNLADGEYVLVPEQGAAQEVAPDLAPEPAPEDLPATALEGKPRFYA

SEQ ID NO: 52287 - protein, 225 aa, Zea mays
  Coding DNA Sequence Number=SeqID_8912
MGRLEPRAEWESRLVGKVCNLCRVLETGISTVLTMARIRFTARKSVIPFLPSRLAERPLRHTMLGQSSHLERLHRRLHEELEHRRQEQEQQDSSPSPQWEVESERPPSPAPQPEMPPAPPQGIPAAGGDPNGDGDDDDAGVSSSHGLERSEETELEGWIARPINLDTARGCHFHDALDTMLRRAFDRHTWSIEYRCVVYHHRRGLYPDQWGLLAWCAVRTMISGV

SEQ ID NO: 52288 - protein, 46 aa, Zea mays
  Coding DNA Sequence Number=SeqID_8913
MGKNNKRKREPTPPSEDFGDSEYSEEEFSSESEGSPAPIPLQVADE

SEQ ID NO: 52289 - protein, 247 aa, Zea mays
  Coding DNA Sequence Number=SeqID_8914
  Subcellular localization annotation: CTP_CleavageSite=19; ConfidenceScore=5.42e-01
MSRRSPSAAAFSSASTNTTAMLRMRYRCWLPRVELCFCVSGHFPLSLPVGRGALTRGHRCSSALPHTYPSLPYLVPAAATPAGTAEEEQDPTSPPGWRTEVFVRTWRRHGGRWGDEERGVVESGGADLRGNAKGGMAGGETRSSTREGWGHRAHGEEICGETRSSAREVGKAHGEEIKLEVGVELSRPRSSRRGGWKLQSASRTGKGWWARGRAMRGSWEGGRRWRTRESAHRTGEELHGILDDRDS

SEQ ID NO: 52290 - protein, 158 aa, Zea mays
  Coding DNA Sequence Number=SeqID_8915
MMLVDYTTILDGLSVSVEGPTQQGVESVVELRLRLLRALRVVVRTATSIIVSVFVRVSSSSRDALGVVQGASLAEVQGKAASQTPPPAEARGKSLAAPAPAPGVGAPAPRAGDDTVSPGDWTDLTPYDAVDALLDEKAKRGSQTYVQCTSYGPSTNTS

SEQ ID NO: 52291 - protein, 140 aa, Zea mays
  Coding DNA Sequence Number=SeqID_8916
MISGVKRPSQSTILSLRGTLPRQPCRMHGVDDGLDLKYYPRRSTGSVGGVIVSPVGDGNPRLSSMVNLAVVLNTELDHALDELGKVRAEVAELRVEYATRHYLDGGSPTPVGIQHPYRLPPRGRFDYGTPDSRTRIGLDP

SEQ ID NO: 52292 - protein, 353 aa, Zea mays
  Coding DNA Sequence Number=SeqID_8917
MNALSREGCRHFEVFDQADEDFERDIYKVEDPIVMESAGAIYDRMWGPHGREVVRERAETARAQAARGERVDDFGALNSALPDPESNPAEAVSEATLEPPPETAEGAPDAPAATAAGGGPPLETAGGAPDAPVAAAPRAEDPAMVAAEATSEATAEAPATAGSSQVQDFGPAHATATTIFLAASTVDGGSKYDGSASEFSDFADSGSSVEWTEESSEEDLDYFAALDVAAAEASPHAADTEDVPGPSTGRRRRRAVAKRRVSGVEGGRLRACMMKLCALAHLAMLAKALRAWSGVFVMLDWCVYSRSWRGQFGVVVFAFVTLRPAVPSGNFCADGLCSGLRFFALAVLVRLHP

SEQ ID NO: 52293 - protein, 101 aa, Zea mays
  Coding DNA Sequence Number=SeqID_8918
MTSAVVGRDAAVCSFGWAKMVNTRKGGGIDLPPNRHSRRIFRQPKQQQAEMDPLNPPPAGAGPALAAQMRIMQQMVDTMADMHAQMRQECQEMRQEREEMR

SEQ ID NO: 52294 - protein, 76 aa, Zea mays
  Coding DNA Sequence Number=SeqID_8919
MAGTDLVGDERGARRDQGYSWRRIRNPRAFLQSVSDLRKQIHFSKHFCKTESLNIEKPYLDSHITSIPLRVFSLVG

SEQ ID NO: 52295 - protein, 285 aa, Zea mays
  Coding DNA Sequence Number=SeqID_8920
  Homolog annotation: Hit_ID=Q6J9V9; Match level="QueryCoverage=49%, HitCoverage=46%, E-value=3e-27, Identity=52%"; Hit description =Putative uncharacterized protein
MQAVCNCTTGMHPFDFDASSMEAQAHTSCNQRAGYYVRKTAPPLTPMSRLLDCGTGVAIRGNPVHGPTMPAEHVVYGAADTFGRRSGRRFTSAIMTASKKGTGKGDTSKGILLCEGSGPRALLLIRGSKAGPSEGLAPRNGSTAASSHSGSAPTTDQGFEGWPPEGFDSRLRTRRARDDSGYVRYMAEARATLPRYLGHFRHQQERFCNGIPSEGGIEPSDPIKRDQVQQITCRGSRAALTNPAPAKPLTASTYQPENSEPDHAPELRPVRMREQPDRPRRHERH

SEQ ID NO: 52296 - protein, 79 aa, Zea mays
  Coding DNA Sequence Number=SeqID_8921
MARVRPSCALNSSTEFGWAADVKECHGDVVTFILLFNWVGQEQVPQDEALGGCCDVFVRDLGRRVPVNFGLLDRCLLIM

SEQ ID NO: 52297 - protein, 47 aa, Zea mays
  Coding DNA Sequence Number=SeqID_8922
MAASPASLYAPSSPSRFGDGTHGQSVLCDARELRGGKFYRVRGEPEI

SEQ ID NO: 52298 - protein, 121 aa, Zea mays
  Coding DNA Sequence Number=SeqID_8923
MAGHPARQWPREEGFGRVLCPSRRRNPPPEEHGRGDEAPGEFFTALLKPAPRRRRGYHKDQVEDLPNRGAHELVIAHPGAHTPKHRKVVTDGVTPRVGVNPPLSWADTPEMNGSTGWDLVG

SEQ ID NO: 52299 - protein, 50 aa, Zea mays
  Coding DNA Sequence Number=SeqID_8924
MAVMGSTSEKMYLCQVRKRQIFVAFALRWYQRKSARNEVREERILHIELL

SEQ ID NO: 52300 - protein, 97 aa, Zea mays
  Coding DNA Sequence Number=SeqID_8925
MTKRQKSFLREHRVSSEAAKVVPKGAHRILIRSDGERLKVGLFTIFACVHPTFKNAVAVPREASRAQKSPCPAITSSSASTSFSICVKFLLLLIEAL

SEQ ID NO: 52301 - protein, 92 aa, Zea mays
  Coding DNA Sequence Number=SeqID_8926
  Homolog annotation: Hit_ID=A2XFR6; Match level="QueryCoverage=84%, HitCoverage=22%, E-value=3e-08, Identity=39%"; Hit description =Putative uncharacterized protein
MKYRHLPLRIRGESQTSFVLGGAREDRINTLAGAVAGLNTNLDSATLDLSRVHLELEDAHTRSAALEAQLDRRNPPEVQVPAVGDLFSNAKS

SEQ ID NO: 52302 - protein, 200 aa, Zea mays
  Coding DNA Sequence Number=SeqID_8927
MTKTSQMTLMSFESNDASVTYVWKMDPGPHMLCIRFCPQNRMVRTIQTTRINTNYIPPPRQVPVYLVVVEEIPVDLPRIRVENRVILEDSSEEFLPTPTPLAESLAFAARSSSSTPPAPAVQAPAPGGDDPNDSGDDDEDDQEEEDEENINEEANDEQQDYYVGLWPVTEHYISMFEMEHFPNLLQDVLHALGTYVRPLY

SEQ ID NO: 52303 - protein, 339 aa, Zea mays
  Coding DNA Sequence Number=SeqID_8928
  Gene Ontology: Mol. function=nucleic acid binding
  Homolog annotation: Hit_ID=A2XZE0; Match level="QueryCoverage=62%, HitCoverage=45%, E-value=2e-13, Identity=26%"; Hit description =Putative uncharacterized protein
MDPKGRNPSWDRWGQKDVPQGSQTWGKNRNLSWRLKSTLGKSDNKEDIMTSSLGDGGQSEVVAENVREELQNYQAICELGSTIGDVEEVDLLSLDTKDIVRFKVHVKSVAMIPPITEVGVKPFLYDIYFKIDNITEEGWNDDSINLGKNPRRCSEVTDGIEDVKPIDGDKGYDDNPVNDEDDFNQSEDDLMSSQDLDEFAKDEDLVLPSSQEKENKTLVELHTEGVAKDAGEKGVNMEVDHVEGIRRSSRLETNDEMKIADKAMARAMAKNAFINKVVIETLPGSGILLMGDLGGLLVGFDAEVFDVREKEMGEFMIKILVVHKENGFIWNFINVYGAA

SEQ ID NO: 52304 - protein, 69 aa, Zea mays
  Coding DNA Sequence Number=SeqID_8929
MSRCVLVSPLVAVLLGCLLVTPWVVVSIVAKFATLETTIRLYKGSCVVVLGRALYVGGLRLPKVLKNMI

SEQ ID NO: 52305 - protein, 66 aa, Zea mays
  Coding DNA Sequence Number=SeqID_8930
MELPLDAQSSGRRLDVDERVEQCRAVVGVLHVLAWFVLVLQMQHLRARARTRAESNGHVFDLPWQC

SEQ ID NO: 52306 - protein, 135 aa, Zea mays
  Coding DNA Sequence Number=SeqID_8931
MLSCCNCCCPAAVKRLLLLRSQKTAATAVLRSQKTAACCPAATAAVLQQSKTATAADHMTYSIMCDVGLATSWLSTVPVPVAKLAAVVTTVVSCRLLVADGAALGTTLSMSSRPGLGASTRLARVIPQVLRELKL

SEQ ID NO: 52307 - protein, 60 aa, Zea mays
  Coding DNA Sequence Number=SeqID_8932
MNAVVTSHIPVCLYSVAAFENKSPTPGTLENMGAGVTWPSTLPPGWTVEWDPTSAGEEHE

SEQ ID NO: 52308 - protein, 354 aa, Zea mays
  Coding DNA Sequence Number=SeqID_8933
MQPGCTPPPAVTQDGDLQFDGGGKQAELRPLPLPQPQGFSSSMLGRGVCRVGVGPCVGGGPFLPSVIGGKGVRRSWRWQLPRARLPDPSGFGAAPGAAFRHGSWKRFFRRRDSRGRPRTDLQLYGLLPVLASRVWARGGGLLAAASALRSSLLLFGPLGAEVVVVAAAGAGDDVSFVGLLSLRRPPDRVGLFVPTEDSLGSVGLVVRGFSCLVKGTPRPLFDEPKPGVAVSARTEAELARKEDLVGRSLAGLSVSGIDAGVDLPRPRAGLMSSVDIWPMPRGDQPSHLLGPNSRRRPWRRWPGRGDDIVLQSGDPRTASPSEARSDLAEGVVDAEGAAAPFNCRDLSLQDPIIL

SEQ ID NO: 52309 - protein, 210 aa, Zea mays
  Coding DNA Sequence Number=SeqID_8934
  Gene Ontology: Mol. function=kinase activity; Cellular component =ornithine carbamoyltransferase complex; Biological process=amino acid metabolic process
  Homolog annotation: Hit_ID=Q6QP54; Match level="QueryCoverage=45%, HitCoverage=33%, E-value=9e-17, Identity=52%"; Hit description =Putative kinase
MALPVDVVGPRPRLGDVEAPPRLRLSLSSVAEVESEPLGQARRRPSAEARAESEPWGRAKRSSSSSGAEPESEPWVGRSGVRRLLGLSPSPSPGVGRIGVRRLQGLSPSPSPGSGEAEFPMVPEAGPDCLLASLCRVAQQSEQRRRRCPSVRPATFALNAPAIWSVGVATCPGLLLGEDWASGEPELCADGGYQLRIRSLEGTPNYGPRQ

SEQ ID NO: 52310 - protein, 132 aa, Zea mays
  Coding DNA Sequence Number=SeqID_8935
  Subcellular localization annotation: CTP_CleavageSite=70; ConfidenceScore=5.72e-01
MQAACNRAKWAHFSDFQHAHAFMQPARRSLRASNCTATRTTTAPPRLRNRGTSGASGRGSERRFASAIMTASKKAPSLPTNQRFEGWAPRKGLTAASERVGSTPTTGQRLALEGFTAASDTERGMTMGTFDT

SEQ ID NO: 52311 - protein, 17 aa, Zea mays
  Coding DNA Sequence Number=SeqID_8936
MTSSSKFEFVGDLRRPK

SEQ ID NO: 52312 - protein, 98 aa, Zea mays
  Coding DNA Sequence Number=SeqID_8937
  Subcellular localization annotation: CTP_CleavageSite=69; ConfidenceScore=5.47e-01
MHAACNRAKWAHFSDFQHAQHGGPGPRVVQPVRRMLRASNCTATRTTATPPRLWNQYRDSRQPYARPSSASLARRDRERGIPRKGSFPVKEPGSEPPY

SEQ ID NO: 52313 - protein, 374 aa, Zea mays
  Coding DNA Sequence Number=SeqID_8938
MAGESKPGCGLCPSLNLKDFHHQCWGGDCRVPGSRTRVASEPLSAPAPATAAGRGSCADEIAGAAYRPTSNSTAFCPSLPHEFGHGRGPPGSSIRPEVIAAAVWPPGAEVVVVAAARAGDGASFVGLLLLRRPPQRVGLFVPAEESLGSVGLAARGFSCLVKGTPRPLFDEPKSGVAVSARTEAELARKEELVDQSLAGSSVSGADFGVDLPRPRVELMSSGTAGRGLGVTSRAACLGRILGEDPGGDGLGVVMTSSFRMEILGPCRRPRLGRTSPKYLDFFVGNRIVCVSETCFSRKVKSEGSVTDAVEKARRIASAEELSNVKSCSVRGITYPNVSYLSQKVMSEKISTQRGFPLLAPEGGSGLAEARLTLP

SEQ ID NO: 52314 - protein, 187 aa, Zea mays
  Coding DNA Sequence Number=SeqID_8939
MTGDKQRQKLKQKPSSKISNTYIKKVNKKDATPYLIKKKKNGKVIAIKTNKQANKGKGAKRIWVPKEIISTMKSTKKVWIPKANLLPSGLVKILDPNFPPMTKFTGCEENWTKAMRMQHLKRRHKKMHRSPRLKNKEARRNQRRNPRKGCQPAPGGAPDIGVRCAPDCPVRHRTVCAERPQKGTLWL

SEQ ID NO: 52315 - protein, 184 aa, Zea mays
  Coding DNA Sequence Number=SeqID_8940
MCHGGFSGDGQGRRSGFISSPARIESKGAASSTAREVGRRQLRQARRVVTSSGHIHDCGEEKSDAWAPHVITVDFGWVVGKVTARWDPAVSVAMRAPRMVDRADARCLVELVVVVEVVVVVVSPTALGLFLGGPDVFPRVLVLSDFASRSLGLSIVVLLVFGQQPLDRFQQVEDLEDSFLFAVV

SEQ ID NO: 52316 - protein, 73 aa, Zea mays
  Coding DNA Sequence Number=SeqID_8941
MAAVARLQYSPCRAQLAKSLRVVVPPPTPVRELTTRCGEPELSRPQDDADERNWRWTDEASIGTKDGRQVIDT

SEQ ID NO: 52317 - protein, 607 aa, Zea mays
  Coding DNA Sequence Number=SeqID_8942
  Gene Ontology: Mol. function=carboxyl- or carbamoyltransferase activity; Cellular component=ornithine carbamoyltransferase complex; Biological process=amino acid metabolic process
  Homolog annotation: Hit_ID=Q8SA97; Match level="QueryCoverage=16%, HitCoverage=15%, E-value=3e-18, Identity=55%"; Hit description =Ornithine carbamoyltransferase
MAPPVVVAGLRPRLGDVEAPPKPRSSLSYVVEVESEPLVRARRRSPADAGAESEPWGRAKRRSPADAGVESEPWGRAKRSSSSSGAEPESEPWVGRSGVRRLMPGRSPSPGVGRSGVRRLLGPSPSPSPGVGRSGPKSEPWVGRSGVRRLPGLSPSPSPGSGGAEFAVFRGLARVRALGRAKRSFLWWLRPGLTAFQPYSVEWHRSRSGAGGAVFLSGRSVERRSDGSHFGSVGRGARVRIKVSGHLCIKCSCGLVGRRGDLVRVASWRRQGLGRAGNTFAAGGGPRARRRSSGLYADGGYQLRIRSFEALIKFLIADAVRSTALRISVCDDFEFTTGRGDGGGPEERTPGSAGRGRFAVAEEDSDLASSQACCIPSRACGGSSKAELVSTQGAEAGWRAIPGRAEEFLRGERPLCPPRVSVASPSPSGRRFPSDTTAIASWLPSPAGAGRGDDLSLGFNAGAASASSGASLAAGLWGSAASRQAAAAAAAAAAAAALGYGAIGPTGDVGMLVVAPPGSFHHQWAADDDDSCSRSSPRRSAPSSTQTPPPAATAIRPCRPRVPSSFGTRSRPRMGMGPTARRPSPCWITPAAGPGPGVATCQDWRQP

SEQ ID NO: 52318 - protein, 284 aa, Zea mays
  Coding DNA Sequence Number=SeqID_8943
  Subcellular localization annotation: CTP_CleavageSite=60; ConfidenceScore=5.52e-01
MVAFQGGHPPFNGGSPYLRPQPSWAESSPTHSKVLPYGAGAGSHTSCKPAQSRRSQTAARGAYNRPAVTSDSPLLPRPMGERGGQPCRRHATTPSGRTSPTPNTPSMEAQAHASCNRRAECFVHATAPPLAPLPRLLDCGTNTATRGDPAHDPAAPAWRGGQCGKKWAGSNGGGRRAGAAATSRSGRRFAFAIMTAPKKGPGKGDTPKRILPREGTRLQASLLIRGSKAGPLEGFDSRLRSRGLYTHYWSEVRRPAPRKGSTAASGYSGSAPITDQGFEGWPPK

SEQ ID NO: 52319 - protein, 204 aa, Zea mays
  Coding DNA Sequence Number=SeqID_8944
MGDIRRLSASSLEERNSVGVGTFQPSFGFKDFHHTARLHPSADGLRRGVCRVGVDPCVGGGPLLPSVIGGKGGCHPWRRPLQRAWLSDPSGFGAAFGAGFCHGSWKRFFRRRNSQGRPRTDLQLYGLLPALASRVLGMSGGLLAAASALRSSLPPFGPPEQKSSSSPLLERATARRSSVFCCSAGSPHRVGLFVPAEVEPEFRL

SEQ ID NO: 52320 - protein, 344 aa, Zea mays
  Coding DNA Sequence Number=SeqID_8945
  Subcellular localization annotation: CTP_CleavageSite=38; ConfidenceScore=5.09e-01
MQAGSEQKKPNRRAQCVQPPSGYKRLSTFAQTNGRKGRAAMQAACNRAKWAHFSDSQHAQHGGPGPRVMQPARRMLRACNSTATCATTAPPRLRNQYRDSRRPSARPSSASLARRSMRQKMGRQQWRWQAGRSSGHVVSQAHVPSGGSERTLSHGVKTTSPRSGRRFAFAIMTAPKKGPGKGDTPKRILPREGTRLRASLLIRGSKAGPSERFDSRLRSRGLYTHYWSEAGPRRVHSRLRRLARDDHGYVRYITKARVALPRARTRAKPQKTAISAPPDPGLGLGLSPGRRRTPLRPTQGSDSGSAPEDDELRFARPQGSDSAPASAGELRSARPRARTQARPQ

SEQ ID NO: 52321 - protein, 152 aa, Zea mays
  Coding DNA Sequence Number=SeqID_8946
MGKNNKRKSEPTPPSEAFGDSEYSKEEFSSESEGSPAPIPLRESSDDSDDSQGLAAEVWTYIRAVERSGLEGSDESEYSSDEEDSDGGGEDEDDDDDGGGGDGDGDGDGSDKGGGGSSKDGDGSGSRGSNRGGSSRGSTRGGSGSGSSRASG

SEQ ID NO: 52322 - protein, 78 aa, Zea mays
  Coding DNA Sequence Number=SeqID_8947
MDMEHAEIGPRRSCAQGQRLPVGEVHRGVPWSREGRSQEEVKGADMLPGSSAMAASAGRHGKAGARAPWLGGSSCAQP

SEQ ID NO: 52323 - protein, 88 aa, Zea mays
  Coding DNA Sequence Number=SeqID_8948
MARRKLLRAAGRRVGRKMNMRWLGEATPRGEEPPWEGHGSLMAVAAVKKKGREKLWRLEIFEGWECKITMCKERGLLFIEEALGLGFP

SEQ ID NO: 52324 - protein, 77 aa, Zea mays
  Coding DNA Sequence Number=SeqID_8949
  Subcellular localization annotation: CTP_CleavageSite=55; ConfidenceScore=5.48e-01
MEPGGGTAVGAVGSLLTSSCFRWAMRRLLQSRGRVCLPWPRPKSEPLGRARRRSSAEARAESEPWGRAKRSSSSSGT

SEQ ID NO: 52325 - protein, 183 aa, Zea mays
  Coding DNA Sequence Number=SeqID_8950
MVEDQMVVKTVREECPWESLPNRHHTPVRAIDSGRRHHAIVPGHRHTELRSPHEEEASEIGSSSWVGSRLVRRVSIAGVVPLMGHSTMLQYQRKVVFSIESLALSDRQPPASLSSSPAAPARVVASGLLLLHEEAAGGPGHLHLPVSELCWGEKAFYSDECRNGLIEEAAEEEVMILDPARNL

SEQ ID NO: 52326 - protein, 133 aa, Zea mays
  Coding DNA Sequence Number=SeqID_8951
MVKSNKRKREPTPPSEDFGDSEYSEEEFSFESEGSPAPVSPPASSDDSDDSQGIAAEVWTYIRAVERSGLEGSDESECLIIKHDKFLKLPIEKLNNYCLSYGLSALMSHFESVLYLFCALQAIYLVILFLVER

SEQ ID NO: 52327 - protein, 273 aa, Zea mays
  Coding DNA Sequence Number=SeqID_8952
  Gene Ontology: Mol. function=kinase activity; Cellular component =ornithine carbamoyltransferase complex; Biological process=amino acid metabolic process
  Homolog annotation: Hit_ID=Q6QP54; Match level="QueryCoverage=39%, HitCoverage=38%, E-value=8e-34, Identity=68%"; Hit description =Putative kinase
MELPLDAQSSGRRLDVDERVEQCRAVAGVLHVLARSVQVLQMQHLRAAVEGHELKTPETEHRPGLERLLETAHLELDGKLFVNMQQAPTWRANYRRFETGGSLGRRVSVAACPSPDGSRGYKRPRGRGSERPQASACLVLVPARPTLSKRALVLPFIGVRRGSRGLRAAVVTEHAGRHHCLSGGTSQMGRRSGSSWPESARGRVMMAPPVDVAGLRPRLGDTEAPPKPRSSLSSVAEAESEPLGRARRRSSAEARAESEPWGRAKRSSSSSGT

SEQ ID NO: 52328 - protein, 347 aa, Zea mays
  Coding DNA Sequence Number=SeqID_8953
  Pfam annotation: Domain name=zf-CCHC; Domain location=296-313; Score =18.0; E_value=0.0029; Accession=PF00098.14; Description=Zinc knuckle
MEDLSQMTLTIVIGKIVRSQPLQGHILSHVMKRAKGRRMLPPQAPQVKKRRKKKVIMMKTINYQHHPLRMKKQSDASERSMIFSLTLTGKCKEREDASHAGRRATSGTTVQTCLNPQRGGAKPRRLQVSKLEITLQAKMNLQGHATTNPYHAHHGHHASALWQEAKLASSQEAIENLLEKMEILSIQNNELTTKLEKIGSTLEVFLVEIPKIIEKDASTSCFDLIDDYNPYNQVLVENVVIETCSNEVSKENEQLRQEVARLGKALYGKKGKAKQIQTPQGNTTAGVNKPVEGGTVICRICHEEGHKSYQCKAKTGDKQKQKLKQKSNSKISNTYINKVDKRLLHHI

SEQ ID NO: 52329 - protein, 57 aa, Zea mays
  Coding DNA Sequence Number=SeqID_8954
MESHDLRAERESRLMGGYEIDGSGYDYGAGCQHCNHCSGEDEAVEGDFQELQDYDEF

SEQ ID NO: 52330 - protein, 370 aa, Zea mays
  Coding DNA Sequence Number=SeqID_8955
  Gene Ontology: Mol. function=sequence-specific DNA binding; Cellular component=nucleus; Biological process=regulation of transcription, DNA-dependent
  Homolog annotation: Hit_ID=A3BCY3; Match level="QueryCoverage=91%, HitCoverage=95%, E-value=7e-53, Identity=41%"; Hit description =Putative uncharacterized protein
  Pfam annotation: Domain name=GATA; Domain location=181-216; Score =66.8; E_value=7.3e-17; Accession=PF00320.18; Description=GATA zinc finger
MSAIYMSQLSTALPLMEGDHQDHHHHHQGHFQAFTLPKETPILFPFVISNSSASEGSLSYGSAADHHLLRQRHQAMLEPQHMIGGSSTATGNSVFSTPFPTVESIRDDMIEPASYDPYDMGKLQVGGSMDACSWTPAAAKMRITRKATADPSAGKKPRRRAQAGYDDTMSGQPNLGVIRVCSDCNTTKTPLWRSGPCGPKSLCNACGIRQRKARRAMMAAASGSVSAVPTDSGKASPSNAAVAAAAAHPKVKKEKRVDVDRSLPFKKRCKVVQQGHGAAVVVAAPAAATDSATVVQATAEDGDDDTCPSRDLLVDDIGGLISWSRSPAAPASAAAATCSFRASPALPVQQDEITDAAMLLMTLSCGLVRS

SEQ ID NO: 52331 - protein, 80 aa, Zea mays
  Coding DNA Sequence Number=SeqID_8956
MTGKKTTASSDGSTPKKAKVVVEDEEEAGLEDEEEATVTLSVEKDALECDICCLPFQSEVFMAMQERAFWMCKVLHPHGR

SEQ ID NO: 52332 - protein, 163 aa, Zea mays
  Coding DNA Sequence Number=SeqID_8957
  Pfam annotation: Domain name=zf-CCHC; Domain location=104-121; Score =19.5; E_value=0.0017; Accession=PF00098.14; Description=Zinc knuckle
MEDLSTMILTIVIGKIVAFEMSRKMGRQEEPTSSRPYVLVCDEKKGKKKAPAPSSSSEEEEEESDDDEHNQPSTSSSKDEETIRRVGKVEDLLFNINRKKQRKRECFACREKGHFRDSCPTMADPKKERSKGKGLTSVKTWDDSSSEDEPPRTCSYRTSSRSS

SEQ ID NO: 52333 - protein, 247 aa, Zea mays
  Coding DNA Sequence Number=SeqID_8958
MVDLQVVTRMMVMIMLMMARIRHTARKSVIPLLSSRLAERPLRRPVTGQSSHLEMLHHRLHEEQERRRQELEQQGSSSSPQQEVESLRSCSPVPPLEASPAPPLGVSTAGVAVGDPSDRGDDSSSSHNTDLSEEQELEGWEGWVARPITRDAARGVTSTMCSTPCCARHLTGVPGLSSIVVLSSSTVAGFTRTARWWLIWCAVRRIVSGVRRSAQSITLSLSGTQLRRPYKMPHGVCFRTTTQCSVG

SEQ ID NO: 52334 - protein, 237 aa, Zea mays
  Coding DNA Sequence Number=SeqID_8959
MTSHGSSDDGNALSHTDGLAREGFPRILWEVLQGAGYTTPPQYAVQQFEKHRVPRCRDTIEAIALHRLTTFCGFHPLELSTHPIGLFPAEREDDPMWKDRVEHAKDIWAIYPGQTSHLTMRCMNALYRLQVMRGEAMSHLMALLEATKITLDNKEELVVDLSTEMVEKDLQVEQLSNEIQELEELVGTRENTIEEIQDTEANEDVDIEGGEEPASSLDTAGSGRPPSPESSVASFAH

SEQ ID NO: 52335 - protein, 124 aa, Zea mays
  Coding DNA Sequence Number=SeqID_8960
MAQWLARSTLAGGRRESDDRGLASPAKQTSIPRSGSFTEARAMASAGLWRDAGHARSGAGVLWRTQNASNMWRCSSARVQTPAEIANVRILAKIRRRPLPGTYGYLLYNLSGFGAIFKVNMGDL

SEQ ID NO: 52336 - protein, 33 aa, Zea mays
  Coding DNA Sequence Number=SeqID_8961
MKNVILECYKYALRKLNTSQPEVELTTWSMQGG

SEQ ID NO: 52337 - protein, 356 aa, Zea mays
  Coding DNA Sequence Number=SeqID_8962
  Gene Ontology: Mol. function=molecular_function; Cellular component =membrane; Biological process=auxin mediated signaling pathway
  Homolog annotation: Hit_ID=Q69PB3; Match level="QueryCoverage=100%, HitCoverage=96%, E-value=1e-122, Identity=65%"; Hit description =Putative MtN21
  Pfam annotation: Domain name=DUF6; Domain location=174-303; Score =40.9; E_value=4.6e-09; Accession=PF00892.11; Description=Integral membrane protein DUF6
  Pfam annotation: Domain name=DUF6; Domain location=6-136; Score=40.9; E_value=4.5e-09; Accession=PF00892.11; Description=Integral membrane protein DUF6
  Pfam annotation: Domain name=TPT; Domain location=165-303; Score= -30.4; E_value=0.035; Accession=PF03151.7; Description=Triose -phosphate Transporter family
  Pfam module annotation: Pfam domain module=DUF6::DUF6::TPT; Domain location=174-303::6-136::165-303
  Subcellular localization annotation: CTP_CleavageSite=69; ConfidenceScore=5.11e-01
MVVTQCIYAALALLSKAAFTGGMSPLVFVVYRQAVATIVLVPVVIAANRKKMKEMTTGLGLTGFSLVFVASLVGATVNQCMYYQGVNLGSSSMATAMTNLIPAITFVMAASVGRPRSLAKIFGTAVCVSGAMAMAFFKGPKLLGDGPNALQLLLHAGGGGRWVAGALFLVGSSSCWSLWLILQVPICKSYVEPLALSAWMCVLSTLQSALLVSFLLPDPSAWRIHSLFELSCCVFSGVFGSGVTFYLQSWCISVRGPLYSAMFNPLCTVITTVFAAAVLREELHVGSLLGAIAVIAGLYVVLWGKAGDANKGGVEPEHHSDDLEKTSSARSDPNSTAGVGSGIAEPLLAGGDPTEK

SEQ ID NO: 52338 - protein, 188 aa, Zea mays
  Coding DNA Sequence Number=SeqID_8963
  Gene Ontology: Cellular component=integral to membrane; Biological process=amino acid transport
  Homolog annotation: Hit_ID=P46133; Match level="QueryCoverage=81%, HitCoverage=30%, E-value=6e-69, Identity=87%"; Hit description =Aminobenzoyl-glutamate transport protein
  Pfam annotation: Domain name=ABG_transport; Domain location=16-188; Score=-116.4; E_value=3.9e-16; Accession=PF03806.4; Description=AbgT putative transporter family
MPMSMSSIPSSSQSGKLYGWVERIGNKVPHPFLLFIYLIIVLMVTTAILSAFGVSAKNPTDGTPVVVKNLLSVEGLHWFLPNVIKNFSGFAPLGAILALVLGAGLAERVGLLPALMVKMASHVNARYASYMVLFIAFFSHISSDAALVIMPPMGALIFLAVGRHPVAGGPQRTPKQTLRQLTAGSRKV

SEQ ID NO: 52339 - protein, 118 aa, Zea mays
  Coding DNA Sequence Number=SeqID_8964
  Subcellular localization annotation: CTP_CleavageSite=44; ConfidenceScore=5.29e-01
MVRTQRPADVAGAPNSVRWCTGLSDSPYSPPSRRLSATFAEFATANNLDYATISVVIDLFTEDNFEEYEQFYELVRLGIPRRFGETAGLRHHPAVINKIARVTILPKSGDKSKIRDKF

SEQ ID NO: 52340 - protein, 167 aa, Zea mays
  Coding DNA Sequence Number=SeqID_8965
MGADEPAQPRTPRARDAEIEKRTAGLQEHGSLFRSFRLGKGHELPVLYLEQCCVTVCLPCLASRPPSSVVSSHTVWSGSGDQCLMAWCRPEGGVFEFGDHASRAHRKATKTAASWHCRYVPMHKEERARRGSEWHRARGRGKANSSGNAKSERERGEVATRERRGSG

SEQ ID NO: 52341 - protein, 29 aa, Zea mays
  Coding DNA Sequence Number=SeqID_8966
MAMQCDELSERPSEPEHTENGGFLDDRRC

SEQ ID NO: 52342 - protein, 71 aa, Zea mays
  Coding DNA Sequence Number=SeqID_8967
MDGRFQGMLTHMDQRMDRMQAHFDDNFDGLHTELTELRTHIQDIVHDPIMTRMNNMQQSFQDNMGGLIQSV

SEQ ID NO: 52343 - protein, 153 aa, Zea mays
  Coding DNA Sequence Number=SeqID_8968
MRERQEMEARMMAEREARLVDQHRMTEMFQYMKNLSAAQGFAPAPPLFPTVDPTFFHTPMSIKNVVRCWANLGRHPTTLMDRPTHRRSSPAAHLDESYILSVETSVLVLNTYVCVGYLCQSLRLMRLMVLILMFVLRIWIFMFVLDIYVCDDI

SEQ ID NO: 52344 - protein, 284 aa, Zea mays
  Coding DNA Sequence Number=SeqID_8969
  Subcellular localization annotation: CTP_CleavageSite=26; ConfidenceScore=5.45e-01
MSSRSLMHRVFPPSKPPDGGYPPSFRLVVGGTQLRGSWYLSAIVRLQGFSSCSPAASPRRWSPKTVTTSPWVGRSKPGCDLGPTLSFKDVHHPRWGGGRAEPELYLRAGSWVSLSLSVRGRERSLALREGRTSTTRGWSTAGIVSFSALDSPAWLPEPPPAARAVIAPCAREDRPRRRALPGRRSCSGAALPLHRYGASTRRSVPRSSGRIRVGICRRADGPCRRCRGGGGSRSPRRRRDHRHHPRFGAPALCTCPRPSSVGVGEGRVAAAFALRPSLLQFGHP

SEQ ID NO: 52345 - protein, 70 aa, Zea mays
  Coding DNA Sequence Number=SeqID_8970
MARVACTLRGKRLDGGVYVLSVGILGLKSALQWTGIIRRLTQSRRCEQEGFGATAKSGTDLKMKRLFRPQ

SEQ ID NO: 52346 - protein, 214 aa, Zea mays
  Coding DNA Sequence Number=SeqID_8971
MTTSNKKRDRERGDTPRRILLREGTRLRASLLIRGSKAGPSEGFNSRLRARGLHTHYWSEVRRPAPRKGSMTASGYSGSAPTTDQGGNDLVTESHQRQASSPRTPSTGDRVRQITHRQSGPASGTIGSSAPPNPGLGLGLSPRRRRTLLRPTQGSDSGYAPEDGKLRSARPRARTRAQPRKTANSAPPDPGLGLGLSPRRRRTPLRPTQGLDSG

SEQ ID NO: 52347 - protein, 60 aa, Zea mays
  Coding DNA Sequence Number=SeqID_8972
MTISLGTMGACALRRKNLRTYAWSFCHDVIVPGRREEYQVCTTFLTAMTKDFAMTVVLPP

SEQ ID NO: 52348 - protein, 323 aa, Zea mays
  Coding DNA Sequence Number=SeqID_8973
  Subcellular localization annotation: CTP_CleavageSite=10; ConfidenceScore=5.23e-01
MGRRTPPRVRRALSTPEHAQRPTPRVPRRAKPRPCPLPAPAPIKPAKASVIRPRALSTSPEHEITGVDSLASREAPRAFGLTYIVVDRPEHSPLTSSPACARGPADSGHHLHRAVPRCDRKDLPKPTPPFAGPPSPPGAGYTTPPQYTVQLFEKHRVPRSRVRMTLEPHPLQPGWRSLDSESFRYRAEDTTEAIALHGLTTFCGQTAHLTVRCMDALYHLQVMRGEAMSQLMALLEATKITLDNKEELVVDLSTEMVEKDLQVEQMSNEIQELEELVGTRENTIEVLEDQLINTQQQLAEANQHLDMHHLEIQEMEANEDVDI

SEQ ID NO: 52349 - protein, 111 aa, Zea mays
  Coding DNA Sequence Number=SeqID_8974
  Gene Ontology: Mol. function=kinase activity; Cellular component =ornithine carbamoyltransferase complex; Biological process=amino acid metabolic process
  Homolog annotation: Hit_ID=Q6QP54; Match level="QueryCoverage=67%, HitCoverage=26%, E-value=3e-20, Identity=66%"; Hit description =Putative kinase
MAVGGAPEPGGGTAVGDVETLLTSSCFRKGAENRRRQGAVMMAPPVDVVGPRPRLGNVEAPPKSRSSLSSVVVVESEPLGQARRRPSAEARTESEPWGRAKRSSSSSGAEP

SEQ ID NO: 52350 - protein, 175 aa, Zea mays
  Coding DNA Sequence Number=SeqID_8975
MWLRRAVARASRSELARPKLSSENTWTRWGLAVLVGKIGGAGPCVAAMRREIAGSAEVAQSAHEEHARRKEGSRRHGEEGRGEGGGQGVGKGLQQRSAMGGSRAASTAGGWRLAPWKENNAGCAPCWAPWKGEQRCCTWGGGLPAAVPEGGRQGERRGRHGKGLGGHGASALAAV

SEQ ID NO: 52351 - protein, 49 aa, Zea mays
  Coding DNA Sequence Number=SeqID_8976
MGGDLLAAASALRSVLPLFGPPEQKSSSSLLLEQGCLCEREMLLAEGDE

SEQ ID NO: 52352 - protein, 276 aa, Zea mays
  Coding DNA Sequence Number=SeqID_8977
  Subcellular localization annotation: CTP_CleavageSite=93; ConfidenceScore=5.72e-01
MQAACNRAKWTRFSDSQRAQPGGPGSRVMQPARRMLHASNCTVTCATTAPPRSRNQYRDSRRPSARPSSASLARRSKRPKEKRATLRLRRKNRAKKGWPPEGFNSRLRSRGPYTHYWSEVRRPAPRRVPRPPQATRAPRPLLIRGSKADPRRVHSRLRRRARDDQGYVRYITKARAALPSSPETPCSAPIEGNMALSPPLLAERRRRGVCKKAESVPDRPLALCRGSGAALANPAPAKPLTASTYQPKNLGPDRTPGLRPVRMREQPDQPKHYARH

SEQ ID NO: 52353 - protein, 101 aa, Zea mays
  Coding DNA Sequence Number=SeqID_8978
MEAKSHHQPNQGGTCKNYATSKAEYTNTQLDLPGYNGSSSLISCEKQTIRIEFYPLQDNASPWIRVHRPSSFRYQKWIQPIPDLARVLEKSPDFYRDPDLA

SEQ ID NO: 52354 - protein, 209 aa, Zea mays
  Coding DNA Sequence Number=SeqID_8979
MTIPSRLLPFDEGALGRATLSYLHQRLHNLKLGQWDDMSFDDRGIVTNSKGVVVPCTGWSHFALAPHATYGTAQGTVKHDFWRRYCVEPEAQEHEDRVLEKNAKKVTLPWMKHRPQAYKALCEIWASLEWIEKSNRNRHRQRHQQDEDDDEVVVNHTYGADGHIQLAKRMETYGQEMVRKYGEDYDWRGAPTIDAEVVHSIEGKAHGRY

SEQ ID NO: 52355 - protein, 149 aa, Zea mays
  Coding DNA Sequence Number=SeqID_8980
  Homolog annotation: Hit_ID=Q2QS81; Match level="QueryCoverage=38%, HitCoverage=20%, E-value=5e-10, Identity=49%"; Hit description =Putative uncharacterized protein
  Subcellular localization annotation: CTP_CleavageSite=56; ConfidenceScore=5.23e-01
MSGAPATSPSHWDSTVGASDFWARLAVRCTPDKYCRLSGAPFRACLTSARFWRALNAPAGWKGASARLLELRPFNLYKIPQYIRVCHKQPQGSVLCGFYACEFMRMNGRYITNPSKEFQKGNPENLTEGALYGIVEDLCTFILKKVIPT

SEQ ID NO: 52356 - protein, 79 aa, Zea mays
  Coding DNA Sequence Number=SeqID_8981
  Subcellular localization annotation: CTP_CleavageSite=37; ConfidenceScore=5.52e-01
MAGSAARSAPRPTPRPCAPSGSAAPPPCSAGSAAPCAARPRQPDRTPPAQPPRLGRPCAPRIGPVQPPLGPLIVYPVQC

SEQ ID NO: 52357 - protein, 102 aa, Zea mays
  Coding DNA Sequence Number=SeqID_8982
MAQGHISLSIPPPAGGLTTAIVAVARRRKEYHVIAAVEGHELKTPHLELDGKLFVNTQQAPTWRANCQRFDPGGSLDRRVNCRCVSQPRWVGARRDTKGGEQ

SEQ ID NO: 52358 - protein, 211 aa, Zea mays
  Coding DNA Sequence Number=SeqID_8983
MSATRQTSQLRYFIHGRDRVGEKQGEMQGGASASMGKKGASSRAAALERGERDRQSMREKEKKGRASHGAEASLRENVDLLKPGQRHGAPKKNREGGSSWGGTLLPSAMGREGARAPAMEESRASAWSQGAQPWLHLLGAMAGRKLLRAAVRKTGTGSSQGGAATGRGARLASSLEEGARRRGSGARAHGRRRAPAAARGRKQPGRNESGD

SEQ ID NO: 52359 - protein, 290 aa, Zea mays
  Coding DNA Sequence Number=SeqID_8984
  Subcellular localization annotation: CTP_CleavageSite=78; ConfidenceScore=5.66e-01
MSSPSLMPRVFPPSKPPDGGNPPSFRFIVGGTQLRGSWYLSAIVRLQGFSSASPAAPPRRRSPKMVTTSSWVGRSKPGCDLGPTLSFKDVHHPRWGGDRAEPTLYLPRGFVGHPLPRRSRERALTGPAGDPDFDNVGLVDGGRRHLQRVGVVGLAPGGPSCRRAAAAPGRCPTRLGGFEWGSAGGLVAPAISAEAEAAREVPVTDGITATIRASGPRRGLGSGWRPWKMVDRGPRGNRPSRLLGLDSRRSPWTASPSEAGSGLAEGVVDAEGATAPFQREDPSLQDQIAL

SEQ ID NO: 52360 - protein, 469 aa, Zea mays
  Coding DNA Sequence Number=SeqID_8985
  Subcellular localization annotation: CTP_CleavageSite=50; ConfidenceScore=5.11e-01
MQAACNRARWTRFSDSQHASMEAQAHASRNRTGGASGRRSGRRFAFAVITAPKKGPGKGDTPKRILPREGTGLRAPLLIRGSKAGPPRGSTAASDRVGPTPTTGQRGSKAGPRRVHSRLRRRARDDQGYVRYITKARAALPSSPETPCSVPIEGNMAFSPLLAERRRRGICKKAESVPDRPLALCGGSGAALANPAPVEPLTASTYQPENLGPTVHPGYGQARTRAQPQKTTNSASPDPRARTPPWPLPNDLRLARPRGSGSASAMEDRLDLGFGGASTSPDLGRKPATSTGSAIITLPRSDSGRREQDRRTSARTQPLRQLSLRQAPLLLRQPRHHTSWVPRSLRLPHWHGLLREGWPRGDEDETGALLGPLASLTRVDACNPLLQAHPTWARDEHEGRGISTSLTPVSGHLASPFALAHALDPSGLGHAAHSLVGLGTPRSRNADNDIARERRGEVTGRRGIAFLYI

SEQ ID NO: 52361 - protein, 285 aa, Zea mays
  Coding DNA Sequence Number=SeqID_8986
  Homolog annotation: Hit_ID=Q8SA97; Match level="QueryCoverage=15%, HitCoverage=8%, E-value=3e-07, Identity=62%"; Hit description =Ornithine carbamoyltransferase
  Pfam annotation: Domain name=zf-CCHC; Domain location=31-48; Score =25.8; E_value=0.00016; Accession=PF00098.14; Description=Zinc knuckle
MGIIPKINLMGVPLQVKDLLFNIDRKKQRKRGCFACGEKGHFRDNCPNMADPTKERSKCKALISVKTWDDSSSEDEPPRTRSHRSSPRSYHHHTSALWLEGNDVPPAAWSVRAQGRARRRLLLRPRPGSGKDVIPLEVEVESEPWGRARQRPPSEFEVEAEPWGRPRQRPPSEAKVGAEPWGRARQSFLWCLRLDSAAVSLTLAGGTTVGARQVALFSCQAILALNASAIRSVGEAIWPRLLHCEACPSWASGESRVWSLLEEALGRGSTACADGDYQPSLRVLG

SEQ ID NO: 52362 - protein, 160 aa, Zea mays
  Coding DNA Sequence Number=SeqID_8987
MKTNLSPRFGFKLEFKFEFEMDRKNKIEKKRKSVTETWAKSAPGGPFNPLSRDHMIKWRRYLGPARQSTHALRSQPGADMWGPPGQPLLSRACFFASQQPLACGQGCQPLASRPVRVVHPLRRQVDPTVQVRQRPPAWSAAWADLLNPTDPPLTELDQGI

SEQ ID NO: 52363 - protein, 102 aa, Zea mays
  Coding DNA Sequence Number=SeqID_8988
MQLKVEFDFSPSLTRLSLFFSGLGLIDVIVDITPQLITLNQRSKSNKSPSPKVTLGTGFQSVRSIFVFRKERFRPTVNIPLIPLLSHPGFRGPKPGREHKHQ

SEQ ID NO: 52364 - protein, 244 aa, Zea mays
  Coding DNA Sequence Number=SeqID_8989
MKRLLETTHLELDGKLFVNMQQAPTWRANCRRFDPGGSLDRRVGCAYSRGLQASAWERARGLCAPSRSPARPTSSYECPGPSFYRRRGRVRTLGSGEAESVVFRGRGRVRALGSGEVEFVVFRGRTRVRALGSGEAEFVVFRGRARVRALGSGEAEFVVFQGRARVRALGSGKAEFVVFRGRARVRALGSGEAELPMAPEAGLGHCQPHSVEWHSSQSDAGDAVFLSGWSVERRSDCGHFGSVD

SEQ ID NO: 52365 - protein, 276 aa, Zea mays
  Coding DNA Sequence Number=SeqID_8990
  Gene Ontology: Mol. function=aspartic-type endopeptidase activity; Cellular component=chromatin; Biological process=RNA-dependent DNA replication
  Homolog annotation: Hit_ID=Q10B80; Match level="QueryCoverage=46%, HitCoverage=11%, E-value=2e-10, Identity=32%"; Hit description =Retrotransposon protein, putative, unclassified
MATEAKQGEARWEKMMVMLERLTGKVEAMEKVADERTTLSMRVEENGKAFARMRLEAMAREMEDVGMGPESSDIGGRRGALPNQDQGGRELQQHVPKMLFPKFGGKEPAIWLNRCEDYFNMYQVPGAMKFMKVLKNEIQGHVMSQIPSTVDRAIRLVLVQQEIVVKNSGRNSKIDQGGRGVTGVRTEEKVVDQGAWSKERQVKEYMRINGLCYTCGEKFEPGHQAKCPKRVIPQLNVLTTKDLEMVLSEEQLGQIEKEEFYQFHQPSYGGQVKTSH

SEQ ID NO: 52366 - protein, 36 aa, Zea mays
  Coding DNA Sequence Number=SeqID_8991
MAKLNFNFNWGLGRFNRGPERFNRGPQRFNRCPGKV

SEQ ID NO: 52367 - protein, 131 aa, Zea mays
  Coding DNA Sequence Number=SeqID_8992
  Subcellular localization annotation: CTP_CleavageSite=9; ConfidenceScore=5.06e-01
MTCHSCEIKAVVTTNLRLTSPTPSIQVLAKKHGSDTGEVSQTNSGQVAGVQARCRGTTAGTTAKSSGCSQGGSRLVLPSWGYCCSMEFVARGVREQGWWRGEDEESVEHRKPSRWGVQEGDAMGKKRTWVR

SEQ ID NO: 52368 - protein, 107 aa, Zea mays
  Coding DNA Sequence Number=SeqID_8993
MSLNPKLRSSENLRNKATVGKQELRNQAKQSTFGLGSEPQYEEVQRMRRLAQSRSYVQGTFGVISERGTDLKGKRLFRPRWITIESLANVKGMSVILHGLRSVPINR

SEQ ID NO: 52369 - protein, 57 aa, Zea mays
  Coding DNA Sequence Number=SeqID_8994
MESHDLRAERESRLVGGNEIDGSGYDYGTGCQNCNHCSGEDEAVEGDFQEFQDYDEF

SEQ ID NO: 52370 - protein, 247 aa, Zea mays
  Coding DNA Sequence Number=SeqID_8995
MQWLFGATSYGNIVDGILLYNFAAELEREEEIEVTEDRTPPPSESQAENCFYFDICGSEPDLPVNEGKPWIHFSKHFCKTESLIVEKPYLDSHITSIPLRVFSLVGLCNCFRISLSLMFCNVCKTGETFLDHLADRDLALDWAIQSRLLACAKEARAQARIKELSSTVDNLQVYCNTLHEEVHILYSQLHPSVPTHPAEAEAGPSHVAGRALGGELDLFEPPPSLRLVDVWTPTPDDEAAKSNGKQE

SEQ ID NO: 52371 - protein, 140 aa, Zea mays
  Coding DNA Sequence Number=SeqID_8996
MALALVISSIDIVLSNPTFKMGKRGRHCHSGGQLGGVSAYAYPLAESLAFVAGSSASAPPAPAVQGPAPGGDDPDDFGDDDEYDDEEEEDEENLNDEANEEQQDHYVGFWPVTEHYTSMFKTGHFPNLLQNVLHALGTYV

SEQ ID NO: 52372 - protein, 83 aa, Zea mays
  Coding DNA Sequence Number=SeqID_8997
MSQPCQGKNLLSEKLGDEGTDARIFDDIMRLGSETQRSPCSFGQLIIFYPSLIPQATCDTPSTVAETHEALSTLHAISDTRMR

SEQ ID NO: 52373 - protein, 379 aa, Zea mays
  Coding DNA Sequence Number=SeqID_8998
MGGAEPGSFAEKDPSRGEGEASRAPPARSAACPAAELMRRGEWLAGRPLRAGDPFEEWVTATGVPFARRVGLGPRLACQKLEKRVHLARLHAACMAARPFCPLVWAKMGGRLNTTPWELVPLSHRSASRIFITQPGRTPSPAVTRDGDLQLDGGGKRAGLQPLPLPQPQGFSSPRLGRGECRVGVGPCVGGGPLLHSVMGGEAGIARGVRQLQRAWSSAASGFGAPCGVGVCHGSRKRFFRQRGGRDRPRADLQLLRPSARPCLTSFGTGGGLLTAASTLRSALPLFGPPEQKSPSSPLLEQAGGSDISMNRGGVGSRMGNLVGRSLAVSPVSGADAQEPLDLGAARGWVRLCCRRRRCRGCYGSLRREDPSLQDQIIL

SEQ ID NO: 52374 - protein, 159 aa, Zea mays
  Coding DNA Sequence Number=SeqID_8999
MGSVREEPEAEHHLRVEKARGSLRSYSTMVLGPRVSYPLRRGTNEGVLLKPANELGYEYAAESTSVGGTTPVPINMSPYCPASIDLACTENVITARASSTTVGDDSCIRRHRALAVRFEFGTLEHRVMPLRRGRRRALQSQGSGSPRTISAILNLYRID

SEQ ID NO: 52375 - protein, 322 aa, Zea mays
  Coding DNA Sequence Number=SeqID_9000
  Subcellular localization annotation: CTP_CleavageSite=18; ConfidenceScore=5.22e-01
MANARDQILPTALSQRIRSTMVFGSTTVHQPRQAIPAVWSMASHEKGHGRVTRSMAKLPSPDPRPERLPRRGGSFTKWIRCAKESAKGSATTAQKKGVRDDHDETDAIGAELEVHGGHGPQQKTDPFDLEEFSCGYGGGGRGLPARVTRKRGRSFHQARGRSGWEGVLKRRNNPARFPGSVGLQREVEDDPGKPGPHVIISASGWNQVEMGRQVRFPLGRARGQYWAGSLEFSPGRCQRFIYNYTKSTVRNTVDYSGQEKLFGKTGQARTVRALAADRPRHEDDTRTESMRKSKSALWTVRRKGRTVWVLVRTVRPLARTVR

SEQ ID NO: 52376 - protein, 67 aa, Zea mays
  Coding DNA Sequence Number=SeqID_9001
  Homolog annotation: Hit_ID=Q8S474; Match level="QueryCoverage=41%, HitCoverage=3%, E-value=6e-07, Identity=89%"; Hit description =Putative pol protein
MGRQVRFPLGRARGQYWAGSLEFSPGRVEEALQDSDWVLVMQEELNNFTRNEEPSGSSTTNKMSMVW

SEQ ID NO: 52377 - protein, 565 aa, Zea mays
  Coding DNA Sequence Number=SeqID_9002
  Gene Ontology: Mol. function=binding; Cellular component=integral to membrane; Biological process=transport
  Homolog annotation: Hit_ID=Q8H613; Match level="QueryCoverage=100%, HitCoverage=100%, E-value=0.0, Identity=68%"; Hit description =Nodulin-like protein
  Pfam annotation: Domain name=MFS_1; Domain location=18-485; Score= -15.0; E_value=0.059; Accession=PF07690.7; Description=Major Facilitator Superfamily
  Pfam annotation: Domain name=Nodulin-like; Domain location=14-261; Score=392.7; E_value=5.8e-115; Accession=PF06813.4; Description =Nodulin-like
  Pfam module annotation: Pfam domain module=MFS_1::Nodulin-like; Domain location=18-485::14-261
  Subcellular localization annotation: CTP_CleavageSite=58; ConfidenceScore=5.02e-01
MRGPASVKAGSRPPWLGLGAAAWVQVAGGASSTFALYSHALKVALGADQSRLALLGVACDVGENLGLLPGVLCNRLHPALLLLIGAGACLLGYGTAWLLVSGVAPALPYWLIWFALCLATNGGAWLATAVLVTNMRNFPLSRGAVAGILKGYSGLSAAVYTEIYTGVLRDSPINLLLSLALGIPAVCLLGMYFVQPCEPSLVETNAEQVHFMFAQVASVLLGVYLVGATILDHVVAVNDIMNYSLLVVMVLLIFAPLAIPLKMTLFPKKKNPLDSHSPTVDNDHTQPLLPSSSESNLGNLEEDDSTDIDVLLAEGEGAIKPKRRRPRRGEDFRFREAILKADFWLLFAICFVGIGSGITVLNNLAQIGIAAGAVDTTISLSVFSFCNFFGRLGGGAVSEYLVRSRTLPRSVLVICTQVVMIITYLLFALGRLATLYVSVALLGLCYGVLLSVVISTSSELFGLKHFGKIYNFITLANPVGAYLFNTLAGYVYDLEVERQHAAAAAAGSDVVACHGPSCFRLTFCVLAGAACLGTLLSTVLTVRVRPVYQMLYAGGSFSQPRNSAH

SEQ ID NO: 52378 - protein, 631 aa, Zea mays
  Coding DNA Sequence Number=SeqID_9003
  Gene Ontology: Mol. function=hydrolase activity; Cellular component =extracellular region; Biological process=metabolic process
  Homolog annotation: Hit_ID=Q5SNA6; Match level="QueryCoverage=78%, HitCoverage=92%, E-value=0.0, Identity=64%"; Hit description =Putative beta-glucuronidase
  Pfam annotation: Domain name=Glyco_hydro_79n; Domain location=116 -422; Score=442.9; E_value=4.5e-130; Accession=PF03662.5; Description= Glycosyl hydrolase family 79, N-terminal domain
MDRTGASEHGMVVAAAESHRTVEWSIYYLAEVWVGALAATGNTVLPSPSSSRVLSSPILSAPGIACAASSSAGVGPRVVGMAAAGTQLGRLLGGLWFLAALLGRPGATAAAAGQPAAPAVAAVDGRRAVAATGEDFVCATLDWWPPDKCDYGTCAWGRAGLLNLDLSNKVLLNAVRAFSPPLLLRLGGSLQDKVMYGYGAGRPCAPFVRNASEMHGFSQGCLPLRRWDDLNAFFRRSGAKVVFGLNALNGRVPLPDGSMGGPWDYTNAASLIRYTANKGYRIHGWELGNELSGTGVGARVGADQYAADVIALKALVDDVYRSEPSKPLVVAPGGFFDQAWFTELVVKTGPDLLSVVTHHVYNLGPGTLAATLRRSCDLQRLLKSTGTSAVAWVGEAGGAYNSGRHLVTDAFVFSFWYADELSDQLGMAARFDTKSYCRQSLVGGNYGLLNTTTFQPNPDYYSALLWHRLMGTKVLAVTFSGTNKIRAYAHCARDSPGITLLLINLSGNATARVSVTAQGAAAAHAHRHRHDARKHGGGRKFRHVHVPGFAGGGEAAAGAVRHEYHLTPKDGDLTSQVVMLNGRALATDAAGNIPALEAVEVDAARPIAVTPYSIVFARVPHFSAPACRVDR

SEQ ID NO: 52379 - protein, 408 aa, Zea mays
  Coding DNA Sequence Number=SeqID_9004
  Gene Ontology: Mol. function=transporter activity; Cellular component= membrane; Biological process=oligopeptide transport
  Homolog annotation: Hit_ID=Q53JI5; Match level="QueryCoverage=52%, HitCoverage=45%, E-value=1e-77, Identity=61%"; Hit description=POT family, putative
  Pfam annotation: Domain name=PTR2; Domain location=35-371; Score= -41.6; E_value=0.00023; Accession=PF00854.12; Description=POT family
MDIESRQVSKGDAIAAAVSVDWKGRPCDPLKHGGMKAAVFVLGIQAFEMMAGCGGGEQPDHGFILLAVQAHLPQLRPPPCDMMAPGQACEEARGLKASIFFAALYLVALGSGCLKPNIIAHGADQFRRGSGSDAARRLSSYFNAAYLSFCVGELVALTVLVWVQTRSGMDVGFGVSAAAMAVGLLSLVAGVAFYRNKPPQGSIFTPIAKVRVDCITGALRTTVSYFIGSPGQTVQSGRAGPGPDVYKRKSVVLGIRFYTPSRFISDSCQAGGGGGSQADGGGLDPEGERRRQRPYVVAAVSRPAVAAPDPEGERRQRPCAVATIPRPLAATPLPRRAVAEVPRSAARPLCRQAAASPKSRGGGTSKAGEQATPVDVRVATATHEARCSSERRHGRGEMRAAMIARDIL

SEQ ID NO: 52380 - protein, 217 aa, Zea mays
  Coding DNA Sequence Number=SeqID_9005
MAEVEFEPLGRARRRPSAEARAESESWGQAKRSSSSSGAEPESEPWGRAKRSSSSSGAEPEFEPWGTRRWKCIAGGCPRGCGGRAPSRLPARRTTWRATPTAELWLGRGVALLGGDIAGRGFLGLGRVVGLDGGSMQVSGEDVRGNRCSPRGYFSQLVHSLVVVSGDVVELEPVELVFQAPNLIAVGFHLRVAAVGVLHDLVDDELRVTASVEASDP

SEQ ID NO: 52381 - protein, 165 aa, Zea mays
  Coding DNA Sequence Number=SeqID_9006
MTEYCIRFRAPRLLILSHFSSIISPIDFNYLEGLKGKCALGPFLSILVIECQHKWSCVNLCQMMDKVQIESKVSGAPTALNLQQSATPKQERNPHRTVSGGAPDCPVRQATEGKNCLPGMLSTAPSCLGAIKGTPRRMEEYTKHSLSIPKHQDSNSSHSFLCDSN

SEQ ID NO: 52382 - protein, 137 aa, Zea mays
  Coding DNA Sequence Number=SeqID_9007
  Pfam annotation: Domain name=zf-BED; Domain location=77-124; Score =10.8; E_value=0.024; Accession=PF02892.6; Description=BED zinc finger
MDLDPDAEAAEHELEDHNERLDELALFETGTGCNATVAIDVDVALPSLAETVTGSSSPTATSSTARDNRWRKRLATSRVWADFEEVTGIDEKGKKVRISAICKHCKSTLSARSSSGTGTYLGTKNIVKLKLNMTKQA

SEQ ID NO: 52383 - protein, 185 aa, Zea mays
  Coding DNA Sequence Number=SeqID_9008
MKRILALAPCSFSDRQSTSSRPPLIRGIPNLGGPEDFADEVDGVLSWICMSFFYPLDYQHGAYHNGFNLLWISLDPSISYNESEKFPDWYPENTFLWVKLLAVAPQAIENLLEILDDIIRVHGFDYYIINNLDECAFLFGSEVGADDYSLALVGETKVPSRVWLRETFGWPPESTPQLPGSQLEW

SEQ ID NO: 52384 - protein, 228 aa, Zea mays
  Coding DNA Sequence Number=SeqID_9009
  Pfam annotation: Domain name=IQ; Domain location=117-137; Score=27.0; E_value=7.2e-05; Accession=PF00612.18; Description=IQ calmodulin -binding motif
  Pfam annotation: Domain name=IQ; Domain location=75-95; Score=25.0; E_ value=0.00028; Accession=PF00612.18; Description=IQ calmodulin -binding motif
  Pfam module annotation: Pfam domain module=IQ::IQ; Domain location =117-137::75-95
  Subcellular localization annotation: CTP_CleavageSite=27; ConfidenceScore=5.64e-01
MTPGISSRLSSPPPAAHPSPPPSVAPSAVATPSHPPSPSPAAFTQLEESFGRFAQKWDQFVVMFHRYKEKTEKELQAAVRLQAAARGFLARRQVQSLRGEKHLAVASRATPWPSSHEQAVVRLQAAVRGFLVRRAVRKLHLLISSSLHQLAACVPNHQVSSILFEPPAEVEIWVSLWQLEDELVLKGGIDVMGIIGSGHHHAVRTRRKGKQQSVPRLGGKRGLVAIQG

SEQ ID NO: 52385 - protein, 181 aa, Zea mays
  Coding DNA Sequence Number=SeqID_9010
MELGLRLKADVILLLFVRPAYLRKSLAVAPRRPMVRNQAERLHGLRTTPGDKCFRVRNQAKRPHRLRTTPWNGVPFSRAVSQLVRPSCFRREVLNYQQAGLMRVDLTGLAYTDAPEVRKRYSFSHSKIVTPGLAYSRHLEGSFPAGGELQSPSSHFRMDLSEASTRGESKRVSGGRQASAP

SEQ ID NO: 52386 - protein, 392 aa, Zea mays
  Coding DNA Sequence Number=SeqID_9011
MDYSAPAGSRSKLAPGSLTSSGDHLYSEWPPLHQRLASNGGHLRPGGLPATAAITVRTKRSSLLSSYGGEDKTIQERGRHLHSVQRLVRPPGRRRNSAADSAGDATYVADLRTARPSPMRWTDSHAPISDGRQRQRCHQSHQSQRDGAAARLASHPKILGGAWDGVVAQPAAHLHEAGNHPSPRMLEEEAGKNIASTDIPRKKVAERRDPNTSPPSKYQRIPSKQAVYHFEHSLSLGTLGMKSQGHGKLWRHKAETLKAKGHKELEDERAPRVGEKQDMAATRRVDPFLKADFLARAPKRHGQGLPQCAPGFPSYDMGARPHMSYKLARSAKKVNRHTRSVQPPCGYTPFHLWRNQRSRRQLPHKERATAPQLKVALPLGPIPCLLKAIAED

SEQ ID NO: 52387 - protein, 94 aa, Zea mays
  Coding DNA Sequence Number=SeqID_9012
MASAILCERGVENECSEVTSHLKTKLVKYLGISSIVLLIGTWGTTRENSATTRVEWDALGQVIMKARERLPYPEGASEEASLLEYREVLRLNCM

SEQ ID NO: 52388 - protein, 97 aa, Zea mays
  Coding DNA Sequence Number=SeqID_9013
  Gene Ontology: Mol. function=cysteine-type peptidase activity; Biological process=proteolysis
  Homolog annotation: Hit_ID=Q8S456; Match level="QueryCoverage=92%, HitCoverage=13%, E-value=2e-19, Identity=49%"; Hit description =Putative uncharacterized protein 163K15.6
MSPTNAPVSSPLVPTLDNKQHDQEVHVPTDDIKVSEQAPTTDKLAAPELTPNINTVRRTKTVKHDTPVSGAPQFDKTPLTEATTELVSKDSSCHTRF

SEQ ID NO: 52389 - protein, 93 aa, Zea mays
  Coding DNA Sequence Number=SeqID_9014
MPFTFANNSIVIHQGLNSLFLFKLVFFSAIALKLSCEQLRLCAILRILYASSHCGFDLSPKALSRRSEKHLPLARIATVNGKRDPPTCNALGV

SEQ ID NO: 52390 - protein, 81 aa, Zea mays
  Coding DNA Sequence Number=SeqID_9015
MALHVWRLLGEALQVGDEGLGFGEGLGVLHALHVTFVRVSPSEKTVRPSVKLPERGIGVCFAGEASPRSPELSTPPEYVDR

SEQ ID NO: 52391 - protein, 269 aa, Zea mays
  Coding DNA Sequence Number=SeqID_9016
MVGRSKPGCDLGPALSFKDLHHPGWGGGRAEPELYLPRGFVGHLLPQHSRERALTGLAGGLDFDNAGLVGGERRQLQRVGLAGSAGFGLAPSAPSRRKSGCRAARTGGPPKTSRAARAAFVFWGCPAFAPVRRLCAEVGAPLVREDPSGDLPVGRWLPSSVLRWWRLKKSSSPTGSPPPSVLRASGSLALIACPRPSSGDVGEGIVAAASALRPSLLQFGHPERRSLSLLLEAGRAGEATLGALIRPRGAPPNVGGFFVPAEVEPEFRL

SEQ ID NO: 52392 - protein, 521 aa, Zea mays
  Coding DNA Sequence Number=SeqID_9017
MNRNTGIQSAITNGTPVPPPHVRTTPLDARGPAEQRKADERRAVARSGSSDDDDFCSGGPNSGSTDLRADAAAKRPPPMPKLVRQGRAEGRRVGGRSVGGPGYLIGGRSSSSCRDRRRRRERLRSHSRPRARHAAAAGATDDDRPSLRSLREGAGHRPRRGRPQLGTLPSPALVMKILEAEGGAEAAARLAFPHHQTGGHHLGPTRHATGAPDASCMQLHRHLRHHRVSSTAEPIPRLEATQRTTQQRQPSAAVSAAKNGLAAMTVAGGQEQQSRRQLSSRPIRGQRENPLSRREDNAPVFRPRTARACATAAPPTTRPVALTPRWDRRRLWQEKQATLRLRHNNRLKKAASDRVGPTPTTGQRFEGRPLGRVPRPPQAIRAPRPLLIRGSKVGPRRVHSRLRRRARDDHGYVRYITKARAALPSSLETPCSAPIEGNMALSPLLLAERRRRGVCKKVESVPDRPLALCRGSGAALANLAPAKPLTASTYQPENLGPDRTPGLRPARMREQPDQPKHYARH

SEQ ID NO: 52393 - protein, 114 aa, Zea mays
  Coding DNA Sequence Number=SeqID_9018
MAPPVTWSVRALGRARRRLLRGRGRVCLPEVEVESEPRVGRGGDRRLRPGLSPSPGVGRGGVRRLLGEAEFVVFRDRGRVRALGSGEAEFIVFRSRGRVRALGRAERSSSSSGT

SEQ ID NO: 52394 - protein, 136 aa, Zea mays
  Coding DNA Sequence Number=SeqID_9019
MVPTASKFSSEKIFSARTSFVLFDYFESGILKTMEYTLGPRRRGSSSTLGVNYTFGEESSSSRQLGRPPRSLSQLSPEDISPARGLGNSTPASVPPVDDPARLRLTKSSFRANSASVRADTAASGFGSSKSGRGII

SEQ ID NO: 52395 - protein, 313 aa, Zea mays
  Coding DNA Sequence Number=SeqID_9020
  Homolog annotation: Hit_ID=Q6QP51; Match level="QueryCoverage=69%, HitCoverage=83%, E-value=1e-17, Identity=35%"; Hit description =Putative growth-regulating factor 1
  Subcellular localization annotation: CTP_CleavageSite=17; ConfidenceScore=5.10e-01
MKLARRLLRARNCAATRATTEPPRLRNQYRDSRQPCAGGSSSQVVSQAHVPSRDSERTLSHGVKTARPCSVPRTARARATAAPDRERGYLERDPSPRRKRAPSPLLIRGSKAGPSEGFNSRLRALGLRAHYWSEVRRPAPRKGSTAASGHSGSTPTTDQGFVGWPSKGFDSRLRRRARDDPGYVRYITKARAMLPSHFAAPLTGLTRGQRHLRRSDCCATRQTPEDDELRLARPQGSDSASAPEDDELRLARPQGSDSALASADGLRLARPRGSDSTSTSEDRLDLDLGGASASPNPGLGPTTPQEGPSLPYP

SEQ ID NO: 52396 - protein, 77 aa, Zea mays
  Coding DNA Sequence Number=SeqID_9021
  Homolog annotation: Hit_ID=Q8SA97; Match level="QueryCoverage=57%, HitCoverage=8%, E-value=7e-07, Identity=68%"; Hit description =Ornithine carbamoyltransferase
MEPGGGTAVGAVESLLTSSCFHKGAESRRRHRLYADGGYQLRIRSLEGTPNYGPRQPQNQILVERDEERDSTICGPV

SEQ ID NO: 52397 - protein, 576 aa, Zea mays
  Coding DNA Sequence Number=SeqID_9022
  Homolog annotation: Hit_ID=Q6J9V9; Match level="QueryCoverage=20%, HitCoverage=32%, E-value=2e-14, Identity=47%"; Hit description =Putative uncharacterized protein
MAERYQPPRGCAPSNNGKSKTTWALPIRGLGRRKDATHEETWRPRPTYHVTGAPVTTCKKLQRRLRQRRAFSTTEPVPQLEATLHAAQQCQPGTPVTGQSSAGEGVTVNMAKSGPAVMAVAGGRKQQSNRLQAHVPSWNSKRALSHGTGKGDTPKEILLREGSGPRAPLLIRGSKAGPSKGFDSRLRALGLRAHYWSEVRRLATRKGSTAASGHSGSAPTTDQGFVGWPPDGFDSRPRARRVRDDPGYVRYITKARATLPRGSGAALANPAPAKPLTASTYQPENSEPDYAPGHPGNDQNGRPRQIRASPEDACSPVDKAEVTAVTSPLDLGRRSLPRPTPGPGLHLDLGRRSPPRPTPGLGLNLDLGRWSPPRPTLGLGLNLDLGRRSPPRSTPGLGLNLDLGGVTTSLGLTMPQGGIITLPLATQGPDSTSTSVDGLRLARPQGPDSTSTSNDSLRLARPQGSDSTSTSDDSLRLARPQGSDSTSTSDDGLKRSSDGHDATGTGLQHLSDSHVSKYIGLWLLSARHDNTRPRVPLTVSPLVSPSRADPSELDHLFTPPLGALNWYRSRSLHIRD

SEQ ID NO: 52398 - protein, 409 aa, Zea mays
  Coding DNA Sequence Number=SeqID_9023
  Homolog annotation: Hit_ID=Q6J9V9; Match level="QueryCoverage=23%, HitCoverage=33%, E-value=4e-07, Identity=42%"; Hit description =Putative uncharacterized protein
MAESKTKATQALPIRGLGRWKDATHEESAKTWLPSKGVTLHLKATLPTCVLSRRGLGLLQHAPRSSPYDTGAGSHAATRHASCPRTEGARPPRAERTIAQRLQAFLHYRPDQQVKKRTTMQAACNRTKRAHPSDFAASSMEAQAHTSCNRRAGYYVRETAPPLAPVPRLLDCGTGDTTRGNPAHGPAVPTRHAGHGSVSRGRRRDGRYGQKWAGSNGDGRLAEAAIKSSASSRTRKGDTPKGILLHEGNGPRAPLLIRGSKAGPSEEFDSRLRALGLRAHYWLAPEGFDNRLRARRARDDPGYLRYITKARAMLPSLGRHRKLRLARPQGSAPVSASEDGLRLARPQSSDSASASAPEDDELRLARPQGSDSAPEDDGLHLARPQGSDSTSTSEESPPRSNSGSDQPCR

SEQ ID NO: 52399 - protein, 260 aa, Zea mays
  Coding DNA Sequence Number=SeqID_9024
  Subcellular localization annotation: CTP_CleavageSite=28; ConfidenceScore=5.35e-01
MDLDQLSVNPENSATCAALTVVPPARVRLTAAKSRLGRHRNLRLARPQGSDSTSTPEDGLRLARPQGPDSTSTSEDGLRLARPQGPDSTSTSDDGLRLARPQGSDSTSTSDDGLRLARPPGSDSTSTSEESPPRSGRPHNKGGIITLPLASPGYGEQDRRPIWLAPVKQVMMAPRVLHDDGGFQPPTEARIRQQGSNSPDSCASTGLKRSSDGHDATRTGLQHLSDSQVGMYIGLWLLSARHVSTLLHPPLYTWTLSLHL

SEQ ID NO: 52400 - protein, 263 aa, Zea mays
  Coding DNA Sequence Number=SeqID_9025
  Subcellular localization annotation: CTP_CleavageSite=49; ConfidenceScore=5.54e-01
MGTVGYWNSVAVHSIRPPPPFAAAVPTPFSAVTVPRLLLAAAPPCGLPPCAAISTPSSGNDAPASTGPKLLESPGTCPVRIQPRLGAAVAPAVSLIGALRGETISVVTAAAGGGVVSGGGMFHPCTGQNPGGNSVPAGYAIGGGMTCSGTGWRKSVGTGTKNRLRGPRHAHTTMMKPCNAAAEEAAPYGGPETSASQDAEAVPTTELANHNSCHHGNHKVDVRHLTFLVLHELLLCVGCFSWLERSADNVFEEMTKWRELIFH

SEQ ID NO: 52401 - protein, 56 aa, Zea mays
  Coding DNA Sequence Number=SeqID_9026
MESHDLRAEWESQLVDDNEDGYDYAYGNGCQHCNHCSGEDEAVEGDFQEFQDYDEF

SEQ ID NO: 52402 - protein, 206 aa, Zea mays
  Coding DNA Sequence Number=SeqID_9027
MESHDLRAERESRLVGGYEIDGFGYDYGVGKWYSFRLERMARLRHTARKSVIPFLPSRLAERPLRRPVAGQSSHLERLHHRLHEEQERRRQEQQGSSFSLQQEIESVRSYSPVLPLEAPSAPPLGAPASGVAAGGDPDDRGGDDSSSHDTDLSANLEPEGWVARPITRDAARGCHFHDALDTLLRRALNRALKGKCAFGAISKYFW

SEQ ID NO: 52403 - protein, 56 aa, Zea mays
  Coding DNA Sequence Number=SeqID_9028
MPLMGLGVCGSLCQGGDEDDGFGYAYGNGCTCCNHCSGEDEVVEEDFQEFQEYDEF

SEQ ID NO: 52404 - protein, 181 aa, Zea mays
  Coding DNA Sequence Number=SeqID_9029
MSVLIQTCKCDYPSLVGRRFPCLPKPRGTGTLPSLRKNPHGLHRIISTCAWCVLWPEGKSTGTPIGRHLLCLAISNVFPSDAVDEGRSGEDVRPSEGTGGGATLHDQATRAVPGEAGREEGGVEVPEVWEAAKQDAQSYEMERKTGELMEDVWSEITWEAEEDQAEVELLFGEMDEELHML

SEQ ID NO: 52405 - protein, 372 aa, Zea mays
  Coding DNA Sequence Number=SeqID_9030
  Gene Ontology: Mol. function=metal ion binding
  Homolog annotation: Hit_ID=A2YJW0; Match level="QueryCoverage=69%, HitCoverage=60%, E-value=3e-77, Identity=58%"; Hit description =Putative uncharacterized protein
  Pfam annotation: Domain name=DUF789; Domain location=5-289; Score =341.5; E_value=1.5e-99; Accession=PF05623.3; Description=Protein of unknown function (DUF789)
MTASRGVTARGHEEKRKCANDHLEGPMLNVQSGEWSAYGAGVPLVLNDSDSVIQYYVPYLSAIQLFADPSRPASRNRRPGDESDGESMDTSSESSIENDVERLRVSSLLEGTHRLENGGVRSDDGKGDASSSFPIFEYMERDPPYGREPLTDKASTLAHRFPALKTFKSCDLLPSSWMSVAWYPIYRIPTGPTLKDLDACFLTFHCLATPCKDCDPPTPACPGFGGINRCTAASGKLSLPTFGLAPYKFRASIWIPDGTQEQDRVTSLMQEADSWLRRIRVDHPDFRFFVSRSSSPGQEEQLRDGRGAHCSSTLAKTIQFAPAAGIGDIVQRQRSVPPSPARYLKFLQKKRHANANAMPSTSDESSLFTSRR

SEQ ID NO: 52406 - protein, 266 aa, Zea mays
  Coding DNA Sequence Number=SeqID_9031
  Subcellular localization annotation: CTP_CleavageSite=32; ConfidenceScore=5.31e-01
MPVAKPAAPGSGKSSASAKTAAAGRTKPPPVEAAKGRELPSPGKCVADFGTNISVEDYFVGPSEGQMVVVPPLVVITSPSAVVSAKGTAQDPWAPFCASDEILTAAAAKDVAGTMSQRLRETSQRLSQQLSQELGLMCFCLAADFADRVASGVLTADVAAEVERLRAQHADAVQEKSAAESKNRRLAEKVAALEAEKTDLRRQLVEERKEANQAIAEAQAEAKVARAKGSLASQRAEEWEARFNALRGRVDKAEASTRSEVERTLA

SEQ ID NO: 52407 - protein, 217 aa, Zea mays
  Coding DNA Sequence Number=SeqID_9032
MERDEDVEDLGGLVGAPPEAAEVNLVLPSDACEGPSPVPVPAMAGEDPVSAPAPTVEGAPEVGFGPAHATATDNANFVAASTVVAENDSDVSMAKFFESDDSGSSVVWSEESSDEDLDYFAALDVAAAETSPRVMGAEVLPGPSAGRRRRRVVAKRRVSEVEGGRLRVDGASKRELLSSPAGASVGEGELRNLFEGEELRIMLFNYRETGIIPKVEP

SEQ ID NO: 52408 - protein, 63 aa, Zea mays
  Coding DNA Sequence Number=SeqID_9033
MAKLWYYIEFFVDSLLLELLALRRLGVSYVDPRAIDLAMRIAERMFLKMKEDEAKIKIEEEND

SEQ ID NO: 52409 - protein, 681 aa, Zea mays
  Coding DNA Sequence Number=SeqID_9034
  Gene Ontology: Mol. function=RNA binding; Cellular component=nucleus; Biological process=regulation of transcription, mating-type specific
  Homolog annotation: Hit_ID=Q850Z4; Match level="QueryCoverage=100%, HitCoverage=100%, E-value=0.0, Identity=67%"; Hit description =Putative uncharacterized protein OSJNBb0027B08.11
  Pfam annotation: Domain name=PUF; Domain location=136-170; Score =14.4; E_value=0.23; Accession=PF00806.10; Description=Pumilio-family RNA binding repeat
  Pfam annotation: Domain name=PUF; Domain location=172-206; Score =10.6; E_value=0.67; Accession=PF00806.10; Description=Pumilio-family RNA binding repeat
  Pfam annotation: Domain name=PUF; Domain location=208-242; Score=7.2; E_value=1.7; Accession=PF00806.10; Description=Pumilio-family RNA binding repeat
  Pfam annotation: Domain name=PUF; Domain location=392-427; Score=5.6; E_value=2.7; Accession=PF00806.10; Description=Pumilio-family RNA binding repeat
  Pfam module annotation: Pfam domain module=PUF::PUF::PUF::PUF; Domain location=136-170::172-206::208-242::392-427
MAGGGLQGAKKRKREHAEGKAKPRKQVKGGGDGAKRKSHSAAGGYTAHGGAGEVVARKKTPVTPKEKRLAAKEMSEARKMKRRQHYSLEKVAKFNACLLCLTLNTGQELTKLWEKMRCHDVSKEERSKAVSQAIHKMDGKYLDIATSHVTARVLQTCVKWCSESERDAIFDVLQPHLLTLSCKKYAVFLVKKLIELASKKQFASFISSLHGRVANLLHHTIGAAVVDYAFQRGTQRQKRQLLVELYSPELQLFKDLTVQSSSCLIDTISKLGLQISSVLLHMTIVIDKILEKGTVEYLIVHTAILEYFTIADKTSASDAICQLIPLLTQGALIIDGDEPTNAPELPKKAKAKKKRSKEPLIVRIMQTREGLKLGISCVKYGSAKDRKKIIKSLKGHIMKLALSDFGCLFLICIISIVDDTKLVNKIVIQELVKHLKQLIFDKNGRRPLLQLLHPFCSRYLSPNDLACLNYNVPSLSSTEVETSESAIGVITENKLDDVTAQDPNGLEGKQIVFESKKDPLQRRHELLIKSELAEALVQSCIENVGELLRTNFGKEVLYEMAVGGKDNVLDGLTDRIHMLHDAIASDAAQPKTEDTEHAFENFFSSRVIRRMVIDCPAFAVTLWRKALQGKCKIWAEGHSSKVVASFLESPSTEVKDLAKPELQPLVDAGILKVPDPKVVQK

SEQ ID NO: 52410 - protein, 260 aa, Zea mays
  Coding DNA Sequence Number=SeqID_9035
MEPDGGTAVGAVESLLTLSCCRRRGVSSEAEVESCLQLPWPSPSQGVGRGGSRPAEARAESEPWGRARRSFVVFRVLARVRALGSGGAEFAVFRVLARVRALGSGGAEFAVFRVLARVRALGSGGAEFAVFRVLARVRALGSGGAEFAVFRVLARVRALGSGVGVAQAALSFCQTGQWSGGVTAVTSALPGARVRIEVSGHLCVKCPCNLVSRCGDLVKVASERSQGLGQAGDVSAIKRGASGETEVSRGRLPSAEAGLG

SEQ ID NO: 52411 - protein, 704 aa, Zea mays
  Coding DNA Sequence Number=SeqID_9036
MCSHYYSAYPQFEVVEEDASEGALRCAAGLSSGRDLVEQFMAYGVWPLAHGWALGEVCPRQMPSHGGKLVRSPAFALDLHNRDPAAFVREAEDGAVQIVGRYVPKTEGQRSWDIRGSNDRLNRVFELNRLPYDGYPGQDDVDRRGKKPAVETGDDPAPAAAPSSKKRKLGIAMGGLGVSDGFARELMRTCAAPGGRMSSPELRESSTRMLRVTGGWWPKNVPIPRAASEDFFTSHMVHDWRVFPYGRNIAAVVSAVMDKDRQGAAQKRQAVVRLHEARPKRPRGTAKAAAPGGSQPPLAAKSAAPGSSRVPEAAKATAASGTKSVPAGAVKARELPPPGKRVADFATDISVEDYFVGSGEGQLVVVLPAVSTTAAAVVPRAKGSALSAGGEIPALTAVRDEAGAVSRRLKEALSQAADFADRAASGALTAVVSVEVERLRAQHADAVREKSATDSKCRKLADKVAALEGERADLRCQLAEERKEANEALAKAQSAQAEANLARAEGSLARQRAEELEERLNALQTRVERTEASTRSEVEWTRKQLMDSYHELGARTADFEVPDREPGLRCLEWLQEELLALPAIVEGFMSYASLVTWEGAMNALSREGCRHYEVFDQADEDFERDIYKVEDPVVKESVGALYDRMWGPLGREVVRERTETARGQAARGENVEDFGALNSAQPDPESNPVAAVSGAAPGNRRRRR

SEQ ID NO: 52412 - protein, 152 aa, Zea mays
  Coding DNA Sequence Number=SeqID_9037
MASPGLQTPRAISGCSLGQPTTFYLSLICRAIYDTPSTVGETHGAPSTPRANDDTRTRSGTGKNMTGITTSLHGVRPPELSRQWLLLVAQPRDGRGTTTTTPLPETDIIIDDRRTRVEYRHSLHASGPFNGPLTSKSPTSTSTSLSRIREAD

SEQ ID NO: 52413 - protein, 147 aa, Zea mays
  Coding DNA Sequence Number=SeqID_9038
MGKSKKGGSSSHHSGDKRKREPTPPSEDFGDSEYSEEEFSSESEGSPVHASPPASSDDSDDSQGIAAEVWTYIRAVERAGVEGSDESEVSSDEENSSDLSEEGGGDGDGVGDDGGDDDGNDDGGEGGGKGDSGDGKDGSKGSNRASG

SEQ ID NO: 52414 - protein, 261 aa, Zea mays
  Coding DNA Sequence Number=SeqID_9039
  Subcellular localization annotation: CTP_CleavageSite=35; ConfidenceScore=5.50e-01
MARARAYKALPGFDCTLPRTLKPHRSLARRRLPVRSVSAAAQSLCHRRPANRAIPNSVQPSEKTVHTSVKLPERGIGVCFAGEASPRSPELSTPPEYVDRVIHSTILRFLVHTVTTLPHEAHCALGLNQFAVVWPVHSPPTRTPACARGPGDSGHPRRQAVPRRDRQSLPEPTPPFVGPPSPPDNLEKPYKNNPKGTRAIQIPYIYPQQKHKPKDCNLADGEYILVPEQGAAQEVAPDPAPEPAPEDMSATALEGKPQFYA

SEQ ID NO: 52415 - protein, 303 aa, Zea mays
  Coding DNA Sequence Number=SeqID_9040
  Subcellular localization annotation: CTP_CleavageSite=51; ConfidenceScore=5.36e-01
MSSSSLMRRVFPSSKPPDGGYPPPFRLLVGGTQLHGSWYLSAIVRLQGFSSAGPAAPLRRRSPRMVTTSFWVGKSKPGCDLGPTLSFKDVHHPRWGGGHAEPALYLPRGSVGHPFPRRSGVEVLAGPAGGADLDNVGLIDGGRRHLQRVGVVGQAPGGPSCRRAAAAPCAREDHPRCRALLGRRSCSGVALLLHWDGALAQRLAEAAREVLVADGIAATIRAPGHCAGAFPMEWGRSYLRRGNRSSVRDGTLSASVFCSLWLLRPEHESLGSIGLVVWGSSSLVKETPQPLFDEPRPGVAISV

SEQ ID NO: 52416 - protein, 345 aa, Zea mays
  Coding DNA Sequence Number=SeqID_9041
  Homolog annotation: Hit_ID=Q6JAD6; Match level="QueryCoverage=100%, HitCoverage=52%, E-value=1e-124, Identity=63%"; Hit description =Putative uncharacterized protein
MPRTKNVSAPGGGDDEDPRRPFRQVKGKTVYLEQQEGRKKRRTDRAARAAAAAAAAAQAELGDQPQTPSDQIAYRVRRLASRPRSSTHTSASTPPPTLPAPVTPVAPSTTTAIPATSTTPASTAPPPPAPALAPPVPPPRFRERDETERDPAAVDLFSTRIQESFFRAQMSAQIALRVHRLLDLPAFLLAAGADSEAHLTYLPGLQTLLTTSDRYVEEWVRVFYASVWIDPDHHWMRFRFEREDVTITASQIRQLFGFPESTTRLHSLCYGTSDPPRRPHGGVAPGTTHVVALFRPPFTDGSRRSPADFTTAAKYLYELIRRTLLSRMGYREATTHIQLWLLGAL

SEQ ID NO: 52417 - protein, 381 aa, Zea mays
  Coding DNA Sequence Number=SeqID_9042
  Homolog annotation: Hit_ID=Q5GAU8; Match level="QueryCoverage=27%, HitCoverage=81%, E-value=2e-33, Identity=64%"; Hit description =Putative uncharacterized protein
MKEALWHKRGHPRELYPNVSSKDALVPPELPVPNCDCGRLAWGRLRCFFFQWIDGPDKFDTRYLLFAYWLCGRTSHERFKRWVPPPPNPPPMMDAEKEPYGWRKCRFREWLYGPLSHWLEPEETRKCSWESYNDKGEVMRTIESKRLMGQKMRCGSQLVGSYINDRIRDMRRYAKSAFYDSPKRAEYRRLKAADEKRAHDARESEAARAKKQMLDNLVDRLKGKIGCGVNYLADEAHARYVQDKMAMVELMEEEEDDTSRLSEIIALAEAGLHGEDEDDTSRLSELIALAEAGLHAQEEEDEFMSQAAEEVEAAYYKQKSDEAEAEDELFSQAVDEAEANYYKRTVDKCDAGQCSKWNEVVVEDCAMDDSEDELLIDCDSD

SEQ ID NO: 52418 - protein, 42 aa, Zea mays
  Coding DNA Sequence Number=SeqID_9043
MTLNGFEPMTSQEALVLASLIDDKKKLDDYQFDLWKQSYMAA

SEQ ID NO: 52419 - protein, 115 aa, Zea mays
  Coding DNA Sequence Number=SeqID_9044
MDYMMFEVAELDEASMICHTNSKMKGYMLVLNMSRMRTRARAWTTPVAVVYMWANEATSKLMTTGTLSHPDFGAPRPGREHNHQVGAHVKCKAYQRGWLELSIAFKVGQNFISNY

SEQ ID NO: 52420 - protein, 141 aa, Zea mays
  Coding DNA Sequence Number=SeqID_9045
  Gene Ontology: Mol. function=diphosphate-fructose-6-phosphate 1 -phosphotransferase activity; Cellular component=6-phosphofructokinase complex; Biological process=glycolysis
  Homolog annotation: Hit_ID=A7PX81; Match level="QueryCoverage=62%, HitCoverage=15%, E-value=6e-13, Identity=48%"; Hit description =Chromosome chr12 scaffold_36, whole genome shotgun sequence
  Subcellular localization annotation: CTP_CleavageSite=18; ConfidenceScore=5.10e-01
MMLMHMMTCQSFSSRNTRGVTAQKSELQRSEPNGFGDVVQTSHLMHTLPLPSILQSNFSVVDGLASSAAGNPDETKLFPNLLGQPSVSMVSLSRILREKQFGIEMSRIQGLPGGKRIKSYSRDLFMFLYILLIIASGESRI

SEQ ID NO: 52421 - protein, 146 aa, Zea mays
  Coding DNA Sequence Number=SeqID_9046
MSKPDKTFPLLILPVLPSLLNPGVGPHEFGLSDCPHSLEWLYDKGVQGVGRGLPTERGRSSAVGIAAGGLWVGDGGWKVVPRVRGYARELLGSLNSLPDQQRRRGRRKGLTGEENDADALRIELGGGEERDGRSWCEEEGARASFL

SEQ ID NO: 52422 - protein, 57 aa, Zea mays
  Coding DNA Sequence Number=SeqID_9047
MGKPIPSLLMLLLSRVTALIPTITGMGDHVSGRVRGYVHCQVHSGFNNIMLREEKLS

SEQ ID NO: 52423 - protein, 326 aa, Zea mays
  Coding DNA Sequence Number=SeqID_9048
  Homolog annotation: Hit_ID=A2XFR6; Match level="QueryCoverage=49%, HitCoverage=48%, E-value=3e-19, Identity=36%"; Hit description =Putative uncharacterized protein
MKKTLMEISMNAESNDAPMVRTLQTTRVNTNYVPLPRQVPVYLVVVEEISVDLPRLRVENGVILENSSEELLPTPTALAESLAFAARSSASAPPAPAFQAPAPGGNDPDDSRDNDEDDNNEEDDEENVNEEADSVQQDYYMGLGPVTEHYTSMFKTGHFPNVLQDVLHALGTYVRPLYETRQVCEPPRACYCITRIHVRVMDVGDRGFRTLSSHESLTLLSTYAASVSDASRGTLWSLSHTYRQQLHDTKYRHLPLRLSGGSQTSIILGGAGEDRLNTLAGVVAGLNTDLDSATLDLSRVHLELEDAHARIAALEAQLQGRDPREA

SEQ ID NO: 52424 - protein, 155 aa, Zea mays
  Coding DNA Sequence Number=SeqID_9049
MEVGCEGWGGWEWSNELVVRVVWKEAPESTTQSVVVRGGGVGEGCLGAAQDMAGCAVPGVLGDATRWGREGAVGRPHGAGVGVGKGRARRAGTAGGRAHGRDASDGSAAGTARAGYARSVSWRALGRGPRPGASGRDARRAGGGGRLAEVQRRRL

SEQ ID NO: 52425 - protein, 155 aa, Zea mays
  Coding DNA Sequence Number=SeqID_9050
MTARFQRLRERNIGNPLILEDFQWDNEWVDNQKEILREGDDLAWAHVDDAIGASSSLQGRNFPKRARYESVYSRRWQAAATQEQRVIEEEGQGNEQDDEDRQAPAIARSSYRAQTAAIACSRPGAAIAPDVVGCPPGSSSYDPLAADVHNPTHIE

SEQ ID NO: 52426 - protein, 965 aa, Zea mays
  Coding DNA Sequence Number=SeqID_9051
MPLLTVRSNVFFFFVRCECAVGPIVVRGYLERFGGSGVTPKPHSGVRRFEDLLGSRARYAAVGKRKIGSKIAQFGLCTFTPRTVKTSAEVVELVPCARNKWGNWYEFWFYVSGGEVEDLLGLPAAVMCSHCYVAFPPFEVAKDDRDEGALRCAARMSSGRDFVEEFIGYGVWPLAHGWALGEVCPRYMPSLGEQQVRSPAFMLDLRGQDPAAFMREVEDGAVRIVGRYVLRTEALRRWDIRGSNVHLNRVFELNRLPYVGYLGDDAIVAVDRRGKKPVAAAGEGSSREAALAMKKRKLGTTAKGLGVSGRFVVELMGNCVAFGGRMSSPELQESSARMLRVTGGRWPRNVLIPRAAGEDIFTSRMARELKIFPYGQNIAAVVSAVMQKGRQDAARKHRAVTRAGDPFHEAKKARGGAKSAAPGSSKPPPVVKPAALGPSKSSTGARAAAFGAGKLPSAEPAKERRPPSPARTDVAAARVADFDMDICVGDYLIGSDAGQLAVVPTPVAATSPTVVVGAKGASQDPLSNFCASREISSATAAKDVAGSMSQQLRHASQQLKHAAAFADHVVSGALTLELLNPEAKLAWAEASLTRQRTEELEARLSGLRNRVDKTEASTRVEVERTHAQLVDAYRELGAQTAAFEAPGQEVGLRFLKWLQEELGSDEGFEREIFQVEDPVQKRTAGALFDRMWGPHGRETVRERSDRAIDQMAHDEEVEDLGDLDGALPDSMLPEASGVEPAPPSDAGKGPSVTPAPTGAGEDPAPAPALTGEDASKAMGEPAAEDPTAAAGPSQVPTFGPAQATAADNTDFVVASTVVPTDDSLFGSVSECFESDGESGSLFSWTEESSDEGLDYFVALDVAAAETSPRVEGAGDLPSASTGCRRRRVVGKHSVGEFSRSGRRRRMGMERGHLRVDRVGKRELLSSPIGASVGEGDLWKLFEGEELRIMLFNYREMGIIPKVEPM

SEQ ID NO: 52427 - protein, 200 aa, Zea mays
  Coding DNA Sequence Number=SeqID_9052
  Subcellular localization annotation: CTP_CleavageSite=28; ConfidenceScore=5.30e-01
MAGAGDSAQAKKARGGCGWPGGLSSSVRYRYRRSPVTNQRDRENKGERKGGPAGKFTLGGAGTMAMMCLVVAEHDRGRWSSSTSGGFRRRGPSNGEAPSSLKNGCAQLGKGDEGWVAPVILPLLVQRGDEDLERRVASSPSPQHLPSEGPVRLSHLVPKTSLDGGDAALARSGSAGGFDVTIDGRGTVGLRASRSVAPYV

SEQ ID NO: 52428 - protein, 183 aa, Zea mays
  Coding DNA Sequence Number=SeqID_9053
MAGKSQGFWRKFSKTQRIESMDCGFYSLKLVVVNQSRCIVDLRFPTIVTLDTIRAVQTQMDGQGVVFYPATGHTAALCYPRRTPPASSGCRFADANEAHKIEDISLLFLGKAASQTPPPAEARGKSLAASTPTPALRVGAPAPRAGDNAVSPSDWTDLAPCDAVDAPPGGKAKRGSLTYVQCI

SEQ ID NO: 52429 - protein, 34 aa, Zea mays
  Coding DNA Sequence Number=SeqID_9054
MATIARSRKQNWYPKTFLQLRYMKYIMNIRKMIR

SEQ ID NO: 52430 - protein, 143 aa, Zea mays
  Coding DNA Sequence Number=SeqID_9055
MPPAPPQGILATGGDPDEDGGDDDTGGSSSHDTELLEEQEPEGWIARPITRDVARGCHFHDALDTLGNPRLNNMINLVVVLNIELDHALDKLGKVQLEVAELCAECAARHYLDGGSPTPVGIQHPYRSLPRGRFEYGTPDCRT

SEQ ID NO: 52431 - protein, 237 aa, Zea mays
  Coding DNA Sequence Number=SeqID_9056
MAKSFIIAQRPSPHMVHKIAAIINRLMENPPQQVLVKFSRLSTMQSISGLRAGVLYSHCIRDHSKTCKNYISCSKSTPGPKSSTKEKLNHSKSPRTLRSPAGHGSGLHNRTQAGKTVTSPKCTTSPISSRLETPLVVMNTPRSRAPTETLEAEAEAEAHNSKGSIAFSMAKTQHIPPGTTLKPRTQRTEWPKTNQLTTKELSPTPTIPNNTIITNSTMSITIPTSKTTTYTSNTKKS

SEQ ID NO: 52432 - protein, 123 aa, Zea mays
  Coding DNA Sequence Number=SeqID_9057
  Homolog annotation: Hit_ID=A2XS04; Match level="QueryCoverage=71%, HitCoverage=13%, E-value=1e-11, Identity=42%"; Hit description =Putative uncharacterized protein
  Pfam annotation: Domain name=Transposase_23; Domain location=46-109; Score=1.2; E_value=0.00087; Accession=PF03017.5; Description =TNP1ENSPM transposase
MVRLAKVHFVLRVFEHMLLQVMKQDMTWKSYNHAPNKNQDSIEVFLKSTRHPNKKVALGRVLSQDPKTKVGDVALGKEIWMVRVSLVSVCDEPLIRPYNNLKVLGEVGNNPIAWPSSCIEKVN

SEQ ID NO: 52433 - protein, 125 aa, Zea mays
  Coding DNA Sequence Number=SeqID_9058
MESNGLDSVLGPVSERLGVQLTPAWLQGMRLQGHPHPTAGYPVLLEQLHCILGRHRITGSLQYLPQDVGKTLPCKSVRVGMCVPSFRGIMRSHLCKAFKVLDQLPSSFEIIDACMRVLNNLTINL

SEQ ID NO: 52434 - protein, 299 aa, Zea mays
  Coding DNA Sequence Number=SeqID_9059
MDRELLLACSKGAELGRLSAGRPGRRAPWEELQQWGPTKSCCSAKGERGARRGSLAGRCGVREELEGGRRHAMAGRGRKGELLRKREEDRDVGWRREKPLGGSPFRTGHEAAHGCLLLAEVHSVLQGHWELTAVELLSLGNDSPSGLVPHSGNIHGLLLALELLGYYDWLLGQEGEVSGCSSDTAIGAEGTASYTATGAGADADASVLEVKGVNQTSQKPVLPLGISVHILGHIIMTEVVSELLSGDSFRVGKGGEASAASALASEVEVGVAVVAPATLLLESGQSLGLPRSALETSAQ

SEQ ID NO: 52435 - protein, 121 aa, Zea mays
  Coding DNA Sequence Number=SeqID_9060
MARCMESDQLRGKWVTRLVGKDAQPLQSVKLVKSRYNRMRRVEDAMMSSHFEAFDQSNEDFDAGVFLVEDDVLKRTAVALYDRMWCPPGCGVVQERADRALAHTMRDEEVEDLASLESSVA

SEQ ID NO: 52436 - protein, 157 aa, Zea mays
  Coding DNA Sequence Number=SeqID_9061
MSGAPEDSNLNSPPSGIFRGDSTIIHRTVRCTPDSVRCAKEEVRRAHSGTPDSKQYVSGVHRTPRRAHKTEAPTATIKRPEQPWTWRWKKEDGSDGQADKHGRGAQKSPEYRVCQSGRQAATGRQVQGALATVPNGGGGGGSSRAEMSYSGVGSGGQ

SEQ ID NO: 52437 - protein, 53 aa, Zea mays
  Coding DNA Sequence Number=SeqID_9062
MDTLFIDDDDDDDNAGFYCDYDYGFLVFFPFGKGKEGVEADLQGFQDFDESED

SEQ ID NO: 52438 - protein, 138 aa, Zea mays
  Coding DNA Sequence Number=SeqID_9063
  Subcellular localization annotation: CTP_CleavageSite=61; ConfidenceScore=5.33e-01
MRRSPSGRGGRRKPGRRLRHAGGDDARRRSAPRCLSPRPSAGPASASTPKRRGRRATRGPRAEGTGKGGYPERDPSPRRNRAPSPPLLIRGSKAGPPKGSTVASDRVGPTPTTGQGFEGQPPEGLHGRLRLLGLRAHY

SEQ ID NO: 52439 - protein, 445 aa, Zea mays
  Coding DNA Sequence Number=SeqID_9064
MAERYQLPRSCVPPTTRQKGCGHPPSGGLEGGKTRCIREHEDMVAFQGGHPPFKGDSPYLRPQPSWAESSPTRSKVLPLRHGGWVPHVTQAGPEQKKPNRRARCMQPPSGYKRPSTFAQTSGRKGGHPCRRPATAPSGRTSPTSNTPSMEAQAHASCNRRAGCCVRATASPPAPLPRLLDCGTSTATRGNPTHDPTAPAWRDGQCGQKWAGSNGGGRRAGAAVTSSARLTSHLGKGGASGRGRERRFAFAIMTASKKRLRASLLIRGSKAGPSEGFNSRLRARGLHTHYWSEVRRPAPRKGSTTASGYSGSAPTTDQGGNDLVTESHQREASSPRTPSTGDRVRQITRSSPETPCSAPTEGNVALSPLLLAERRHRGVCKKVESVPDRPLALCRGSGAALAILAPAKPLTASTYQPENLESDRAPGLRPTRMRERPDQPKHYARH

SEQ ID NO: 52440 - protein, 515 aa, Zea mays
  Coding DNA Sequence Number=SeqID_9065
MPDAMKPKGGRAEPGFYLPHGPATRFFLRRFGGEGHPLAVRRRRPPAMRGKANCCCLDRVQLSVLHPGRQSCCARVAAVTGLAEGVNFDNTSPIGRERRQLQRAWHAGSAGSSAASDVASCRLVRAWLSIHLMGDCCAARRSGITTPPRGGRCRPVREDLSGDLPVQVGAAAIRWRGAGAQVAAVVGAEVVAAREGFSADETVGATCGQTPDTLALMACPRPSCGGVGEGLSTTVFALRSSLLLFSHSKRRSLLLLVQWSPASHLEFIVPQALWCGGCSYPREWNQSPNLRPLCDELEPEAAVLAWTEASSARKEASSAQEQVASQAEEVQRQRLELGQVICEQDQPRSHAAEVVSRAKVPGGQLAEATERPTEVSAWAGALAETRAVRAQARCWRPSSRWRSFHPCRRPRPSQIPPKVETTSRVLLLPLPMSEPAGNNRLSERELLFAEGFYYRFSREGTKVVLAEKFSSVRTRWVAESLIRATPLSKQLKSTKDVLAKDFSEENFDAEGVPPF

SEQ ID NO: 52441 - protein, 233 aa, Zea mays
  Coding DNA Sequence Number=SeqID_9066
MSWLSEVRRSLAEGQLLGAVESPLTSSCFRRRGGSSEAEVESAFCCRGRAPSQGVGRGGSRSAEARAESEPWGRAKRSFVVFRVLARVRALGSGGAEFAVFRVLARVRALGSGGAEFAVFRVLARVRALGSGGAEFAVFRVLARVRALGSGGAEFAVFRVLARVRALGSGGAEFAVFRVLARVRALGSGGAEFAVAPLARPDCLSDSLCRVALQSGWRRRRCPSVRLASGAVE

SEQ ID NO: 52442 - protein, 265 aa, Zea mays
  Coding DNA Sequence Number=SeqID_9067
  Gene Ontology: Mol. function=carboxyl- or carbamoyltransferase activity; Cellular component=ornithine carbamoyltransferase complex; Biological process=amino acid metabolic process
  Homolog annotation: Hit_ID=Q8SA97; Match level="QueryCoverage=41%, HitCoverage=20%, E-value=9e-22, Identity=54%"; Hit description =Ornithine carbamoyltransferase
MAPPIDVDGPRPRLGDVEAPPRSRSSLYSVAVVESEPLGRARWRLSAEARAESEPWCRAKRSSSSSGAEPKSEPWVGRSGVRRLLGLSPSPSPRSGGAEFAIFRGLARVRALSRAERSSPSSGAEPKSEPWVGRSGVRHLLGLSPSPSPGSGGAELPMVPEAGPDCLSASLCQVALQSAGQWSGEVTAVTSALPTEGCASGIKGVRATFCIKCSCDLVGWRGDLVRGLLLGEDKASGRAGNMFVAGRGALGRDGDPPGSAALVRG

SEQ ID NO: 52443 - protein, 43 aa, Zea mays
  Coding DNA Sequence Number=SeqID_9068
MARWHGRLLFMLQNDPDDNGNRAKHGILGDIAATTKDGGDLDR

SEQ ID NO: 52444 - protein, 180 aa, Zea mays
  Coding DNA Sequence Number=SeqID_9069
MAVGVSEALYAKAVSPDLLTGDRWGRLIVVSKDVNLEELPYDLTDRRRIIDYPGLKLQGQIRRSETNSSLLTYMAAFSPKNSFGDFKLIYIDNVQANERFSNLNTLIELVKGVCLEGIRWILKFHQNKSKLESQIRFLEKVRVFSNEHKTTSTWIMTKNCTKRAHVVIQRVYLCTNQSPT

SEQ ID NO: 52445 - protein, 318 aa, Zea mays
  Coding DNA Sequence Number=SeqID_9070
  Homolog annotation: Hit_ID=Q6QP51; Match level="QueryCoverage=21%, HitCoverage=29%, E-value=2e-11, Identity=56%"; Hit description =Putative growth-regulating factor 1
MHCLISGVPVRACLTSARFWRALNALQPLRFPEAGEFLRQLFLEAPDTVRCTPDSPVNYSGVPLEIPEGGEFELESSGAPDTVWWCTGQSGVPDQSAAHPAPTTVPATRAKLTTASLDSGATGSSASPDLGPRPREEVSASPDPKTRPQPRPREEISASPDPKTRPQPRPQEKSPPRLTLGSDRPRHRGYIITLPLASSGYEGTRPASHLARPVTGNDGSPRASITTVVLSPLRKQGDVSRIPAAPSAALLQGSSTSPTTTLSHTQGSSTSPTATLACTQGSGTSLPDTNRRSSFGDQEIKLFEFYEAEDPEHLFGEG

SEQ ID NO: 52446 - protein, 149 aa, Zea mays
  Coding DNA Sequence Number=SeqID_9071
  Homolog annotation: Hit_ID=Q6QP51; Match level="QueryCoverage=25%, HitCoverage=17%, E-value=4e-12, Identity=92%"; Hit description =Putative growth-regulating factor 1
MGSKADPPEGFDSRPRARRVRDDSGYVRYMAEARAMLPSARVSDFCALLARIKCAAAEQPLRFPEAGEFLRQLFLGAPDTVRCTPDSPVNYSGVPMEIPEGGEFELESSGAPDTVWWCTGHCPVYTGQSGVPDQRYLRLSLCSFVESNI

SEQ ID NO: 52447 - protein, 141 aa, Zea mays
  Coding DNA Sequence Number=SeqID_9072
MGKSKKGGSSSHHFGDKRKREPTPPSEDFGDSEYSEEEFSSESEGSPVHASPSASSDDSDDSQGLAAEVWTYIRAIERAELEGSDESEYSSDEENSSDSSEEGGGDGDGVDDDDRGDGDGDEGDGEGGSKGSNKGSNKASG

SEQ ID NO: 52448 - protein, 344 aa, Zea mays
  Coding DNA Sequence Number=SeqID_9073
  Homolog annotation: Hit_ID=Q6JAD6; Match level="QueryCoverage=94%, HitCoverage=66%, E-value=3e-97, Identity=46%"; Hit description =Putative uncharacterized protein
MVHTKNVSAPGGGDDEDPPRPFWQEQDETEVRPLAADPRLIDLQRATAALMLAQIALRAHRLLDLPAFLLAAGADSEIRQLFGFNESSTRLQSLCYDGSRRSSADFTTAAKYLYQLMRRTLLPRMGYREATTHIQLWLLGALISHSEFDVVDFLICEIEDTVLDGLRARHQLSYAHYLCYIFSQLIQPPQFQGTLEASCLHFGSYRPTPEDPVSVSDPVIDTPAEDAAFHQFGTQGATVPDDEDDDYYYFGIPPPPLARLASQQARLASEQARQEAVQQQMSERMLSLFQTIQDRKDTLQQQFLADRDEHRAFMTHILQHTGVQIPPVQSAPPPALQASIVPAI

SEQ ID NO: 52449 - protein, 294 aa, Zea mays
  Coding DNA Sequence Number=SeqID_9074
GSGALQVVSELLGWPQDKSDGGLLPNQLLPEDGFPKLLRACTVCLGIRSQPEFKDTCHVVARKALRALCQIYEEEVADTLLRFFPPFQRNRPVWMARMRALEEKQLLEDDPSVRSATVTVDLTTAQARATALESREVITVEALKQAKDEHVQKLMEAYLVTHNQRRALRIQEPASSNPVQPRRAEDPQILEGHPVSIRGEKKAWELPEGAIVLEGIPVFPQAMNKQEHPESSQDPPLELFEPLTMKKILAPSLEVKEEAARTLPAPPPSEELQEPVQLEEEFNPVLPSQSLPEE

SEQ ID NO: 52450 - protein, 119 aa, Zea mays
  Coding DNA Sequence Number=SeqID_9075
MRKEQIRWAHGCRVLASWERRFEGERSGGAWDPRLGRGQARTLRVGALLCDLDLGGGAYPYQGKREGKRRTERVTPEFGGYWKRNFIPPNSGCYKSNPLKRNLALEIQEEASKKMRLVH

SEQ ID NO: 52451 - protein, 39 aa, Zea mays
  Coding DNA Sequence Number=SeqID_9076
MVGLQVVTRMMVFDYDYGNGKEGAEADLQEFQDFDEFED

SEQ ID NO: 52452 - protein, 135 aa, Zea mays
  Coding DNA Sequence Number=SeqID_9077
MVSARSSTFSGRYTDKRNEAHGMEVTLPWMVTETRAYDERLHRCLRDPSTKYSDHDAGTTALAVPGLRWRPDTARRCKMCGRTRSGWWKSYRRTGQGWKRATAGFWTTKCGGAPNSSGQVIVYGQVDLSHQFRLK

SEQ ID NO: 52453 - protein, 102 aa, Zea mays
  Coding DNA Sequence Number=SeqID_9078
MWGKTYVIAWRLTSVTKRDHLDADPMVFSMSSMAVWKDGAEIYDDNEEDILLMVIAWLLTYARDITYLVWGESIYAPEADVKLGRITCRCTTTKKTISEIRT

SEQ ID NO: 52454 - protein, 49 aa, Zea mays
  Coding DNA Sequence Number=SeqID_9079
MRNDDGVEGIPRHVGSLEDMVARVTWPSTLPPGWTVEWDPTSVGEEHEE

SEQ ID NO: 52455 - protein, 233 aa, Zea mays
  Coding DNA Sequence Number=SeqID_9080
RAHGCKHGAELQAPMAAELLSCSMGAGALHGVDRRPCCLLQWCMAQGAAIPSSPLSPPTTAAGLRSPSMENQQELSPPHGRELPSATMALDASFPDRRASISVRPVSHGLNVPPPRSTSPWRVSFPATLHFPPAMDAQEQQLLQLPMARCSRRRGAPPGISPAMARDSASSLLACCCAVTRGACKVLGKMRSSPDVCARCRLAVLGSQVDSTPSTLAGCLLFLHSPVVVVVHP

SEQ ID NO: 52456 - protein, 67 aa, Zea mays
  Coding DNA Sequence Number=SeqID_9081
  Subcellular localization annotation: CTP_CleavageSite=64; ConfidenceScore=5.23e-01
MALMGSTSNKMYLCQPYLDSLKPAYPSESFLLSGLSKVLRTRTTVGGPNTLGGSVTTCKDRSPRSST

SEQ ID NO: 52457 - protein, 47 aa, Zea mays
  Coding DNA Sequence Number=SeqID_9082
MAELPGSMPVPLLSPWPPAAMAASPWRAQVKLGEKRKLRDIYLVFGR

SEQ ID NO: 52458 - protein, 179 aa, Zea mays
  Coding DNA Sequence Number=SeqID_9083
MDRVLQGDGSDPEVEDNGDSAARRGKMPWEREVDELLAGGRRKGASWDFSGRRGSESRAAREKNLSSPGAGGHGCWRPRGEQGHRHAPRELGHGCCAWKNGGHAMAAEGAGPRASAMGGLRRPWSSAPAQGKSGERGRACGGPAPTLACGCIPGSRVEDARRCFGTLEKKGALQGQHAG

SEQ ID NO: 52459 - protein, 427 aa, Zea mays
  Coding DNA Sequence Number=SeqID_9084
  Subcellular localization annotation: CTP_CleavageSite=78; ConfidenceScore=5.07e-01
MSSRSLMHRVFSPSEPPDGGHPQSFHLVVGGTQLCGSWYLSAIVRLQGFSSRGPAAPPRRWSPKTVTTSPWVGRSKPGCDLGPALSFKDVHHPRWGGGRAEPELYLPRGFVGQPLLQHSREGALTGPASGADFDNAGLVDGGRRQLQRVGLAGLAPGAPSCRKGGCRAVRTGGPPKTSRAARATFVFWGGPAFAPVRRPRAEVDAPLVREDPSGDLPASGSLYLSSPLERRRGRGQGCSGVRPEAIAAAVRPPVEGVVVAAAGAGDDSPVGCRNRFTKRESPRAKVTSEESLGSVGLAIRGFSCLVKGTPRPLFDEPKPGVAVSARTEAELARKEDLVGRSLAGSSVSGTDAGVDLPRPRAGLMSLGDSWPRPRGDQLSRLLEPDSWRRPWRRWPGRDDDVVLQSGDPRTASPSEARSDLAEGVVDA

SEQ ID NO: 52460 - protein, 339 aa, Zea mays
  Coding DNA Sequence Number=SeqID_9085
  Homolog annotation: Hit_ID=Q6J9V9; Match level="QueryCoverage=19%, HitCoverage=33%, E-value=1e-07, Identity=45%"; Hit description =Putative uncharacterized protein
  Pfam annotation: Domain name=DAP_B; Domain location=173-267; Score =2.1; E_value=0.089; Accession=PF07930.3; Description=D -aminopeptidase, domain B
MGAHSHASRNRRASRYVQATAPPLAPLPRLLDYGTGGASGRGSERRFAFAIMTASKKGPGKGDTPKRILLREGNRLRASLLIRGSKDGPSEGFNSRLRARGLHTHYWSEVRRPAPRKGSTAASGYSDSAPTTDQGAPSGPPNTSTARAARYNTARVPALNPTLIAGTALTARSSSPQRNRASSAAPNQAWLNPGAGFVARPEGAGGSITGMSSAFGFGRAQWDLGLHEFAVDSSRTATREFGAEGHRVLASRCQINGHCSNQGARGHRGMKTVRWEETAATGDTAPVDRTPVEGATVGACVAVLCQVWKAMPQIVGSTALGAYRFGLGESNLGRPDGIQ

SEQ ID NO: 52461 - protein, 105 aa, Zea mays
  Coding DNA Sequence Number=SeqID_9086
MSSAFGFGRAQWDLGLHEFAVDSSRTATGESRAEGHRILASRCQINGHCSNQGARGHRGMTTVRWEETAAIGDIFGIRAPVDRTPVDGATVGACVAVLCQVWKAM

SEQ ID NO: 52462 - protein, 363 aa, Zea mays
  Coding DNA Sequence Number=SeqID_9087
MNVYELTLAVSHPPQVKNRNDLVTESHQREASSPRTPSTGDRVRQITRWYFWARLRASSRPLTNGAQVSTRITRQQLTGYTMFGALRGQHGAFPPPPCGKATQGQESKPLLRGLRGYTRRSRSDRSHFAAPLTGLTEGQRRLRRSDCCATRQIEADRQSGPASGTIGNSAPPDPGLGLGLSPGRRRTPLRPTQGSDSGSAPEDGELRSTLPRAQTWAQPRKTANSAPPDPGLGLGLSPGRRRTPIRPTPGLGLGLSPGRWRTPIRPTPGLGLGLSPGRRRTLLRPTLGLGLSPGLSRRSPPRPTQGLGLDLGHGRQTRPRLRRSLYIAQPRERTDHRSCDGHDTTGTGCQNLSGCHDGMYLGR

SEQ ID NO: 52463 - protein, 107 aa, Zea mays
  Coding DNA Sequence Number=SeqID_9088
  Homolog annotation: Hit_ID=Q7XBD4; Match level="QueryCoverage=100%, HitCoverage=11%, E-value=9e-07, Identity=39%"; Hit description =Cinful1 polyprotein
  Pfam annotation: Domain name=HLH; Domain location=41-105; Score=2.3; E_value=0.088; Accession=PF00010.17; Description=Helix-loop-helix DNA-binding domain
MASVLDDVLRPSKMATPAPTRVSNDKVEELEGAVAASAAPDCTKAGRLETRRTEQINESLQEKLSLLIPEAASTEELDFIIHHASGKQLTQMQIVEAQHYAKELKYP

SEQ ID NO: 52464 - protein, 162 aa, Zea mays
  Coding DNA Sequence Number=SeqID_9089
MGATPQRSQADSPLPPRLHRLRPSPLTLTNFGVVYTDANWAGYPDTRRSASDYVVLLAPCVKDACALSYLGYPQNIPIKQGYGFGPDHTWASELGEAALWDNAVAGLRLVPNRAKGVPARFVSVRPATAAKASSEGWRLCLRPNICPPRDQFDKVTWCRRRR

SEQ ID NO: 52465 - protein, 67 aa, Zea mays
  Coding DNA Sequence Number=SeqID_9090
MGNVAASRLLVSDLLEPILLIRFYPYVLLVGLGVGARMADHYVNWNMERPPGKTVLPQGFNGTPLAD

SEQ ID NO: 52466 - protein, 388 aa, Zea mays
  Coding DNA Sequence Number=SeqID_9091
  Subcellular localization annotation: CTP_CleavageSite=2; ConfidenceScore=5.64e-01
MQANSGQKKPNRRARCIQPPSGYKRPSTFAQTSGRKGGRPCGRHATAPSGRASLTPNTPSLEAQAHASCNWRADCFVHATAPPLAPPPRLLDCGTNTATRGDPAHDSAAPAWRGGQCGQKWAGSNDGGRRAGAAVTSSAKLTSPSGGSESTLSHGVKTTRPCSVPRATRARATTAPSTTRPVASTLRRDRRRLWQEKRATLRLRHNDRASKGWPPEGFDSHLRSRGPYTHYWSEAGPRRVHSRLRRRARDDLGYVRYITKARAALPSSPETPCSAPIEGNMALPPSSLRKGDAGAVNIPVRELRTRPYTRATASSHEGTTRPAEALREALRPRRSGSEASGATPGGARTRAQPRKTANSAPPDPGLGLGLSPGRRRTPLRPTQGSDSG

SEQ ID NO: 52467 - protein, 333 aa, Zea mays
  Coding DNA Sequence Number=SeqID_9092
  Subcellular localization annotation: CTP_CleavageSite=60; ConfidenceScore=5.19e-01
MQAACNCAKWTRFSDSRHASMEAQAHASRNRRAGCCMQATAPPLAPPPRLLDCGTNTATRGAREQRSRRQPGSRPIQGQQESLLSRREDGAPVIRSSNGSRTRNGRPANYSPRRINSAAGQAALLAGAAGDASPSPKQPRQKRDRERGILRKGSFPVKEPGSKPPLLIRGSKAGPPRGSTVASDRVGPTPTTGQRFEGRPPEGLHGRLRLLGLRAHYWSGVRRLAPEGFTVASDAERGMTRGDRVRQITRRYFWACLWAPNRPLTNGARTTTRITRLQLTGDTMFGAHRGGSGAALANPAPAKPLTASTYQPENLGPDRTPGLRPARMREQPD

SEQ ID NO: 52468 - protein, 99 aa, Zea mays
  Coding DNA Sequence Number=SeqID_9093
EEQSTPEQNTGQTGFDGVVVTVLALGSDDWTMVVVLDIGTATTLSGHGNRRASRELGNEVAASRAKGRMARCTRARAVSVSGVQAGVEAGSWAVSGWAL

SEQ ID NO: 52469 - protein, 97 aa, Zea mays
  Coding DNA Sequence Number=SeqID_9094
MVESEPWGRARRSPSSEAETGAEPWGRARRSFLCRPRLDLADVDLTLASGTAVGAGQAALYSCQAILALNAPAIRSVGVAIWPRLLLCEDWASGEPK

SEQ ID NO: 52470 - protein, 336 aa, Zea mays
  Coding DNA Sequence Number=SeqID_9095
  Homolog annotation: Hit_ID=Q6J9V9; Match level="QueryCoverage=21%, HitCoverage=26%, E-value=2e-08, Identity=48%"; Hit description =Putative uncharacterized protein
MRALPIQGLGRWKDAIHGVEDMVAIQGGHPPFKGDSPHLHPQPARTESSPTRSKVLPLRHGGWVPRVMQAGPGQKEPKPPRAVRATAQRLQAFLHYRPDERVKGRTATQAACNRTKGAHPFDFDVSSMEAQAHTSCNRRAGYYVRETAPPLAPVPRLLDCGTGAATRGDPAHDPTVPTEHIGHGSISRGRRRDGRYGQKCAGSNGGGRRAEAAVKSDRERGYSERDPSPRRKRAPSPTTGQRLAPEGFDSRLKARRARDDPGYARYITKARATLPSVTCPALTVVPLARVRSTAAKSSLGRHRKLRLARPQGSAPVSASEGGLCLARPQGSDSTTT

SEQ ID NO: 52471 - protein, 69 aa, Zea mays
  Coding DNA Sequence Number=SeqID_9096
MARARAYKAARASTTLFRAHSNLTGAQLTAVCPEYVLVPEQGAAQEVAPDPAPEPAPEDLPVTALEGKP

SEQ ID NO: 52472 - protein, 178 aa, Zea mays
  Coding DNA Sequence Number=SeqID_9097
  Homolog annotation: Hit_ID=Q10G45; Match level="QueryCoverage=43%, HitCoverage=91%, E-value=1e-31, Identity=82%"; Hit description =Putative uncharacterized protein
MADLLGDPVWPQLHPRPYTDTPWPGLQCELAPDDARVLRATRLHLGPDVATSPCRPRARLDPALLGGLPHLQTLSIFGATRAVHVVVLARADRAQVQPRPHRPHTGDVGSYFGSLITLMEFVPPMSLYRIIYELSPPSSSRLFSNFSGVHLGDLSDPKTFNYLIPPMRMDKCIANGQV

SEQ ID NO: 52473 - protein, 103 aa, Zea mays
  Coding DNA Sequence Number=SeqID_9098
MGPLRTRVLGRAGVSPRVVTTVGGTTAGIEKYGSSTIGIGTYILFPEALNYLNLSTSYDLSLKKSTLNRILDETLIMIKYITLGSFSIDLIDALRRHLKVILR

SEQ ID NO: 52474 - protein, 63 aa, Zea mays
  Coding DNA Sequence Number=SeqID_9099
MDNIDEVIDKRMVALREIEKDKIIVANAYNKKLFQKVGGMCLAPYVPPGKARWSGSVARQSGP

SEQ ID NO: 52475 - protein, 132 aa, Zea mays
  Coding DNA Sequence Number=SeqID_9100
  Subcellular localization annotation: CTP_CleavageSite=78; ConfidenceScore=5.73e-01
MARPGSRRRASRPPPPASPEPRPAATPPRPGSASRRRARRVRVQSPSLAAVRGGSASAPPMQLPQPPPETPPVRWPLEAGARSTSRPGAGAALSVREIAAALWRMQPPPRPPGPGTAPRRAQQVSLPRDLCQ

SEQ ID NO: 52476 - protein, 904 aa, Zea mays
  Coding DNA Sequence Number=SeqID_9101
  Gene Ontology: Mol. function=identical protein binding; Cellular component=cellulose and pectin-containing cell wall; Biological process=negative regulation of catalytic activity
  Homolog annotation: Hit_ID=Q9FVC7; Match level="QueryCoverage=69%, HitCoverage=91%, E-value=0.0, Identity=64%"; Hit description =Subtilase
  Pfam annotation: Domain name=IQ; Domain location=115-135; Score=27.0; E_value=7.2e-05; Accession=PF00612.18; Description=IQ calmodulin -binding motif
  Pfam annotation: Domain name=IQ; Domain location=73-93; Score=25.0; E_ value=0.00028; Accession=PF00612.18; Description=IQ calmodulin -binding motif
  Pfam annotation: Domain name=PA; Domain location=511-620; Score=53.8; E_value=5.9e-13; Accession=PF02225.13; Description=PA domain
  Pfam annotation: Domain name=Peptidase_S8; Domain location=346-738; Score=42.1; E_value=1.9e-09; Accession=PF00082.13; Description =Subtilase family
  Pfam annotation: Domain name=Subtilisin_N; Domain location=243-321; Score=9.3; E_value=0.02; Accession=PF05922.7; Description=Subtilisin N-terminal Region
  Pfam module annotation: Pfam domain module=IQ::IQ::PA::Peptidase _S8::Subtilisin_N; Domain location=115-135::73-93::511-620::346 -738::243-321
  Subcellular localization annotation: CTP_CleavageSite=19; ConfidenceScore=5.21e-01
MDRRSMTPGISSRLSSPPPAAHPSPPPAAAPFAAATPSHPPSPTLDAFTRLEEKWDQFVVMFHRYKEKTEKELQAAVRLQAAARGFLARRQVQSLRGEKHLAVASRATPWPSSHEQAVVRLQAAVRGFLVRRAVRKLHLLISSSLHQLAACAPNHQVSSILFESPAEVKIWVCNPPARPKRVVSFIRATALVLDRPNIRTGRFLLHLSSNVKSAVQLFPWDPGGQEDIATVQIYILVPQLFCIFVLNNKAPRAATLEPSLRQRGITSPEKTAIPMDRSKEDTLDSIIHNYKHGFSGFAALLTEEQAKQLAGIWPESRSFSDEGYGPVPSRWKGVCQVGEGWGSNNCSRKIIGARFYSAGVAEEDLEIDYLSPRGASGHGTHTASTAAGSVVEAVSFYGLAAGTARGGAPRARIAVYKALWGRGAGTGNTATLLAAIDDAIHDGVDVLSLSLVGVENTFGALHAVQKGIAVVYAAGNSGPASQTVRNTAPWVLTVAASQIDRSFPTTVTLGNKQQIVGQSLYYYGKNSTGSSFKPLVHGGLCTADSLNGTEVRGRVVLCASDIESPLAPFLDALTNVLDAGASGLIFGEYTKHIIDATADCRGIACVLVDSTTALQIDRYMSDASLSSSPVAMIEPARTITGKEALAPTIAELSSRGPSIEYPEVIKPDIAAPGASILAAVKDAYGFKSGTSMATPHVSGIVALLKALHPNWSPAALKSAIMTTASVTDERGMPILAQGLPRKIADPFDYGAGHINPNRAADPGLIYDIEPNDYNKFFRCSFRKPIQRCNATTLPGYHLNLPSISIPDLRRPIIVSRTVTNVGEADAVYHAAIESPAGVKIDVEPSVLVFNATNKVATFQVNLSPLWRLQGDYTFGSLTWYNGPKTVRIPIAVRMTVYDFYADVA

SEQ ID NO: 52477 - protein, 181 aa, Zea mays
  Coding DNA Sequence Number=SeqID_9102
  Subcellular localization annotation: CTP_CleavageSite=35; ConfidenceScore=5.05e-01
MGEGGAEGSPLAGQNRSSPPHLCKSPGLLSSHAARCYLPGRVYRRRTYPPLPVPGQCPPSPATLNETPTEALTLETNQTASGTEADSMDDAPNGPGLEEAPGLVDAAARLEPEGLPPSLLASFINNFTRPAARPLLHHTSKPRQARRRGEGMGSGRSAEASGSRRLSGHAATYKSALAKSS

SEQ ID NO: 52478 - protein, 243 aa, Zea mays
  Coding DNA Sequence Number=SeqID_9103
  Gene Ontology: Mol. function=carboxyl- or carbamoyltransferase activity; Cellular component=ornithine carbamoyltransferase complex; Biological process=amino acid metabolic process
  Homolog annotation: Hit_ID=Q8SA97; Match level="QueryCoverage=33%, HitCoverage=21%, E-value=2e-25, Identity=59%"; Hit description =Ornithine carbamoyltransferase
MAPPVDVAGLRPRLGDVEAPPKPRSSLSSVAEVGSEPQPVSEPWVGRSGVRRLPGLSPCPSPRSGGAEFAVFRAALSFCQAGQWSGEVTAVTSALPAGGARVRIKGLGRAGNMFAAEGGPRARRKSSGLCADGGYQLRIRSLEGPFFGDKDQQKSTYRRGVPDPKIRIYDVGTKKGVDDFPFCVHMESNANHAEEALRHAKFKFPGRQKIIRSRKWGFTKFVRAEYLKYKSEGRIAPDGVNAT

SEQ ID NO: 52479 - protein, 268 aa, Zea mays
  Coding DNA Sequence Number=SeqID_9104
  Homolog annotation: Hit_ID=Q6QP51; Match level="QueryCoverage=44%, HitCoverage=31%, E-value=2e-10, Identity=53%"; Hit description =Putative growth-regulating factor 1
MQAACNCTIGAHPFDFDASSMEAQAHTSCGRKQQSNRLEAHVPSWGSERALSHGVKMTHPCSVPRMARATAAPRTTRPVALTPRQGRRHLWQAKDRERGYSERDPSLRRKRAPRPLLIRGSKAGPLGRVRQPPQSTRALRPPLIRGSKAGPSEGFDSRLRALGLRAHYGSEVRRLAPRKGSTAASGHSGSTPTTDQGFEGWPPEGFDSRLRTRRAMDDSGYVRYMAEARATLPRGSGAALANPAPAKPLTASTYQPENSEPDHAPGLC

SEQ ID NO: 52480 - protein, 309 aa, Zea mays
  Coding DNA Sequence Number=SeqID_9105
MHCALPPSEPPDGERPCCFRPVVGGAQPRGGWHLSAIARLQGFSSGSPAASPYQWSSKTVTTSSMVGRSKLGCGLCPALSFKDLHHPCWGGGRAEPELYLPYGPAGHLLLQHSGERALTGLAEGADFDNAGPIGHKRRQLQHARFAGSAGSGAASGATSHRWAECGYLPAVRAAVAPPRRLCAEVGAHPSGRTQVGIYRGQVDTAVGAEVVAAGEGLAADEIVGAICAPGLRLFGFDSLSSPLEWGRGRGPCHSSVCPEVIAAAVWPPGAEVVVAAAVVGDEPPGACRPAGPPMWGLFVPAGLEPEFRL

SEQ ID NO: 52481 - protein, 148 aa, Zea mays
  Coding DNA Sequence Number=SeqID_9106
  Gene Ontology: Mol. function=translation initiation factor activity; Cellular component=cytoplasm; Biological process=translational initiation
  Homolog annotation: Hit_ID=Q6L4U9; Match level="QueryCoverage=68%, HitCoverage=88%, E-value=2e-48, Identity=93%"; Hit description =Putative uncharacterized protein P0010D04.10
  Pfam annotation: Domain name=SUI1; Domain location=60-141; Score =150.5; E_value=4.8e-42; Accession=PF01253.13; Description =Translation initiation factor SUI1
MAPRVLHDDGDSQPPYGSKEMSRVRSSLSAFAGEGLPWFIPSPDPPPALEANAEDSSAGAGSKDYVHVRIQQRNGRKSLTTVQGLKKEYSYNKILKDLKKEFCCNGTVVQDPELGQVIQLQGDQRKNVATFLVQAGIVKKDSIKIHGF

SEQ ID NO: 52482 - protein, 413 aa, Zea mays
  Coding DNA Sequence Number=SeqID_9107
MARLRHTARKSVIPFLPSRLAERPLHRTVSGQSSHLERLHHRLREEQERRRQHGEQQGSSSSPQQEVETVRPRSSVAQLEAPLVPPRDVPAVGGATGGDPDDDDSAHSTESSEPQEAEGWVARPITRDAARGCHFHDALDTLLRQAFDRHTWSIEYRCVVYQHSRGRYPDRWEATCLVRRPEDDLRGAEAVSEHYSISERDTAEAAMQDAARRALSQYCSLFGGVADGLNLRYYPRRPTGSTESVVVSPVGEANPRLSSTVNLVAVLNTELDHSLDELSRARTEIAELRAELAERHHQEGGSPAPVGTQHPYRSPPRGHHTYGSPIVRSMLMYECLPQMSDNRRRCNRRAQLEQHDQQEENQRQPPPPPPMSVEQMFLMQTQAVQAIGQTLAAMQQAQQQPQPQLQVQMPQMP

SEQ ID NO: 52483 - protein, 314 aa, Zea mays
  Coding DNA Sequence Number=SeqID_9108
NVFILRIFGEEGNPNIAYKQNLCLEDLRRRRRYPKKGFSRFNTYLSELLTEGRSGSNSDDNSDKQLLPIHASSAKTEGTATFVSSRASSGHVRFMDRTSETPSIDGVLVDFGEGLLPRASLSLPSPPPAAAALPLVFPYHAAPSHSAGVEPVAAQASLPCRAPCPCVLGAFLLRRPDFTGDPQSTSPDFGLSPPRVDRAKRPDSSPPTSIPACARGLANSDHPRRRPAHRCDPRDLPYVLDHFTGAISPPEKDLGIGFEEPEGFSVTSVTHVNKYVLIPEQGPVQEEEQEQASEAAIEDLPAAPAIEGKPRFYA

SEQ ID NO: 52484 - protein, 96 aa, Zea mays
  Coding DNA Sequence Number=SeqID_9109
MASLWRIVFKLKISWEKKVFLLRGPSAEKKALNRAKAKIVIYKGENAIKGRVGKHHSEIEMAKMIIQKVHDKHQGKDRGMIRVKVITNKHTTKDVF

SEQ ID NO: 52485 - protein, 150 aa, Zea mays
  Coding DNA Sequence Number=SeqID_9110
MALHVLTTFCGFHPLELSTHPIGLFPAKKDDDPIWKDRVEHTKDVWALYLGHTAHVTQMATQIQEFEDQVEARENTIEVLEDQLQPPSNNLRKPTSICLHHQEIEDMEVEGDDEDVDIEGGDEPEPASSLDTVGSRRLPSPESSVTLFAH

SEQ ID NO: 52486 - protein, 30 aa, Zea mays
  Coding DNA Sequence Number=SeqID_9111
MTQIESWCQEVLGNPTMKSMQISSHLQDGM

SEQ ID NO: 52487 - protein, 86 aa, Zea mays
  Coding DNA Sequence Number=SeqID_9112
MALNESVKNCKALAEAAEQKEADRVDMSEAISAFCQAFSLNGVPPDSAGRCTTASGGPSLCSLPTTTWIWSGSARGIAYPTKRRLP

SEQ ID NO: 52488 - protein, 166 aa, Zea mays
  Coding DNA Sequence Number=SeqID_9113
MASGRTLPLKGPRSRPLAGDENQPLKPKSHRSGAQVALMVSSAEATAAVGSLTSGGHHFSTGDSSHLHTARPSPGWRTDIYTLTRQQRFTFPCIAGGCLLRRARGCPSPPNAGGRSGSPAHAGGRTQLGVPSSSARMMNILEAEGGEDAAARLASPHHKAGDHPYG

SEQ ID NO: 52489 - protein, 307 aa, Zea mays
  Coding DNA Sequence Number=SeqID_9114
MGEAVNKEDEQGAVGPARQFGRASDPSQRRRRRWGWASAPTRGCSVRARWAGACDGPQARGALGKRGGGPLGRKGAVLHRPGLGRRRRRKDLHLEGGHQHRAWARGGRVKPLNFGQGGFVFVEKAIPLVDPLQIHIIVGSEHDEGPPNAVMQRLAESTARVVAQGLQVTLRGASRRDVVKAKDLAKGRDSLEHGRTVGLLLLSRLGKCLGGLAEGKLELCKQPKQKSLNASCRMKLNQNLKIAKTYLPPGYATPRLRLGLTEQTRWPRPGPPQGLQPERTPRLAGLQGPQPGFQPRRPGPEIDPAHR

SEQ ID NO: 52490 - protein, 57 aa, Zea mays
  Coding DNA Sequence Number=SeqID_9115
MSADEPEDGWTKQMSEQKLIVNWPSFNNTNVVLSQERFTRLADITEHRRYRNAEAIT

SEQ ID NO: 52491 - protein, 122 aa, Zea mays
  Coding DNA Sequence Number=SeqID_9116
MNKNTRDTRFIPRFGHTTKVPYFLVEAPTKSRVSFNPNPPFADHKEEQEGFRDEAPKSQLFNLTQRFLSKDLKWERQEVCEREWEVFLRLEMESKSCSSVGKSVGGVYKGAPKSWWPLGKSD

SEQ ID NO: 52492 - protein, 65 aa, Zea mays
  Coding DNA Sequence Number=SeqID_9117
MSGAHRTVRCPLPTVGSATCRAPIAQPTVGPADRWLTGQSGAHRTVRLFQMDVKSTFLNGPIKEK

SEQ ID NO: 52493 - protein, 225 aa, Zea mays
  Coding DNA Sequence Number=SeqID_9118
MALSPLPPCGKVTKGHMIKVESVLDRPLAPCRGSGAALANPATAKPLTASTNQPENSEPDQAPGLRSGRMRENQIDRGITKGIKTSEESNHASEASGATTGECARAHPPEQSVTEKGRSPCKKVRSRLRLLKGRDLASPEPSLEREQYPRRIHASPEGLLKQRAHPQLARSPARAGFVVKQPWPNRLTNRPYRRRIQCEDRLTPYPDTHASVGKVEVTAVTSPFH

SEQ ID NO: 52494 - protein, 171 aa, Zea mays
  Coding DNA Sequence Number=SeqID_9119
MKGRSRGSQRCAERRRRWPESVGPRAQAGMLVGGEETGLGGPRDAREDMSERNRAETHWIARSTRGGGRPKSGEVDLGPPVKSGRVRGLGKLHGLLAELAEALAGLEGGWSGLATAAEALAAMAGGIKLAGAKGRWLAGEGECGAKREIWSQEIWSVSLPKPEANPRFCRV

SEQ ID NO: 52495 - protein, 113 aa, Zea mays
  Coding DNA Sequence Number=SeqID_9120
LRRGGRKGEKQPGRELVRAWERKGRHGELLRRQDMDLAEVDPRSSSAQGRKAPCCSRFPGGGAGRTLDLQQRGAASGTGSLSSAMGKGRPHHGWKWSCRGEEEGGVGEMADGG

SEQ ID NO: 52496 - protein, 276 aa, Zea mays
  Coding DNA Sequence Number=SeqID_9121
MTLGTSDTWPRLGLRSRGTLGHFRDQQERFCNGIPSEGGIEPSDPIEWDRVRQNTCRSRLCLLKGRDLASPEPSLGREQYPKRIHASPEGLLKQRAHPRLARSPARAGFVVKQPWPNRLTNRPYRRRIQCEDRLTPYPDTRASVGKPQAQQEAPPRPTLGLGLTLGLRRWSPPRPTPGLGPRLGLGRWSPPRPTPGLGLNLDLRRWSPPRPTPGLGLDLDLGRNRVLTRPWPQEESPPRPTLGSDRPCHRGYVITLPLASSGYGGTRPPSHPGSPR

SEQ ID NO: 52497 - protein, 92 aa, Zea mays
  Coding DNA Sequence Number=SeqID_9122
  Subcellular localization annotation: CTP_CleavageSite=15; ConfidenceScore=5.12e-01
MGLISGPQMSELAVCARARSRGLVRGSRTTVAGFLSTGPHGVGKGEWAKMSSGRPSYGGYKCGHCTAAAGVSGALYAKAVSPGRERGIEGDS

SEQ ID NO: 52498 - protein, 156 aa, Zea mays
  Coding DNA Sequence Number=SeqID_9123
MAHLIARSMRGGGWPKFGDGDLAVPVRQGFNPCLEKLHGFTGKLPRGSGEARVLWKWLAVVAGARVARAGGAELAGAKDGVWSAGLSVEGNEKDTHSCPCNLNELSNARSEFYVKSFEFTCPFGCSSNNFLVVEYISYWESRLLELLWSTGIYPPS

SEQ ID NO: 52499 - protein, 154 aa, Zea mays
  Coding DNA Sequence Number=SeqID_9124
MIKLRLWLNFWQQNSAIAMNVVHLRTSSQQRQKSATNNHPTPLPSKEDEKKHATPPAPFFPDVLFIQGRLESSPILDDEPTVLGKNLPSAMLGDGETDVETCGDIMKPKNGIRHNPSLRTKPRRWGKPMMKEHIENDASLAAATAVKLRNASGG

SEQ ID NO: 52500 - protein, 279 aa, Zea mays
  Coding DNA Sequence Number=SeqID_9125
MRGKANCCCLARVQHSVLRPGVCGRLYLGVAQHVVRREGGTRVLGQSRSRSCGKNGSEDLPVRFGAAAACWCGASGQVAAVIGAEVVVAVGEGFSADDTISATCAPGLRLFGFNGWFSSPARGRERGPSSGSVRPGAIAAVVLPSETEVVATLLVQRSPASHPEFVVPQALRCGGSSYPREWNRSSVCNGTLSAGVTSEVSVSQRRRSPSAWLALPLKASLAQFENLRLLCDELEPEAAVSAWTEAESARKGASSAQEQVASQAEEVQQRRLELGQVVR

SEQ ID NO: 52501 - protein, 66 aa, Zea mays
  Coding DNA Sequence Number=SeqID_9126
MRSSGGRDEYDSEVPHVNELKTHAKGRVRLGSWDPPVGAGCPSLQYGAAQDRKVRYQIQIQIQIPV

SEQ ID NO: 52502 - protein, 146 aa, Zea mays
  Coding DNA Sequence Number=SeqID_9127
MAVAGGRAQQSRRQPGSRLILGQQESLLPRREDATPPTTRPVALTPRRDTRRLWREKRATLHLRRNNRVKKKGPGKGDTPKRILFREGIGLRAPLLIRGSKTGPPKGSTVASDRVGPTPTTGQGFEGQPPEGLHGRLRLLGLRAHY

SEQ ID NO: 52503 - protein, 159 aa, Zea mays
  Coding DNA Sequence Number=SeqID_9128
MARVNARRITQEFRQIWGTRMRNTLLPIEAEYLSISDKQPLTCIILLIGLPSAKGSTQTNKKIQVRVQKKGAKETEENPGLAHRTVRCPGPYDFKLTTFGFLESRSAIIHRTVRARTVRAESEQRQNAYRTVNKTCPVWHQTVRCPKMSELQQSKPSEL

SEQ ID NO: 52504 - protein, 137 aa, Zea mays
  Coding DNA Sequence Number=SeqID_9129
  Pfam annotation: Domain name=IQ; Domain location=48-68; Score=26.9; E_ value=7.4e-05; Accession=PF00612.18; Description=IQ calmodulin -binding motif
MGDLWTNIRADLAKMQATFQKVEQGLLQIKVAVQHEQHQLALSARLQTSAAMGIQAAARGFLARRRVREMRRQMLEAALVTVDLGTRGRDLALSDGHQQRLRAAISKCEQGARPCAPLSSRWRSWDPGGYTRASPMR

SEQ ID NO: 52505 - protein, 566 aa, Zea mays
  Coding DNA Sequence Number=SeqID_9130
  Gene Ontology: Mol. function=nucleotide binding; Cellular component =Golgi apparatus; Biological process=regulation of transcription, DNA- dependent
  Homolog annotation: Hit_ID=A2ZIJ9; Match level="QueryCoverage=77%, HitCoverage=81%, E-value=0.0, Identity=73%"; Hit description =Putative uncharacterized protein
  Pfam annotation: Domain name=DUF246; Domain location=166-490; Score =464.9; E_value=1e-136; Accession=PF03138.5; Description=Plant protein family
  Subcellular localization annotation: CTP_CleavageSite=37; ConfidenceScore=5.13e-01
MSLAGAGAAALRKPATWRRPGGRGVARRRVAVAALLLALAYAGGLLMFLLDERLSGGSVGGAAAGGLGPMVTVASSVRRRRPLPSPADAPPHAQPGSVYRSHLVFERLLPAMRDDATLASSLSASASWRRTMLMTSHYQNSGDPWMPCVNGRLTRSELPPSNGYLMIEANGGLNQQRLSVCDAVAVASLLNATLVIPTFHLNSVWRDPSKFGDIFDEDHFIETLKEHVRVVKKLPEDVLLRFNHNISSIPNMRTKAYSSPNHYVQNVLPKLLELGAVRIAPFSNRLAQSVPLNIQALRCLVNYHALRFAEPIRILSDELVGRMTKKSLLTGGKYVSVHLRFEEVSSLLCIHNYVIFPSYLYRLASQVGMMLRGMGFDNTTSLYVASGKIYNSEKYMAPLRQMFPLLTTKDSLALPEELAQFKGHSSQLAALDYTVCVHSEVFVTTQGGNFPHFLMGHRRYMFGGNAKTIKPDKRKLVLSFDDPNIRWDQFKQNMQEILQHSDMRSIALRKPNDSVYTFPMPDCMWPMAAATATPPWASLGPDTTPLLDKQLALELQHDGCSKTEST

SEQ ID NO: 52506 - protein, 185 aa, Zea mays
  Coding DNA Sequence Number=SeqID_9131
MQYNGSSSLISCEKQTIRIEFLSLQVTALVPTITGMGDHVSSHVRGKVHCQVQSVTAERNKAARLTGGERGPARGGVGFGRSWRSQRVNRKMAQRLTRSTCAGGVPNSGERDYAFPVAGILGSSSGKLHGLLGKLPRGLDRAEEGGKWFGHCGCPRALWRVAERSPELWASFGEFGAGQRMQRGR

SEQ ID NO: 52507 - protein, 205 aa, Zea mays
  Coding DNA Sequence Number=SeqID_9132
MTSHGSSDEGNAQSHTDGLAREGFPRILWEVLQEAGYTTPPQYAVQLFEKHRVPRCQTAHLTVRCMNALYRLQVMRGEAMSHLMALLEATKITLDNREELVVDLSTEMVEKDLQVEQLSNEIQELEELVGTRENTIEVLEDQLINTQQQLAEANQHLDLHHQKIQDMEANEDVDIEGGEEPASSLDTAGSGRPLSPESSVASFAH

SEQ ID NO: 52508 - protein, 48 aa, Zea mays
  Coding DNA Sequence Number=SeqID_9133
MAVPSDSDQNHSVRSTKNTKVDAEPKLCARELRHDSRKGNRLKREKAI

SEQ ID NO: 52509 - protein, 171 aa, Zea mays
  Coding DNA Sequence Number=SeqID_9134
MAYDAQAWASSGEQRMDADCPVTSWARRGQGFESRWGSVEVLRGRSGDELHDGEGERIERREREREFGGARACVWPSGVQCRGAGLGCTALGRVRRRRGAWSRVFWRRSELLGAHGAVGCLGAGLGVAVVGRGAVGVALGAGQPSRPPGGACWEEREERNERRARVGPTRE

SEQ ID NO: 52510 - protein, 84 aa, Zea mays
  Coding DNA Sequence Number=SeqID_9135
MAKLTEWLARLGSDWSGLATVAEALVAMAGGKELAEAKEGRLAGEDGHGRFGALKSGLSLCLNPRQIQGFVVSRARIPMPYSGM

SEQ ID NO: 52511 - protein, 205 aa, Zea mays
  Coding DNA Sequence Number=SeqID_9136
MASPGLQTPRAIGGCSLGQLIIFYLSLILRAIYDTPSIVGGTCEAPSILHTNGNMRTRSGAEKSMIGIVASLHEVRPLGLSQQQLQLAAQPRDGRGSTAATPLPRTDTTIVDRRTHVEYLRSLRALRPFSGPQTSKSPTSTNKMHCNGYDTCPDTASMIEAAVIEDFYRGSNDSAFVRAILQKAPITSEQLLREADLYITADERA

SEQ ID NO: 52512 - protein, 299 aa, Zea mays
  Coding DNA Sequence Number=SeqID_9137
  Gene Ontology: Mol. function=serine carboxypeptidase activity; Cellular component=extracellular region; Biological process =proteolysis
  Homolog annotation: Hit_ID=A3BZN3; Match level="QueryCoverage=82%, HitCoverage=66%, E-value=7e-42, Identity=39%"; Hit description =Putative uncharacterized protein
  Pfam annotation: Domain name=Peptidase_S10; Domain location=92-299; Score=-25.8; E_value=2.3e-13; Accession=PF00450.13; Description =Serine carboxypeptidase
  Subcellular localization annotation: CTP_CleavageSite=84; ConfidenceScore=5.02e-01
MRTDACLTHLTLLLLVSVPVLHSHASQQAQLEKFILSRQGRAASGSSKSSAHEPGVGVTSSSLLQRLQARSYLGSESDQSALKAADKIAALPGQPDDGVGFDQYAGYVTVDEEKGRALFYYLVEAPPEDAPSKPLLLWLNGGPGCSSFGYGAMLELGPFRVNNDNTTLRVNEYAWNKGTHAVGNPYLDRYKNQKGRFEYLWNHGVLSDEDMANITHHCSFSPSDDKLCSDLYGWYDFGPIDPYDIYAPICVDEPDGSYNSSSYLPGYNACDYYPTVTYLNDPVVQEAFHARKTEWSGCS

SEQ ID NO: 52513 - protein, 441 aa, Zea mays
  Coding DNA Sequence Number=SeqID_9138
MPSSSSSADATPPAAASSEETLSNVMVEELRAGDSVEFGVSRMTSARIEDMQRLGYFGGGVARAPGTEEVPEPEGELVVFEAFFVAGLRLPAHRVFELNQLPYDGYPGQDEADRRGKKPAVETGGDPALVAAASSKKRKLVMDKDRQGAARKRQATVRVHEARPKKQRGTAKAEASGGGKPPLPAKVGASAPGKAPEVTVGAGGPKLTKVAPSVSGVAEAAKVARTLPPPGKRVADFGTEINVEDYLGGSDEGPPALVVPGAAIATAAPAPKAGGETLGAGGEVSALALVRDEAGVATRRLKGATEALSRATEALSQVADFTSRTASGALTAALSAEVERLRTQHADAVREKSASDSKCRKLAEKVAALEKEKADLRRQLAGERREANEAIAKEQAAQAEARLARAEGCSVTSRCRSERPDFAVWNGCRRNCRSSPLSWRG

SEQ ID NO: 52514 - protein, 433 aa, Zea mays
  Coding DNA Sequence Number=SeqID_9139
  Gene Ontology: Mol. function=nucleic acid binding; Cellular component= cytosol; Biological process=regulation of mRNA stability
  Homolog annotation: Hit_ID=A2Z240; Match level="QueryCoverage=71%, HitCoverage=80%, E-value=1e-128, Identity=77%"; Hit description =Putative uncharacterized protein
  Pfam annotation: Domain name=RRM_1; Domain location=105-176; Score =51.4; E_value=3.1e-12; Accession=PF00076.13; Description=RNA recognition motif. (a.k.a. RRM, RBD,
  Pfam annotation: Domain name=RRM_1; Domain location=198-270; Score =71.8; E_value=2.3e-18; Accession=PF00076.13; Description=RNA recognition motif. (a.k.a. RRM, RBD,
  Pfam annotation: Domain name=RRM_1; Domain location=301-366; Score =84.4; E_value=3.7e-22; Accession=PF00076.13; Description=RNA recognition motif. (a.k.a. RRM, RBD,
  Pfam annotation: Domain name=RRM_3; Domain location=301-390; Score= -2.6; E_value=0.034; Accession=PF08777.2; Description=RNA binding motif
  Pfam module annotation: Pfam domain module=RRM_1::RRM_1::RRM_1::RRM _3; Domain location=105-176::198-270::301-366::301-390
  Subcellular localization annotation: CTP_CleavageSite=32; ConfidenceScore=5.17e-01
MQAAAAAANGAGDVQKPQQQPLVAGAPPPPPPAAVVPPHWVAMPFAPPPGAAAMVMQPHHMAPPPPQFAPTHFVPFHAVAPPRAAAVALGSPAPHQPGQEENKSVWVGDLHYWMDENYLHSCFGYTGEVVAIKVIRNKQTGQSEGYGFVEFYSHAAAEKVLEGFSGHIMPNTDQPFRLNWASFSMGDRRSDSASDHSIFVGDLASDVNDATLLEAFSSRYSSVKGAKVVIDANTGRSKGYGFVRFGDDSEKTQAMTEMNGVYCSSRPMRIGPATPRKSSGTSGSNGSAARSDGGDLTNTTVFVGGLDPNVSEEDLRQTFSQYGEISSVKIPIGKQCGFVQFAQRKNAEDALQGLNGSTIGKQNVRLSWGRNPANKQFRGDNGNQWNNGGMYYAAPPFYNGYGYPAAAPFPDPGMYAAPAYGAYPFYGNQQQVS

SEQ ID NO: 52515 - protein, 165 aa, Zea mays
  Coding DNA Sequence Number=SeqID_9140
MSTCRIHESLVTDSSASEAEWSGISQNSSVFETEHLPQRKDSITDDPPPEAGGSAITQRLSGSSVGNMIEEFRDLDKLGQGFTSVDPLEEIDIVKGKCAFGPFLSILVIECKHKCLNVKMCPWLNKVQITSKGTPRRMEEHTKHSLSTLDHSHINLAHLFDILVI

SEQ ID NO: 52516 - protein, 273 aa, Zea mays
  Coding DNA Sequence Number=SeqID_9141
MVTSSLMVRESEPGCGLCPSLSLKDFHHQGWGGDCTVPGSRTRVASEPLAAPASATAAGRGSSADEIARAAHGPTSNSTAFCPSLPHKFGHGRGRPGSSTRPEVSAAAVRPPGAEVVVVAAAGAGDGALFVGLLLLRRPSPMKWGYSPVDCLNRFTERESPRVKVTSEPGCPLAGPMLELTSRGLGSGWRPWKMVGRGPRGHRPSRLLGPDSRRRPWRRWPGRGDDVVLRSGDLRTVSPSEARSNLAEGVVDAEGATAPFQRQDPSLQDQIVL

SEQ ID NO: 52517 - protein, 198 aa, Zea mays
  Coding DNA Sequence Number=SeqID_9142
  Subcellular localization annotation: CTP_CleavageSite=72; ConfidenceScore=5.33e-01
MRSFLENTYVQTVWAPSVTPRARTRAKPQKTANSAPPDSGLELGLSPGRRRTPLRPTQGSDSGSAPEDDKLRFARPQGSDSALASADDLHLARPRGSDSASAMEDRLDLGFGGASTSPNLGRRPATSTRSAIITLPRADSGRREQDRSLTEARGRQQGLNRSDSCPSAGLHRSSDSHDITPAGCQKLSGCHIDMYLGH

SEQ ID NO: 52518 - protein, 44 aa, Zea mays
  Coding DNA Sequence Number=SeqID_9143
  Gene Ontology: Mol. function=nucleic acid binding
  Homolog annotation: Hit_ID=Q6YZW2; Match level="QueryCoverage=72%, HitCoverage=7%, E-value=3e-09, Identity=84%"; Hit description =Putative oligouridylate binding protein
MDASQDARSKENPENNPDCTTVYVGNLGHELSVEHVVSIVARMK

SEQ ID NO: 52519 - protein, 207 aa, Zea mays
  Coding DNA Sequence Number=SeqID_9144
  Homolog annotation: Hit_ID=Q5FCP2; Match level="QueryCoverage=36%, HitCoverage=74%, E-value=1e-07, Identity=39%"; Hit description =Putative uncharacterized protein
MAKPLTASINHPENSEPDHAPGLPSDHMREQPHWPRHHERHSDLRGVKPLLRGLGGYTRRENSAACPAPTTVPPARVRLTTAKSSLRRNRKLRLARPQGSAPASASEGGLRLTRPQGSALASASEGGLRLARPQGSASTSVSEGGLRLARPQGSASTSASEGIASSPDPGLGLRRSLYLARPWAQTDHATGGLKRSSDGHDTACTGL

SEQ ID NO: 52520 - protein, 300 aa, Zea mays
  Coding DNA Sequence Number=SeqID_9145
MARVCFGLGGRRKHTLQDNPILQARILTAEGSSSTLGVSNIFGEARPNLGRRRGPKISTLKDDVIATPRPSLPGSSPGIRPEQAAPPVTPGPRPAVLQGRQPDPRPRLVNPGVGPANGRPGQAPADQAPTATMNKNTGIQSAITNGTPVPSPRVWTTSTPGKPVERQALGESPANAGRPKAHRQVLIPVLATQARKRTECCILAGQQQPASPSMAGGRLLRRTGGWSPPPEAGRGGGRPTRAGGRAPAQPGPRPSEDDEDQLGAGPTSQPSLLLPIQGLVVTVLGDPRRGGAVGLADENP

SEQ ID NO: 52521 - protein, 171 aa, Zea mays
  Coding DNA Sequence Number=SeqID_9146
MAQQNEILRQLAQRQPPPQHYGGGDHHQWPPIRSSSALSRHCSLGQRIHLRLMYGSEWWNPSSHYLMEFVQMCLGSGSPPSSFADPRGHGYHADTDEKKRDRFRRGLSTKLRDRLNTVRANSYNELVNMAISQEDCITTRQAENKRKTPMAGPSAQPQRFRIVSDTQSRGP

SEQ ID NO: 52522 - protein, 172 aa, Zea mays
  Coding DNA Sequence Number=SeqID_9147
MTAIGVSEALYAKTLGSLEDMVAGMTWPSILPPGWTIEWDPTSVEEEHEMTSHESSEGGNTFSHTDGLAREGFPRILWEVLQGAGYTTPPQYTVQLFEEHWVPRCRVRMTLQPHPLQPGWRSLDSESFGFRAEDTIESIALHGLTTFCGFHHFELSIHPIGLFPAKKEDDPM

SEQ ID NO: 52523 - protein, 525 aa, Zea mays
  Coding DNA Sequence Number=SeqID_9148
  Subcellular localization annotation: CTP_CleavageSite=72; ConfidenceScore=5.19e-01
MPAAKPAAPGASKASTGEKVAATGGTKPPPGGPLPAKLPPPGKRVADFSTNISVEDYLVGSSEGQLVVVQPSVAATSPSAVVKAKGAKQDPWAAFCASGKILTAAAAKDVAGTMSQRLREVSQQLSQQLKQVWLMCFFQAADFADHVASGVLTADVVAEVKNLRAQHADAVRDKSAVESKNSRLAEKVATLEAEKTDLRRQLARPSLKRRLRKRRLSRVDKAETLVRSEVMRTHAQLAEAYRDLGAWTADFDVPDQEASLRFLEWLQEELLVLLTIVQGFMSYASLVTCEGAMNALSREGCKHYEVFNQSDENFECEIFKVEDPVMARAEDVEDLGDLNGARPEAEVNPVLPSEAGEGSSAAPVSTVSGEGSLPAPAPTAEDPPKAVAESTAEDPMVAAGPSQDFGPVHATTTDTANFVAASTVVAKNESDDSVFKFFESDDSGSSVVWTEESSDEDLDYFAALDVAAAEASLRVMDAEVLPGPSVGHRWRREVAKRRVSEVEVVVFVWTGLVNGNCCPRRLGRV

SEQ ID NO: 52524 - protein, 83 aa, Zea mays
  Coding DNA Sequence Number=SeqID_9149
MGLGVCGSLYQDDDEDGYDLAYGNAELWKSVKNGRKMKIIEREEEIEVTEDRTPPPSDSQAGNCFYFDICGSEPDSPVNEGKP

SEQ ID NO: 52525 - protein, 333 aa, Zea mays
  Coding DNA Sequence Number=SeqID_9150
MPPRTRLTARKSTGPIGVPRHQLAPRHESSSSGSNDPIGDLEARVSRLQAALQHQTDAWVADGDRINELRRDIRHLQDQLADRDLALDWAVQSRLLACAKEARAQARIKELSSTVDNLQVYCNTLHEEVHVLYSQLHPSVPTHPAEAEAGPSHVAGRALGGELDLFEPPPSLRCRPGLEDRTLQELLGEGMLPQTHLRVPPTLAEAIAALVNATADDSRFLREMAWQQQFEQQAGRTDRQGHREATYLDFSDTRPLLFVLAEDPLHADEWIRVIVHQFALLCCSESPMPLFAAYIYVCLPGSWWRIYEGIQAVNLKSLGEYTAYILLRTTYLS

SEQ ID NO: 52526 - protein, 35 aa, Zea mays
  Coding DNA Sequence Number=SeqID_9151
MAAGKLTDGGGSRGRKPGKPAGEPTPEGAVELAVT

SEQ ID NO: 52527 - protein, 332 aa, Zea mays
  Coding DNA Sequence Number=SeqID_9152
MECTRHDYKGCKHSIVLVHDLLVWLFYRTRETRDSEVSPWVDDVVDGAAQHSKHPAGIMACCPRHSASPEHFVGCPVGVDGMSQAFTLLQRNGSARLAAHNIKQVAARHHGRLPAALRYGGRRWGFPGRCAAGMRRQGREGRAAALGCRVEEGESTGRLDHGEEKHLLELGALAASVEVAMDAWGKKKRWWGRHGRCRGRLLLMTLCCWRGTPGRRPWEELDWRPPDAQGVGVGGEDAGGGLRSSGWRFGAPWMGVKRCARALHFLDRGVMASMCQHLGKMAAGKLTDGGGGGGGSRGRKPGKPAGEPTPEGAVEVSDCSLGEEGSLLAARV

SEQ ID NO: 52528 - protein, 82 aa, Zea mays
  Coding DNA Sequence Number=SeqID_9153
MAEVKVMRARADGPGAVKGECWVLTDGSEQPALRLVGFAEFGPQNSVVAVLEGIGGGTQHDRGGCIKAKQLRVKDVAVGSKT

SEQ ID NO: 52529 - protein, 129 aa, Zea mays
  Coding DNA Sequence Number=SeqID_9154
  Homolog annotation: Hit_ID=Q8SA86; Match level="QueryCoverage=89%, HitCoverage=15%, E-value=2e-10, Identity=35%"; Hit description =Putative retrotransposon protein
MDALNFEYSDYEKLDKGAEGKTKTAPEPKATISKKRKLGIAPSSEPKMDETGEEAPSTPSATKVAKFLKRKEQPSATKEKVKEQKKRRIVNVMQAIEQTLPSASAVKTAIPADADVGDLRLPKVLKNMI

SEQ ID NO: 52530 - protein, 124 aa, Zea mays
  Coding DNA Sequence Number=SeqID_9155
MRKNFEERGNFHASLCTKRSEGVFRLRLKGQVSSTAKQIVHGFVILQLCHPAHIKEQNKKGANVKKKPAFRKAVAVPREATRAQKLACPPITSSRASTSPSICSKVLGRFSAEGEKFSELAPIE

SEQ ID NO: 52531 - protein, 122 aa, Zea mays
  Coding DNA Sequence Number=SeqID_9156
  Subcellular localization annotation: CTP_CleavageSite=39; ConfidenceScore=5.16e-01
MTQPLPFSPLSAKPSLTLFMPTSKGSDEEVESPCIVRPSSAAFGGSSSFGKNGDEGGGSSRREKVEQKEKETMLEAEVTEATQTTEEDEELGFFTRHISGEELNEEVSKLGEKAKPWGTTLM

SEQ ID NO: 52532 - protein, 237 aa, Zea mays
  Coding DNA Sequence Number=SeqID_9157
  Subcellular localization annotation: CTP_CleavageSite=25; ConfidenceScore=5.08e-01
MAFLPSCGKCLTPPVTLRPLCTRCSCMRTIGVPRCRVWLTLEAQPLQLGWRSLDSETIGLRTDDTVEAAAMKTLTTFCGYHPLEMVMHPLGLFPAEKKDDPMWCNRSDAMALLANSAQTAKLTLDSREDFVVGLSIELVEKDLQVERLSQRITTLEQQVEIRDNTIDVLENQLHDVQRELEEANDHLDMHHLEMEANEAGSEGEEALEELGPAPGANGITSAMPPSPVSSVASTAQG

SEQ ID NO: 52533 - protein, 422 aa, Zea mays
  Coding DNA Sequence Number=SeqID_9158
MSSHSMYRVLPPSEPPDGERSRHFRLAVVGGTQLRGSWYLSAIARLQGFSSGSPTASPRRWSPKTVTTSSMVGRSEPGCGLFPALSFKDLHHPCWGRGRAEPELYLPHGFVGHPLLQHSGERVLTGLAEGVNFDNAGLVGRERRQLQRVGLAGSAGSSSAPGRCFACPGGSEWGSAGGQMAAVIDVEVVAAEEVLVADEIAATISAMGLRLFGFDSLFSPLEWGRGRGARCSSVRPEVIAAAVWPLRAEVVVAAAGAGVGEPPGVLSPRRPSNESLGSVGLAARGFSCLVKGTLGRSSMSRSRRQRCQCGQRQSWLEKRLRRPEPGQAITGGTNAGVELSRPRAGLVSLGDSWLRLRGGRPSRLLGPGSWRRPWRRWPGHGADVVLRSGDPSPVLQSEARSDFAEGGVDAEGAAAPRGGNGL

SEQ ID NO: 52534 - protein, 201 aa, Zea mays
  Coding DNA Sequence Number=SeqID_9159
MAHRRAWSTRAGGRPKSGEVDLGLPVKSCRVRGLGKLHGPLAELAEALARLGDGWSGLATVAEALAAVAGGKELAGAKEGWLAGDGERGVKDMEPGNPVCLPAQTRGKSRVLSCLGLASQCHLLAHDRERKTLGDTGVSQPSPLKGISSRDSGQSPPRVKRRIRRAGGGVGCDYIPASLGRQSGKLDLKNSSVSQVASSSE

SEQ ID NO: 52535 - protein, 126 aa, Zea mays
  Coding DNA Sequence Number=SeqID_9160
MAGEDGVQGGARSHGNRKAREELARASGEAPWEKPELAGRGAVICCRVRAGAWERKMPWRQQRRGELEWGLGGWRMETVSARGGKLRVGEWRGGEGRGRWLPFMEEKLQSTAATFLHCSNSSNTWF

SEQ ID NO: 52536 - protein, 234 aa, Zea mays
  Coding DNA Sequence Number=SeqID_9161
  Gene Ontology: Mol. function=kinase activity; Cellular component =ornithine carbamoyltransferase complex; Biological process=amino acid metabolic process
  Homolog annotation: Hit_ID=Q6QP54; Match level="QueryCoverage=32%, HitCoverage=26%, E-value=2e-18, Identity=65%"; Hit description =Putative kinase
MALPIDVVGPCPRLGEVEAPPRSRSSLSSEVEVESESPGRARRRPSAEARVESGPWGRAKRSSSSFGAEPESEPWGRAERSSPSSGAEPESEPWGRAERSSPSSGAEPKSEPWGRAERSSSSSGAEPESEPWVSCSLMRAGRSSGARSGPKFSGWYVDAVNGVARVGFARAAPKPLHRARGWSRIDSTFSHTPLRRLSARRRGESAMLPSEGAEHGVSSELLAGNPSGRPCPIC

SEQ ID NO: 52537 - protein, 84 aa, Zea mays
  Coding DNA Sequence Number=SeqID_9162
MTEENQPPRGCAPLTTARRKQDHRHHHERKLSGGEIAGGDGPDAGLSRRHQRTPSGGPGGGRAQGMREERQKYKRDVKANDRFT

SEQ ID NO: 52538 - protein, 475 aa, Zea mays
  Coding DNA Sequence Number=SeqID_9163
  Homolog annotation: Hit_ID=A2YGC2; Match level="QueryCoverage=34%, HitCoverage=73%, E-value=2e-10, Identity=28%"; Hit description =Putative uncharacterized protein
  Subcellular localization annotation: CTP_CleavageSite=44; ConfidenceScore=5.36e-01
MAPRMLCDDGGPQPFYGSKKTSARAQPLRQLSLRQAPSLLSRPRHHTSWVPKSLLLPRRHGPLREGWPRGDEDENRRSLGAARSLSRVDACNPLLQAHPTWARDEHEGRGIPTSLTPVSGRLALPPFALALALDPSGLGHVATLTRRPRDPPMARLKHTAWKSVIPFLPSRLANGPLCHPVTGQSSHLERLHHRLHEEQGRRRQELEQQGSSFSLQQEIESVRSCSLVLPLEAPPAPPLSALAAAVAAGGDPYDGGGDNNSSHSTDLSEEQELEGWVARPITRDAARGCHFHDTLDTLLRQALDRCTWSIEYRCVVFQHSRGVYPDRWEATCLVRRPENSLQGAEICSEHYSISERDSAEAAMQDAAWRALSHYCSVLGRVADGLNLKYYPRRPSGSTGGMIVSPVGKDNPRLSSTVNLAAVLNTEMDHALDEMSRARAEIAQLRAERAEHRHLEDGSPAAVGTQHPYRSPQHGH

SEQ ID NO: 52539 - protein, 161 aa, Zea mays
  Coding DNA Sequence Number=SeqID_9164
  Subcellular localization annotation: CTP_CleavageSite=52; ConfidenceScore=5.33e-01
MPTPTFNHLALPLKRRLRVRSLGITSKMPTPTFNHSALPLKRRPRVRLLGITSKMPTPTFNHSAQPLKRRPHVRLLGITSKMPTPTFNHLALPLKRRLHVRSLGITSKMPTPTFNHSALPLERRPRVRSLGITSKNADADLQSLGAASKAPTTCSIARHYF

SEQ ID NO: 52540 - protein, 148 aa, Zea mays
  Coding DNA Sequence Number=SeqID_9165
MAPEAGLGCCQPHSVEWHSSRSSAGGAVFLSGWSVKRRSDDGHFSSVDLKARVRIRCQATFALNASAIRSVGVATWPRLLLGEDWASGEPKLKLAIGLSFCIKTAPNPISLALISTVKDSSKLGSANTGVLLMACFKVSKAVVASKFH

SEQ ID NO: 52541 - protein, 84 aa, Zea mays
  Coding DNA Sequence Number=SeqID_9166
MVRADRTRDNGQGPRKNDLTNYRALGPFVRPFTSLVDPGDIYPPQDGSEDLFVRTVMAAVAGKPPGRRWPPSLASRWCRGGRSE

SEQ ID NO: 52542 - protein, 74 aa, Zea mays
  Coding DNA Sequence Number=SeqID_9167
MGRPRHGPSSGDAWDEGEAGEGIERRVASSPSHQHLPSEGPVRLSHLVPKTSLDGGDAALVRSGSTGVFDMTVD

SEQ ID NO: 52543 - protein, 1424 aa, Zea mays
  Coding DNA Sequence Number=SeqID_9168
  Gene Ontology: Mol. function=ubiquitin-protein ligase activity; Cellular component=ubiquitin ligase complex; Biological process =protein ubiquitination
  Homolog annotation: Hit_ID=Q5NB32; Match level="QueryCoverage=100%, HitCoverage=100%, E-value=0.0, Identity=63%"; Hit description =Putative uncharacterized protein P0485D09.14
  Pfam annotation: Domain name=U-box; Domain location=404-477; Score =48.2; E_value=3e-11; Accession=PF04564.6; Description=U-box domain
  Pfam annotation: Domain name=WD40; Domain location=1122-1158; Score =18.8; E_value=0.021; Accession=PF00400.23; Description=WD domain, G -beta repeat
  Pfam annotation: Domain name=WD40; Domain location=1164-1204; Score =22.1; E_value=0.0021; Accession=PF00400.23; Description=WD domain, G- beta repeat
  Pfam annotation: Domain name=WD40; Domain location=1248-1283; Score =4.7; E_value=8.3; Accession=PF00400.23; Description=WD domain, G -beta repeat
  Pfam annotation: Domain name=WD40; Domain location=1385-1422; Score =14.5; E_value=0.39; Accession=PF00400.23; Description=WD domain, G -beta repeat
  Pfam module annotation: Pfam domain module=U-box::WD40::WD40::WD40::WD 40; Domain location=404-477::1122-1158::1164-1204::1248-1283::1385 -1422
MAGPTPTCSAIVSHTAAFLAELVADPLLRRHLLSAAAAAGGGQQHPAATLQALSLVSDALDTAASCSPSPSSLRAAERLLRSLPAATPLSCLLLALARAARRGAGAAAAVLDLFALDPALARHELAPAAFEALFAPRLLPVMRHFAARRAAAAARTKGEEGGSDEATPMRVLSLMSGAQAQEMRALEREYDKVLDANCRAYALYLKRILEAGEPSSPAVSSPLPQPLPPPELVFGVEDDDDSRGDEDTAPENDESAASSQSELRDNPMWAETEEQPGDLYPRRQGSVKGRRDLLRPPSLYPQRVPPHLIVQQQQALPVGRGSPASRLRAEHSRSRSPATPSDDSMEESSSELCAAKEEKIAASPLSSKQPRPRADAGQLSPEPASFPVRCDAAAVDPLQPLPTPKDFVCPITSQVFDDPVTLETGQTYERRAIQEWLDRGNATCPITRQRLHGAQLPKTNYVLKRLIGAWRDQRRTPSPSSSPSPSPPPATPPPAPATAMAGDSPAPPFPLPVKAAAASSPSPDANTSASAPSPTSVIAQASLESAVAELRAAVSCLCTSEDLAQSERSVLKIERLWRDATAGGADAEPAILAALARPAVLNGFVEILFNSVSAQVLRVAVFLLAELASRDDAVVQTLTRVDSDVDCLAALFKKGLAEAAVLICLLSPAPEQLVEMDLAEALVATIRRGGGDEDPLKMCVSPKAASVILLSQILVEDAAAAADDDSSSTPPVPRSALMSERFIRSLAASLEAEPVEERLAAMRILLRCIWEDGHCRRSIAEKASLGAVLDAFHAVGDADKIDIVRFLYELLKLKKRSAAERLLRTIKEGGSFSMMHTLLVYLQSAPPEHSPVVAGLLLQLDLLVEPRKISMYREEALDCLIQCLKNADFPRCQLLAAETIMCLPGRFSSSGRPLARSTLLKLARVKERYRQSQDLSAARADGEDEMEEGKAASEWERKAAYAVVSHEFGLVFEALSECLRTKNAELFTTSLVCAAWLVHMLSLLPDTGVLGAARVCLLRQFVVVLRSAKHGSDRVLAMVALRSFMNDRGRFFFLLLLLLLLHVSELNLGMCKFVEGMHDITTYIKDVLRTLRELKKSSGLAFEMLKLLSDGQESSVDMWSHKEINQVDCSANGEVTSVVYLNNYIFSGHSDGTLKVWQGSENILALVHEAQEHSKAITSLSVLHSESEEKLYSGSLDRSIRAWQLRDGVLRCVEVHDTRDPVQSLAVASAVACFVPQGAGVKVLSWGSGSSRVVNANKYVRSMALVHGKLFCGCSDGSVQEIDLASGTLGVIQPGSKRILGKASPVYALQAHGGLLYTGGTPSSSSAASADGGGGAAVKVWSCANYGLVGSMATAAEARSLVVSADLVYVASRAAAVEIWSREKLARIGTLQAGGRVQCMAVDADGDVLVVGTSDGKIQAWGLT

SEQ ID NO: 52544 - protein, 539 aa, Zea mays
  Coding DNA Sequence Number=SeqID_9169
  Gene Ontology: Mol. function=protein binding; Cellular component =fibrillar center; Biological process=translation
  Homolog annotation: Hit_ID=A2ZQY2; Match level="QueryCoverage=94%, HitCoverage=96%, E-value=0.0, Identity=85%"; Hit description =Putative uncharacterized protein
MAAAHYDREDGLPPSAPPHAAADAYDPNYVPDSVKTFVVHLYRHIRDKNVYEIHQMYEGGFQRLSDRLFRDVFWPSAEAVSPYCDGDHVFLLLYRELWYRHAHARLSPLTAAHRAESWTNYCDLFSVVLHGVVNMQLPNQWLWDMVDEFVYQFQSFCQYRAKLKTKTEDELNQLKQFDKAWNVYGVLNYLQALVEKSMITQILEKEKEGLEQFTATDGYDYEGGSNVLKVLGYYSMIGLLRIHCLLGDYHTGLKCLTPIDLNQQGVYTIVIGSHISAIYHYGFANLMMRRYVEATREFNKILLYILKYKQYHQNSPQYDQILKKNEQMYALLAICLSLCPQNKLIDENVSTQLKEKYNDKMTKMQRYDDEAYAAYDELFSYACPKFITPSPPILDQPLTNYNQEALPILALPGKPNLLQQDAYRLQLKLFLYEVKQQQLLSGIRSYLKLYSTITISKLAQYMEVDEATLRSILMTYKHKMHAVDSEGKIVSSADFDFYIVEDVIHVVESKPTKRHGDYFLRQILKFEEMIGELEKVQLD

SEQ ID NO: 52545 - protein, 377 aa, Zea mays
  Coding DNA Sequence Number=SeqID_9170
  Homolog annotation: Hit_ID=Q5NAJ4; Match level="QueryCoverage=27%, HitCoverage=40%, E-value=2e-38, Identity=78%"; Hit description =Putative uncharacterized protein P0443E07.29
  Pfam annotation: Domain name=DUF623; Domain location=318-377; Score =77.1; E_value=5.7e-20; Accession=PF04844.4; Description=Protein of unknown function, DUF623
  Subcellular localization annotation: CTP_CleavageSite=56; ConfidenceScore=5.58e-01
MNYGGGSRSSSRLRDRLARMFRPSALLRSTCNTAAAASSCSSSSPASTAKPPPPPVAAAASACSSSRALLGAVVDGDSSFLASSRRDLAVAGRAESFSAAVDRRRRSRSSLDAAPPPSRFSVDAPAALAETGRDKEEKKKKKKSPRDDDDDEHRLGVGGSSKNDSRMKLLLSNPYGFSSSDDTDVFSSDGEDDDRAAGRGSKRPGESAAETFFSSSRSFSSDSSEFYTNNKKQHKKKTATKAKAKAKGMAKAKPPAAAPSDRSSKAPASSSRRRPQYHRRAASSCDTCGVRDGFRPVVVVSAAAEEQVRRGFAVVKRSRDPYGDFRSSMVEMIVGRQLLGAPDMERLLRSYLSLNAPRHHPVILQAFSDIWVVVHGG

SEQ ID NO: 52546 - protein, 96 aa, Zea mays
  Coding DNA Sequence Number=SeqID_9171
MYREALWQKRGRPRELYPDRILPHLKTALALGEDSASPELSLDQLPWQQPPTLRKSRRRQSGDCSNHFLHDSMPWRRFDHGLGRNLCLARAWPRPE

SEQ ID NO: 52547 - protein, 486 aa, Zea mays
  Coding DNA Sequence Number=SeqID_9172
  Gene Ontology: Mol. function=oxidoreductase activity; Cellular component=cytoplasm; Biological process=metabolic process
  Homolog annotation: Hit_ID=Q5N800; Match level="QueryCoverage=97%, HitCoverage=98%, E-value=0.0, Identity=82%"; Hit description =Putative uncharacterized protein P0452F10.6
  Pfam annotation: Domain name=adh_short; Domain location=155-340; Score=-36.2; E_value=0.003; Accession=PF00106.16; Description=short chain dehydrogenase
  Subcellular localization annotation: CTP_CleavageSite=47; ConfidenceScore=5.45e-01
MAAAAAAAVAHLSIHGRLRRSPEHRPSITTTTTSSSSSSAHRPSLLRCRAFKQEAGDGDPAEADARKRRKGPLYKLKAAIQGLAGSRSAAAEVYGGEYQYQRAVEKAEEIFFSVTTQLGRYVITMMSSGVVLGVGFQLSGGDSQMNELIWYSWLGGVIIGTMIGANSVLEEHCKAGPRNVVITGSPESVLQTIKELEENIQEGLSVAKKKQRNILSHAKVVGTDCDVCKPEDVKELVNFAINELGSVDIWINNAGTNKGFRPLVTFSDDDITQIVSTNLVGSLLCTREAMNVMQYQEKGGHIFNMDGAGSGGSSTPLTAVYGSTKCGLKQFQGSLLNESRRSKVGVHTASPGMVLTDLLLSGSSLRNKQMFNLICELPETVARTLVPRMRVVKGSGKAINYLTPPRILLALVTAWVRRGRWFDDEGRAVYAAEADRIRNWAESRARFSFTDAMEMYTENTWVSVFSLSVVCAFIILSSSGGPLPGT

SEQ ID NO: 52548 - protein, 425 aa, Zea mays
  Coding DNA Sequence Number=SeqID_9173
  Subcellular localization annotation: CTP_CleavageSite=51; ConfidenceScore=5.14e-01
MAATSTAYDVLYDPLDSVGTVRPTTRGTSWMWRTCARRDRRPCGGRTAMPRSAAGDSVGGDTKAIKSKEMETQHGSLPTPRYWGARGMEPWLSPLPTSTRLEEAGKNVASTDIPAEVGDDGRLKDENRAPWVELGGQAPPTAARRKMGSTGPTRWEFGNKEHKLFGGKVAERRGPSTSPPGKYRRIPSKQAVYHFEHSLSLGTLGMKSQGHGKLWWHKAETLKAKGRRELEGGRVSRVGKKQGMAATRRGSHPMTWGQTSHVIQAGPKREEGESSHKERATAVRLYAPPSSPQPAVKEANRRTRNVQPPHDCAPPRFLCNRWSNLWHGGPGPHVMHPTRRFLGAEKSHRCSRQYRASSSPSQKTEKINLQNQCSDSRHPAHGPSKTLSAEVTGQSAAGTCVTVDVTMGGPAVIASTGAEEQRSNR

SEQ ID NO: 52549 - protein, 159 aa, Zea mays
  Coding DNA Sequence Number=SeqID_9174
MGKNNKRKREPTPPSEEFGDSEYSEEEFSSESEGSPAPVSPPASSDDSDDSQGIAAEVWTYIRAVERAGLEGSDESEYSSDEEDSDGGDEGEDDDDDDDDDGDDGDGSGSGRGGGDGSRDSTKGDSSRGSTKGSSRGSTKGSSRGSTKGDGGGRGRASG

SEQ ID NO: 52550 - protein, 314 aa, Zea mays
  Coding DNA Sequence Number=SeqID_9175
MESHDLRAERESRLVGGNEIDGFGYDYGAGKWYSFRLERMARLRHTARKSVIPFLPSRLAERPLRRPVAGQSSHLERLHHRLHEEQERRRQEQEQQGSSFSLQQEIESVRSCSPVLPLEAPPAPPLGAPASGVAAGGDPDDGGGDDSSSRDTDFSADQEPKDGLLDPSLATLLAGVTSMMRSTPCYIRHLTGVLGPSSIAVWSTSIVAGSIRTVGRRPACTGGVIVSPVGEDNPRLSSTVNLAAVLNTELDHALDEPSRARAEIALLRAERAERRHLDDGSPAPVGTQHPYRSPRRGRQPYGNPDCKTKINLEP

SEQ ID NO: 52551 - protein, 102 aa, Zea mays
  Coding DNA Sequence Number=SeqID_9176
YHQPVLREQLEYQRQQSEYQRQQAEYQKKRDEYYANLQAQNQALLLQLAQQAGVPMPTYGMPPPDFALPMPMLAPPPPPPSQFPTEKEAQAVLGRWAHTKFL

SEQ ID NO: 52552 - protein, 320 aa, Zea mays
  Coding DNA Sequence Number=SeqID_9177
  Homolog annotation: Hit_ID=Q6J9V9; Match level="QueryCoverage=27%, HitCoverage=33%, E-value=8e-31, Identity=70%"; Hit description =Putative uncharacterized protein
MRLRKPKQKASANSRVKNHRRPLFRGKRHLQQEKRALFHLRHDGRVKKRDRERGYSEKDPSQRRKRAPSPPTDQGFEGCALRGSTTAPEHSGSEPFTDQGFKGWPSEGFDSRPRARRVRDDPGYVRYMAEARATLPRYPRTFPRPAGTICNGIPPEGGIEPSDPIEWVRGNGTVRPALATVPTTRVRLATVSRDLSQVQPQAQQGAPPRSISGLGLSLGLGRRSPPRPTPGLGLSLGLRRSHNLARPQPRPQEKSPPLPTWASDRLRYRGYIITLPLASCLRLRRNRTGVPSKVTPGSRHFSDSNVSSCTGLKALLRQPR

SEQ ID NO: 52553 - protein, 18 aa, Zea mays
  Coding DNA Sequence Number=SeqID_9178
RYNKLLLGMDEYIRADNE

SEQ ID NO: 52554 - protein, 109 aa, Zea mays
  Coding DNA Sequence Number=SeqID_9179
  Subcellular localization annotation: CTP_CleavageSite=85; ConfidenceScore=5.43e-01
MKKVAVVATILSGIWKHKSNNFNQNSITGMIYGSWMMPSKTRSQDVAGTSSGREATTNPPPVPPTLAEAIAALVNATTDNTRFLREMASQQLQQQEDPLEADEWIRVIE

SEQ ID NO: 52555 - protein, 57 aa, Zea mays
  Coding DNA Sequence Number=SeqID_9180
MGSSSLRAERESRLVGGNEIDGFGYDYGAGCQHCNHCSGEDEAVEGDFQEFQDYDEF

SEQ ID NO: 52556 - protein, 260 aa, Zea mays
  Coding DNA Sequence Number=SeqID_9181
  Gene Ontology: Mol. function=serine-type endopeptidase activity; Cellular component=chloroplast; Biological process=response to stress
  Homolog annotation: Hit_ID=A2Y7L6; Match level="QueryCoverage=51%, HitCoverage=29%, E-value=3e-67, Identity=95%"; Hit description =Putative uncharacterized protein
  Subcellular localization annotation: CTP_CleavageSite=31; ConfidenceScore=5.51e-01
MAAPSSAATACFVSPLPPPRRPRHFLRHLARAAAAEPTPASASSFALPSPWPWARRLRDLVPAEAAGRLLSSAAGSLIVALASASLVLGDAGAASAFVVSTPRKLQADELATVRLFQENTPSVVYITNLAVRQDAFTLDVLEVPQGSGSGFVWDKSGHIVTNFHVIRGASDLRVTLADQSVYEAQVVGFDQDKDVAVLRIEAPKDKLRPIPVGVSADLLVGQKVYAIGNPYVMYGRTYRRRRDARRAADRAAKAGATISG

SEQ ID NO: 52557 - protein, 94 aa, Zea mays
  Coding DNA Sequence Number=SeqID_9182
  Subcellular localization annotation: CTP_CleavageSite=52; ConfidenceScore=5.38e-01
MAGSAARPTPPARPLGRPAHCPAPLRAQRLGRPAPLLGRLGRPLHRPPSPVRSPAAGSAAPGGYEIDGSGYDYGAGKDEAVEGDFQEFQDYDEF

SEQ ID NO: 52558 - protein, 669 aa, Zea mays
  Coding DNA Sequence Number=SeqID_9183
MPSSSSSADATPPAAASSEETLSNVMVEELRAGDSVEFGVSRMTLARIEDMQRLGYFGGGVARAPGTEEVPEPEGELVVFEAFFVAGLRLPAHRVFELNQLPYDGYPGQDEADRRGKKPAVETGGDPALVAGASSKKRKLVMDKDRQGAARKRQATVRVHEARPKRQRGTAKAEASGGGKPPLPAKAGAPAPGKAPEVTVGAGGPKLTKVVPSASGAAEAAKAAGTLPPPDKRVADFGTEINVEDYLGGSDEGPLALVVPGAAIATAAPAPKAGGEALGAGGEVSALALVRDEAGVATRRLKGATEAPSRATEALSQVADFTSRTASGALTAALSAEVERLRMQHADAVREKSASDSKCRKLAEKVAALEKEKADLRRQLAGERREANEAIAKEQAAQAEARLARAEGNIAKELAGELQRRLTALESRAEGAEAAMRAEAERTRTQLMTSYRELGVRTGDFEVPEREAGLRCLEWVQEELQELPTVLAGLMSFTSLVTCEAAMNALSREGCRHFEALDQVDEDFGRDIFEVEDSVVKESAGALYDRMWGSYGREVVRARAEAARAQAERGERVDDFGALNSALPEPETTPAEAATGVAPVPTPETAEDAPGAPAPAAAGEDLPPKVAEGAPDAPAAAVPSAEDPAEVGAEAAAEASAEAPAAAGPSQVA

SEQ ID NO: 52559 - protein, 145 aa, Zea mays
  Coding DNA Sequence Number=SeqID_9184
  Subcellular localization annotation: CTP_CleavageSite=47; ConfidenceScore=5.19e-01
MSQQSAPSPMPLPLPPPPQSLGIQGDDRRTIDFVRTKSTDEKWATVVFMAFVSSVVQELFKVFQWEDDLQSTSLQEDKSPHEQVFLLVSATAVPGSRTLCLEGVIQQCPMHILVDSCPSFWNWINGRLKCSNIPLLSKKLAIWDM

SEQ ID NO: 52560 - protein, 33 aa, Zea mays
  Coding DNA Sequence Number=SeqID_9185
MPPLTGSLAPLSKPPTKLSPVPTLEEPRPLLKS

SEQ ID NO: 52561 - protein, 51 aa, Zea mays
  Coding DNA Sequence Number=SeqID_9186
MPIGPHGCLAGLGILHSKLGETVSTTVAKWFVPDARGTVDNVYRFGPLRDA

SEQ ID NO: 52562 - protein, 58 aa, Zea mays
  Coding DNA Sequence Number=SeqID_9187
MDGQSANQRVKPRLSSVWHTGLSGGAPDSVRCARLTRREVAALGNSPTAYDYNSPDCP

SEQ ID NO: 52563 - protein, 779 aa, Zea mays
  Coding DNA Sequence Number=SeqID_9188
  Gene Ontology: Mol. function=binding; Cellular component=nucleus; Biological process=activation of protein kinase C
  Homolog annotation: Hit_ID=Q5NAR1; Match level="QueryCoverage=61%, HitCoverage=93%, E-value=0.0, Identity=67%"; Hit description =Pentatricopeptide (PPR) repeat-containing protein-like
  Pfam annotation: Domain name=PPR; Domain location=388-422; Score =15.2; E_value=0.12; Accession=PF01535.11; Description=PPR repeat
  Pfam annotation: Domain name=PPR; Domain location=450-484; Score =45.0; E_value=2.7e-10; Accession=PF01535.11; Description=PPR repeat
  Pfam annotation: Domain name=PPR; Domain location=551-585; Score =40.3; E_value=6.8e-09; Accession=PF01535.11; Description=PPR repeat
  Pfam annotation: Domain name=PPR; Domain location=586-620; Score=7.2; E_value=1.1; Accession=PF01535.11; Description=PPR repeat
  Pfam annotation: Domain name=PPR; Domain location=622-656; Score =10.6; E_value=0.43; Accession=PF01535.11; Description=PPR repeat
  Pfam module annotation: Pfam domain module=PPR::PPR::PPR::PPR::PPR; Domain location=388-422::450-484::551-585::586-620::622-656
  Subcellular localization annotation: CTP_CleavageSite=27; ConfidenceScore=5.09e-01
MRLRVPFIAPRQLGAVDCIPGRQFLPSVAWRTGQSGAPPDTVRARPPPQPRKVISASPDPRARPRPRPRKVVSASPDPRAQPQPRPRKESRPRPTPASVSGGVSASPDLGLGPTTPQEVHHYPTPSQLRLRGNKTGVPSRLASVTSNDGSPRASMTTVALSPLRKQGDVSKVPTAPTAVLLQGSNAPPTATTPYTQGPSTSLTTTLAWTPGVKTPTASKRDIQFFNFSKLAKRALVADVGEEESFGDGDVGGVLVGGGVGGAFVGVPLAAHMGIAALLLVVSLLFTQLSSEAMEINRRTTVSNAHAFLLPRGGQRDPRLLSALLLASLCLVPHSQQTSDHAAALLRRVYPSVYLRDVARLPPHLLRRSLLGQLHSLLLRTGHVASDAHVSSSLVQLYCTCGHVADARSVFDEMAVRDVVAWNVMIAGYVKAGDQAHARELFDAMPERNVVSWTTVIGGYAQMKRPEKAVEVFRRMQVEGIEADGVALLSVLAACGDLGAVDLGEWVHRFVVRRGLCQEIPLMNSIIDMYMKCGCIEKAVEVFEGMEEKSVVTWTTLIAGFALHGLGLQAVEMFCRMERENMAPNAVTFLAILSACSHVGLTDLGRWYFNIMVSQYRIKPRVEHYGCMVDLLGRAGCLKEAQDLVKNMPLKANAAIWGALLAAARTHGDAGLGEQALLHLIELEPNNSGNYILLSNIFAEQERWGDVSKLRKAMRERGLRNVPGASSIEVDGMVHEFTSRDWSHPFIHTICEVLCEIDTNMKSVGFASVFPEVLHVIEEG

SEQ ID NO: 52564 - protein, 69 aa, Zea mays
  Coding DNA Sequence Number=SeqID_9189
MAGASAREREGGSCRAKEEEGRGRGRGGRGAHRGSYLTFLYGNPVGWVDIGPSLVDQADQRANIGSKSW

SEQ ID NO: 52565 - protein, 149 aa, Zea mays
  Coding DNA Sequence Number=SeqID_9190
  Subcellular localization annotation: CTP_CleavageSite=49; ConfidenceScore=5.63e-01
MASIKRPYQTASTSLSQQQRLRLCSLLFFLNPRRNRRALDQRRPAHLARGLTLGSGTTVQPRMTCRSIVDQRATPLMSDLDIYRRQTIIIYRQVVLGYTVAPAPDVRLCRLRRHVLFFPLSSSDDDDRAEGNLRKVNHIKSSFCHMTLE

SEQ ID NO: 52566 - protein, 144 aa, Zea mays
  Coding DNA Sequence Number=SeqID_9191
  Gene Ontology: Mol. function=kinase activity; Cellular component =ornithine carbamoyltransferase complex; Biological process=amino acid metabolic process
  Homolog annotation: Hit_ID=Q6QP54; Match level="QueryCoverage=59%, HitCoverage=23%, E-value=1e-10, Identity=48%"; Hit description =Putative kinase
MAPPVDVAGLRPRLGDVEAPPKPRSSLSSVAELYADGGYQLRIRSLEGTPNYGPRQVGKVRDKPDDEGPQEGEAIVECKERLRSSSRVVHLTLILKSNLVVGDCWLAFLPALDCGRADGYIFEGKVVEFYMNKLRRKKGKGAAS

SEQ ID NO: 52567 - protein, 159 aa, Zea mays
  Coding DNA Sequence Number=SeqID_9192
MAIQLLSFCAFLELHYRNLFHCNGHIFYWNRHQILPGFVIDSSQVRVQRGGSSRSATSSSRRFTQDPAEVEQLREELMQHQDYLKQQAAQHEYYATQIRQQQTLIQGLRSAVGRKPANFLGATGNGGDASGGDHAPPLPYQDVSTQQQRRHVTLFFSVE

SEQ ID NO: 52568 - protein, 178 aa, Zea mays
  Coding DNA Sequence Number=SeqID_9193
  Subcellular localization annotation: CTP_CleavageSite=74; ConfidenceScore=5.51e-01
MEPSPSSYRSALWFYLLCWTAPPLCSSSSPPPWRPWPSTSSATLAPSLHWRSSLFLTTHARPCFLFLASDPLPHASSSPPGIHGAVGHLPCVERPLLLEHRRHGLNPSARLLPQGEFLSMAALNPMVELAQPIASITGAVLSSPFIKFGPRCPSFCVPAARRACAALTTTSSNPFSAL

SEQ ID NO: 52569 - protein, 319 aa, Zea mays
  Coding DNA Sequence Number=SeqID_9194
  Gene Ontology: Mol. function=carboxyl- or carbamoyltransferase activity; Cellular component=ornithine carbamoyltransferase complex; Biological process=amino acid metabolic process
  Homolog annotation: Hit_ID=Q8SA97; Match level="QueryCoverage=13%, HitCoverage=7%, E-value=6e-10, Identity=80%"; Hit description =Ornithine carbamoyltransferase
  Subcellular localization annotation: CTP_CleavageSite=59; ConfidenceScore=5.11e-01
MSEPWVGRSGVRRLPGLSPCPSPRSGGAEFAVFQVLARVRALGSGGAEFAVFRDLARVRALGRAERSFLWSLRPGLTACQSHSVKWHRSQSGAGGAVLLSGRSVERRSDGGHFGSAGWGARVRIKVSGHLCIKCSCGLVGRCGDLVRVASWRRQGLGQAINMSVAVGGPRARRKSSGLYADGGYQLRIRSLEARVYGRVPSSRAGMLTLSMGRPEPGLREQPPSLCTGARRAIRDRLGFFTYAPASPFRKEEGGKRHVALDGRQNMVSPVSYKRVIRVDVRAPFVRGRLGAQRHAQKYLRVICRTWSPGDGVRGLDASL

SEQ ID NO: 52570 - protein, 266 aa, Zea mays
  Coding DNA Sequence Number=SeqID_9195
  Homolog annotation: Hit_ID=Q6J9V9; Match level="QueryCoverage=24%, HitCoverage=33%, E-value=4e-08, Identity=45%"; Hit description =Putative uncharacterized protein
  Subcellular localization annotation: CTP_CleavageSite=59; ConfidenceScore=5.24e-01
MHKGARRHGRLPRGVTLLLKAALPTCVPSRHGLSLLQHTPRSSPAARGLGPTRHASRLRAEEAKPPCTVRTTAQRLQATLHFCPDQRAKGRAAVQAACNRAKWAHFSDSQHAQHGSPGPRVMQPACRMLRACNCIATCATTAPPRLRNQYRDSRRSERRFAFAVMTASKEGPGKGDTPKRILPREGTRPRASLLIRGSKAGPSEGFDSRLRSRGPYTHYWSEVRRPAPRKGSTTASGHSGSTPTTDQGFEGWPPKGSQPPQTPSEG

SEQ ID NO: 52571 - protein, 268 aa, Zea mays
  Coding DNA Sequence Number=SeqID_9196
MGDIRRLSASSLEERNSAGVGTFQPSFGFKDFHQPARLYHPPQPAVTQDGDHQPLGGEKHPGCDLGPTLSFKDVHYPCWGGGRAEPELYLPRGFVGHPLLRRSRERALAGPAGGSDFDSAGPVDGRRRLPQRVGLVGLAPSAPSCRKAAAAPCAREDRPRCRALLGRRSCSGAVLPLHRYGASAGRSVPCSSGRIRVGICRRADGPCRRCRGGGGSRSPRRRRDHRHHPRFGPPALCTCPRPSSVGVGEGKVAAAFALRPSPLQSGHP

SEQ ID NO: 52572 - protein, 120 aa, Zea mays
  Coding DNA Sequence Number=SeqID_9197
MAGIAGIAHRRRTPPRIRGRANRRKSSGECLLDWFACVPASHGIPRISVWGAVGRSPIMAPPRDTAGTGMPVCRAGEEGVRTVGMLIYGLDWVWFLGCALGYGGETVSVDRVVNGGRLEL

SEQ ID NO: 52573 - protein, 198 aa, Zea mays
  Coding DNA Sequence Number=SeqID_9198
MATVALGSHACTVMEAVAVDDMGSGIRGRKGGPRPHLMDWRVRAAREESGMVVETTCATTAHPPSAMLADLVEDGAIFGSPPMQGEGPARGRARRRLLLRPRPGSGEDAIPPEAEVEAEPWGRARRRPPSEAEVEVEPWGRARRRPPPEAEALRSGEAELPVAPEAELGCCQLHPGGWHNSRSGASSTVFLSSRSTKG

SEQ ID NO: 52574 - protein, 89 aa, Zea mays
  Coding DNA Sequence Number=SeqID_9199
  Homolog annotation: Hit_ID=A3AXI0; Match level="QueryCoverage=74%, HitCoverage=9%, E-value=1e-15, Identity=69%"; Hit description =Putative uncharacterized protein
MLAFRLKHHLSGMMSGSLFTNSNWFAFDEDKALNDGLVSSEASPSPNSEISALKEDDEHDEVILGKIIDEIKGSEPTLPVIKISTTLSS

SEQ ID NO: 52575 - protein, 241 aa, Zea mays
  Coding DNA Sequence Number=SeqID_9200
MADLTKPRCPTTKTLASLSARKDGCRSSEGSEVSSTWEGELAEGRICPGVSQLSDSPRCQEEVCAGLLQRFARLRPLATFEHWKKQTATCSTPSAAPEHARAAPKPSQCPAIPNPVQPSEKTVHVSVKLPERGIGLCFTGEAGPRSPDFNRPPATVDRGTPCTSLRFLARLDSLDLHEAPHALGLNYAAVDRPEHTPPTSSPACSRGPGDSGHPRRRAVPRRDRQTLPEPTLPFAGPPSPP

SEQ ID NO: 52576 - protein, 234 aa, Zea mays
  Coding DNA Sequence Number=SeqID_9201
MEKGRQDAQRKKRRAHVRLADLRREVKVAWPSAKPTALDAEAESGQLAVVPAASSTGPVVTATGTKGDTGTSAEPWARFCASDEIASTAAATGVAASVAQQLKYATAFTERIALGVLTLEFSTERQRLEGRIERLRTQHTEAVRDKSATENKSRNLLDKLSAAEKEKEDLSRRLAEEKEGTEKARTEAQAARVEADIARVEAGLALKRAADAESEMKSLCSYTEKTEASPPRRC

SEQ ID NO: 52577 - protein, 77 aa, Zea mays
  Coding DNA Sequence Number=SeqID_9202
MGELGEFLPVVLRYREPAVRPGLRHHRKLRFARPRARTRAQPLKTANSAPPDPGLGLGLGPGRRRTPLRPTQGSDSG

SEQ ID NO: 52578 - protein, 21 aa, Zea mays
  Coding DNA Sequence Number=SeqID_9203
MGVSRPIEPSLASYFYLFIFE

SEQ ID NO: 52579 - protein, 51 aa, Zea mays
  Coding DNA Sequence Number=SeqID_9204
MEKNSLLQKQKPRDDVSGGQVFGFVELSGWCNGPKYEYDGTILEEKITSIN

SEQ ID NO: 52580 - protein, 42 aa, Zea mays
  Coding DNA Sequence Number=SeqID_9205
RGNGYFGANGYLQRIKCGPRRQKLQRSESNGIGDVAGAPDMS

SEQ ID NO: 52581 - protein, 309 aa, Zea mays
  Coding DNA Sequence Number=SeqID_9206
  Gene Ontology: Mol. function=carboxyl- or carbamoyltransferase activity; Cellular component=ornithine carbamoyltransferase complex; Biological process=amino acid metabolic process
  Homolog annotation: Hit_ID=Q8SA97; Match level="QueryCoverage=58%, HitCoverage=24%, E-value=3e-23, Identity=41%"; Hit description =Ornithine carbamoyltransferase
MAPPIDVAGLRPRLGDVEAPPKPRSSLSSVAKVESEPLGRARRRPSAEARAESEPWSRAERSSSSSGAEPKSEPWVGQSGVRRLPGLSPSPSPVSGGAEFAVFRDFARVRALGRAKRSFLWCLRPGLTICQSHSVKWHRSRSGAGGAVLLSGRPLQLYADGGYQLRIRSLEGTPNYGPRQVPAAEERVERLTGGEIAPAGELVGGEESGLSRAQLTNQTGQRASPGIKEGGRPKSGEVDLRLPVKFCQVRGLGKLHGPMAELTEALAQLGGDWSGLATVAEALAAMAGRKELAGAKEGCLAGDGEHGVK

SEQ ID NO: 52582 - protein, 262 aa, Zea mays
  Coding DNA Sequence Number=SeqID_9207
MTERYQLPRSCVPPTTRQKDGGYPPFGGLEGGKTRCIREHEDMVAFQGGHPPFKGGSPYLRPQPSWAESSPTHSKVLLLRRGGWVPHVMQAGSEQKKPNRRARCVQPPSGYKRPSTFAQTSRPTRHATGAPNASCMQLHRHLRHHRASLTAEPMQRLEATQRMTQQRQPGATVNAAKNGPAVMTMAGGQEQRSRRQPSSRPIRGQRENPLSRREDNAPVFRSSNGSRTRNGRPTNHSPRRINSAAGQAAPLAGEAGDASPSP

SEQ ID NO: 52583 - protein, 218 aa, Zea mays
  Coding DNA Sequence Number=SeqID_9208
MALSPLLLAERRRRGRLGGYSRKPGSSRTVDNVNIPARELGTRPYTRATASSHEGTIRPAEALREALRPRRSETTPPRPRGLHPAGALARTHRNKTQPRKAGPLAKKCDESLQASANTPFEARGLLSGTIIRGTLKAPNSQLAKSRKTTNSALPDLGLGLGLSPQKTMNSAPPDPRARAPPWPQPTASASPDPGAQTRPQPRKIDSTSASEELPHRPT

SEQ ID NO: 52584 - protein, 197 aa, Zea mays
  Coding DNA Sequence Number=SeqID_9209
  Subcellular localization annotation: CTP_CleavageSite=44; ConfidenceScore=5.34e-01
MGGGLLAAASALRSLLPLFGPPEQKSSSSPLLERATACRSSVFCCSAGPPPIEWGCSYLRRWNRSSICNGTLNASVFVHCGCRGLNINVCASESCFSRKVMSEVSVSRRRRSPSARSALPLTRTLTRSWGSVTDAVEEARRIASAEKLPNVKTCSVRGITYPNVSYLSQKVMSEESLGSVSLGCLRVLRRFQDPLSK

SEQ ID NO: 52585 - protein, 22 aa, Zea mays
  Coding DNA Sequence Number=SeqID_9210
MAIDGQTRVGGKAKGHNGGYLL

SEQ ID NO: 52586 - protein, 225 aa, Zea mays
  Coding DNA Sequence Number=SeqID_9211
MASAGLWRDAGHARSGAGVLWCAQNASNTWRCSSARVQTLAEIANVRILAKIRRRPLPGTYGYLLYAGTVTGAKITAVRLIGGSRAPVGWLVTSGRSRRSHRCAGRRRRWLELLWPRAQVAKVVGGTYSGQTTAVGFNQGARGAPLGDVEAMRARNREMVQWVTRSTCSGGVTNSGERDRTVPVGLVLGSSLGKLHGLSRKLSEGLDREEVGGIGLATVGALGRL

SEQ ID NO: 52587 - protein, 136 aa, Zea mays
  Coding DNA Sequence Number=SeqID_9212
MGKPVQSLLMLLLSRVTALVPTITEMGDHVSGRVSGKVCGQVHSGKRSGLRLGLPLKGFSRYSRGFARLVRQHGSSNLISCEKQTIRIEFLSLQVTALVPTITGMGDHVSGRVRGYVCEQVHSGFNNIMLKEEKLS

SEQ ID NO: 52588 - protein, 63 aa, Zea mays
  Coding DNA Sequence Number=SeqID_9213
MAKPLPPTSARSEPTDCNLADGEYMLIPKQGVDREGVQEPAPEPATEDVPAAPALEGKPRFYA

SEQ ID NO: 52589 - protein, 238 aa, Zea mays
  Coding DNA Sequence Number=SeqID_9214
MEDFEEFQDYDEFLFILSGKPPMVRTIQTTRTNTNYIPPPRQVLVYPVVVKEIPVDLPRIRVVNGVILEDNSEEFLPTPTPLAESLAFVAGSSSSAPPAPAVQDPAPGGDDPDDFGDDDEDDEDGEEEEEEENINEEANSEQQDHFVGIWHAIEHYTSMFETGHFPNLLQDVLHALGTYVRPLYETRRVCEPPRACYYITRIHVRVMDAGDRGFRTLSAHESLTPLSTYTASVSDAAR

SEQ ID NO: 52590 - protein, 209 aa, Zea mays
  Coding DNA Sequence Number=SeqID_9215
MQAACDRTKGAHPFDFDASSMEAQAHTSCNQFAGCYVQETAPPLAPLPCLLDCGTSTTARGNPVHDPIVPTRHIGHGSISRGRRRDDRYGQKWAGSNGGGRRAEAAGPGKGIPRKGSFSAKKAGLSPLLIRGSKAGPSEGFNSRLRALGLRAHYWSEVRRPAPQKGSAAASGHSGSAPTTDQGFVGWPSKGSTATSDAERGMTLGTFDT

SEQ ID NO: 52591 - protein, 766 aa, Zea mays
  Coding DNA Sequence Number=SeqID_9216
MPTSSSSAAATPPADASSEETLSTLAMEELRAGDTVDFGVSRMSSVRVQDMQQLGYFGGGVARVPGTEEVPEPEGELVVFETFFAAEGTVEDHPGLPVAEMCSHYYSAYPQFEVAEEDADEGALRCATGLSSGRDLVEEFVAYGVWPLAHGWALGEVCPRQMPSRGGMLVRSPAFALDLHSRDPAAFVCEAEDGAVRIVGRYMPKTEGQRSWDIRGSNDRLYRVFELNRLPYGGYPGEDDVDRRGKKPAAETGDDPAPAAASSSKKRKLGIATGGLGVSDGFARELMRTCAAPGGRMSSPELRESSARMLKVTGGWWPKNVPIPRAVGEDFFTSRMVRDWRVFPYGRNIAAVVSAVMDKDRQGAAQKRQAVVRLPEARPKRSWGTAKAAAPGGSQPTLAAKSAAPGSSRVPEAVKATRAGGTKPALARAAKARELPPPGKRVADFATEISVEDYLVGKSAGGEIPALTAVKDEAGAVSRRLKEALSQAADFADRVASGALTAVVSAEVERLRAQHADAVREKSAADSKCRKLAEKGSLARQRAEEWEERFNALQTHVERAEASTRTKAERMRKQLMDSYHELGARTVDFEVPEQEPGLLCLEWLQEELLALLAIVEGFMSYASLVTCEGAMNALSREGCRHYEVFDQSDEDFEREIYKVEDPMVKESAGALFDRMWGPHGREVVRERSDTARARSLIRSRTRWRLCPKIGPAPPPETVEGAPDAPAATAAGSGSSPTAAPRAEDPVKMAAESAAEDPAMAGSSQVA

SEQ ID NO: 52592 - protein, 142 aa, Zea mays
  Coding DNA Sequence Number=SeqID_9217
KRYKLLEDGSYYMNTRYLFEYNANDVVADAMYYARIQAIKAWYRVSADDRPMPNTKAKWSSIYLTEEQYLERVIGPCEGGGLPLSLVPFLKGTEETVVLSRSTTTVAMDMCAWLSKWLGIFDSTIDSWELRRRGQHSTSSSS

SEQ ID NO: 52593 - protein, 91 aa, Zea mays
  Coding DNA Sequence Number=SeqID_9218
MTAVTSPPLLIVLTGKQHYSPRSDYCANPQGKTDDRSSASPDLKPRPQPQPRAQQGAPPRPTPGLGLSLGLGGITASPDPRPRPRRSRRLA

SEQ ID NO: 52594 - protein, 136 aa, Zea mays
  Coding DNA Sequence Number=SeqID_9219
MRVTNRGIGTHRPLSATQRELAAPEHRTVVLRRRTHCPAPPCSRVEDLRGLRTKIHTDVEETVDTDPPTRKSRAPSVAADAEDETRTGRAFIHRRGELKTEILGRPQAPNGPSELHLNSACAVRPSPREFCVLLSP

SEQ ID NO: 52595 - protein, 224 aa, Zea mays
  Coding DNA Sequence Number=SeqID_9220
MAERYQLPRSCAPPALRRKDGGYPPSGGLEGGKTRCIREREDMVAFQGGHPPFKGDCPYLRPQPSRAESSPTRSKALPCGAGAGSHMSCKPAQSRRSQTVVRGAHNRPAVTSDPPLLPRPTGERGGRPCRRHATAPSGRTSPTPNTPSMEAQAHVSCNRRSRRRFAFAVITAPKKGPGKGDTPKRILPCEGTRLRATLLIRGSKAGPPEGFDSRLRSCGPYTHY

SEQ ID NO: 52596 - protein, 138 aa, Zea mays
  Coding DNA Sequence Number=SeqID_9221
  Subcellular localization annotation: CTP_CleavageSite=83; ConfidenceScore=5.31e-01
MRSKDLRSEGRRHHHARAIAARVFSGNPARASGSAGRPGASASRPPRATARPEAPRGFSWSTPASVPLTNDPVRLRPTRSPFRANSAPVHADIATPGLGSSKSGQGVPLTKLEEPRTTRPTEPRDSYASGIRIPHSSP

SEQ ID NO: 52597 - protein, 258 aa, Zea mays
  Coding DNA Sequence Number=SeqID_9222
MGSTKGARDNRRQPWSGASDCLRRFAIIHRTVSDAPEESDSELASFGFQLRYNSPDMSGAHRTVRYLLGDIANYFLGMMVCSLDKSSLHPRGPGMDYSTPAGSRWKLAPGSHTCGSDHLYSKRLASGGGHLCTNGSPAAAATFASVACRRRRPPQHVRRGPRPRPPTGVRLRPSKNATTTSTTYDVLYDPPGSVGAVRPAAQGTPQMWWTCAWRDRRPCGGRTATPRLVAGGSVGGGTKTIKAKEMEAQHGLLPTPKS

SEQ ID NO: 52598 - protein, 317 aa, Zea mays
  Coding DNA Sequence Number=SeqID_9223
  Subcellular localization annotation: CTP_CleavageSite=47; ConfidenceScore=5.27e-01
MTRGPRPLCQRLGCRFRQGQRGALSQAVACFFTRRFACSTNRNRRTKCMTCGHGPPCQRSDDWLRRSRGGVLPRGGSMLPVRWFAFLTVSRGKDEGGALPRGGSTLLVWRFAFFALEDQRASCMTCGTGPPCHGMDTPVCIGGGFSRRFEAGAGEFAFKEGFIPRVAAMSCFSPTRDVLSPPSSPRPFASRSLLRVAVVTMALLDPCNRFQPEVALNLARNPLGWGVLAFAGRTCAAVSPLGDLAAKVFVFFVSKLPSGLALPIPSFFVQLLEGLGPHLLPVVSCFILQAAIVAYLREVSVEATLLPASSSSIRGEG

SEQ ID NO: 52599 - protein, 84 aa, Zea mays
  Coding DNA Sequence Number=SeqID_9224
MEIVLKDAEIEEPVVEDHARDDVEDDGGDNVGDDAGDDAGGDSGARDSGAGGDSAAGSGTSRVKRTFCWTTSRASTRISGFDKA

SEQ ID NO: 52600 - protein, 155 aa, Zea mays
  Coding DNA Sequence Number=SeqID_9225
MWAQGQNGRKDHAAQRPYVRLRPLAYVTGSRPRGTIGALPKRGAEAHVVWSGHVSAPDPRLALIKAWVFFVLESRDPAVSGPDPTSRGPGPVPGVQFVPVEVLDLARRGDTADRANLTPQDLLTLTIFVLGTCTEEIDFGTVKRPYMGSLPRYAR

SEQ ID NO: 52601 - protein, 97 aa, Zea mays
  Coding DNA Sequence Number=SeqID_9226
MELPLDAQSSGRRLDVDERVEQCRVVVGVLHDLARFVLVLQMQHLRGIHTYREEAPRTELLGSRRRLGKGERRYGGLLTPRPIINPKAQSNFGSNPN

SEQ ID NO: 52602 - protein, 350 aa, Zea mays
  Coding DNA Sequence Number=SeqID_9227
  Homolog annotation: Hit_ID=Q6J9V9; Match level="QueryCoverage=33%, HitCoverage=41%, E-value=7e-52, Identity=86%"; Hit description =Putative uncharacterized protein
MENGLELLLVFACGPPTPVVAGGGHHSLRKWREHPVVVLEINHWFCHPLFEDTREAGMYCDAHPDLSWRVQPPARTAIRLLHIRRRDEELCGEEMGPQVPVGVNPQKPLTNHHKNSRLRDGVGVEVMQLHPVVMRERPHEAARRHPKPPLMEGGETDHVPQRRSRVGLIPRSHPLRLRLAGERTEQTIGNKGLQILHSNGGERPWVARRNDGRLVSHRQAEAVEAEGMRDRERGYFERILLSEGNGPQALLLIRGSKVAPCGVRQLPQSTRAPSPLLIRGSKAGPSEGFDSCPRACRVRDDPGYVRYMAEAQATLPRYPKTFPRPAGTICNGIPLEGGTEPSDPIKWVRV

SEQ ID NO: 52603 - protein, 290 aa, Zea mays
  Coding DNA Sequence Number=SeqID_9228
  Gene Ontology: Mol. function=transporter activity; Cellular component= integral to membrane; Biological process=transport
  Homolog annotation: Hit_ID=A2WNH2; Match level="QueryCoverage=37%, HitCoverage=29%, E-value=3e-43, Identity=74%"; Hit description =Putative uncharacterized protein
MAGSDNRRFGRDMVSSSTHFSQSQMVWVGDHVPGGRVDLQCGVNKGTRHQNEGKQESKRPRESQSTRRGTRELGIVKRARGDELLRFMDGASKEPLRKSTCSVPQFDSEKKQIFTFIAIKQDIRDLKVAKEEQDIGFYAGFVGATYFLGRAISAVPWGMFADKYGRKPCIVISILSVIVFNTLFGLSTTYWMAIVTRGLLGLLCGILGPIKVTSSRAIALVIGPAIGGFLAQIELAIYLFSYTSNGALGTPSMANTATSITSVLADARRVKNVGTHVLKVKNVGTVELIV

SEQ ID NO: 52604 - protein, 52 aa, Zea mays
  Coding DNA Sequence Number=SeqID_9229
MAMMGSTSEKMYLCQNKITRSGSGEMARIACTLHGKRLDGGVSVLSVGVNLI

SEQ ID NO: 52605 - protein, 69 aa, Zea mays
  Coding DNA Sequence Number=SeqID_9230
  Subcellular localization annotation: CTP_CleavageSite=30; ConfidenceScore=5.01e-01
MVKNFGSKTVQIAMNAVVTSHLLVCLYSTAAFENKSPTVKKQQTFVASVPRWYQKKRIKTKAAGGKVLR

SEQ ID NO: 52606 - protein, 190 aa, Zea mays
  Coding DNA Sequence Number=SeqID_9231
MDSPFASRPHRLGIQCSTDHGCHRAVTALSGELVGGEEFGLSRAQLIIRMGQRASPGIKEGWRPKSGEDDLGSPVKFCRVRELGKLHKLLAKLTERLAWLGSDWSGLATVAEDRVAMAGGTELAGAKEGRMAGECEHVASAGEHGRGWGSDKCSKHARENASARSGAWHDVEHEAAQREVEFKHGLAPNL

SEQ ID NO: 52607 - protein, 76 aa, Zea mays
  Coding DNA Sequence Number=SeqID_9232
MVTSSLMVGESEPGCGLCPSLSLKDFHHQGWGGECAESSLGMGGGLLAAAPAVRSVLPLFGPPEQKSSPSPLLEQA

SEQ ID NO: 52608 - protein, 168 aa, Zea mays
  Coding DNA Sequence Number=SeqID_9233
MAEGLTGGEVAPGTIDQLNGSGSFTRDQGRCEREEFENDSPNCSVYARPQRPKSGEGDLGSPVRFCRVRELGKLHGPLAKLTEGQAQLGRGWSELATVAEAWVVMAGGGELTGAKGGVSGQRGLAGFADRIKRYGGVKLGLSHYRAQREDPGFDVSRARVLMPSSGMR

SEQ ID NO: 52609 - protein, 305 aa, Zea mays
  Coding DNA Sequence Number=SeqID_9234
  Homolog annotation: Hit_ID=Q6J9V9; Match level="QueryCoverage=25%, HitCoverage=43%, E-value=1e-09, Identity=40%"; Hit description =Putative uncharacterized protein
MEAQAHASYNRRAECFVHATAPPLAPPPRLLDCGTNTTTRGNPEHDPAAPAWRDGGASGRRSGRRFAFAIMTASGKGPGKGDIPKRILPREGTRLRASLLIRGSKAGPSEGFDSRLRSRGPYTHYWSEERSCKGIPSEGGIEPLDPVARGPGLADHPQLTGKHHVRRPSRATWRFPPSSSLRKGDAGAARTRAKPRKTANSTPPDPGLRLGLSPGRRRTPLCPTQGSDSGSTPEDDELRFARPQGSDSALASADGLRFARTRGSDSTSATEDRFDLGFGGASTSPNLGRRPVTSHRRRHHHPTPS

SEQ ID NO: 52610 - protein, 218 aa, Zea mays
  Coding DNA Sequence Number=SeqID_9235
  Homolog annotation: Hit_ID=Q6QP51; Match level="QueryCoverage=24%, HitCoverage=23%, E-value=5e-10, Identity=64%"; Hit description =Putative growth-regulating factor 1
MFGALRGQHGAFPPSSLRKGDKGAGRGITKSIKTSEESNHSSEASGATPGGRQGRSDRSHFALSLTDLIGKQRRSPRSDCYATQWGETDNNRVQPRAQQEAPPRPTLGLGLGRRSPPRPILGLGLSLGLERNHVLARPRPRPQEKHFSDGPVIAYTGLKHFSDSHIGMYTGLRHSSARHEKKKKRNYEQYWAESGPSRPRNRRKRAYAVHFTQGTLTV

SEQ ID NO: 52611 - protein, 212 aa, Zea mays
  Coding DNA Sequence Number=SeqID_9236
  Gene Ontology: Mol. function=hydrolase activity
  Homolog annotation: Hit_ID=A2YJE5; Match level="QueryCoverage=25%, HitCoverage=18%, E-value=3e-11, Identity=58%"; Hit description =Putative uncharacterized protein
MEDLSNMTLTIVIGKIAAFEMSRKMSRGEEPTSSRPYAFACDERKGKKKAPTPSSSSEEKEEEESDDDEDNQPCTSSSEDEETIRRVGKPAATCPPPALRHACPTAPPRAWAGWYHAVLAIKRRCCEHLDPQPINPFLGVPKSFPGVKPEFRDARAPASSSFEPLLHRRGSLEPDRRAVVLLNKADLVDPSETEGMSKGSVRLILDWSPNVV

SEQ ID NO: 52612 - protein, 260 aa, Zea mays
  Coding DNA Sequence Number=SeqID_9237
MARLRHTAHKSVIPFLPSRLAERRLRRTLEAPPAPPRDAPAVGGATGGGPGGDPDDDDSDHSTESSEPQEAEGWVARPITRDAARGCHFHDALDTLLRQAFDRHTWSIEYRCVIYQHSRGRYPDRWEATCLVRRSKDDLRGAEAFSEHYSISERDTAEAAMQDAARTESVVVSPVGEDNPRLSSTINLVAVLNTELDHSLDELSRARTEIAELRAELAERRHQEGGSPAPVGTQHPYRSPPRGHHTYGSPACKTRIDLDP

SEQ ID NO: 52613 - protein, 129 aa, Zea mays
  Coding DNA Sequence Number=SeqID_9238
  Subcellular localization annotation: CTP_CleavageSite=45; ConfidenceScore=5.32e-01
MELGFRFHSSVASRWGQRGFVGFHSGVLQSARTPLRSIKPGYLVRPSSIGTLVFDRATRAKRRHRQERGRSSIGPWGGDARSRGHLLMLVDVSLDLAYRWEASNCSSESPPPRQSPPTVAVCLRAIIAG

SEQ ID NO: 52614 - protein, 169 aa, Zea mays
  Coding DNA Sequence Number=SeqID_9239
  Gene Ontology: Mol. function=carboxyl- or carbamoyltransferase activity; Cellular component=ornithine carbamoyltransferase complex; Biological process=amino acid metabolic process
  Homolog annotation: Hit_ID=Q8SA97; Match level="QueryCoverage=36%, HitCoverage=15%, E-value=3e-10, Identity=55%"; Hit description =Ornithine carbamoyltransferase
MDAIPPEVEVESEPWGRARRRPPSEVEVEAEPWGRARRRSPSEVEVEAEPWGRAKRRPSSEAEAGAEPWGRARWSFLWRLRLDSAAVSLTLAGGIAVGAGQAALFSCQAILALNASAIWSVGEVIWPRLLHCEACPSWASSESRSHPSLCVFWGGCRTLRGASLRTPDQ

SEQ ID NO: 52615 - protein, 281 aa, Zea mays
  Coding DNA Sequence Number=SeqID_9240
  Homolog annotation: Hit_ID=Q6J9V9; Match level="QueryCoverage=54%, HitCoverage=44%, E-value=4e-22, Identity=44%"; Hit description =Putative uncharacterized protein
MQVACNCTTGAHPFDFDASSMEAQAHTSCNRRAGYYVRKTAPPLAPIPCLLDCGTGAATQSNPAHGPTVPTKRIGHGDRKGDISKGILLREGSGPRAPLLIRGSKAGPSKGFDNRPEHSGFRLITDQRFEGWPLGRVRQPPQSTRAPRPLLIRGSKAGPSKGSTAAPEHAERGMTLGTSDTWPRLGLRSRGTLGHFRDHQERFCNGIPSEGGIEPSDPIKRDRVRQITCRGSGAALANPAPANPLTASTNQPENLEPDHAPGLRSDCMREQPDRPKHHKRH

SEQ ID NO: 52616 - protein, 137 aa, Zea mays
  Coding DNA Sequence Number=SeqID_9241
  Homolog annotation: Hit_ID=Q6J9V9; Match level="QueryCoverage=53%, HitCoverage=25%, E-value=9e-12, Identity=60%"; Hit description =Putative uncharacterized protein
MEAQAHASCNRRAECFVHATAPPLAPPPCLLDCGTNTATRGGAFGRKSGRRFAFAILTASVKGPGKGDTSKRILPREGTRLRASLLIRGSKVGPPEGFDNRLRSRGPYTPLLVRGSKAGPSEGFHSRLRLLGLRAHY

SEQ ID NO: 52617 - protein, 728 aa, Zea mays
  Coding DNA Sequence Number=SeqID_9242
MSSPELRESSARMLRVTGGWWPRNVPIPRAAGEDFFTSRMVHEWKVFPYGRNIAAIVSAVMDKDRQGAAQKRQAVVRLHEARPKRQRGAAKAAAPGGGKPPLAAKSGGPVFSKAPEAATGAGGSKSMKAVPPSSRVSEVTKAARELPSSGKRVADFATDISVDDYLGGSDEGQLAIVAPAAAAMAAAVVPKAKGGALSAGGEMSALAAVRDEAGAASRRLKEVTEALSQVADFANRTASGALTAVVSAEVERLRTQHADAVREKSAADSKCRKLADKVAALEGEKADLRRQLVGERRETNEALAKAQAAQMEANLARAEGNLARERAEQLQERLIALESRVERAEAATRVEAERTRKQLMDSYHELGARTGDFEVPDRESGLRCLEWVQEELQALPTIVEGFMSYASLVTCEGAMNALSREGCRHFEVFDQADEDFERDIYKVEDPIVKESAGAIYDRMWGPHGREVVRERAETARAQAARGERVDDFGVLNSALPDPESNPAEAVSGAALEPPPETAEGTSDAPAAAAAGGGPPLEAAESVPDAPVAAAAGEGLPPAAVPRVEDPATVAVEVQDFGPAHATATTNFLAASTVDGINKSDGSTSKFSDFGDSGSSVEWTEESSDEDLDYFAALDVAVAEASPCAADTEDVPGPSTGRRRRRAVAKRRVSGAEGGRLRVNRASRQELLSLPAAASTGEGELRSLFAGEELRIMLFNYREMEIIPKVEPM

SEQ ID NO: 52618 - protein, 196 aa, Zea mays
  Coding DNA Sequence Number=SeqID_9243
MDQYIRADNDFRQRREEAYRFSEGLRRKNPPEACQLQEAEAPGASEEDMGISQGRSTAYFVVKTRAILQECAKSPFKSRRRSQKPKPGKINRSRSCTLLRVTHPTYQNMRVIILQLLLLWLVSHRLLGHSFHLRHHYNLPIHEDSNQKGANRPISSEISGRNPKLAQSTVLCQNQNTSIERYPTSEAFLHSLSFSF

SEQ ID NO: 52619 - protein, 245 aa, Zea mays
  Coding DNA Sequence Number=SeqID_9244
MDGGEVASGVDCTIISGTRLTPSKCEDNTRHVPRWGAGVVDSLWTDSRRGAASCLAMVASSPPPAVRRVARLTRMLLFRHGGKTSSSSPPPGELMTVVVAVAPRGEEYHVVAAIEGHELETPEAEHRPGLKRLLKTTHLELNGKVFVNTQQAPTWRANCRCFGPGGSLDRPVNLSLRAPVQMGWRKMEHKGKRGLYYLAPGGNDVSPVVRSVRAQDRARRRLLLRPRLGLDEDAIPPETEAEAEP

SEQ ID NO: 52620 - protein, 165 aa, Zea mays
  Coding DNA Sequence Number=SeqID_9245
  Subcellular localization annotation: CTP_CleavageSite=36; ConfidenceScore=5.49e-01
MNAVVTSQLLVSLYSAAGKKAKRRNCYTRRAVTRTRCAVDRKDQTVTPQGGTDTRSEVGSFLRNELREGVFWTFGFPKLKRLFSRVKLVTKNDLAPRKGLLLGSCFGAPKVSHEEAASAEVVSKRWPKENIAARPAPTAMPPIGVRLTTAEFSFGHNRKLRLARP

SEQ ID NO: 52621 - protein, 106 aa, Zea mays
  Coding DNA Sequence Number=SeqID_9246
  Subcellular localization annotation: CTP_CleavageSite=66; ConfidenceScore=5.51e-01
MQSARNRDKWAHPFDFQRTQHGGPGPRVMQPARRLLRASNCTATRTTTTPPRLRNQYHDLRQPCVRPSSASQARRSIRPKMGRDRERGIPQKGSFSVKETGPEPPY

SEQ ID NO: 52622 - protein, 37 aa, Zea mays
  Coding DNA Sequence Number=SeqID_9247
MPPLCLHPSLFALPPRSLLKCLLPCKLLGDGSKILKF

SEQ ID NO: 52623 - protein, 378 aa, Zea mays
  Coding DNA Sequence Number=SeqID_9248
  Subcellular localization annotation: CTP_CleavageSite=51; ConfidenceScore=5.29e-01
MAANTAKGGPAVMTVADAREQRARRQPSSRPIRGQRESPLSRCEDNALVIRSSNGSRTRNGCPANYSPRCINSTAGQVALLAGATGDASPSPKQPHQKGVRRLAPEGFIVASDAERGMTRAHRRHHVRCPSRRLGGCSRKPSSGRTVDSVNMPARELGPRPYTRATASSHEGTTRPAEALRKALRPRRSETTPPRPRGLHPAGALARHNRNQMQPRKAGPLAKKCDESLQASANTPFEARGLLSGTIIRGISPYERLDHASPEPSLGQGQPTPKGFPSRPRPPFNGGHISGLPEALPSLEATLTESAHRPAKSQEHLTQRKPGPAKGTIGSSARPRAQTRAKPRKTANSAPPDPGLGLGLSPGRRQTPLRPAQGSDSG

SEQ ID NO: 52624 - protein, 294 aa, Zea mays
  Coding DNA Sequence Number=SeqID_9249
MVTSGLMVGRSKSGCDLGPTLSLKDVHHPRWGGGRAEPALCLPRGSVGHPLPQHSRERALTGPAGGPYFDNAGLVDGRRRHLQRVGFVGLAPGGPFCRRAAAAPCTREDHPRCRALLERRSCSGAGAPLAREDLSGDLPEGWWALPSAPRQRRLEKSPSPMGSPPPFALRASGSLYLSSPLERRRGRGQDCSSAYPEACTAAVRPPRVGAVVVVVRAGGGEPLVSLLLLRRPTPMEWGCSYLRRREPEFRFVMALRMPESLGSVGLAVRGSSSSVKGTPRPLFDEPRPGVAISV

SEQ ID NO: 52625 - protein, 100 aa, Zea mays
  Coding DNA Sequence Number=SeqID_9250
MAREIHGRQICAYLFLSSPQREIQVKHEELLEYAQSGINGERSEIAEIEAASTGEAARLRAALWRAPPGAVRQPHQPFERLTQTCFDKSQAAILPFRTTT

SEQ ID NO: 52626 - protein, 219 aa, Zea mays
  Coding DNA Sequence Number=SeqID_9251
  Gene Ontology: Mol. function=carboxyl- or carbamoyltransferase activity; Cellular component=ornithine carbamoyltransferase complex; Biological process=amino acid metabolic process
  Homolog annotation: Hit_ID=Q8SA97; Match level="QueryCoverage=67%, HitCoverage=20%, E-value=2e-17, Identity=45%"; Hit description =Ornithine carbamoyltransferase
MALPVDVAGLCPRLGDVEAPPKPGSSLSSMAEAEFEPLGRARRRSSAEAESEPLGRARRRSFAEAGSEPLGSGEAEVVSRGRVRAPGSGEAEVVRRGRVRAPGVGRSGPESEPWVGRSGVRRLPGLSPSPSPGSGGAEFAVFRGLARVRRLPGLSLSPSPGSGGAEFAVFRGSARVRRLPGLSPSPSPGSGGAEFAIFRGLARVRALGRAERSSPSSGA

SEQ ID NO: 52627 - protein, 267 aa, Zea mays
  Coding DNA Sequence Number=SeqID_9252
  Gene Ontology: Mol. function=kinase activity
  Homolog annotation: Hit_ID=Q6QP54; Match level="QueryCoverage=44%, HitCoverage=27%, E-value=2e-09, Identity=53%"; Hit description =Putative kinase
MAPLLRGRSKLEVGRGGDPSEVEAESEPWGRARRRPSSGVEAESEPWGRARRRLSSGVEAESEPWGRARRRPSSEVEVESEPWGRARRRPSSEVEAESEPWGRARRRPSSGVKVESEPWGRARRSPSSEVETGAEPWGRARRSFLWHPRLDLAVVGLTLTSGTAVGAGQATLFSCQAILALNAPAIRSVGVAIWPRLLLREACPSWASGESKLCADGGYQLRLGVLGLVAIGGEAVEAHELGLPYLLPGQDPTQSLLENADSTMASI

SEQ ID NO: 52628 - protein, 161 aa, Zea mays
  Coding DNA Sequence Number=SeqID_9253
  Subcellular localization annotation: CTP_CleavageSite=30; ConfidenceScore=5.45e-01
MALSPPPPCGKATKGRMKKSSQSLTVLSLCAEARENSAACPAPTAVPLARVRPTAAKSSLGRHRKLRLARPQGSAPVSTSDDGLRLARPQVSDSTSTPEDGLRLARPQGSDSASTSDDGLRLARPQGSDSTSTSDDGLCLARPQGSDSTSTPEDSLRLARP

SEQ ID NO: 52629 - protein, 432 aa, Zea mays
  Coding DNA Sequence Number=SeqID_9254
MHRVLPPSEPPDGERPRCFRLAVVGGTQLRGSWYLSAIAQLQGFSSGSPAASPCRWSPKTVTTSLMVGRSKPGCDLCPALSFKDLHHPCWGGGRAEPELYLPYGFVGHLLLQHSGEKALTGLAEGADFDNAGLVGRERRQLQRIGLAGSAGSGSALGAPSRCRAECGYPAAVRGHAARTGGPPKTSRAARAAFVFLGCPALAPVRRLRAEVGAEVVAAGEVLVTDEIAATIRALGLRLFGFDSLSSPLEWGRGRGPSNSSVYPEVIAADVWSPGAEVVVVAAGAGVGEPPGVLSPRRPSNVGGCSYLRGRNRSSVCNGTLSVGVYSSWLSRPEHPEPEAAVSARTEAELARKEDFLGPKAGDFSSRGGVHRRLEPGQVVHWRDQRWSRAAEAMGRADVLGGQLAEASGRPVQPSAWAGFLEETLAATDQARC

SEQ ID NO: 52630 - protein, 231 aa, Zea mays
  Coding DNA Sequence Number=SeqID_9255
  Subcellular localization annotation: CTP_CleavageSite=56; ConfidenceScore=5.80e-01
MPAHAPLRPLDVVPSHPQFPPPPRFHPSLVASTSRVVVSPSLTEARKRSTQANPSRRAHGESGRDEEPVQDVFQQRLRGVLAGEQIRKAKLMSLNCFAANCDELRSPSPSILGKSCNRGNLSAARPPQSPFSFSSHWNLAEHWPPVTIITVHGRPDVSPVLIQAIFVLEWILCLLLLGAFVFRRNLRTRNKAVHNMKSMVEMKVEPASKLRARELRLNGRKRNRLKGEKAI

SEQ ID NO: 52631 - protein, 409 aa, Zea mays
  Coding DNA Sequence Number=SeqID_9256
  Subcellular localization annotation: CTP_CleavageSite=39; ConfidenceScore=5.59e-01
MPSHFPHASCPSAFRAPGWGAPAPAASPHQWSPKTVTTSSMVGRSKPGCGLRPALSFKDLHHPCWGGGRAEPELSLPYGPAGHLLLQQSGKRVLTGLAEGTDFDNAGPVGRKRRQLQHAWFAGSAGSGTASSATSHRWAERGDLPAVRAAVVPRVLGDRPRRRALLGRRSCSWVVLPSLRHDASARRSVLARPGGFERGSAGGRVDTAVGAKVVAAGEGLVADEIVGAICAPALRLFGFDSLSSPLEWGRGREPCRSSVFPEVIAAAVWPPGAEVVVAAAGVGGGEPPGILSSRRLSDVEESLGSVGLATRGFSCSVKETLSRSAMSQSRRQQCERGQRRSWLEKKLRRPEPGRVVHWRNQPWSRTVEAMSRAGVLGGQLTESTERPVQPSTRARFLEEILAAMAQAQC

SEQ ID NO: 52632 - protein, 143 aa, Zea mays
  Coding DNA Sequence Number=SeqID_9257
  Pfam annotation: Domain name=Arf; Domain location=6-124; Score=-94.3; E_value=0.023; Accession=PF00025.12; Description=ADP-ribosylation factor family
MKENHDLTMYHKTYDEAKILFVGLDNAGKTTLLHMLKDEHSGAFLSLLLPPQAIDDFFSCRPGDGACDHVGLLPEVELEVVKLLLVVDERRQCERLLLVVFVRGFQDECPSGQGVTLHKIVTAIEGGVSVAKAQRLWKAVVGP

SEQ ID NO: 52633 - protein, 532 aa, Zea mays
  Coding DNA Sequence Number=SeqID_9258
MKILEAERWLKGTNSCGVAFPPTTRRKDCGYPPSGGLEGGKARCIREREDVVAFQGGHPPFKGDSPYLRPQPSGAESSPTRSKVLPLRRGGWVPHVMQAGPEQKKPNRRARCVQPPSGLQAALHFCPDQRAKGRAAVQAACNRAKWAHFSDFQHAQHGGPRVMQPARRMLRASNCTATCDHYRASLTAEPIPRLEATQRTTQQRQPGATVNAAKNGPAVMAVAGGQEQRSRRGASGRRSERRFAFAIMTASKKGPGKGDTPKRILPREGTRLRASLLIRGSKAGPSEGFNSRLRARGLHTHYWSEVRRPAPRKGSTAASGYSGSTPTTDQGFEGWPPKEAREAALANPGSGQTVDNVNIPARELGTRPYTRATASSHEGTTRPAKALREALRPRRSQTTPPRPRGLHPAGALARTHRNKTQPRKAGPLAKKCDESLQASANTPFEAWGLLSGTIIRGTLKAPNSQLVTPISIKLQRPDGRHRKLRSARPRARTRAKPQKTANSAPPYPGLGLGLSPGRRRTPLRPTQGSDSG

SEQ ID NO: 52634 - protein, 72 aa, Zea mays
  Coding DNA Sequence Number=SeqID_9259
MEVWDGLEQLNELDNDVLYDNFSEKEIKEALFQMEKIKLMVLTAFLLSSIKSVGTLLKKILSISFMIFMLGI

SEQ ID NO: 52635 - protein, 166 aa, Zea mays
  Coding DNA Sequence Number=SeqID_9260
  Subcellular localization annotation: CTP_CleavageSite=83; ConfidenceScore=5.11e-01
MDVSNLFGSSPLLSRVPEPSILPFYNFSRPIPHTSFPPPRPDPAAPAPKARRHRDSQPTHKRRPCLLFPDSAAAIPVLTLAPRCRMPHALLYHLSQRRQTGFERSGLGGVGQIYFMLSSIAACGKRTHCSCSQGLRHSLLPILLIDACSIPSGDAPAGRQRRRMRQ

SEQ ID NO: 52636 - protein, 161 aa, Zea mays
  Coding DNA Sequence Number=SeqID_9261
  Gene Ontology: Mol. function=transferase activity, transferring nitrogenous groups; Cellular component=endoplasmic reticulum; Biological process=biosynthetic process
  Homolog annotation: Hit_ID=A2ZEQ2; Match level="QueryCoverage=91%, HitCoverage=58%, E-value=8e-49, Identity=89%"; Hit description =Putative uncharacterized protein
MLAISTAFDVVERTSKDNNKTLQRTSNTTRCLNLGSYNYLGFAAADEYCTPRVIESLKKYSASTCSVRVDGGTTKLHNELEELPARFVGKPAAILFGMCYVTNSAIIPCLIGKEIIQHLKHSCPPHLYATSMSPPGVQHVISAIKVILGEDGSNRAVLMFD

SEQ ID NO: 52637 - protein, 269 aa, Zea mays
  Coding DNA Sequence Number=SeqID_9262
  Gene Ontology: Mol. function=carboxyl- or carbamoyltransferase activity; Cellular component=ornithine carbamoyltransferase complex; Biological process=amino acid metabolic process
  Homolog annotation: Hit_ID=Q8SA97; Match level="QueryCoverage=42%, HitCoverage=21%, E-value=1e-09, Identity=44%"; Hit description =Ornithine carbamoyltransferase
MALPVDVAGLCPRSGDVGAPPKPRSSLSSVAEAEAEPPGWARRRSFGRGQGGVRALGSGEAEFRRLLGLSPSPSPGSGGAEFAVFRVLARVRALGSGGAEFAVFRVLARVRALGSGGAEFAVFRVLARVRALGSGGAEFAVFRVLARVRALGSGGAEFPMAPLARPDCLSDSLCRVALQSEWRRRRCPSVRLLYADGGYQLRIRRLEGKKVNRQDFYTRQTVARTRCTVGRKNQNSEPAWWDRYALANCIVSRQRAQGRCFSDLRLPEA

SEQ ID NO: 52638 - protein, 304 aa, Zea mays
  Coding DNA Sequence Number=SeqID_9263
MSRAARAAFVFWGGPAFAPGWRPSAEAGAPLVWEDLSGDPPGGRRPPLSAPRRRRLEKSPSPTGSLPPSAPRASGSSYLSSPLERRRGRGQDCSSAHPEACTAVARPSGSSSLVKGTPLPLFDEPRPGVAISVRTEAELARKWEPGWPEPSRKMLGRGPRGNRPSRLLGPDSRRSPWTASPSEAGSDLAEGVVDAEGATAPFSVKTRACRIRSSCSVCLLRPPRPENTPSLRCKAASPFLLFRASGLSVGNRDVCVGESCFSRKVMSEKVMSEVSVSRRRRSPSARSALAAYVYSVVSRIRFSK

SEQ ID NO: 52639 - protein, 216 aa, Zea mays
  Coding DNA Sequence Number=SeqID_9264
  Gene Ontology: Mol. function=transcription factor activity; Cellular component=nucleus; Biological process=regulation of transcription, DNA-dependent
  Homolog annotation: Hit_ID=A7PFK0; Match level="QueryCoverage=70%, HitCoverage=43%, E-value=2e-68, Identity=79%"; Hit description =Chromosome chr11 scaffold_14, whole genome shotgun sequence
  Pfam annotation: Domain name=AP2; Domain location=154-207; Score =23.9; E_value=0.00058; Accession=PF00847.11; Description=AP2 domain
  Pfam annotation: Domain name=AP2; Domain location=52-112; Score=66.0; E_value=1.3e-16; Accession=PF00847.11; Description=AP2 domain
  Pfam module annotation: Pfam domain module=AP2::AP2; Domain location =154-207::52-112
  Subcellular localization annotation: CTP_CleavageSite=50; ConfidenceScore=5.66e-01
MARPRKNSAAAANNNNSNTTNAGNAAVDLAARVKPKRTRKSVPRESPSQRSSVYRGVTRHRWTGRFEAHLWDKNSWNESQNKKGKQVYLGAYDDEDAAARAYDLAALKYWGPDTILNFPASAYEAELKEMEGQSREEYIGSLRRKSSGFSRGVSKYRGVARHHHNGRWEARIGRVFGNKYLYLGTYGVFIPLDYAAAVRGVRVIKSASRLGMVYSR

SEQ ID NO: 52640 - protein, 97 aa, Zea mays
  Coding DNA Sequence Number=SeqID_9265
MSRAFDDYYIEDCSVILAPKVTQRRIDNSDQFVILATVRVAFVLGHSPKQQRKPEAQRNSACGRRHERGRRDPASPLGARFARSSLGDNRRPFFAGQ

SEQ ID NO: 52641 - protein, 219 aa, Zea mays
  Coding DNA Sequence Number=SeqID_9266
MENPWVIRTSYCSEEEGFPHLLRSCALRLGIRKKPEYVWKEYRENGMENNKNTPTWKKRLQALSGGDPIEDDPTIVYMVGYLHTLDNHYDELSSHCTHLNSRVESLEQQVKELKQEKASLQESLSIVEGEEANTREAYRTLKIDFDKKLKALAPKKKIQKKTTNQGCQTEKKKKKAPLDLPPPRIDDWSDEEDVSPEELKGKSLEKKVKPTSPHLHPYP

SEQ ID NO: 52642 - protein, 150 aa, Zea mays
  Coding DNA Sequence Number=SeqID_9267
  Gene Ontology: Mol. function=transposase activity; Biological process= transposition, DNA-mediated
  Homolog annotation: Hit_ID=Q69J12; Match level="QueryCoverage=67%, HitCoverage=51%, E-value=9e-20, Identity=46%"; Hit description =Putative uncharacterized protein B1054C11.15
MDEEGIIQQQPQEEDSRLERDEDPIIDMTEQSVHIKTRRSATSTISQDKEVKRMNKDSLEGLVGRYLDLKAKQVEDEVTQMAKEKESSQGDDFSIKRCISVVRSMNVIEDQKIKAAGVFDIPNNRETFISFSVDEPETVLLWLRRMMDKL

SEQ ID NO: 52643 - protein, 39 aa, Zea mays
  Coding DNA Sequence Number=SeqID_9268
MVGLQVVMWMMVFYYDYGNGKEGVEADLQEFQDFDEFED

SEQ ID NO: 52644 - protein, 330 aa, Zea mays
  Coding DNA Sequence Number=SeqID_9269
MQASCNRATGMRPFDFDASSMESQAHMLCNQRAGYYVRKTAPPLTPILRLLDCGTGAATQGNPAHSPIVPNQAHRSRISQPQEKARRSIWPKVADSNGGSRRAEAAVKSSAGSRPLLEQQESPLPRREDDAPVFRSSNGSRMHNGCPANHSSRRINSAAGQETFGRRSGRRFTFAIMTASKKGTGKGDTPKGILLCEGSGPQALLLIRGSKADPSEGFDSHLRALGLRAHYWSEPTVEDPEPLAHRTVRCPLQTVGPATRHARIAWPTVGPADRWLTGQSGAPPDSPVIYSRTPPTKPESSQFARANLAHRTVRCTQTEQPFGCTQPTSP

SEQ ID NO: 52645 - protein, 72 aa, Zea mays
  Coding DNA Sequence Number=SeqID_9270
MGYPYSVRREHYRCDPWCQRFIYNYSKSTVRNTVDYSGQEKLFGKSGHARTVRALAADRPRHRLDFDQDQEL

SEQ ID NO: 52646 - protein, 314 aa, Zea mays
  Coding DNA Sequence Number=SeqID_9271
MEKLVPSLLMLLLSRGGVPLDSPTWWQDGRPSHSSNHFLQRTCKKNYATSKAEYTNTQLDLPGYNGSSSLISCEKQTIQIEFLSLQVTALVPTITGMGDLVSGRVRGYVCGQVHSGLNNIMLKRKLSPSPKVNSTRGKEKVGAAYRRRDRSGEGQGWLGEALAVTARCGSTAGMAGIARSTCAGRCSRRRRVYRPNHGDLVQSKGTLDWPVYGDSGSDGRGHAAHGQTAVNWAPVRLERARKSVTDAWEGFIGAGTGQDAGWPLARREARAGVLWQAQGASNTWSLQSARVPQLTQVANVRILAKIRRESFPGT

SEQ ID NO: 52647 - protein, 433 aa, Zea mays
  Coding DNA Sequence Number=SeqID_9272
  Homolog annotation: Hit_ID=Q6J9V9; Match level="QueryCoverage=14%, HitCoverage=21%, E-value=5e-21, Identity=85%"; Hit description =Putative uncharacterized protein
MSCNRRTGYYVQRNRTATCANAASSRDYRTDATTRGSPAHDPIVPIKCDDHESVSRGDRHDSWHDHRRTGSNCSNGRTEAAVQPPTRPWDRERGYFKRILLSEGNGPRALLLIRGSKVVPYGVRQPPQSTRAPSPLIIRGSKAGSSEGFDSRPEHAESGMTVGTSVTWPRLGLRSRGTLGHFRDQREQFVMESHRREAPSPRTLSNGSGYSKSPAEARRLLSHQATAKLLTTSTNQLKNSEPDHATGLRPGRMREQQGQPRNHKKNSDLRGVKPLLRGLGGYTRRVRSRAPIRTKYNRERLVPLQKIWQNLQASAYTPFEAQGLLSGTVIRGTPNTPKHVWKTSSKQTVKTGKYSSKLKPHLPRDAISSRPGPASGKNSSPGRIHALPEGLLREWAHPRLARGQARANFVVQQPWPNRLTTDRIACAFIAGIT

SEQ ID NO: 52648 - protein, 42 aa, Zea mays
  Coding DNA Sequence Number=SeqID_9273
MALHELYDDGGPQLSYGSRTTMTKLRSKLTKLKSAKLKLNRQ

SEQ ID NO: 52649 - protein, 84 aa, Zea mays
  Coding DNA Sequence Number=SeqID_9274
MTVVTAQKWQRDGSSRRGGEGTARAQCAGTHGANRAGERVNGEEMGQTVVGGERAGGLVTSEGREKLTGGAGLPVGAVHGRGRN

SEQ ID NO: 52650 - protein, 271 aa, Zea mays
  Coding DNA Sequence Number=SeqID_9275
  Gene Ontology: Mol. function=transcription regulator activity; Cellular component=nucleus; Biological process=regulation of transcription
  Homolog annotation: Hit_ID=A2Y1S9; Match level="QueryCoverage=86%, HitCoverage=69%, E-value=1e-77, Identity=69%"; Hit description =Putative uncharacterized protein
MPLYSLYGGGSHSHSHLAAAGDHEMPPAPAAAAAGANKSQLSQMLLASSPRSCVTTSLGSNMLDFSNNGVPPAPDQLKSHHHHQSDNSSECNSTVTGSAIKKPRVQASSSAQSTLKVRKERLGDRITALHQIVSPFGKTDTASVLQETIGYIRFLLGQIEALSYPYMGHGNGTSIQNGPTTGERNHAGLLPDQYPGQLLNHNNNTGARQPAAVGQPDEQQQQQGGANNNDETKKDLRSRGLCLVPVSCTSHFGGDNAADYWAPAPLGGILR

SEQ ID NO: 52651 - protein, 405 aa, Zea mays
  Coding DNA Sequence Number=SeqID_9276
  Subcellular localization annotation: CTP_CleavageSite=46; ConfidenceScore=5.03e-01
MNKNTGIQSANSGDDDFCPGGPSSSSDDLRADAAAGRPPPMPKLVRQGRAEGRRVGGRSVGSPGYLVGGRTSSSCRGGSRRRERLRSHSGPRARHAAAASATDGNRPSPRSQREGAGHRPRRGRPQLGTLPSLALVMKILEAEGGAEAASRLAFPAIELEVTILGDRRRRAVVGWVFSNTLQGPPPTAWGLGPTHHASRPRVEEAKPPRAVHATAQRLQAILHFRPDQRAKGRVAMQAACNRAKWAHLSDFKRAQHGGPGPRIMQPARRMLRASNCTATRATATPPRLRNQRAGAAVTSSAKLTSHPGAGPGKGDTPKRILLREGTRLRASLLIRGSKAGPSEGFNSRLRARGLHTHYWSEVRRPAPRKGSTTASGYSGSAPTTDQGFEGWPSKGSQPPQTQSEE

SEQ ID NO: 52652 - protein, 229 aa, Zea mays
  Coding DNA Sequence Number=SeqID_9277
  Gene Ontology: Mol. function=nucleotide binding; Cellular component =intracellular; Biological process=small GTPase mediated signal transduction
  Homolog annotation: Hit_ID=Q9XF07; Match level="QueryCoverage=99%, HitCoverage=93%, E-value=1e-105, Identity=88%"; Hit description=Rop3 small GTP binding protein
  Pfam annotation: Domain name=Miro; Domain location=14-144; Score =48.2; E_value=3e-11; Accession=PF08477.4; Description=Miro-like protein
  Pfam annotation: Domain name=Ras; Domain location=14-208; Score =212.7; E_value=8.8e-61; Accession=PF00071.13; Description=Ras family
  Pfam module annotation: Pfam domain module=Miro::Ras; Domain location= 14-144::14-208
MSAAAASSVTKFIKCVTVGDGAVGKTCMLICYTCNKFPTVECSHLFTTTSLFFLSSDYIPTVFDNFSANVSVGGSIVNLGLWDTAGQEDYSRLRPLSYRGADVFILSFSLVSRASYENVLKKWMPELRRFSPTVPVVLVGTKLGISATADLREDRSYLADHSAASIISTEQGEELRKQIGAVAYIECSSKTQRNVKAVFDTAIKVVLQPPRRREVTRKKMKARSNQSLR

SEQ ID NO: 52653 - protein, 221 aa, Zea mays
  Coding DNA Sequence Number=SeqID_9278
MASSKEENMKALVKVLVDCAEDATKCLGGLVDHALDHMHDEEIVARTLLAMKEKLELLQQDALEAKVQAFPEIAKYEWDDISVQPPSPSPPPTVIDPSVDEEEFYCPDVSDDWYFSDSDRSTRTPSVDGNEPDSASTGLTGKRPRGRHYSKLERNKAASSSSPEYLSRLQEITEKQIQRSIEKGEKKEKCSEEDREIEKKRLELEAQKIYVCETIILLLEP

SEQ ID NO: 52654 - protein, 379 aa, Zea mays
  Coding DNA Sequence Number=SeqID_9279
MAVPGLGGATVLAPVARLPALLGRGHPGLDNGQLVESEGVAGGDEDDGFGYDYGNDKGYCFRLERMARLRHTARKSIIPFLPSRLVERPFRRPVTGQSSHLERLHHRLHEEQERRRQELEQQGSSSSLQQEVESVRSCSPVPPLEAPLAPPLGVLAAGVAAGGDPDDGGDDSSSSHTTDLSEEQEPEGWVALPITRDAARGCHLHDALDTLLRQALDRCTWSIEYRCVVFQHSRRVYPDRWEATCLVRRPENSLRGAEVCSEHYSISERDSAEAAIQDVARRALSHYCSVLGGVADGLNLRLSRVNLAAVLNTELDHALDELSRAPTEIAQLRAERVERRHLEDGSPAPVGTQHSYRSPRHGHHAYGNPDCRTRINLEP

SEQ ID NO: 52655 - protein, 165 aa, Zea mays
  Coding DNA Sequence Number=SeqID_9280
  Homolog annotation: Hit_ID=Q6J9V9; Match level="QueryCoverage=64%, HitCoverage=28%, E-value=2e-10, Identity=43%"; Hit description =Putative uncharacterized protein
MAQGHISLSDTPKGILLRKGSGPRAPLLIRGSKAGPSEGFNSRIRALGLRAHYWSEVRRLAPRKGSTAASGHSGSAPTTAQGFVGWPSKGSDSRLRAHRARDDPGYVRYITKARATLPRLGGCSRKPGSAQTVDSVNIPARELGTRLCTRATATGNPHQHKAAKA

SEQ ID NO: 52656 - protein, 327 aa, Zea mays
  Coding DNA Sequence Number=SeqID_9281
  Homolog annotation: Hit_ID=Q6J9V9; Match level="QueryCoverage=28%, HitCoverage=32%, E-value=1e-34, Identity=78%"; Hit description =Putative uncharacterized protein
MRADPKREEGKPLHAKHVTALGYKHSLILAETSGRKGGPPQPAQRLKAALRVTQQCPLSATITGHSAAEIGTTVDMIRGGPTVIAATGVRKQRSNHLQGKRHLWQAKRAPFHLRHDDRIKKRGSKAGPSEGFDSRPRARRVRDDPGYVCYMAEARATLPRYPRTFSRPAGTICNGIPPEGGTEPSDPIEWVRVQQITHRPHEGTTRLTEASQKGLRPQRSQTTPPRPRGIHPAENNAIHPVPTTVPTTRVRLATVSRDLPRVQPRAQQGAPPRPTSGLSLGLGRRSPPRPTLGLGLDPGLRRRSPPRPTLGLGPRLGLGRSHNRAQP

SEQ ID NO: 52657 - protein, 184 aa, Zea mays
  Coding DNA Sequence Number=SeqID_9282
MAERYQLPRSCVPPMMRRKDGGYPPSGGLEGGKTRCMRKREDMVYFQGGHPPFKGDYPYLRPQPSQAESSPTRSKALPRGAGAGSRMTGGASGRKSGRRFAFAEITAPKKGPGKGDTPKRILPREGTRLRASLLIRGSKAGPPKGSTAASDRVGPTPTTGQRFEGRPPEGFHGRLRLLGLRAHY

SEQ ID NO: 52658 - protein, 119 aa, Zea mays
  Coding DNA Sequence Number=SeqID_9283
MGRREAEREGGRKVAGDRRERGGNPAAFVFVPRPGRPESAWGRVMMALPVDVVGPRPRLGDVEAPSRSRSSLSSVAVVESEPLGRARRRPSAEARAESEPWGRAKRSSSSSGAEPKSEP

SEQ ID NO: 52659 - protein, 192 aa, Zea mays
  Coding DNA Sequence Number=SeqID_9284
MNVNGNLQNGIGIQMGQIKAIEIKETAEKGRNRKSETAEKKGNINHGFVGILCWNSDPVANPPRTELLRRKDPDGHEMEKVRLKNNRHMVTCERQLAVGSIGGITAADELEAFRLGAISTPPANRAGAELQKDREDLEAGKQELGHGKQRRLKAQYIWDLPGSDTVSKKRPVITRQLLLKHWRAMSSPGGYF

SEQ ID NO: 52660 - protein, 272 aa, Zea mays
  Coding DNA Sequence Number=SeqID_9285
MALSPLLLVERRRRGVCKKVESVPDRPLALCGGSGAALANPAPAKPLTASTYQPENLEPDRAPGLQPARMREQTRPAKALREALRPRRSQTTPPRPRGLHPAGALARTPRNKTQPRKAGPLAKKCGKSLQASVNTPFEARGLLSGTIIRGTLKAPNSQLGSVHSRDSITPRPSLASGKGNRPRRISVSPEAPSSNEYISGSPEALSSPRSNPDRIAAPTDQIAGAFNAKKDSAACAAPTAVPLDRVRLTGSQARPQAPLQTPLRPTQGSDSG

SEQ ID NO: 52661 - protein, 68 aa, Zea mays
  Coding DNA Sequence Number=SeqID_9286
MRTGRSSLPSSPRLSQNTSTALAAYDVLCDPPVQPTAQGGPGRGRPVHGATDTHAADGQPRSAPAGSK

SEQ ID NO: 52662 - protein, 257 aa, Zea mays
  Coding DNA Sequence Number=SeqID_9287
  Homolog annotation: Hit_ID=Q6J9V9; Match level="QueryCoverage=37%, HitCoverage=36%, E-value=4e-36, Identity=75%"; Hit description =Putative uncharacterized protein
MRWVVSFSLAALLGCGNQSEIHPRLRPNPPQNSNSKGKRHLRQEKRAPFRLRHDDRVKKGTGKGGILKKDPSQRRKRAPSPRTDQGFEGCALRGSATAQSTRALSPLLIRGSKVGPSKGFDNRPRACRVRDDPGYVCYMAKARATLPRYPRTFPRPAGTICNGIPPEEGIEPSDPIEWVRVWQITCRELRLARPQASASALEEDLRLARPQASDSASASGGVTTSPEPSLGLRRSLRLARPRPQTYYATGDASLPYY

SEQ ID NO: 52663 - protein, 153 aa, Zea mays
  Coding DNA Sequence Number=SeqID_9288
FVLQASPGQAPHSLQSARLPHTVVEEPLALVELASLNLSDTASVLRRLSAELIPIERLRPTSALKRMASLPKVSKCFLQISNVTFLLRAFYYDIINICQHISAYLRMKYFRCHSAEASSSILEPLRHPKITICITGGYEAGFWLIFLLHLDLM

SEQ ID NO: 52664 - protein, 324 aa, Zea mays
  Coding DNA Sequence Number=SeqID_9289
  Gene Ontology: Mol. function=nucleic acid binding; Cellular component= cytosol; Biological process=DNA damage response, signal transduction by p53 class mediator resulting in transcription of p21 class mediator
  Homolog annotation: Hit_ID=Q10N14; Match level="QueryCoverage=74%, HitCoverage=78%, E-value=1e-49, Identity=49%"; Hit description=RNA recognition motif family protein, expressed
  Pfam annotation: Domain name=RRM_1; Domain location=28-98; Score =73.4; E_value=7.5e-19; Accession=PF00076.13; Description=RNA recognition motif. (a.k.a. RRM, RBD,
MTMMAPHPQPLPLPQPPAPFGDTTLTKVFVGGLAWETHKDALREHFERYGDILEAVIISDKLTGRSKGYGFVTFKEADAAKKACEDATPVINGRRANCNLAALGAKPRPPPHILRPSPPATPAPHAPALPSQHQPTPAIAVGSRGVSPVPWYYHPSTTPPPPAAHHYAHGAHQQYHGVLPFYPAAAATYGYAPNYVADLSYNAKVGQAAAGGTGGSYLQGHFAYPAAAAAQGGMVAAAPNGMVPVYPFYHYHQYHASQGGVAAAHFFPPVSAAAVPAVVSKHTVMAAPKGPGTWIKVWYRWSSQQNKMETAAAEDEYKRQFPKS

SEQ ID NO: 52665 - protein, 348 aa, Zea mays
  Coding DNA Sequence Number=SeqID_9290
  Gene Ontology: Mol. function=prephenate dehydratase activity; Cellular component=cytoplasm; Biological process=L-phenylalanine biosynthetic process
  Homolog annotation: Hit_ID=Q10N17; Match level="QueryCoverage=96%, HitCoverage=87%, E-value=1e-125, Identity=68%"; Hit description =Prephenate dehydratase family protein, expressed
  Pfam annotation: Domain name=ACT; Domain location=289-343; Score =18.1; E_value=0.033; Accession=PF01842.16; Description=ACT domain
  Pfam annotation: Domain name=PDT; Domain location=108-279; Score =250.4; E_value=3.9e-72; Accession=PF00800.9; Description=Prephenate dehydratase
  Pfam module annotation: Pfam domain module=ACT::PDT; Domain location =289-343::108-279
  Subcellular localization annotation: CTP_CleavageSite=81; ConfidenceScore=5.88e-01
MAPTACLRTPFFPARARSTNATPFSPHRRFSLKCSASNGDNSNPNSISISPTSPPRLTVSDGVESVDVNGLRRPPAPASVPAARDPHWLPRPLTSADVMEVDGKGLKVAYQGCAGAYSEAAAKKAYPNCETVPCEHFDTAFQAVQNWVADRAVLPLENSLGGSIHRNYDLLLRHSLHIVGEVRLAVRHCLLANPGVKIENLKSAMSHPQALAQCEHTLTSLGIEHREAVDDTAEHMLQDTGAIASSLAAKLYGLDVLAENIQDDKDNVTRFMMLAREPIIPRTDKPFKTSIVFSLEEGPGQLFKALAVFALRDINLTKIESRPHKERPLRVSDDCSSLLKLDAKPVAF

SEQ ID NO: 52666 - protein, 113 aa, Zea mays
  Coding DNA Sequence Number=SeqID_9291
MGQRTLACTKLLIRDFFCNFLGKHRLPVVYVNGGSKKRRERAEEVPYLKANSGDSSVAAKTRRQPESTVADLGDCAENGGGAPTATEKRARGDGTLACEKRGGRWKGGLQVRK

SEQ ID NO: 52667 - protein, 86 aa, Zea mays
  Coding DNA Sequence Number=SeqID_9292
MDSSRVATWPDKMIYSRISTEGPDPHGKVPDPCGVPVLSVGRRYARAAAYTMLILTRTLRGKLPLHANATQTADIRVHGDYTGNWH

SEQ ID NO: 52668 - protein, 225 aa, Zea mays
  Coding DNA Sequence Number=SeqID_9293
  Homolog annotation: Hit_ID=O48967; Match level="QueryCoverage=16%, HitCoverage=7%, E-value=2e-07, Identity=75%"; Hit description =Putative uncharacterized protein
MAMSTMLLLWRAGSSGRNISEKEWKCLSPRLNALLLLCLCAFSAPAQSQNTTMAMAVPASVEGFNCTANRTYPYQAYALYRAGFAGSGPLTARSRDSGTNNTQALTKARRGSGANTRYARAAAYTVLILTRTLRGKLPLHANATQIADIRAHGDYTGRVRSATRPENFLSDIWRASMMVQIIEHRAETSEDFLVEEEAASSMPRVPNRPVLGTAAVHAAQQHTTA

SEQ ID NO: 52669 - protein, 821 aa, Zea mays
  Coding DNA Sequence Number=SeqID_9294
  Gene Ontology: Mol. function=DNA binding; Cellular component=nucleus; Biological process=regulation of transcription
  Homolog annotation: Hit_ID=A3C6H3; Match level="QueryCoverage=72%, HitCoverage=68%, E-value=1e-142, Identity=46%"; Hit description =Putative uncharacterized protein
  Subcellular localization annotation: CTP_CleavageSite=43; ConfidenceScore=5.27e-01
MQQQQHGGGGGASGGGPAQQFCAQQVEMPLPFSPVGGAGQRISLAEAPSPISSRPPAPAPAQQYDELGPSGAGAVGFDAEGLAAAAAGEDGASGGSAGNRWPRQETLELLKIRSDMDTAFRDATLKAPLWEQVSSVRATTVVACTVEICGGWWWRYAIDKAIKVLVFVAKLLIDAVVGRKLAEKGYNRSAKKCKEKFENVHKYYKRTKESRAGRNDGKTYRFFTQLEALHGTGAAPASVASQVGPAISGGVSGAARPSSAVRVPAEPLPAVSAGVGMPMTTTVGYPSISTSNTEDDYTDEDDSDDEGTEELVGGGADDQRRKRKRVSDGSGKMMRFFEGLMKHVMDRQEAMQQRFLEAIEKREQDRMIREEAWRRQEMTRLAREQEILAQERSMAASRDAAVLSFIQKITGQTIPMPSIAAPTINAMPPPSHPKPPPPPQPHPTPIASVSPAPPPPQPPASQTPPPQQQKSPMPATPQTPAPQRQSTDIVMTPAETTPHADTQGHEGSGGGATSSRWPKAEVHALIQLRSTLDTRYQETGPKGPLWEEISAGMRGMGYNRNAKRCKEKWENINKYFKKVKESNKKRPEDSKTCPYFHQLDALYRNKAAITSSSGAGAMVHANASSAPQEMVTVTAATPISQTPPPPTQPSQSHHAAKNGGSSNSAGTGTGNGSYASEHGSRGMQTQASNGSAAASMFVGLGGGAASAAKKPEEIMKEMIEQRQPQQPQAVVGGYNRMDGAGSNNMDDDDDDDEDDYDENDNDEDDAGNKMQYEIQFQHHHQHPNVVRSNAGAGGGNPPGTTAPSTAAAPTTTAGSFLGMVQ

SEQ ID NO: 52670 - protein, 184 aa, Zea mays
  Coding DNA Sequence Number=SeqID_9295
MGRLEPRAEWESRLVGKVCDLCRVLKTGISAVLTMSRIRCTARKSVIPFLPSRLAERPLRRTVSEAFLEHYSITERDTAETAMQEAARRALSQYCSLFSGVADGLDLKYYPRHTTGSAGRVIVSPVGEGNPRLSSVVNLAAVLNIELDHTLDELGKVPAEVAELRAECVARHYLDGGSPAPVGI

SEQ ID NO: 52671 - protein, 130 aa, Zea mays
  Coding DNA Sequence Number=SeqID_9296
MGAVALLGPAAKTHRRRGGWPRWGSRGLGFGLAAIRAVWRVQPWPSRWRRGTIGHRPRQGGLTAARDSSDEQSREQQNGYDHIKGTGGLLTLRGSAGVAKQRRRRKDSTGRRRRDSGCAKIALVSAERMK

SEQ ID NO: 52672 - protein, 240 aa, Zea mays
  Coding DNA Sequence Number=SeqID_9297
MERSERSRRARQDNKWRSRRGRSRSCTRRSCWTRMTLTAPQTQRLNWIDFLERLHGKRMLLMDNSMNWNQFESMLYARLYGTRPDVRDALALSGSIFFTYKAVIEVMSLTSRTIESMIMDSCDFGIMTPHDLHEAVACECPTLKELILDECPNVLGNFVVCLRESWPNLTKLTLNRIGISDVQIRILMLVGFDQLEEFNLTWCWCPLITDRLLAILHASTLPNVTQESVDYYQHRCEVEY

SEQ ID NO: 52673 - protein, 117 aa, Zea mays
  Coding DNA Sequence Number=SeqID_9298
  Gene Ontology: Mol. function=RNA binding
  Homolog annotation: Hit_ID=Q7G2G8; Match level="QueryCoverage=52%, HitCoverage=9%, E-value=2e-17, Identity=72%"; Hit description=KH domain containing protein, expressed
  Pfam annotation: Domain name=KH_1; Domain location=30-84; Score=8.9; E_value=0.081; Accession=PF00013.20; Description=KH domain
MVSRKDTKDSSLETEDASKVLSPERRDVAQGSPVIGKSGANVRRVEQQTGARIKVQEIDKDASGERLIIVSSNEIPTEPISPTIEALILLHDKHSRKDTGQDYHMRISSTFRKVVDL

SEQ ID NO: 52674 - protein, 551 aa, Zea mays
  Coding DNA Sequence Number=SeqID_9299
  Gene Ontology: Mol. function=cysteine-type peptidase activity; Biological process=proteolysis
  Homolog annotation: Hit_ID=Q6J9V9; Match level="QueryCoverage=11%, HitCoverage=22%, E-value=1e-25, Identity=90%"; Hit description =Putative uncharacterized protein
  Pfam annotation: Domain name=Peptidase_C48; Domain location=77-242; Score=-14.7; E_value=0.0023; Accession=PF02902.10; Description=Ulp1 protease family, C-terminal catalytic domain
MARAAERRMRAGGQEAWGEDGRARPWRIPGMRLPSKGDLALIDFIKEIPCEPRVEVVLIDDAFVERKSMECLFQRNAYLGDEVIDCYINLIKAQKHLKCRSGGRVHIENAFQFNFLKRDGDVDIKTKELYPIEDMTQICSAERRVLLYLDHDMIKGLQRQIDMISQRKELKDHRWPNLQVASWPLREIDMGYAKQTDSSSCGLFLLNYIEYWTGDELSDSFTHDDMSHFRKKMAAILLSSELNKRRGCLLYKNDKEVDSGSPWHVEILENPTDSKKRKLLHVLDDNEVVYEDEEGPITQADLQKWFVDDWDKRTPVKVSNDGCTNDFLMVGLSTKDMPVTKADSIDVLCDYIMAIEDDTTLEEWLGFGKLPKYHQDPTAEELAKTLDCWPSMNYYITGCRYVLMPWKFNGCHALFVIDHVKKHVTFIDFTPTQDWCKHMPYKRFAEAIIMASKKYKIAYSKKRSGWAEDIFKWEHTIQTGVPIDLRGFNTSYLVLQAMAMWGNDRRMKFVGDAKIVRWSFVIDLLSYEDNSCRYVIPANIQQRLIDIAKKD

SEQ ID NO: 52675 - protein, 80 aa, Zea mays
  Coding DNA Sequence Number=SeqID_9300
MRGAAGIAEASTIHPPLGALKFQKLGFFGAMIGRVPGSETSPNPKEEIVVFVASFDVGPRPPCHRFLMEVLERSVFNCIG

SEQ ID NO: 52676 - protein, 86 aa, Zea mays
  Coding DNA Sequence Number=SeqID_9301
MAVSHMPTRRASELGMYRQVGPTRSTTQGKEKERFECWASMGEKKSVDWQREHENGPKLTEKLSVWQSAVAFGGQKLQKAETNRGK

SEQ ID NO: 52677 - protein, 256 aa, Zea mays
  Coding DNA Sequence Number=SeqID_9302
METLTGDRNRDDIDPSPKRFANEFQTPEGTCHGFEEGESPDRLTHMPATVGAFRPHVSSSDEVAPLASNEGAFYSLAGQQPGNRARSTGGGKYPRLNHREREGRSRRARDGCGYNILLSGADLLRRPLLTGSSRSSYTRLPRSHGHAQHGNMFLTDRTWKMDLDRTWRRCGLRARGKRARMAVLWETTQNERSTAIQQVPEAAPMPISFSPSLPSPAGVGRARPVAVAGIGWGSSDLRRPLAICGARGDFWGWAAS

SEQ ID NO: 52678 - protein, 268 aa, Zea mays
  Coding DNA Sequence Number=SeqID_9303
  Subcellular localization annotation: CTP_CleavageSite=48; ConfidenceScore=5.31e-01
MPSTPHCGWPRTEAGAASPCRQRATPTPGRGASAAVPARRGWAAAPALAAAAPGQTAGGRARTGQHAQPGAPRVRAAGEAPLRAVTRAAVAGPPRPGPQGAAPAPPRLRPPGQGSTPRGCRGRTPVEPRPRGRAATGSAPEPPGPHAVGHRGARQGPRPPRRVRRRMLPAPAGARAGVAHSHRGLLQSPRSCPRWRPSLQGPKPKAVPRAGSGWCRPSRVGPARPLTAAPAHGPGRLLPRRRGRPCPPGEAAARASPPGRNPRPPMPE

SEQ ID NO: 52679 - protein, 345 aa, Zea mays
  Coding DNA Sequence Number=SeqID_9304
MQTTCNHTKGAHPFDSDASSVEAQAHTSCNRRAGYHVWEAALPLAPVPRLLDCGTSAATRGNPAHGPTVPTEHIDHGSVSRGRRRDGQYGQKWADSNGGGRRAEAAVTSSAGSRPLLGQQESPLPRSEDDAPVFCSSNGSRVHNDCLTNHSSRRINSAAGQAAPLAGKGPGKGILRKGILLREGSGPRAPLLIRGSKAGPSEGFDRRLRALGPRALLLIRGSKAGPSKGFDSRLRALGLRAHHWSEVQRLAPRMGSTAASGHSGSVPTTDQGFVGWPSKGSTAASEHAERGMTLGSGAALANPASAKPLTASTYQPENLEPDYAPGLWPVRMREQPDRPKHHETR

SEQ ID NO: 52680 - protein, 70 aa, Zea mays
  Coding DNA Sequence Number=SeqID_9305
  Homolog annotation: Hit_ID=Q2QTV3; Match level="QueryCoverage=47%, HitCoverage=3%, E-value=2e-08, Identity=81%"; Hit description =Retrotransposon protein, putative, unclassified
MEEDDLLGEDLVDYEASPERPDGGAAVNLMPYSLYRKLGKQDDELVKTNMTLNGVGTDSSIKARESRLLN

SEQ ID NO: 52681 - protein, 199 aa, Zea mays
  Coding DNA Sequence Number=SeqID_9306
  Subcellular localization annotation: CTP_CleavageSite=71; ConfidenceScore=5.44e-01
MATVAGVLELVGAGATPVALVQGRPQLRSAVALGRSRRPQGRRDAGRRGGSVRTSLFADLPRWTESKTKTTAARRFSSFCRLPSTKSADNEAFCRWRLSGDEQGEAGLDLRLRGVARPRFQGVRALRRQTRLRTAASRPLASMPAAKRAGSRARPRKKQSPARGTNAGKFPGGGWWTKSADSALPEPSTFRVSATSSKI

SEQ ID NO: 52682 - protein, 680 aa, Zea mays
  Coding DNA Sequence Number=SeqID_9307
  Gene Ontology: Mol. function=polynucleotide adenylyltransferase activity; Cellular component=nucleus; Biological process=RNA 3'-end processing
  Homolog annotation: Hit_ID=A2X2M3; Match level="QueryCoverage=99%, HitCoverage=96%, E-value=0.0, Identity=70%"; Hit description =Putative uncharacterized protein
  Pfam annotation: Domain name=NTP_transf_2; Domain location=79-176; Score=36.0; E_value=1.4e-07; Accession=PF01909.14; Description =Nucleotidyltransferase domain
  Pfam annotation: Domain name=PAP_RNA-bind; Domain location=367-502; Score=150.9; E_value=3.5e-42; Accession=PF04926.6; Description =Poly(A) polymerase predicted RNA binding domain
  Pfam annotation: Domain name=PAP_central; Domain location=16-366; Score=556.6; E_value=2.7e-164; Accession=PF04928.8; Description =Poly(A) polymerase central domain
  Pfam module annotation: Pfam domain module=NTP_transf_2::PAP_RNA -bind::PAP_central; Domain location=79-176::367-502::16-366
MAGSVGKARAALRSSPKRYSGTDPPLSLAGPTLADLQRTAELEKFLVEAGLYEGKEESAKREDVLSEIGLIVKEWVKQLTRKKGYAEQLVEQANAILFTFGSYRLGVHGPGADIDTLCVGPSYVNREEDFFVTLHGILAEKEEVAELQPVPDAHVPVLKFKFRGISIDLLYASISLSVIPADFDISQGSVLCDVDEATVRSLNGCRVADQILRLVPNVENFRTTLRCLKYWAKRRGVYSNITGFLGGVNWALLVARVCQLYPNAVPSMLVSRFFRVFTQWQWPNPVMLCAIENNDLGFSIWDPRKNPRDRNHLMPIITPAYPCMNSSYNVSTSTLRVIMEQFQFGNKVCQEIELNKANWNALFEPFHFFEAYRKFLVVDIVAEDDDDLRLWKGWIESRLRQLTLKIERDTKGILQCHPYPCEYSDPTIECAHCAFYMGLSRKEGLKKRGQQFDIRGTVDEFMREIGMYSLWKPGMDLAVTHVHREQVPSYVFEQGYKKPCPTMHANQQEQSDGDGTFSPYLESQLKRKYISDGDGHVDLCKSVKRASVSPPGVGTPPHLGNSVSNVVCDSPVKFVSSVVCSGAHASSSHDDINIEQAQLTTSPYGSEDTSASGTSCAAVGAVILADESSKLGNLTSDLEVDTIQTMPLHTSLECVAQKGETKLEEIRRLASNNCAEFLES

SEQ ID NO: 52683 - protein, 93 aa, Zea mays
  Coding DNA Sequence Number=SeqID_9308
MSRSRLRRLYKSCGGSSMTGLATSLTEENLKAKDASLEERATNLVWQEKDLAWREEMWERREKLLAEHELEAEDKEKKLEEKERTLEERVRRF

SEQ ID NO: 52684 - protein, 147 aa, Zea mays
  Coding DNA Sequence Number=SeqID_9309
  Homolog annotation: Hit_ID=Q6F3C2; Match level="QueryCoverage=62%, HitCoverage=11%, E-value=8e-07, Identity=29%"; Hit description =Putative gypsy type transposon
MEKKASTKQSRKRSGDEEQLTEVAATMPLAKKKKPDDEPLAPDAVRAWRKSTLKESTNNDWRNQWFYICNHAPNLPKRSGRRPEYKDCWVSDLEPGTFNEIPSLLKDIQELKKDGLMGHSVVLDWLKRRFQQLQRRITMGYEYLGER

SEQ ID NO: 52685 - protein, 705 aa, Zea mays
  Coding DNA Sequence Number=SeqID_9310
MGVGRTVVVHEAEDGAVRIVGRYVPRTEALRSWDIRGSNDRLNRVFELNRLPYGGYPGDDAVDRRGKGPMAVTEEGPMQEAAPATKKRKLGTVVGEMGVSDSFDMELMGTCAALRGRMSSPELRESSARMLEVTGGRWPKNVLIPRVPGEDFFTSRMARDLKVFPYGRNIAAGVSAVMNKDHQDAAQKRRAVVRLADPMREAKRARGSAKAAASGSRKPAPWAAFCASGEILSAAAAKDVAGSMSQRLRESVAAALVAADAAAEARGRLCRPRCVGVLTADVAAEVESLRAQHADAIREKYAAESKNCRLAEKEAAMEAEKTDLRRQLAEERREANQAIAEAQAARAEAKVARAEISLGSQRAEELEARLNSLRSRVDKAEASTCSEVERTHAQFMDAYRELGAQTADFEEELLVLPTIVEGFMSFASLVTCEGTMNALSREGCRHYEVFDQSNENFEHEIFKAEDPVVKQSAGALFDRMWGLHGWEAVRERSDRAIEQMVHAEDVEDLGGLAGALPEAAEVHPVPPSDAGEGSLAVLEFGPAHATATDNADFVAASTVVAEDDSDDFVSKFFESDDSGISIVWTEESSDEDLDYFVALDVAAAETSPCVMGAEDLPGASAGRRRRRAVAKRRVSELSRSHRCHRGEMEGGRLRVDGTGKQELLSSPAGASVGEGELRNLFEGEELRIMFFNYREMGIILKVEPM

SEQ ID NO: 52686 - protein, 145 aa, Zea mays
  Coding DNA Sequence Number=SeqID_9311
MAPKRASSKAAPSVDEAAKAALLAEKKGKALADTTHQEACEEDALSKRQCNDQPTPEGTLCTCSSGGQPQAPPGFAPLEGEDATEDGEVIGVSAEEQLQLRALCIKNRNLQKQKEILEAKRQRVSVQAKVPQMIRDEEQRAQELE

SEQ ID NO: 52687 - protein, 69 aa, Zea mays
  Coding DNA Sequence Number=SeqID_9312
  Subcellular localization annotation: CTP_CleavageSite=40; ConfidenceScore=5.71e-01
MTNSTSLYGGIRGNSCGKTFGKSLTTRMLTPTNFPSTKNAASMVAVVTAIPTSNISPLELVSSYSQQLL

SEQ ID NO: 52688 - protein, 158 aa, Zea mays
  Coding DNA Sequence Number=SeqID_9313
MELELEVDIGVESKEVSAIQGQCSTAKVKIMRFGVDGSGAVKDERCVLIEGLEKSDWRVWEVKVSTIIELPNYETPTVDERFGKLKSSKIHHQTWANIENPYVVAGSNDGFFNCGDLDHFIANCSKLKGKIDTDKRGHHSDQRKGKHEYTSDKHTYKG

SEQ ID NO: 52689 - protein, 298 aa, Zea mays
  Coding DNA Sequence Number=SeqID_9314
  Subcellular localization annotation: CTP_CleavageSite=40; ConfidenceScore=5.50e-01
SPRGPAGPPRPSSPASSPPRDGRRRLSWLGKETGASRPISAVHLRSDGPVSNSPNPASAVRLRSNGPEPFPPRPASLPTGPRLPVARARAANWAPPVSPAPALPARPRLSAAHAAARPRARPQDLILVVRLRSNGYNEQSVFPEAVAEEVPDQQFGEGKWFEMQGLCYGFGSTMMMMFLDEEMDSAEAAMQDAACRALSHYNSVLGGVADGLNLKYYPRRPSGSTGGMVVSPIGEDNPRLSSIVNLAAVLNTELDHALDELSRACAKIAQLRAERAEHRHLEDGSPAFVGTQHPYRSP

SEQ ID NO: 52690 - protein, 77 aa, Zea mays
  Coding DNA Sequence Number=SeqID_9315
MAWLPRLTPARPPAAWLPGPLVRRPSAPARGRPNPGGDEDNGFGYDYGNVCPRCNHFSGEDEVVEEDFQEFQEYDEF

SEQ ID NO: 52691 - protein, 101 aa, Zea mays
  Coding DNA Sequence Number=SeqID_9316
MASKARGSSGRGREMRERRLGKDEKREVTPKFVNMSKEILYPQIQGVTVVVQGAPPVGAWGSSSSQTLSPAEARKKSRAAPAPVFDAPAPHVGGGAASPSG

SEQ ID NO: 52692 - protein, 47 aa, Zea mays
  Coding DNA Sequence Number=SeqID_9317
MYGLQGGDEDDGFGYDYGNGCPRCNHCSSEDEVMEEDFQEFQEYDEF

SEQ ID NO: 52693 - protein, 313 aa, Zea mays
  Coding DNA Sequence Number=SeqID_9318
  Homolog annotation: Hit_ID=Q030F8; Match level="QueryCoverage=58%, HitCoverage=15%, E-value=8e-07, Identity=26%"; Hit description =Condensin subunit Smc
  Pfam annotation: Domain name=zf-CCHC; Domain location=31-48; Score =24.5; E_value=0.00029; Accession=PF00098.14; Description=Zinc knuckle
MGMIRKINLMGVPLQVEDLLFNIDRKKQRKRGCFACGEKGHFRDSCPNMAEPKKGRSKGKSLTSVKTWDDSSSKDEPPRTRSHRSSSRSSRSSHKCLMEMSIPSSSDESSSNDEGEGKPSIDELAEAVEFFQDVCTKQKAQLKTLKNKLISSQNDYKGLLEKFETFANLNSQLSTKIELLESSAPSIATDDGLIKKNEKLKAKLASSQEAIENLLEKMEILSIHNNELTTKLENIGSTQVASLVEIPEIIKKDASTSCFDLIDDSNPCNQVFVKNIVVETCSDEVAKKNEQLKQEVARFGKALYDKKGKAKQI

SEQ ID NO: 52694 - protein, 157 aa, Zea mays
  Coding DNA Sequence Number=SeqID_9319
MGSTSEKMYLCQAEFRRRTAIWVVDGNRINELRRHVRHLRDQLADRDLALDWVVQSRSLAWDKEQKAQARVAELNLAVEDLQTYCNTLHEEVHVLYLQLHPSEPTNPVESEAGPSHVAGQALGGELDLFQPPPSMRLVDEWSPTPDDEAAKSNWKQE

SEQ ID NO: 52695 - protein, 77 aa, Zea mays
  Coding DNA Sequence Number=SeqID_9320
MAVKAAVIRADFGGQCAILFRAAGLRTKLSSGPIRQRQKDGERGAAGTDSWGPHFGEHGTRATDEWTPPVGAGVSLG

SEQ ID NO: 52696 - protein, 161 aa, Zea mays
  Coding DNA Sequence Number=SeqID_9321
MAMIADQSRSIRPLIWYQYLATVARPAVAAVPRPTVAALDPEGERRRQRPYVVAAVSRPAVAAPDPEGERRQRPCAVAAIPRSVAATPLPRRAVAEVPRSAPRTLVQASGGVPEAPRRRHFQGRRASDPVDVRVATAMHWARSSDDRRHGMGRDARSDDRA

SEQ ID NO: 52697 - protein, 50 aa, Zea mays
  Coding DNA Sequence Number=SeqID_9322
MSENYHCFCMLCSAPSEFDSRFIDTIPYCKLLDTMIGLGVSPATLFMCNI

SEQ ID NO: 52698 - protein, 263 aa, Zea mays
  Coding DNA Sequence Number=SeqID_9323
MHRALPPFEPPDGVLQCRLALAVVGGARPRGDRHLLAIARLQGFSSCSPAGFPHQWAVWWGEASQAVASAPPSASRIFIILAEAEGKLSRGSTSRMGRQAVSSFSIQGRRRSPTLRRGELRQRRTGRPQATSAPACLARWLSWLCRGLRRCLLPLDPGSGIYCAVRTGGPSKTSYAAWAAFVFLDCLALTPARRLRAEVGACPSGRTRVGIYRCRLGHPPFVGVALARRWPLSSVLWWWQPEKVSPLTRPSAPAGARPSALWL

SEQ ID NO: 52699 - protein, 301 aa, Zea mays
  Coding DNA Sequence Number=SeqID_9324
MTKEHRPPRGCAPLTSAKGRQDRQPNCERKLSGDGTTRGDGSDAFPSRRCPPLAPRSKVSRCAPKVPPYDTGARPHASGREDEPPHKERATAPRLGAPSFFAKTGGQEGEPSRGKRAVAPRFDSRHPAHGPVVTKVTGRSAVGTGVTVGIAIGEPAVIAPTGPQEQQADRQSDSGPTCRLASSPEAGPGATVSTLNQGYLLLLHKGTAPVQRLKTTWRMVPNGQGPKKVCRIPWKAPALARSQDEEDPGIGGVRVIKQAARLTGLLANSAPVPSGCGAELTQLGATACGAELRDVAVPRGT

SEQ ID NO: 52700 - protein, 141 aa, Zea mays
  Coding DNA Sequence Number=SeqID_9325
  Homolog annotation: Hit_ID=O48967; Match level="QueryCoverage=97%, HitCoverage=29%, E-value=8e-55, Identity=75%"; Hit description =Putative uncharacterized protein
  Subcellular localization annotation: CTP_CleavageSite=31; ConfidenceScore=5.30e-01
MASPGAMKQWHDDVDRLLGMAHSTLTKSRPRSSRRQREATASVRSPSIRGAQTDDLWAELNRRRTGEDARISLERAQERRQNIEGHNLDRDFTTEAPQTPMGAWSQTGVPLAGVGCADLADHLRAASWPPKFRLHLPKKKR

SEQ ID NO: 52701 - protein, 104 aa, Zea mays
  Coding DNA Sequence Number=SeqID_9326
MSVDLWFGGLGLKTTQRYGWLVLLSLGLKTRRWWFWKEPVAARGMIAEVFGKLNPIGSHSPPSSRLTDPTFEDRAQSLSGVKYKNPDSLLNAFQAQQLETGIYD

SEQ ID NO: 52702 - protein, 34 aa, Zea mays
  Coding DNA Sequence Number=SeqID_9327
MAMMGSTSEKMYLCQVRKQQTFAVKVVPKEEPQQ

SEQ ID NO: 52703 - protein, 699 aa, Zea mays
  Coding DNA Sequence Number=SeqID_9328
  Gene Ontology: Mol. function=transporter activity; Cellular component= integral to membrane; Biological process=transport
  Homolog annotation: Hit_ID=A7QKE3; Match level="QueryCoverage=100%, HitCoverage=100%, E-value=0.0, Identity=70%"; Hit description =Chromosome chr2 scaffold_112, whole genome shotgun sequence
  Pfam annotation: Domain name=MFS_1; Domain location=250-651; Score =60.6; E_value=5.5e-15; Accession=PF07690.7; Description=Major Facilitator Superfamily
  Pfam annotation: Domain name=SPX; Domain location=2-148; Score=134.6; E_value=2.8e-37; Accession=PF03105.10; Description=SPX domain
  Pfam annotation: Domain name=Sugar_tr; Domain location=253-699; Score= -130.1; E_value=0.00067; Accession=PF00083.15; Description=Sugar (and other) transporter
  Pfam module annotation: Pfam domain module=MFS_1::SPX::Sugar_tr; Domain location=250-651::2-148::253-699
MVNFGKKLMADQIPEWKGYYINYKLMKKKVKQYGQQLQQGEKDRRRVLKDFSKMLDDQIEKIVLFLLEQQGMLASRIEELGKQRAILQDQPDISGIAELREAYREVGIDLIKLLKFVDLNATGIRKILKKFDKRFGYRFTDYYVTSRSNHPYSQLQQVFKHVGVGAVVGALSRNLAELQERQGSYLSIYDQPSSALKDPIIDMINSSVDKLTRSTNFLRFLGQHALIVDEESPSTAGEEEIEDQKYHFMSLMLNLVNTFLYMVNTYIIVPTADDYSVSLGAASTVCGVVIGSMAVAQIFSSVYFSAWSNKSYFKPLVFSSIVLFLGNVCYAMAYDMKSLTVLIIGRLLCGMGSARAVNRRYISDCVPARIRMQASAGFVSASALGMACGPALAGLLQWKFKIYMVTFNQSTLPGWVMAVAWLLYLIWLWVSFKEPNRATEVNEAPQNPASGQTVDIGQVENGLAQPLLMDSVDKQNEDEDEEVDESEEAADDSRKPATSIGSAYRLLTPSVKVQLLIYFMLKYAMEILLSESSVITNHYFSWNTSAVAIFLAILGLTVLPVNAVVGTYISNMFEDRQLLMVSQITLLVGIIFSFKVTSTYSVVQYVVSALVTFVSAEVLEGVNLSLLSSVMSSRLSRGTYNGGLLSTEAGTLARVVADCTITAAGYLGVGKLLNVTLLPSLVICVASIACTFLTYNSLF

SEQ ID NO: 52704 - protein, 111 aa, Zea mays
  Coding DNA Sequence Number=SeqID_9329
MKVVVIPQIKLPGDLTTAYGRNSRILDDNEQLVLSVTIKRAPEHENRQRLHIDDLGLHSEGVRVVTTKFTVAARYSDLTARTPRAKFATDPNGSAGRCNGGTDVMIAGSHQ

SEQ ID NO: 52705 - protein, 551 aa, Zea mays
  Coding DNA Sequence Number=SeqID_9330
MSSPELRESSARMLEVTGGRWPKNVPIPRAAGEDFFTSRMARDLRVFPYGRNIAAVVSAVMNKDRQEAAQKRRAVIRLPEAMPKRARGTAKATALDGSQPTLAAKPAAPGSSKVLESVKAAGAGGTKSVPAGAAKARELPLPGKCVADFGTDISVDDYLVGSSEGQLVVVPPAVATTVSGAVPGVKGSALSASGEISAVAVVKDEAGTVSRRLREASQQLGQAADFTDRVASGALTADVSVEVERLRAQHADAVREKSAADSKCRKLAEKVAALEGERTNLRRQLVEERREANQAIAKAQAAQSEAKLARARMERPEASTRSEVERTRKQLVDLYRELGARIADFEVPDREAGLCFLEWLQEELLALPTILEGFMSFASLVTCEGALNALSREGCSHYEVLDRSDEDFGREIYKVEDPVVKDSAGALFDRMWGPYGREVVRERSHRARDQMARAEDVEDFGLLNSVQPEAEANPVVAEAEVVPAPPPETGEGSHAAPAAAVSGGGPSPATTLMVENPPKAATELAAEDPPKAATEPSAEDPMAVAGSSQVA

SEQ ID NO: 52706 - protein, 146 aa, Zea mays
  Coding DNA Sequence Number=SeqID_9331
  Homolog annotation: Hit_ID=Q8W0S6; Match level="QueryCoverage=24%, HitCoverage=4%, E-value=1e-07, Identity=77%"; Hit description =Putative uncharacterized protein
MCLRLGRVSSGALLITRNSSAGTDDVEEVSVIEAGSARGGVARRLQRVDLDAGEVEAPRAAWTRSGLDLRSSRGFVDGEFESAKFLRPASSLYHDAEDSLVIIDSEVLSLIDWCLEIYESLSEDGGAGSLELQTIRSNQASFEYYT

SEQ ID NO: 52707 - protein, 146 aa, Zea mays
  Coding DNA Sequence Number=SeqID_9332
MEARMAEMFQYMQSLGAAQGFPSPPLLFPTVDPDMFHTTPPRNPTGTIWGGIQQPSWIAQPIVAPVQPPTSMRLMFLALRLMRYLRLQNLLVMLCWILIAVALALGKEASFAECLQEHSAKNLTPGPAGEPFAECKLETLDKGDFA

SEQ ID NO: 52708 - protein, 112 aa, Zea mays
  Coding DNA Sequence Number=SeqID_9333
MDEYIRADNDFHQRREEAYRVMTKGVSLRGRNTPHNLRGNSKALLGHQLQGAEAPGASGEDLEIILERFTAYSVIYEAQKLSKLKSRSKGNTELDKYRSCKKDVPKGAQRKF

SEQ ID NO: 52709 - protein, 267 aa, Zea mays
  Coding DNA Sequence Number=SeqID_9334
  Gene Ontology: Mol. function=kinase activity
  Homolog annotation: Hit_ID=A3BP95; Match level="QueryCoverage=35%, HitCoverage=41%, E-value=8e-20, Identity=60%"; Hit description =Putative uncharacterized protein
  Pfam annotation: Domain name=DUF212; Domain location=54-166; Score= -31.8; E_value=0.00093; Accession=PF02681.5; Description=Divergent PAP2 family
  Subcellular localization annotation: CTP_CleavageSite=64; ConfidenceScore=5.42e-01
MARFLPRPSLGVGRGGDLLPRPRPKVGRVRLPPLSIQSLRAAAPPPGAPSFSYLAVFSNCPLVAAVLTFAIAQSIKVLTTWYKENRWDAKQLVGSGGMPSSHSATVTALAVAVGLWCDVVAVGGVLEPGGGTAVGAIESLLTSSCFRKGAESRRRHRVCGAPSLPIWRSEPDGTPVLFPVARVSWGRVMMAPPVDVAGLRPRLGDVEAPPKPRSSPSPWVGRGGDRRLRLGQSPSPGSGEAEFVIFRGLARVRALGRAERSSLSSGA

SEQ ID NO: 52710 - protein, 74 aa, Zea mays
  Coding DNA Sequence Number=SeqID_9335
  Subcellular localization annotation: CTP_CleavageSite=54; ConfidenceScore=5.57e-01
MNTKATGFPPLSRLSPATSLPPFALGLASTHLGWGTRRHSLVGLGTPGLETPTSCMSRGRGVDSSHRVLLRMIG

SEQ ID NO: 52711 - protein, 114 aa, Zea mays
  Coding DNA Sequence Number=SeqID_9336
MRYSTTYIMFEDTHTTSATSIVPAYKNSCPNNPRVVDVGDNHEASLLNDGQCGAAALDRVQVVASRELVVHSGACDHVGLLLEVELTVAKLLLVIDERRQRECLLLMVFVRGFK

SEQ ID NO: 52712 - protein, 106 aa, Zea mays
  Coding DNA Sequence Number=SeqID_9337
MILDFLESQGALKRTARALSYGREAGAPWRLLPLLGVLKGGLLFFPALEGFPAHEQRGREVPWLPQRASAKGTAPCAQGRKRLPALNAVEKRGRWAEEEEGLGRHG

SEQ ID NO: 52713 - protein, 117 aa, Zea mays
  Coding DNA Sequence Number=SeqID_9338
  Gene Ontology: Mol. function=methyltransferase activity; Cellular component=mitochondrion; Biological process=ubiquinone biosynthetic process
  Homolog annotation: Hit_ID=A2WZP1; Match level="QueryCoverage=81%, HitCoverage=41%, E-value=3e-26, Identity=55%"; Hit description =Putative uncharacterized protein
  Pfam annotation: Domain name=Ubie_methyltran; Domain location=1-110; Score=-126.7; E_value=0.0032; Accession=PF01209.9; Description =ubiECOQ5 methyltransferase family
MATSLRYMSIKEEWKMCIYASGCSEIGLVQVMGSGYSKEHCLSWIQGDAEALSFEDGSMDGYTIAFGIRNVTHIEKALSEAYSYDAYSFSMIPAIGELVDGDRQIEDGQHANQACEP

SEQ ID NO: 52714 - protein, 61 aa, Zea mays
  Coding DNA Sequence Number=SeqID_9339
MSRAFDDYYIEDCGVILASEVTQRRIDNSDQFVILATVRLDATDIGFELGARTCGVELYTT

SEQ ID NO: 52715 - protein, 153 aa, Zea mays
  Coding DNA Sequence Number=SeqID_9340
  Gene Ontology: Mol. function=catalytic activity; Biological process =metabolic process
  Homolog annotation: Hit_ID=A3AE78; Match level="QueryCoverage=29%, HitCoverage=6%, E-value=2e-10, Identity=77%"; Hit description =Putative uncharacterized protein
MSSTTFWRRLRLILEAIGAAASRILVDAAQHRSQPSKIFLAVLRSGMLTSLRQFESKPKARVFINSCFAHCQSELQDTWFAPNYPSDNKIAPVEIEGLLLSHLEILDAIVIWLPDAKAGEVPIAYVVLSFSSSCRIEVVASSCDAIRFCQLYV

SEQ ID NO: 52716 - protein, 126 aa, Zea mays
  Coding DNA Sequence Number=SeqID_9341
  Subcellular localization annotation: CTP_CleavageSite=21; ConfidenceScore=5.10e-01
MYEMHPALSLKTRCDRAVPGRSSMANSTFHSGGMPGRQGLTAAGLPSSDIASPNGLALHSENMLCFRLELVLLDCSVGLLGQEDEVPADSASETDLLLTDYSGDSAAGAEGTTFETTAAEMGAGSV

SEQ ID NO: 52717 - protein, 246 aa, Zea mays
  Coding DNA Sequence Number=SeqID_9342
MARLRHTARKSVIPFLPSRFAERPLRRPVTGQSSHLERLHHRLHEEQEHRQQELEQQGSSFSLQQEIESVRSCSPVLPLEAPPAPPLSAPATGVAAGGDPDDEGGNSSLSFSTDLSADQELEGLVARPITRDTARGCHFHDTFDTLLRQALDRHTWSIEYRCVVFQHSHGVYPDRWEATCLVRRPENSLRGAEICLEQYSISERDSGKAAMQDATRRALSHYCSVLGGVANGLNLKYYPCRPSSST

SEQ ID NO: 52718 - protein, 116 aa, Zea mays
  Coding DNA Sequence Number=SeqID_9343
  Pfam annotation: Domain name=GRP; Domain location=17-113; Score= -28.2; E_value=0.061; Accession=PF07172.2; Description=Glycine rich protein family
  Subcellular localization annotation: CTP_CleavageSite=47; ConfidenceScore=5.12e-01
MVGGERLPSSSINNAFASPAFSHLLLFSAACFLLLSLFPPWARTYIRAVERSGLEGSDESEYSSDEEGSPEEDGDGDDDDDRGDDGDDGGGGGRGGNGDGKGGDGGSSKGSNKASG

SEQ ID NO: 52719 - protein, 105 aa, Zea mays
  Coding DNA Sequence Number=SeqID_9344
MAHRTVRCTPDMSGAPATSSVPLESDRWSSDLWATLDVRWRTGQLLFIVRCASMGKPDVCARCGAFNASAGSLEDMVAGVTWSSILPPGWTVEWDPTSAEKEHEE

SEQ ID NO: 52720 - protein, 148 aa, Zea mays
  Coding DNA Sequence Number=SeqID_9345
  Subcellular localization annotation: CTP_CleavageSite=64; ConfidenceScore=5.04e-01
MEKRPQELFSFGKSQRLVRYNSPDMSGVHRTVRCDSSTTAIPRQRLPAEALNAPQRAQTSGAVRCATGTSRVAHKSELQRSDSNGTDDVAGAPDMSGVHRTVRCAIEQTGSPTATFGGWGYKYPNHPTFIAIQVFPLLNHLQELGIQF

SEQ ID NO: 52721 - protein, 176 aa, Zea mays
  Coding DNA Sequence Number=SeqID_9346
MVQGVTRSTCSGGFTNSGERERTILVGLVLGSSSGKLHGLLGKLSEGSDRAKVGGKGFGHGGCPRAVLAGRGEVAGTVGELGKVGRGAEEATGKMGMHEGELYSHSRARHGRGHRGGRGRVRACFVAFPSVCPRQTRGGLLLPVFNDLFGRLSVQISAKIPCTVSSLHQILSFPWY

SEQ ID NO: 52722 - protein, 270 aa, Zea mays
  Coding DNA Sequence Number=SeqID_9347
  Gene Ontology: Mol. function=transferase activity, transferring glycosyl groups; Cellular component=integral to membrane; Biological process=protein amino acid glycosylation
  Homolog annotation: Hit_ID=Q2WBL9; Match level="QueryCoverage=91%, HitCoverage=56%, E-value=1e-144, Identity=97%"; Hit description=4 -alpha-L-fucosyltransferase
  Pfam annotation: Domain name=Glyco_transf_10; Domain location=2-269; Score=-142.2; E_value=3.7e-05; Accession=PF00852.10; Description =Glycosyltransferase family 10 (fucosyltransferase)
MTTSMKKALAFPGTFMWRSDQGRRMKGLPLRVYLDLEASRKPTGFEDIFVGYHASDDVQVTYAGKSFHTSRSYHISTEKRNDALIYWSSSRCLPHRDKLAKDFLSLVPHHSFGRCLNNVGGPDMALSMYPVCSTNDNGTPHWWDHLHCAMSHYKFVLAIENTKTESYVTEKLFYALEAGSVPIYFGAPNVWDFVPPNSIIDASKFSSLRKLASYVKTLANDPVAYAEYHAWRRCGALGNFGRAREMSLDTLPCRLCEVVSKRGGKGADAL

SEQ ID NO: 52723 - protein, 446 aa, Zea mays
  Coding DNA Sequence Number=SeqID_9348
  Gene Ontology: Mol. function=nucleic acid binding; Cellular component= intracellular; Biological process=regulation of transcription
  Homolog annotation: Hit_ID=Q2QX40; Match level="QueryCoverage=53%, HitCoverage=53%, E-value=2e-68, Identity=59%"; Hit description=Zinc finger, C2H2 type family protein, expressed
  Pfam annotation: Domain name=zf-C2H2; Domain location=207-229; Score =30.5; E_value=6e-06; Accession=PF00096.17; Description=Zinc finger, C2H2 type
MDNHIHSQPAANLYYQFGMGTEQQYPPPFASPPSTNIPHMDWNPATMLDNLTFIEEKIQQVKDVIRTMVDNAGQVQVQCHHQAGELLAQKQKQQVVNADLTCLIVQLISTAGSLLPSLKNSSFLSHPHPAGHVDMANHVGPSSSLVPNAMTVSEDYEELFKGWTDGGIEVDDDGVLVEEQEITKDGDSLSYELLQLEEDEILAPHTHFCTICGKGFKRDANLRMHMRGHGDEYKSPAALAKPPRDPGAEQEPAKRRYSCPFAGVQAEQAAQKLPAPQDHPVREEPLQAEPLREEPHLRPVPRQEVLHRGRPEDAREALRPPGQVGVLLRDEFLEEGQALRARRLVPRSHARVVVAAGGGAAEGLLGPAPDRPCWEPSGTSESPSWLSGRRQRQQLRVGCLVLRGEQCSGYQSFGPADGFTGEPSSGGSFSMLPPEHFQSAQKKGQN

SEQ ID NO: 52724 - protein, 93 aa, Zea mays
  Coding DNA Sequence Number=SeqID_9349
  Gene Ontology: Mol. function=kinase activity; Cellular component =ornithine carbamoyltransferase complex; Biological process=amino acid metabolic process
  Homolog annotation: Hit_ID=Q6QP54; Match level="QueryCoverage=77%, HitCoverage=36%, E-value=2e-09, Identity=44%"; Hit description =Putative kinase
  Subcellular localization annotation: CTP_CleavageSite=54; ConfidenceScore=5.02e-01
MALPVDVAGPRPRSGDVGAPPKPGLSLSSVAEAESEPLGRARRRSFGRGQGGVRALGPSPSPRSGEAEFAVFRGLARVRALGRAERSSPSSGA

SEQ ID NO: 52725 - protein, 91 aa, Zea mays
  Coding DNA Sequence Number=SeqID_9350
LGCTLKAPMVKRKRKKELQRELQVNSKRVLDYQTATASPLTGTVRCGSRSPIAASAVAVGSGMGGRPRDRWARDRTRGPVADRPMRSGSRQ

SEQ ID NO: 52726 - protein, 586 aa, Zea mays
  Coding DNA Sequence Number=SeqID_9351
  Homolog annotation: Hit_ID=A2Y9N4; Match level="QueryCoverage=42%, HitCoverage=12%, E-value=4e-13, Identity=24%"; Hit description =Putative uncharacterized protein
MEGDGGGLISHDADGLQSKRQRIHKRRRRAKPVSDLVKKPAGPASPAEDDKPCILRWTQQMTRAEDDLQKAVVITVISDRERVPIEEIVELIAPRLELEERSLIIRQYSESSFILFLPGCDMVEILVGNWPFLRAATFTITCRKWSRFLNSRGVVLLILLDIELQGIPIHAWETITVEQLLSPFASVHQVHPDTLELKDVVVYRCSAWCLDTSLVPASRELWIVEPPFAIDGVSSGRRTLMYPIRITFSSAPRRDGSDPKLQAITSSGDGFGNVQQGSPFSRPPHSLRGRGEDGHLGRLSVHERLGPRDENMQQRNISSEMAVSDLRTTLESDWGTLSPRLIEMTDDRVLTSPVKAKQLKVYSRQRLKNVLTLEGAGAPNTVTVLPPSPTDVADADTVPSEYPVLDVDAVLATPFGTLPSSLSDVAAAHAAPSEASALDIDAELAAPSEEDLPTTQDSVEINAREQFISRLSNQITRVLPIPKSVRRQSSTPLAVPRCSRRVAGVGVEFKIQDWGKRSKKQAMVALNIIEDNEGFSRQALDDYAKLFKNTLSCSHVRALAALFGWSVPDNLEYDNGTGDITAASIF

SEQ ID NO: 52727 - protein, 504 aa, Zea mays
  Coding DNA Sequence Number=SeqID_9352
MSLGGRGKRGDLDYVAPMGPLFRTHPLIRPPGGRGEERRHRLHRADGSFVSDPPLDSGSSQKRQKTVGGAKEAEPQAQDGQRGVSPPTLPPSDLTPPPPPPMTDQSSSPQGQRQQRQRVPRFQGHWVAPSDPQDPPVTVEAAPSGPRVPAEGPEATLLPTAAEGLAAGIPSDAPSAVGVGGAPSSVPPPTPGSPEVILGRPLRSGTESEATLTPLPRVLSRAHQDLRETEVAIRREWEALETKRQRLGDWCTQLEERTKVVSCHFASERAEFEQEREDFKEDIRKVSDREDEVIQKEKGLARKEVRLDQREETVTALQAKLKAYITVLEKQRVKQAAAEVKLQHELANRASDIARAEGSLKAGEASLAKWAAGLTRQEEDLAFREEMWAWRNKLLDELELEDEERRKRLEEKVRALEEQVRQFRAAQVAQATRTASAPQAVEAMRKILDDLRAEQRAGAQRIASWAGEASTAIVPLGVSPIPALVRPASISDTLPVLDSAADRL

SEQ ID NO: 52728 - protein, 479 aa, Zea mays
  Coding DNA Sequence Number=SeqID_9353
  Gene Ontology: Mol. function=transferase activity, transferring glycosyl groups; Cellular component=integral to membrane; Biological process=metabolic process
  Homolog annotation: Hit_ID=A1XFE0; Match level="QueryCoverage=93%, HitCoverage=97%, E-value=1e-158, Identity=64%"; Hit description=UTP -glucose glucosyltransferase-like protein
  Pfam annotation: Domain name=Glyco_tran_28_C; Domain location=287 -459; Score=-39.2; E_value=0.085; Accession=PF04101.7; Description =Glycosyltransferase family 28 C-terminal domain
  Pfam annotation: Domain name=UDPGT; Domain location=20-478; Score= -62.1; E_value=1.8e-07; Accession=PF00201.9; Description=UDP -glucoronosyl and UDP-glucosyl transferase
  Pfam module annotation: Pfam domain module=Glyco_tran_28_C::UDPGT; Domain location=287-459::20-478
  Subcellular localization annotation: CTP_CleavageSite=60; ConfidenceScore=5.59e-01
MSSPAPSSASRSSHGSRGSPRIVLFPSAGMGHLVPFTRLAVALSAGHGCEISLLTALPTVSSAESRHIAALYAAFPAIRQLDLRFAPFDASSEFPGADPFYLRYEALRRCAPSLLGPLLAGAGASALVVDMALASVAIPVARELHVPCFVFFTASATMLSFKAYFPTYLDDVGAGHGVGDVDVPGVYRIPSSSVPQALHDPDNIFTRQFVANGRALATADGLLVNAFHAMEPEAVEALQGRFVLSVLPPVFAVGPLMPVNDLRETGEAAQKQGNYRAWLDEQPPRSVVYVSFGSRKALPKDQIKELAAGLEACGHRFLWVVKGAVVDRDDAGELSELLGEAFLRRVHGRGLVTKSWVEQEEVLRHPAVALFVSHCGWNSVTEAVSSGVPVLAWPRFADQRVNARVVVRCGLGVWADQWSWEGEEALVRAEEITALVMEAMEDDAMAVKAANVREAASRAVVDGGTSYRSLAAFVRRCTA

SEQ ID NO: 52729 - protein, 239 aa, Zea mays
  Coding DNA Sequence Number=SeqID_9354
MHLLAIARFPPLRDFSQYQRDPYESRPPARKTQGKREQQFRQELHQNHANPSRSTHIPHPWQICGNRTNKEEPNHEPSEKMQEHSRWRTAKVAHDFRSAPFRAAAIRPPRRLLDTIGPCLGCDFWVDSLGFEPGWRWLLGTTGYWVPPCRAWERSAPASGPRRRRKREGELNGDSQRMTGSMRRALMEADDGIWEWQLRLAGWMAGGGLDGGRECRSRRPRWAGVQVAAFAAAAAGGLR

SEQ ID NO: 52730 - protein, 256 aa, Zea mays
  Coding DNA Sequence Number=SeqID_9355
  Gene Ontology: Mol. function=oxidoreductase activity
  Homolog annotation: Hit_ID=Q10I64; Match level="QueryCoverage=57%, HitCoverage=24%, E-value=1e-64, Identity=78%"; Hit description=FAD -binding domain-containing protein, putative, expressed
  Subcellular localization annotation: CTP_CleavageSite=43; ConfidenceScore=5.16e-01
MARQQPERVPPQRHPVGCGGGWKRDGVCGSPPLSGGLFAAATSASSRSECRRSGVLSVVEVVGSAVGVCPWDPRVRGGTLFHQTIFSLPVRRAVLFVAEVHRLRDLEPRALCGVELYDGILMRYVKASTAYLGKPAPRGEPSGDMVDFDITYYHSCDPGQARLFEDVLEEVEQMGIFKYGGLPHWGKNRNLAFVGAARKYPGLPRFLRVKDAYDPERRPVGCGGGWKRGGVCGRGVRADAGAVYIGNLIVSRDILI

SEQ ID NO: 52731 - protein, 111 aa, Zea mays
  Coding DNA Sequence Number=SeqID_9356
  Homolog annotation: Hit_ID=O48967; Match level="QueryCoverage=29%, HitCoverage=7%, E-value=3e-08, Identity=75%"; Hit description =Putative uncharacterized protein
MARRLHGAGGFGAGAAVTLMAFMVLHSGSCPVHPNGRHSAAKCREIIELAKRVGERREQSSKDGSPPRRRPGKERVDDGEVAAAEWDLGYQSPEGVLKDVFTGDSDSGGDN

SEQ ID NO: 52732 - protein, 285 aa, Zea mays
  Coding DNA Sequence Number=SeqID_9357
MQAAQGRRSQTTARDQRVKGRIAIQAACDRAKWAHPFDSNAPSLEAQAHTSCNRTGGTFGRRSGRCFAFAIMTSSKKAGPSEGFNSRLRALGLRAHYWSEVQRPAPRKGSTTASGHSGSAPTTDQGARSTQGTRPRLARALPRARAADPGGFTSRPRAPSSNGHTFGSPEAQSSLRSNLGPIATPTDRIAGAFNAKGSDSGSAPEDDELRLARPQGSDSGSAPEDDEVRLARPQGSDSGSAPEDDELHLARPQGSDSGSAPEDDELRLGLGRQTRPRPRRSLRLA

SEQ ID NO: 52733 - protein, 17 aa, Zea mays
  Coding DNA Sequence Number=SeqID_9358
MEVVVIAISLNQGTLGI

SEQ ID NO: 52734 - protein, 539 aa, Zea mays
  Coding DNA Sequence Number=SeqID_9359
  Gene Ontology: Mol. function=aspartic-type endopeptidase activity; Cellular component=cellulose and pectin-containing cell wall; Biological process=proteolysis
  Homolog annotation: Hit_ID=A3AVX0; Match level="QueryCoverage=90%, HitCoverage=90%, E-value=1e-137, Identity=57%"; Hit description =Putative uncharacterized protein
  Pfam annotation: Domain name=Asp; Domain location=89-491; Score= -196.0; E_value=0.052; Accession=PF00026.14; Description=Eukaryotic aspartyl protease
  Pfam annotation: Domain name=Drf_FH1; Domain location=68-232; Score= -12.8; E_value=0.089; Accession=PF06346.3; Description=Formin Homology Region 1
  Pfam module annotation: Pfam domain module=Asp::Drf_FH1; Domain location=89-491::68-232
  Subcellular localization annotation: CTP_CleavageSite=100; ConfidenceScore=5.15e-01
MRLLCCLAALVVLALQHQCHGLLLPLTNTMLSSLRGTNGTTTPVHHLLRASSLRSAARHGRHRARRSPPSPPSPGRHRQLSLPLSPGSDYTLSLSVGPASAAAPVSLFLDTGSDLVWFPCAPFTCMLCEGKPTPGRLGPLPPPPDSRRIPCASPLCSAAHASAPPSDLCAVARCPLEDIETGSCGASHACPPLYYAYGDGSLVAHLRRGRVALGAGARASVAVAVDNFTFACAHTALGEPVGVAGFGRGPLSLPGQLSPQLSGRFSYCLVSHSFRADRLIRPSPLILGRSPDDAAAAAETDGFVYTPLLHNPKHPYFYSVALEAVSVGAARIQARPELARVDRAGNGGMVVDSGTTFTMLPNEMYARVAEAFARAMAAAGFARAERAEEQTGLTPCYRYAASDRGVPPLALHFRGNATVALPRRNYFMGFKSEDAGAGTRKDDVGCLMLMNGGDASGEEGDGPAGTLGNFQQQGFEVVYDVDAGRVGFARRRCTDLWDSLSRRFCIFFCLNLSVKRYGNLRSCQDRKGLHGLLATGRQQ

SEQ ID NO: 52735 - protein, 91 aa, Zea mays
  Coding DNA Sequence Number=SeqID_9360
MAIFGKTVDDHKNAVHCSRFGQTLDEVHGQGMPSMGRHRQGRQEPWVLDTFWLGLLASGARVNKLVDCLLFFCQIHGEGGGKLAQSRCSQF

SEQ ID NO: 52736 - protein, 129 aa, Zea mays
  Coding DNA Sequence Number=SeqID_9361
  Gene Ontology: Mol. function=protein serine/threonine kinase activity; Biological process=protein amino acid phosphorylation
  Homolog annotation: Hit_ID=A3AZI1; Match level="QueryCoverage=31%, HitCoverage=6%, E-value=5e-10, Identity=77%"; Hit description =Putative uncharacterized protein
MARAAAPILLHLLLLLADLGPAAAVRFNYASLTLGSLRLLGDAHLKNGIIRLSRDLPIPTSECGGAKQCALADDEGSAFPTAAVVELKFVARGTRTMLAPGPLLMAVQQGKVTPPCSRSTVSKAASSIC

SEQ ID NO: 52737 - protein, 171 aa, Zea mays
  Coding DNA Sequence Number=SeqID_9362
  Homolog annotation: Hit_ID=Q6QP51; Match level="QueryCoverage=29%, HitCoverage=22%, E-value=3e-11, Identity=66%"; Hit description =Putative growth-regulating factor 1
  Subcellular localization annotation: CTP_CleavageSite=69; ConfidenceScore=5.50e-01
MQAACNRAKWAHLSDFQRAQHGGPGPRVMQPAHRMLRASNCTATRATAMAPRLRNQYRDSRQPYARPSSASLARRRRLWQEKQATLHLRHNDRVKKGTGKGGYPEKDPSPCRNQAPSLPTDQRFKGWPLGGVQQPPQSTWAPHPLLVRGSKVGPSEGFNGCLRPLGLRAHY

SEQ ID NO: 52738 - protein, 66 aa, Zea mays
  Coding DNA Sequence Number=SeqID_9363
MEVTEDPSALEVAVVENPAPKGGAGGYPAPEGVASNDPARVGSAGCNPAPEGVAGKLASVIPPGFG

SEQ ID NO: 52739 - protein, 388 aa, Zea mays
  Coding DNA Sequence Number=SeqID_9364
  Gene Ontology: Mol. function=histone acetyltransferase activity; Cellular component=cytoplasm; Biological process=regulation of pH
  Homolog annotation: Hit_ID=Q8LPU4; Match level="QueryCoverage=31%, HitCoverage=27%, E-value=4e-58, Identity=90%"; Hit description =Histone acetyltransferase type B catalytic subunit
  Pfam annotation: Domain name=UQ_con; Domain location=133-260; Score =89.7; E_value=9.4e-24; Accession=PF00179.17; Description=Ubiquitin -conjugating enzyme
MCLLQRAALYFVGGADDREALAYAARMPETGTMSLTVVRFKLRNWVGMGGRDEARDEELLQEFWSRHRDNERGGIRGEDGGGRGGHGVRGEGDPEGSTALTSGLSESSEFPELGVLGDMLASAEVASKVSILVIQQQPPKKTIATIKLFCFLALAAKRGLTDWEGGYFPVTLHFTENYPSNPPTCKFPRRFFHVNVYDSGDVCLSILGDAWAPSITVQQILIGIQELLENPNPASPAQDFAYDVFAELRFHAYRYWRTWMGNASGSKKGTQEAGSKFELLGFAAVHNFYHYPESIRLRISQGEGHGLGLLEAINYIAQSKNIYDVTIESPSDYLQYVRSSVDCLRLLMFDPIKPALGAIVSSLKETNLSKRAQSLRMVPPADLMETVR

SEQ ID NO: 52740 - protein, 169 aa, Zea mays
  Coding DNA Sequence Number=SeqID_9365
MEVRCQTSFCQNEDGFPKLLKACTVRLGIRSQPEYDGREFVEHGLEKCVVTVYIGSNPHHVEWSVTVAGHRFKDTCQVVARKALRALCQIYEEEVAETPLIFFPPFQRDRPVWMARMRALEDDAREEDVEKLNRKLHVDLTTAQARVAALESHEVIAVEALKQAKDEHA

SEQ ID NO: 52741 - protein, 98 aa, Zea mays
  Coding DNA Sequence Number=SeqID_9366
EPAPKEDDSWAWAPASEAEPLDSVEVKRGWAAVFGGDEEARRFAPRMAVRLLRTWRPMPKEYDSWTRALVLEAGPLLSAEMKRHDSSLLAWRFAFFAH

SEQ ID NO: 52742 - protein, 180 aa, Zea mays
  Coding DNA Sequence Number=SeqID_9367
MVTTSLMVGRSKPGCGLCLALSFKDLHHPCWGGGRGEPGFYLPHGPAGHLFLQHSGERALAGLAEGANFDNAGLVGRKHRQLQHTWLAGSAGSGAAFGATSHRWGGAWLSAHRTGGCCAVRTGGPSKTSHAARAVFVFLDCLVLTLARRLHTEVAAVVGAEAVVARGGFSTDETVGATRG

SEQ ID NO: 52743 - protein, 191 aa, Zea mays
  Coding DNA Sequence Number=SeqID_9368
  Homolog annotation: Hit_ID=Q6QP51; Match level="QueryCoverage=40%, HitCoverage=35%, E-value=2e-24, Identity=72%"; Hit description =Putative growth-regulating factor 1
MQVACNRTARAHPLGFVASSMDAQAHTSCNRRAGYYVQATAPPLAPMSRLLDCGTGAATRGNPAHGPTVPIERIDHGLTSPPGAAGEPSPTGKRYLLQAKRASFHLRHDDRVKKAAPEHSGFRLITDQRFKGWPLGRVRQPTQSTRAPRPLLIRGSKAGPSEGFNSRPRARRARDDSGYVRYMAEARATLP

SEQ ID NO: 52744 - protein, 136 aa, Zea mays
  Coding DNA Sequence Number=SeqID_9369
MTVAGGREQRSRRQPSSRPIRGQQENPLSRREDNAPVIRSSNGSRTRNGRPANHSPRRINSAGPGKGDTPKRILPREGTRLRASLLIRGSKAGPPKGSTTASDRVGPTPTTGQRFEGRPPEGFHGRLRLLGLRAHY

SEQ ID NO: 52745 - protein, 335 aa, Zea mays
  Coding DNA Sequence Number=SeqID_9370
  Subcellular localization annotation: CTP_CleavageSite=9; ConfidenceScore=5.45e-01
MSSRSLMHRVFSPSKPPDGGYPPSFRLIVGGTQLRGSWYLSAIVRLQGFSSVSPAVPPCRQSPKTVTTSPWVGRSKPSCDLGPTLSFKDVHHPCWGGGRAEPELYLPRGFVGHPLLRRSRERALTGPAGGPDFDNAGLVDGGRRHPQRVELVGLAPGGPSCRKAAAAPCAREDRPRCRALLGRRSCSGVVLPLHRPSPIEWGCSYLRRRNRSSVCNGTLNANSLVGCLNRFTKRESPRVKVTSEPKPRVGLAPSKDSWPRPRGDRPSRLLGPDSRRRPWQRLPGCGDDVVLYNGDPRTASPSEARSDLAEGVVDAEGAAAPFQRQGPSLQDQIVL

SEQ ID NO: 52746 - protein, 105 aa, Zea mays
  Coding DNA Sequence Number=SeqID_9371
MSTAEVKVMWARADGLVEDWWDTRLMVEDVHKVRCSWQCLEAKYDWLPFTPLVALPVLQLISETIKDLSNRFEIHVGGMERGVGKPPFFDGTNYPYWKIRKSAYL

SEQ ID NO: 52747 - protein, 189 aa, Zea mays
  Coding DNA Sequence Number=SeqID_9372
MKLPGPGIELYLAGDTGINVAGLHQIAGVDPLAPRKALCALGLNPTAVSRPEHTPPTNPPACAHGPTDSGHHHRRAVPRCDRKDFPELTHPLSDLPRRRKNVCNVHLSVGVVWKLSCMNSGFPFEMDTSMLGRVAALLIRDLGRSRVIFLALTRGSLEDMVAGVTWPSIFPPGWTVEWDPTSAEEEHEE

SEQ ID NO: 52748 - protein, 144 aa, Zea mays
  Coding DNA Sequence Number=SeqID_9373
  Homolog annotation: Hit_ID=A2WPX5; Match level="QueryCoverage=52%, HitCoverage=35%, E-value=1e-07, Identity=47%"; Hit description =Putative uncharacterized protein
MDRRLRALGLRAHYWSEVRRLAPRKGSTAASGHSGSALTTDQGLRSRGTLGHFRDRRERFCNGIPPEGGIEPSDPVKRGPGPANHPQVLLERASGPLADPYRTGHGRPLGSPVSNSLETPCSAPSEGNMALSPLLLAERQCWGV

SEQ ID NO: 52749 - protein, 104 aa, Zea mays
  Coding DNA Sequence Number=SeqID_9374
MESGGGVLPEAAQQHSVPSVTRWEYSHLRLGCDSENGSVLMYQVPGVLLYLTSRRGKLNEKGRMRHARRRAAEGQRSRMQLTKRHETERVNPELKLPRLMSAKN

SEQ ID NO: 52750 - protein, 85 aa, Zea mays
  Coding DNA Sequence Number=SeqID_9375
MEGTTPPARGVHHAANWRARIGYNGSFERIFVATARAKVDASVAAVRDSRRFAVCPHLPRWRPDQHAQVLKSFSLSLLQQFEFLS

SEQ ID NO: 52751 - protein, 176 aa, Zea mays
  Coding DNA Sequence Number=SeqID_9376
  Gene Ontology: Mol. function=carboxyl- or carbamoyltransferase activity; Cellular component=ornithine carbamoyltransferase complex; Biological process=amino acid metabolic process
  Homolog annotation: Hit_ID=Q8SA97; Match level="QueryCoverage=100%, HitCoverage=24%, E-value=4e-30, Identity=46%"; Hit description =Ornithine carbamoyltransferase
MAPPVDVAGLRPRLGDVEAPPKPRSSLSSVAEVESEPLGRARRRPSAEARAESEPWGRAEWSSSSSGAEPKSEPWVGQSGVRRLPGLSPSPSPGSGGAEFAVFRDLARVRALGRAKRSGTAVGVAQAALSVEQRSDGGHFGSAGWGARVRIKLYADGGYQLRIRSLEGTPNYGPRQ

SEQ ID NO: 52752 - protein, 185 aa, Zea mays
  Coding DNA Sequence Number=SeqID_9377
MQARVLTLEGSSSTLGIDNTFGEVRPSLGRRRGPKISTPKDDIIATPGPSLPGSSPGIRPEQAARPVTLGPRPAVLQGRQPDPRPRLVNSGVGPANGRPSQAPANQASTATMNKNTGIQSAITNGTPVPPPQERVTHEPAREVELRLSPASTPARMMNILEAEGGTKIAARLASPHPGAGGHRLG

SEQ ID NO: 52753 - protein, 247 aa, Zea mays
  Coding DNA Sequence Number=SeqID_9378
MAERCQLPRSRILPTTRRKDGGYPPSGGLEGGKTRCIREREDIVAFQGGHPPFKGDSPCLRPQPSQAESSPTRSKVLPRGAGAGSHASCKPAQSRRSQTAARGAYNRPAVTSDSPLLPRPTGKRGGQPCRRHATAPSGRTSPTPNTPSMEAQAHASCNRRTKCFVHATAPPLAPLPCLLDCGTNTATRGDPAHDPAHDLAAPAWRDGQCGQKWVGSNGDGRRAGAAAPSSAKLTSHPGAAREPSLTA

SEQ ID NO: 52754 - protein, 120 aa, Zea mays
  Coding DNA Sequence Number=SeqID_9379
MADSKDLNSASPNSDTRLTNLSVAKHETLKDDMKKMDEEIQRQQDQMLKVAKKWYLSHFKVDRHQKVVKEREIDADYMSSVLQQLPTIGDARGAFIANGMAPFSIIPMIVPSSVGKYNRL

SEQ ID NO: 52755 - protein, 858 aa, Zea mays
  Coding DNA Sequence Number=SeqID_9380
  Gene Ontology: Mol. function=protein binding
  Homolog annotation: Hit_ID=Q5SN38; Match level="QueryCoverage=91%, HitCoverage=92%, E-value=0.0, Identity=64%"; Hit description=TA9 protein-like
MAQLVRRQGKVKLLGECNRGSKSSGCLGLKFCQTTTKPFWSEQRFGFLFLCLVLKEHLGDYGLRFHVELYYFVVHEDTFQEVKSKRDRKKEVKETPEPRSRGASNSSRSSRGGVDRAGRGNSVQSGSSGTDYMASRSSILGPAVAATNAMQKPTVPSLSTNKDVVPNGSVGAQQSSSGFQHNWFGVPGQMSMADIVKMGRPQVRSSGKPMAAGDTSYAGQTPSLSSSINQNSKQSASTALPTTFDQGFPALPDPIPHTVNSSHGSAGNNHTHENDWFPQDDLPSGVQPTCIEASGDQSLFVASLDQSMLVADASYSQEISHAEENNSTAVEATLSSERHLEIVEDDNHFNDGLLQNSSAYQAQVHSYVDNEVGISNVDAESASMNFQHLSLQNEDIAATKSAEDNPAVILPDHLQAANADCAHLSFGSFESGAFSGLLSSKVPKGSLEDDEVLIPDESRSVNRIDVRNQDYYDDDALNSSENVDVETRIGNMDNIDGPSVSESDALRQGAIDVPGLQYDLPSVSSHAYSNTTQPSTMEEPQGNTQAQPLSHFSGLLQANTLPNNLLGSNLTPLREFDFSQFLQTQSATKYNPSVAPNNLPPISMQETSKQGGFPNTQSTQHVPSTSISSGLPLPQQLPVYSQPTLPLGPFTSLVGYPYLPQNYYLPSAPFQQAYSSNGPFHQSAAPAVPGAGMKYPMPQYKSSPPASTLPQPSSLSGYGGFGSANNIPGNFSQNQGAPAAPTTLGFDEALGTQFKHPNHYAALQQSDNSTMWLHGGAGSRTISAVPPGNFYGFQGQSQHGGFRQAHQPSQYGGLGYPSFYQSQTSLPQEHPQNPTEGSLNNPQGVPSQPSHQLWQHIY

SEQ ID NO: 52756 - protein, 283 aa, Zea mays
  Coding DNA Sequence Number=SeqID_9381
MGHLTNAGPSTLAEWEVDGLPYGRGMTVSLISKVEVQPTKRSSRPSSRTSAAEARGHDRTSSQQSQHRGTVRASRLWRLSAVRSARGPEPRRRAAATVLRPPSAVRPSSERPRARAAEQASSSAPPAFAHRPLGLGPSLSVDSAPPLLTAPALRPSSAVRSGSEPRTEPLRDSDAPSAVHPSGRPSSARRPEKASRSSSAPQPAEHAPLPLCLRPPSCCAFRLRRPPSRSVRERDALTAELPPSAEQDFGEFGSRQRLLCRVPEKKHSAKRLALRVSLVGLWL

SEQ ID NO: 52757 - protein, 967 aa, Zea mays
  Coding DNA Sequence Number=SeqID_9382
MQVVELVPCARNKWGNWNEFWFYVAEATVEGHEGLLVSEMCSHYYSTYPPFEVAEEDADEGALRCAAGQSSGRDLVEEFVAYGVWPLAHGWALGEVCPRQMPFHGGREVRSPAFALNLRKRDPAAFVRDAEDGAVRLVGRYVARTEGQRSFDIRGSNDRLNRVFELNQLPYDGYPGQDEADRRGKKTAVETGDDPAPVAAPSSKKRKLGTAMGGLGVSDSFARELMRTCAAPGERMSSPELRESSAWMLRVTGGCWPRNVPIPCAAGEDCFTSRMVRQWRVFPYGRNIGAVVWAVMDKDRQGAAQKRQATVRLHEARPKRQRGAAKAAASGGGKPPLAAKAGASAPSKVLEATAGAGGSKSTKVVPPASGVAEASKAARALPLSGKRVADFGTDITVDDYLGGLDEGQLAMVAPGAEIATAAIVPRARGEALGARGEVSALAVVRDEVGAATRRLKGVTEALSQATEALSQVADFASRTASRALTAAVSAEVERLRTQHADAVREKSASDSKCRKLTDRVAALEREKADLRRQLAAERREANEAIAKEQAAQAEAKLARAEGNLAKELAEHLQERITALESRAKGAEAAMRAEAERTRAQLMDTYRELGARTGDFEVPDREPGLRCLQWVQEELQELPTVVGGLMSYASLVTCEGAMNALSREGCRHFEVFDQADEDFERDIYKVEDPVVKESAGALYDRMWGLHGCEVVRERAETARAQAERGERVDDFGALNSALPDPEPTLAEAVTGVALEPTPETAAIATAASTSAAAGEDLPPKVAEGAPDAPAAAVPSAEDPTAVAAETTAEAAAEPTAEPTAEAPAASGPSQVQDFGPAHATATTEFLAASTAEGGNEYGGSVSEFFDFTDSGSSVEWTEESSEEDLDYFAALDVAAAEASPHAADAPDVPGPNTGRRRRRAVAKRRVSAEEGARLRVSGAGRQEMLSLPAAAGTGEGELRSLLRVRSLG

SEQ ID NO: 52758 - protein, 140 aa, Zea mays
  Coding DNA Sequence Number=SeqID_9383
MGKGTKRKREPTPPSEDFGDSEYSEEEFSSESEGSPAPVSPPASSDDSDDSQGIAAEVWTYIRAVERSGLEGSDESEFSSDEEDSDGGEDEDDDDDDGDDDGGGDGDGDGSGGKGSTRGGSSTGSTRGGGGKGSSNKASG

SEQ ID NO: 52759 - protein, 399 aa, Zea mays
  Coding DNA Sequence Number=SeqID_9384
MARVCLGLGGRRKHTLQDDPIPQARILTVEGSNSTLGVNYTFGEARPGLGRRRGPRISTLKDDVITTPGPSPPGRLGWSPRGLGKLSPEDINPARGLGRSTPTSVPLTDDPTRLRPTRSSFRANSASVRADTATPGLGSSKSGRGFPLTKQEKPRTTRLTEPRDSYASGMRIPHSSPLHGATHAWYEQPHSTGGEPAEQQKTDGRLAVARSGSNNNDPRSGWPNCSSDGLRADAAATMPSPTPTLEGRGQILPDEWGTDLRVEAPYRCKGRTAPEHERRPGSARHLGRSSRAHGATTAFAAGGGTGSQAGESNAPRLTTPAVGQPCVVEVRPSRRASERPLPRTMKERLTHETAREVELRLSPASTPTRMMNIHEAEGGTKIAARLASPHPGAGGHRLG

SEQ ID NO: 52760 - protein, 328 aa, Zea mays
  Coding DNA Sequence Number=SeqID_9385
MGRGAGAGSSSVSATGFFPAAVDNVLPGITAIRQAVQLEDPIQAVVGSAYIPTPLGLRLWHVATNNPHRPILRLTHECGGISAMQIQCEGGTPHQHPATGRHLARAYFAQCLAMRQGPHPIPDKLLKQIAPATHAGRAPQGPFVFILLRYFKLRTIILREVFDRGLPAVRSRCPDIFRQSHHGIWRQLVDLDVESTQNFSHKSMRGQTKASGEKSLEDDPTRLLARGPPSSPGHVPLRRQNNQAVACLARGPRTSTTRQTPLCRRCATPPPPHCSASPRTTRQPAVYRQQKRKRTASLRTVGGGGRSASHGPDLRRARARRANKQQAV

SEQ ID NO: 52761 - protein, 178 aa, Zea mays
  Coding DNA Sequence Number=SeqID_9386
MGELGVSDSFAMELMRDMRGPRGNDVFARSSREFSARMLEGTAKAAAPGGSQPTLAAKSAAPGSSKVPEGMKAVGADGTKSASAGAAKARELPSPGKRVADFGTNISVDDYLVGSGEGQLVVVPPVVATTVSAAVPGVKGSALSAGGEISALTAVKDEAGIVSRRLREASQRLSQVVF

SEQ ID NO: 52762 - protein, 154 aa, Zea mays
  Coding DNA Sequence Number=SeqID_9387
MNALSHEGCSHYEVFDRSDEDFEREIYKVEDPVVKDSVGALFDRMWGPHGREVVRERSDRARDQATRAEKLEDLRPLNSAKPEAEANPVAAETGGRPGPPPRKSAKDSLAPPAATVSGGGSSPTVVPRAEDPLKTATEPAAEDPTAAAGSSQVA

SEQ ID NO: 52763 - protein, 43 aa, Zea mays
  Coding DNA Sequence Number=SeqID_9388
MTTNRPLELLHMDLFGLIAYISIGGRKISDPRDIKRILEMSSK

SEQ ID NO: 52764 - protein, 166 aa, Zea mays
  Coding DNA Sequence Number=SeqID_9389
  Gene Ontology: Mol. function=kinase activity; Cellular component =ornithine carbamoyltransferase complex; Biological process=amino acid metabolic process
  Homolog annotation: Hit_ID=Q6QP54; Match level="QueryCoverage=57%, HitCoverage=33%, E-value=1e-36, Identity=79%"; Hit description =Putative kinase
MKSRMALGSPSPEKSQQKLGSSSSSDPEGPYKGDTQQAFRERAGVVRLLGIGVLRGDGARLRLKREVDARGLRAVVVTEYAGRHHCLSGGASQMGRRSCSPWPESAWGRVMMAPPVDVAGLRPRLGDVEAPPKPRSSLSSVAEVESEPLVRARRRPSTEARVESEP

SEQ ID NO: 52765 - protein, 200 aa, Zea mays
  Coding DNA Sequence Number=SeqID_9390
MQYKGSISLISCEKQTIQIEFLTLQGLTALAYNAPLTPAAAVHNHGGRKGGGAYRRRDCSGEVVEDAGEVSGITTRGSRDAREDMGARNRSETHWIARSTCGGGRPKFGEVDLGPPVKSGQVRGLGKLHRLLAELAEALVRLEDGWSGLATVAEALAAMAGGIELAGAKERGLAGEEIWSQEIRSVSLPKPEANPRFCRV

SEQ ID NO: 52766 - protein, 220 aa, Zea mays
  Coding DNA Sequence Number=SeqID_9391
  Homolog annotation: Hit_ID=Q6J9V9; Match level="QueryCoverage=29%, HitCoverage=33%, E-value=6e-08, Identity=45%"; Hit description =Putative uncharacterized protein
MAKRYQLLRSCVPPTTRRKDGGYPPSGGLEGGKTRYIREREGMVAFQGGHPPFKGDSPYLRPQQSWAEPSPTHSKVLPNGAGAGPHTSCKPAQSRRSQTATRGGASGRRSGRRFAFAIMTASKKGPGKGDTPKRILPREGTRLRASLLIRGSKAGPSEGFDSRLRSRGLYTHYWSEVRRPAPRKGPTAASGILGSAPTTDQGFEDWPPKGSQPPQTQSEG

SEQ ID NO: 52767 - protein, 57 aa, Zea mays
  Coding DNA Sequence Number=SeqID_9392
MAGGIELAGAKERGLAGEEIWSQEIRSVSLPKPEANPRFVVSRARVPMPSSGTRQRG

SEQ ID NO: 52768 - protein, 132 aa, Zea mays
  Coding DNA Sequence Number=SeqID_9393
MARIVCTLHGKRLDGGGGVWEVAFPAPQPKMPPTPPQGIPTAGGDPNGDRDRDDDDGGSSSHNTELSEEQEQEPEGWITRPITHDAARGCHFHDALDTLLCWAFDRHTWSIEYHCVVYQHRRGLYPDQWEAT

SEQ ID NO: 52769 - protein, 144 aa, Zea mays
  Coding DNA Sequence Number=SeqID_9394
MQDVARRALSQYSSLFSGVADGLDLKYYPRRSTDNARGVIVSPAGEGNPRLNKMVNLAVVLNTELDHALDELGKARAEIAELRVERTARHYQDVGSPSPVGIQHPYHSPITPMVLLSHTLIWHHMWNREIIDEHNLSTRELASV

SEQ ID NO: 52770 - protein, 191 aa, Zea mays
  Coding DNA Sequence Number=SeqID_9395
MAHTKTTRRKSTRPFDVPRHQLASWHEGSSSGSNDPIGDLEARVEQLRSELRHRNRAREQDSRRIAELSAKVSRLQYEILERDLGIDWAVNSRSFAWDCEAKAIARVAELSASLESLQVYCNTLHEEVHLLYVRLHPDVPSDIAAMGAGPSGTTNEGPDGELDLFRPPPSVNLADEQSPTTGNGATKDEED

SEQ ID NO: 52771 - protein, 41 aa, Zea mays
  Coding DNA Sequence Number=SeqID_9396
MDVLMIRNLGEDQKGLGKGLGISLRGEVIRVSLVITIGAVV

SEQ ID NO: 52772 - protein, 146 aa, Zea mays
  Coding DNA Sequence Number=SeqID_9397
MGKNNKRKREPTPPSEDFGDSEYSEEEFSSESEGSPAPVSPPASSDDSDDSQGIAAEVWTYIRAVERSGLEGSDESEFSSDEEDSDGGEDEDDDDDDDDGDDDDDGDGDGNNGGGGSGGKGGTRGGSSTGSTRGGSSKGSSSKASG

SEQ ID NO: 52773 - protein, 154 aa, Zea mays
  Coding DNA Sequence Number=SeqID_9398
  Subcellular localization annotation: CTP_CleavageSite=80; ConfidenceScore=5.06e-01
MHPSPPPIALGSLASDLTAASAVDRPPQAPSGQIGPTPKIPYPRPCLATTPPSQNRAPGGEPPRTSPAVEPDRRTLSCPRSDAATSSSDRIDSMARISAVVAAVITAAVVVDALFTAASATEAPAPAPMSGAGALSAQLSVGCLAALLAAFLRH

SEQ ID NO: 52774 - protein, 169 aa, Zea mays
  Coding DNA Sequence Number=SeqID_9399
  Gene Ontology: Mol. function=thiopurine S-methyltransferase activity; Cellular component=cytoplasm; Biological process=metabolic process
  Homolog annotation: Hit_ID=A5AQ16; Match level="QueryCoverage=100%, HitCoverage=72%, E-value=3e-74, Identity=86%"; Hit description =Putative uncharacterized protein
MQELLAIQQQGPRAIGFFGTRNMGFMHQQLIEILSYAMVITKNHIFTSGASGTNAAVIRGALRAEKPELLTVILPQSLKKQPPESQELLSKVQNLIEKPQHDHLPLIEASRIPPLYLVATVAIFRLCNMDIISKVQQVICFAFHDSKLLMETCQEAKNLRKIVTLFYLD

SEQ ID NO: 52775 - protein, 347 aa, Zea mays
  Coding DNA Sequence Number=SeqID_9400
  Homolog annotation: Hit_ID=A7P4H3; Match level="QueryCoverage=27%, HitCoverage=57%, E-value=7e-28, Identity=63%"; Hit description =Chromosome chr4 scaffold_6, whole genome shotgun sequence
  Pfam annotation: Domain name=DUF866; Domain location=124-308; Score =98.3; E_value=2.4e-26; Accession=PF05907.4; Description=Eukaryotic protein of unknown function (DUF866)
MGTGWGRGVGWSDRAWKGERGRCRWCRQCMLRWWKGGMGRVPSCGKSMERKAVMVATERPRSANAWATASRVRGDVVEGDVRTGAVASDDSISLSSRPDRPTSRRLGRLVVRLVVPDRHSPTSRGFADITWANVDEVVGAAEGLRGCNLPRAASTRVAAVSSHIISYSRSRKHQRDTTQQSEGDATDEMDEDNDDESGSAEVADAGFHLDDDLCKLCGRDGTIVMIPGQGTPLTIEQSQKEEKTCLMVFDCRGYEPVEFSFGAGWKAESVHGTPFEIDCSEDEFSEYDEKGECPVELSKLQSTFKVVKKHEKGAFSDSVHRGIALDRLLLFCGLRSSEPIFLSSANA

SEQ ID NO: 52776 - protein, 323 aa, Zea mays
  Coding DNA Sequence Number=SeqID_9401
  Gene Ontology: Mol. function=protein dimerization activity; Cellular component=endoplasmic reticulum lumen; Biological process=proteolysis
  Homolog annotation: Hit_ID=Q84XG9; Match level="QueryCoverage=97%, HitCoverage=64%, E-value=1e-127, Identity=74%"; Hit description=IAA -amino acid hydrolase
  Pfam annotation: Domain name=M20_dimer; Domain location=61-163; Score= 33.8; E_value=6e-07; Accession=PF07687.5; Description=Peptidase dimerisation domain
  Pfam annotation: Domain name=Peptidase_M20; Domain location=5-301; Score=70.9; E_value=4.2e-18; Accession=PF01546.19; Description =Peptidase family M20M25M40
  Pfam module annotation: Pfam domain module=M20_dimer::Peptidase_M20; Domain location=61-163::5-301
MGKTPNPRQGTVVLVFQPAEEGGGGAKKMIEDRAVENIDAIFGLHIADSVPIGVLASRPGPIMAGSGFFEAVISGKGGHAALPHHTIDPILAASNVIVSLQQLVSREADPLDSQVVTVGKFQGGGAFNVIPDSVTIGGTFRAFLKESFNQLKQRIEETKIKDSKLHSIYGYLKLLDNLSLCLTTEVIVSQASVQRCSAAVDFLSKDRPFFPPTINSPELHDFFVNVAGEMVGSRNVRDRQPLMGAEDFAFYAEAVPSTYYYFVGMYNETRGPQAPHHSPYFTINEDALPYGAAGQAALAARYLLERQQPAAATADKAETHDEL

SEQ ID NO: 52777 - protein, 46 aa, Zea mays
  Coding DNA Sequence Number=SeqID_9402
MEGLFVKSCRTTGGGTSAAAVWRAWDPQPPIYGLGITYSLVMVAEN

SEQ ID NO: 52778 - protein, 35 aa, Zea mays
  Coding DNA Sequence Number=SeqID_9403
MANEVAATEVMTIIIVRRAWVRTPPPGPFLTFFLI

SEQ ID NO: 52779 - protein, 354 aa, Zea mays
  Coding DNA Sequence Number=SeqID_9404
MQAACNRTQGAHPFDFDASSMEAQAHTSCNRRAGYYVQETAPPLAPVPRLLDCGTRAATRGNPAHDPTVPTEHIGHGSVSRVRGRDGRYGQKWAGSNGYGRRAEAAVKSTGGTFGRRSRRRFTSAMMTASKKGPGKGIFRKGSFSVKEAGPEPPTDQRLAPEGFDSRLRRRARDDLGHVRYITKARATLPSSLETPCSAPSEGNMALSPPPPCGKATQGPKSGLGRHRKLRLARPQGSDSASAPEDDELRLARPQGSNSASAPEDDGLHLTRPQGSDSGSAPEDDELRLARPQGSDSGLAPEDDELRLARPQGSDSALASDDSLRLARPGARTRPRPRKTDSTSTSEEPPPRPT

SEQ ID NO: 52780 - protein, 75 aa, Zea mays
  Coding DNA Sequence Number=SeqID_9405
MDYVPGLQINEALKMQLEVQKRLHEQLEGGKSQSQKSNQTLSFKIKLNLSCQLSFAAQNNSLFSLIINTFFQGAC

SEQ ID NO: 52781 - protein, 369 aa, Zea mays
  Coding DNA Sequence Number=SeqID_9406
  Gene Ontology: Mol. function=oxidoreductase activity, acting on the aldehyde or oxo group of donors, NAD or NADP as acceptor; Cellular component=chloroplast; Biological process=amino acid biosynthetic process
  Homolog annotation: Hit_ID=Q6AV34; Match level="QueryCoverage=100%, HitCoverage=100%, E-value=1e-171, Identity=75%"; Hit description =Probable N-acetyl-gamma-glutamyl-phosphate reductase, chloroplast precursor
  Pfam annotation: Domain name=Semialdhyde_dh; Domain location=40-165; Score=117.8; E_value=3.2e-32; Accession=PF01118.15; Description =Semialdehyde dehydrogenase, NAD binding domain
  Pfam annotation: Domain name=Semialdhyde_dhC; Domain location=182 -340; Score=67.4; E_value=4.7e-17; Accession=PF02774.9; Description =Semialdehyde dehydrogenase, dimerisation domain
  Pfam module annotation: Pfam domain module=Semialdhyde_dh::Semialdhyde _dhC; Domain location=40-165::182-340
MAFTTLGGCGAQASVRLAPQNGILGSNSKPFAGIILKKPQQIVRILANHPQFHIKVMTADRKAGEQFGSVFPHLITQDLPRLVAIKDADFSDVDAVFCCLPHGTTQEIIKSLPRHLKIVDLSADFRLRDINEYAEWYGHSHRAPELQGEAVYGLTELKRDDIRNARLVANPGCYPTSIQLPLVPLVKAKLIKLTNIIIDAKSGVSGAGRGAKEANLYTEIAEGIHAYGITSHRHVPEIEQGLTDAAESKVTISFTPHLMCMKRGMQSTVYVELASGVTPRDLYEHLKSTYENEEFVKLLHGSNVPCTSHVVGSNYCFMNVYEDRIPGRAIIISVIDNLVKGASGQALQNLNLMMGLPENMGLQYQPLFP

SEQ ID NO: 52782 - protein, 169 aa, Zea mays
  Coding DNA Sequence Number=SeqID_9407
MELQHGSLPTPKSWEARGIEPQLSPLSTFTRLVNILPPNAGGRSGKECRHHGHPVEENGRSLRYNLPDCPVKHRTVSVVTPDCPVCQRSNDYFTRNGRLQRIKCVPARAEDRARAVGVPDSLQDLSGAPPDSPEAPPVRAPMVKPQRLADVDGAPDCPTLQRDQILSQV

SEQ ID NO: 52783 - protein, 41 aa, Zea mays
  Coding DNA Sequence Number=SeqID_9408
MQDAAWHALSQYFSLFNGVSSDLYQKGRSSKDTKVDTVPKL

SEQ ID NO: 52784 - protein, 75 aa, Zea mays
  Coding DNA Sequence Number=SeqID_9409
MARIRSGGRARRRERLTGGPEVGQGTDTRDPWVSGSGAKGLYLLWSAMGGAASGRGNAVTGDEADRDSWGIGWSG

SEQ ID NO: 52785 - protein, 161 aa, Zea mays
  Coding DNA Sequence Number=SeqID_9410
MARVVCTLRGKRLDGGVFVRSVRKQQTFVAFVLRWCQRKKLKSEVPGGCCPPFKNFILLCCNIYETGETLLGKFSPYGHMPPRTRKTVRKSTGPIGIPRHQLAPRHEESSSGSNDPIRDLDAQVEQLRMELRHRNRVWVEDGQLINESRADVRHLQDELAE

SEQ ID NO: 52786 - protein, 135 aa, Zea mays
  Coding DNA Sequence Number=SeqID_9411
MLLEELYGLLATLVDSSCMTRGIDIFLYVFVEEARSVLFQVKLEKIASTPLLVCWQVLTLIWIVLPLIFQGYMENLKKHMPGLQPSKLRLKEEIHPKPKSLPLLCPRPARGFAMENQDLSLGYSRFISHILLSLI

SEQ ID NO: 52787 - protein, 30 aa, Zea mays
  Coding DNA Sequence Number=SeqID_9412
MRWWIMGIKGLEVGLDVGEKAAYVTAGYSR

SEQ ID NO: 52788 - protein, 1281 aa, Zea mays
  Coding DNA Sequence Number=SeqID_9413
  Gene Ontology: Mol. function=nucleic acid binding; Cellular component= nucleus; Biological process=regulation of transcription, DNA-dependent
  Homolog annotation: Hit_ID=Q10LF6; Match level="QueryCoverage=95%, HitCoverage=80%, E-value=0.0, Identity=73%"; Hit description =Transcriptional activator, putative, expressed
  Pfam annotation: Domain name=DEAD; Domain location=597-767; Score= -19.7; E_value=0.0013; Accession=PF00270.20; Description=DEADDEAH box helicase
  Pfam annotation: Domain name=ResIII; Domain location=593-761; Score= -1.3; E_value=6.1e-05; Accession=PF04851.6; Description=Type III restriction enzyme, res subunit
  Pfam annotation: Domain name=SNF2_N; Domain location=599-896; Score =344.7; E_value=1.6e-100; Accession=PF00176.14; Description=SNF2 family N-terminal domain
  Pfam module annotation: Pfam domain module=DEAD::ResIII::SNF2_N; Domain location=597-767::593-761::599-896
MGECGGASAKRRCRPLSRSSNIVGNTWHRGGEGGWSEIGAKHLPLVAGGHEIVTREPLLNFRVPVPEDLARYENSSSNGSPSSEGQGSLLDQYNGVNDASHGLHRKRKRHLDGASDDDEADAYSNKITEEQYRAMLSEHVQKYRRSKFKEGAFSSDPPRVATPQLKHKNGGKKNMKRISDFSDDVALDGIEASHEYNGIECIKTHGGFNKLVATLDSTYLDMGDSTRYLVPEGYDKLASSLNLPVSSDIRVEEHFLKGMLDLRTLAAMLGTDQRFEASNRGGISEPLPQFESLKERVKVQEFSLQVTKDPFAIPEGSAGRIRRYIISEAGDLQVHYVRVMEKGDTYEIIERSLPKKQIVKKEPSVIMKEESEKTYKLWQSLATKSIPKHHKNFTALIKKRQVDAKRFSDSCQREVKLKVSRSLKLMRCAAVRTRKFVKDMQMFWKRVDKEQYELRKKEEKEAAEALKREEELREAKRQQHRLNFLLSQTELYSHFMQNKTGGSAPPDEEDVPDEEDPEEAQLKREALRAAQHAVSQQKMKTNAFDSEIVRLRQTSDSALPTDDSSSMDPSKIDLLHPSTMPETSSVQTPELFKGVLKEYQLKGLQWLVNCYEQGLNGILADEMGLGKTVQAMAFLSHLAEDKNIWGPFLVVAPASVVNNWAEELIRFCPDLKILPYWGPERMILRKNINPKRLYRRDASFHILITNYQILVNEEKLLRRVKWQYMVLDEAQAIKSSSSQRWKTLLSFNCRNRLLLTGTPIQNNMAELWALLHFIMPTLFDSHEQFNEWFSKGIEGHAEHGGALNEHQLSRLHAILKPFMLRRVKIDVIAEMTKKKEEIVPCKLSSRQQVFYQAIKNKISLNELLAGSRGSLNDKKLLSLMNIVMQLRKVCNHPELFERNEGSSYFNFAEIPNSLLSPPFGELQDVHYAGKRNPIIFEIPKLVYEGIISNMENSGNICGFQNGYLNRLFNIFLPSNIYRSAIPEVSSSKESLLSSGAFGFTRLSNLCPVEASFLATASLFERLVFSVMQWNMNYTAEILDEFLDSEDTGIQSSHNDSTKVRAVARLLLSSTKVKPSLLRTKIGTGPIDGPYEALVLSHRDRLASNIRLLRSAYAFIPPARAPPPFPLHQINVWCADRNFAYKFTDEMYDPWAKKLFLGFARTSEFNGPRQPIAPHPLIQELNTDLPIIEPMLQLPYRIFGSSPPMSNFDPAKMLTDSGKLHTLDMLLRRLRAEGHRVLLFAQMTKMLDILEDYMNFRKFKYFRLDGSSAISDRRDMVRDFQN

SEQ ID NO: 52789 - protein, 99 aa, Zea mays
  Coding DNA Sequence Number=SeqID_9414
MGWREMEHKGGNAARVILRRGDALVVGVTSVREGERVSLFASPFSHVTFPHEGPGPSFYRCKERVQGTENRRRHGRTRGAIITCHRGEPDGTPVLFPVA

SEQ ID NO: 52790 - protein, 175 aa, Zea mays
  Coding DNA Sequence Number=SeqID_9415
  Gene Ontology: Mol. function=hydrolase activity
  Homolog annotation: Hit_ID=A7Q437; Match level="QueryCoverage=53%, HitCoverage=30%, E-value=1e-09, Identity=37%"; Hit description =Chromosome chr13 scaffold_48, whole genome shotgun sequence
MPKPPAGFVLNEWGRCIVAAFKCIFIIVRRQGRPTVGRQYSRLGPPTVVACRQPPIPLSQSTHQLQRWLSTKNISIMKSGLILIGYRAECSISIGDTTFVLVHRGYIVHGINHEGHSKSSGSKGYLSSFDDTLETALTISRVYVKHENMLKKRFLYGFSMGGTVVVQLHMNDPFY

SEQ ID NO: 52791 - protein, 153 aa, Zea mays
  Coding DNA Sequence Number=SeqID_9416
MGVGKGRLGKNNKRKREPTPPSEEFGDSEYSEEEFSSESEGSPAPIPLRESSDDSDDSQGLAAEVWTYIRAVERSGLEGSDESEFSSDEEDSDGGEDKDDDDDDGDDDDGGDGDGDGGNGGGGSSGKGGTKGGSSVGSTGGGGGKGSGGRASG

SEQ ID NO: 52792 - protein, 388 aa, Zea mays
  Coding DNA Sequence Number=SeqID_9417
MRRKDGGYPPSGGLEGGKTRCIREHEDMVAFQGGHPPFKDDYPYSRPQPSRAESSPTRSKALPCGAGGWVPHVMQAGSEQKKPNRRARTGGASGRRSGQRFAFVVITTPKKRLWGCSRKPGSGRTVDSVNIPARELGTRPYTRATASSHEGTTRLAEALREALRPRRSETTPPRPRGLHPAGALARTHRNKMQPRKAGPLAKKCDESLQASANTPFEARGLLSGTIIRGTLKAPNSQLKDSAARAAPTAVPLDRVRLTGSQVLQKAPQETPLRPTQGSDSGSAPEDGELRSARPRARTRAKSRKTANSAPPDPRARTPPWPQTTTSTSPNLGRRPATPLTEARGRQQGPNRSDSCPSARLHRSSDGHDITPTGCQNLSGCHDGMYSRR

SEQ ID NO: 52793 - protein, 119 aa, Zea mays
  Coding DNA Sequence Number=SeqID_9418
MAGIARSTLAGGCPRRRRVYRPNHGELVQSEGTVSIPGSRSNCVHKESKGGGVVYLVHVLWRGRELRRAWTGFSGEGNSDSLLGEPHGEEPVAEDLGVQQIEVAEQELIEGCALDHFVT

SEQ ID NO: 52794 - protein, 306 aa, Zea mays
  Coding DNA Sequence Number=SeqID_9419
  Gene Ontology: Mol. function=endonuclease activity; Cellular component=nucleus; Biological process=tRNA processing
  Homolog annotation: Hit_ID=P60193; Match level="QueryCoverage=40%, HitCoverage=96%, E-value=2e-47, Identity=61%"; Hit description =Nuclear ribonuclease Z
MAKSCGEYTVEVASSSSSPIPASASATRSKAKHHIEIKGYPVDGVSIGGQETCVIFPTLSLAFDIGRCPQLRPPTIFVPACLRDLVERLFEVHHAMDQSDLNHNLVPLEVREEYELRRDLKGYVIYSVKQKLKQEFIGLPGSEIKRLKLSGVEEVSDNNCVYPNEVHHTARERTKANPMESCPSKEVENLREKLVEENFYLITELGEQGRVHVLLRKLDDPVPRRKPAIVFLHSSYKCKEWLRPLLKVFLSLRFDEDIGKDEIEEKKVDADLRAVSFTLDPKERKGIKKETISALFETYFRILKHR

SEQ ID NO: 52795 - protein, 204 aa, Zea mays
  Coding DNA Sequence Number=SeqID_9420
MVLRENLLKIPGYTPNGCIAIGRGKRGRGWPRHGDNKRKRAPSPPSEDFGDSEYSEEASSESDRLPALAFPPASSEDSDDSMGLSTAARAYWRSIERARLGGSDESGVSSDEVDSSDSSKEWSGGDDEGACSGDDNGEGDDGDNGGSEGDSGNDNSDGGDGGDKGDDGDGGDKGNGGDGDSGDGKGDGDGGGNDSKASGIAPLV

SEQ ID NO: 52796 - protein, 134 aa, Zea mays
  Coding DNA Sequence Number=SeqID_9421
  Gene Ontology: Mol. function=heat shock protein binding; Biological process=protein folding
  Homolog annotation: Hit_ID=Q9SWB5; Match level="QueryCoverage=33%, HitCoverage=10%, E-value=3e-09, Identity=64%"; Hit description=Seed maturation protein PM37
MELDECEDTMPYDVNIKEEMRRRQQQHQEAYDEDDDVPGGGQRVQGKSLPSVKHGDEGTDAGIFGDITRLGSGTQHNPYLGMKFWKWEKLPMSGYTEKGRILADVIADKLRTESANKPSRAQGYTERIPSLLET

SEQ ID NO: 52797 - protein, 145 aa, Zea mays
  Coding DNA Sequence Number=SeqID_9422
MYLLMRPLLLMPVRLLVRVTPWCRWCRFCTFDEVLGPLVSGDVEVCLSKHLFRGDRCFLQYDPNEGRVIGSPVEIIDYLYLGDFGDAISHGLKPLEVCSKRFIPLAPDGFEVPWLRLLVREGLKVGDELPTEVAPIVDAVSWQMS

SEQ ID NO: 52798 - protein, 41 aa, Zea mays
  Coding DNA Sequence Number=SeqID_9423
MPCWVTLVVIKGKSHDLRAERESRLVGYIVLITWVKAKARL

SEQ ID NO: 52799 - protein, 223 aa, Zea mays
  Coding DNA Sequence Number=SeqID_9424
  Gene Ontology: Mol. function=RNA-directed DNA polymerase activity; Biological process=RNA-dependent DNA replication
  Homolog annotation: Hit_ID=Q7XBD9; Match level="QueryCoverage=70%, HitCoverage=8%, E-value=2e-17, Identity=39%"; Hit description =Putative gag-pol
MAIVFKNKIALNLGALFCSGTISCIADKEGTLHRVADTLEKRPTSEILRKVEVSPQAMPLLIAQGKVAPRKPGLKIPRRVEGQSGCRSLGKKEVNVPCRGRKTQRAIFLAPPPSKEDGKKNIAIPAHFYPDVLFIQGRLDSSPISDDEPTMQGRNLPSVIPDDGETDAGMCRGIMKSRSGTRRNPYPRTKLQKWKKLPMNEYTEKDATLAVAITDRLRSESEN

SEQ ID NO: 52800 - protein, 124 aa, Zea mays
  Coding DNA Sequence Number=SeqID_9425
MAEERADVGTSTVGDHGRKVGDELTDVRLPKQLFGGGRCLLKYGPDEGRVVGSLIEVFYHSRFYDFGNTIPHCLKSFEERPESLIILARNGFEVSWLRRFVRERMEVCDEPATEVTLVVDAVPR

SEQ ID NO: 52801 - protein, 189 aa, Zea mays
  Coding DNA Sequence Number=SeqID_9426
MNDVVTSHLPIYLYSAAGGKVNRQGLPYRTNSHPHSLNGGPQGPRRPHVGDGRDFLRVGLDAPLGDDEPQEHASGDSKDTLLGIKLHALRSQTLECCFKVGEEVRGFPRLDNDVINVSLDCSVDVLSEYVVHAPLVCCTCIPQAKWHSSITVHAKSHQLVDLLAYGSTLFFVETAQRLLHGSGTGSDIQ

SEQ ID NO: 52802 - protein, 189 aa, Zea mays
  Coding DNA Sequence Number=SeqID_9427
MRCRLLPGHGCPVSSSCGKEGGGTNPDTALPPREEDVVEFAAPGKLTAVVVAVALRGEEYHVVAAVEGHELETPEAEHRPRLKRLLETTHLELNEKLFVNTQQAPTWRANCRRFDPGGSLDRRVNLSLRVTAQMGWREMEHKGETWLVLSRARGGAENRRRHGPTRGAIITCYQGEPDGTPVLFPRSLS

SEQ ID NO: 52803 - protein, 255 aa, Zea mays
  Coding DNA Sequence Number=SeqID_9428
MMTTSSVVGRSKPGCGLCPALSFKDLHHPCWGGGRGKSGPACVWVGDPLLPPAFGGERHPPALRRRHPPAMRGKANCCCLDRVQLSVLHPGDGRRLHQGVAQHVVRREGGTRVPGWSRSRSCGESGSEDLSVRFRAAAARWCGVGGQVAVVVGAEVVVAIGEATEAVASADDTVSATCAPGLRLFGFNGWFSSPMRGCERGPSSGSVCPGAIAVAVLSSETEVVAALLVQRSPASHPEFVVPQALWCRRCSYPRE

SEQ ID NO: 52804 - protein, 53 aa, Zea mays
  Coding DNA Sequence Number=SeqID_9429
MAMPDMRARNATEMVSAMANFPEGGRAATPASPRREQRQNPEACAAGDGSLRA

SEQ ID NO: 52805 - protein, 169 aa, Zea mays
  Coding DNA Sequence Number=SeqID_9430
MEVRCQTNFCQNEDEKRNRKIHVDLTTAQARATALESREVIVVEALKQANDEHVQKQMEAYLVTHNQRVIVLEGMLVSPKAMDKQEHPESSQDPPPELFEPLTMKKIPAPSLEVKEEAGSTPPAPLPFEELQEPVSLEEEFNPILPSQPSLEEVINISSLLTHLGDASD

SEQ ID NO: 52806 - protein, 103 aa, Zea mays
  Coding DNA Sequence Number=SeqID_9431
MEQVPCDSKCDGGGGVAGGNGGGCVAKGAWAAVCAWRQGTRAGARVSGGVDDPDVCGLWFQESLPLCMGKNRVFQSTDYSDSGAKHNCYCSAPELRTMLKCDL

SEQ ID NO: 52807 - protein, 193 aa, Zea mays
  Coding DNA Sequence Number=SeqID_9432
  Pfam annotation: Domain name=zf-CCHC; Domain location=53-70; Score =18.4; E_value=0.0025; Accession=PF00098.14; Description=Zinc knuckle
MEILSIHNNELTILVKNVVIETCLDEIAMENEQLRQEDNTTVGVNKPGEGETVVCRLCHKEGHKSYQCKAKTGEKQKLKQKPTCKISNTYINKVDKKVATPYLIKKKKNENMIAIKANKKANKGKGAKCIWVPKKIISTMKSTKKICVGTMLHRRRSCEKKQLQLKLLEHDAEDTIHEASELQHIRRRRVEPT

SEQ ID NO: 52808 - protein, 44 aa, Zea mays
  Coding DNA Sequence Number=SeqID_9433
  Homolog annotation: Hit_ID=Q8H6I0; Match level="QueryCoverage=65%, HitCoverage=1%, E-value=4e-07, Identity=79%"; Hit description =Putative gag-pol polyprotein
MAKTMLDEYKTLDQFWVEAINTACYSINRGQGDKPDLASAYILT

SEQ ID NO: 52809 - protein, 31 aa, Zea mays
  Coding DNA Sequence Number=SeqID_9434
MSYLSRKNIVRLSSGFETALNESVKNYKTLA

SEQ ID NO: 52810 - protein, 68 aa, Zea mays
  Coding DNA Sequence Number=SeqID_9435
  Subcellular localization annotation: CTP_CleavageSite=55; ConfidenceScore=5.00e-01
MAGEATTGHHAGAGNGAGATGRGHHGQGGRGRDGAGPRRGRAGAVGRAAGVATPRESAGGRGMGREIM

SEQ ID NO: 52811 - protein, 54 aa, Zea mays
  Coding DNA Sequence Number=SeqID_9436
MESHDVRTERESRLVETFWFIGGNETDGFGYDYGAGEDEAVEGDFQEFQDYDEF

SEQ ID NO: 52812 - protein, 548 aa, Zea mays
  Coding DNA Sequence Number=SeqID_9437
  Gene Ontology: Mol. function=protein binding; Cellular component =nucleus; Biological process=response to molecule of bacterial origin
  Homolog annotation: Hit_ID=A7PA10; Match level="QueryCoverage=100%, HitCoverage=100%, E-value=0.0, Identity=64%"; Hit description =Chromosome chr14 scaffold_9, whole genome shotgun sequence
  Pfam annotation: Domain name=LRR_1; Domain location=101-127; Score =0.9; E_value=2.1e+02; Accession=PF00560.24; Description=Leucine Rich Repeat
  Pfam annotation: Domain name=LRR_1; Domain location=152-180; Score =5.5; E_value=30; Accession=PF00560.24; Description=Leucine Rich Repeat
  Pfam annotation: Domain name=LRR_1; Domain location=206-228; Score =2.1; E_value=1.2e+02; Accession=PF00560.24; Description=Leucine Rich Repeat
  Pfam annotation: Domain name=LRR_1; Domain location=451-471; Score =8.0; E_value=9.9; Accession=PF00560.24; Description=Leucine Rich Repeat
  Pfam annotation: Domain name=LRR_1; Domain location=476-492; Score =0.6; E_value=2.3e+02; Accession=PF00560.24; Description=Leucine Rich Repeat
  Pfam module annotation: Pfam domain module=LRR_1::LRR_1::LRR_1::LRR _1::LRR_1; Domain location=101-127::152-180::206-228::451-471::476-492
MTYFPGEVVEHIFSFLPSHSDRNTVSLVCKLWYDVERLSRRGVFVGNCYAVLPERVVLRFPNVKALTVKGKPHFADFNLVPPDWGGYAGPWIEATARSCLSLEELRMKRMVISDENLELLARTFPKFKVLVLISCEGFSTDGLAAIANHCKLLRELDLQENDVEDRGPRWLSFPDSCTSLVSLNFACIKGEVNSGALERLVAKSPNLRSLRLNRSVSVDTLSKILERTPNLEDLGTGNLTDEFQAESFVRLTSALEKCKRLRNLSGFWDASPIFVPFIYPLCHQLTGLNLSYTPTLDYSDLTKMISRCVKLQRLWVLDCISDKGLQVVASSCKDLQELRVFPSEFNVAGAFTMTNEALTTVAKNCPSFIRFRLCILEPKKPDAMTGQPLDEGFGAIVRDCKGLRRLSMSGLLTDRVFMYIRMYAKYLEMLSIAFAGDGDKGMMDVMNGCKNLRKLEIRDSPFGDFALLGNVAKYDTMRSLWMSSCNVTLKGCQVLASKMPMLNVEIMNELDGSSEMENHGNLSKVDKLYVYRTTAGVRDDAPNFVQIL

SEQ ID NO: 52813 - protein, 138 aa, Zea mays
  Coding DNA Sequence Number=SeqID_9438
MGSGEAEVVRPRPGRSPSPGVGRAGVRSPEARAESELWVGVAQAALSFCQTGQWSGGVTVVTSALPGARVRMKVSGHLCVKCPCNLVSRCGDLVKVASERSQGLGRAGDVSAIKRGPRARRKSLEVGCPWPRLGSGEE

SEQ ID NO: 52814 - protein, 43 aa, Zea mays
  Coding DNA Sequence Number=SeqID_9439
MARRGAEDLAAVWFGANGVMVADGAAWVVNDRFGFERLSGRQR

SEQ ID NO: 52815 - protein, 705 aa, Zea mays
  Coding DNA Sequence Number=SeqID_9440
  Homolog annotation: Hit_ID=Q6JAD6; Match level="QueryCoverage=87%, HitCoverage=88%, E-value=0.0, Identity=75%"; Hit description =Putative uncharacterized protein
MPRTKNASASGGGDDEDPRRPFRQVKGKTVYLEQQEGRKKRRTGREARAAAAAAAAAAQAALGDQPHVPSDQIAFRARRLTSRPRSSTHTSASTPPPTLPAPVTPIAPSTSTAIPTTSTTPASTASPAPAPASAPPVPPPRFRERDETEVRPLVSDPRLFDLQCATAARVRRFRYVLVESWLPAQRDPAAGVLFSTRIHESFFRAQMSAQIALRVHRLLDLPAFLLAAGAESEAHLTYLPGLLTLLTISGRYVEEWVRVFYASVWIDPDHHWMRFRFEREDVTITASQIRQLFGFPESTTRLHSLCYGSSDPPRRPHGGVAPGTAHVAALFRPPFTDGSRRSPADFTTAAKYLYELIRRTLLPRMGYREATTHIQLWLLGALVSHSQFNVVDFLICEIEDTVLGGVRARRQLPYAHYLCHIFAQLIQPPRFQSILEASRLVFGSYRPAPEIPVPASASVFDSQAEDAALRQFDTQGTTADDDDDDDFGVPPSPPPPMPPRSHDHEAGSSRAAPAPPPAMDPALAAILANLAAEQARLSETMLSMFQSMQDRQDALQQQLIQDRAENRAFMALMLQHSGISAPPVQSAPPPPLHAPVVPSILSGPPVGTSPLRPVTLAFTSPVLSSVCPQPPVPPASAVPTTAVAVSVTASVPVAPAARPPSESVPAPASTADPGSKTDSDPPPAFALLPRPRPDAPPSPPPASDV

SEQ ID NO: 52816 - protein, 323 aa, Zea mays
  Coding DNA Sequence Number=SeqID_9441
MKLWKETSRSSKTTTSSRCGLAATPSRLPVKAALSTFLFRTLIYCGYEIDGFDHGYGAASPLQPNRILAEYVDVYSPLLYTPNPPQVVSIATTAQAKMKLWKETSRSSKTTTSSRCGLAATPSRLPVKAALSTFLFRTLIYCKSYMDVSDMARLRHTARKSVIPFLPSRLAERPLRRPVAGQSSHLERLHHRLREEQERRRQEQQSSSFSLHQEIESVRSCSPVLPLEPPPAPPLGAPASGVAAGGDPDDGNGDDSSSHDTDFSANPEPEGWVARPITRDAARGCHFHDALDTLLRRAFDRHTWFVEYRCVVYQHSRGVYPDR

SEQ ID NO: 52817 - protein, 267 aa, Zea mays
  Coding DNA Sequence Number=SeqID_9442
MAERYQLPWSCVPPTTRRKDCGHPPSGGSEGGKTRCITEREDTVAFQGGHPPFKGDSPYLRPQPSWAESSPTRSKVLPLRRGGWVPHVMQADPEQKKPNRRARCMQPPSGYKWPSTFAQTSGRKGGQPCRRHATAPSGRTSPTSNTPSMEAQAHASCNRRAGCCVRATALPPAPLPHLLDCGTNTATRGDPAAPAWRDGQCGQKWAGSNGGGRRAGAAVTSTGGATGRGSERRFAFAIMTASKKGPGKGIPQKGSFPVKEPGSEPPY

SEQ ID NO: 52818 - protein, 258 aa, Zea mays
  Coding DNA Sequence Number=SeqID_9443
MALRKLCDDGGPRLSYGSRTTLRRTSDSHDITPAGCPDLSGCHIGMAFSEEVGRAGPRTGQALSWGRSLPSPAWTLVTPLLQAHLTWARDEHEGRGTYTSLTLDSGHLASPPFALAHALDPSGLGHAAHSLVGLGTPLSRNADSMESSSRLKTILVLESHIVSDYDERHRVSVGSADGQNYWRTHPATLFSCSGSSVPPNGIGLVQLNLGTREAAVVKHEGMYNAPGTTSWLQVYCVRFIVFTVPWLIKFNWDVLIEA

SEQ ID NO: 52819 - protein, 110 aa, Zea mays
  Coding DNA Sequence Number=SeqID_9444
MWGLPVLRKRNVSSLDFAPRLTGFKARRCRLCTEHNDVWDDMDCLCEEGSQLQWVLRETRARAEEAESTLKGANARLKVTKLELLKEHNAVRGQSFSSSYVRAVWYTKSP

SEQ ID NO: 52820 - protein, 95 aa, Zea mays
  Coding DNA Sequence Number=SeqID_9445
RDSLLSFEESTIKHGDQVTELFEFYEIEDPEHLFGEGKNWGVVRFAVVPLMGLGVCGSLCQDDDDEDGYDHAYGNGKEGVEADLQEFQDVDEFED

SEQ ID NO: 52821 - protein, 87 aa, Zea mays
  Coding DNA Sequence Number=SeqID_9446
RDSLLSFEESTIKHSDQVTELFEFYEIEDPEHLFGEGKNWGVVRFAVVPINGARYDDEDGYDHAYGNGKEGVEADLQEFQDVDEFED

SEQ ID NO: 52822 - protein, 51 aa, Zea mays
  Coding DNA Sequence Number=SeqID_9447
MVGLQMMMRMVMIMLMVMVAFGAIYAQVKKASRRISRSSRTSTSSRIRLAH

SEQ ID NO: 52823 - protein, 247 aa, Zea mays
  Coding DNA Sequence Number=SeqID_9448
  Subcellular localization annotation: CTP_CleavageSite=59; ConfidenceScore=5.37e-01
MAFMLAQGHQRVQTTAGWANGGAGLLRGSAGVVKQRRRRKDSTGRRRRDSGCAKIASVSADRTKQRGRGRTEGCPEQLTKTVVAPASEKMEIENVEVAPSASEIILVPTAEATVGLVKEIEANNTKTDERLKLQSPPTTTGLPKLTTAAAMTPRKGRRMASVLDAVLKCSKVPTPVSTQASEDNIKNLVVTAASTSPACAEAGPSGFKPAEQEKEDLPEKPASPTPEASSQDNLEYIVRHASGKQLS

SEQ ID NO: 52824 - protein, 235 aa, Zea mays
  Coding DNA Sequence Number=SeqID_9449
  Homolog annotation: Hit_ID=Q6QP54; Match level="QueryCoverage=30%, HitCoverage=19%, E-value=7e-08, Identity=57%"; Hit description =Putative kinase
MPQRIARNPRAYHARTYVDGDGADTGGSTSQRQKARVRVSREGDGASAGGDRPVGPVSQVPGSEPEVGRGGGSSEVEVESETWGRARRRPSSEVEAESEPWGRARRSPSSKVEAESEPWGRARWSPSSEVEVESEPWGRARRSPSSGVEVESNPWGRVRRSPSSEVEVESEPWGRARRSFLWRSRLDLAAISLTLSSGTAVGAGQAALFSYQFDQWSGKVTAVTLALSTEERASG

SEQ ID NO: 52825 - protein, 253 aa, Zea mays
  Coding DNA Sequence Number=SeqID_9450
MQAACNRTKGAHPFDSDAPSMGAQAHTSCNRRAGYYVRETAPPLAPVPRLLDCGTGAATRGNPAHGPTVPTEHIGHGDRERGYSKRDPSPRRKRAPSPLLIRGSKAGPSKGFDSRLRALGLRALLLIRGSKAGPSEGFDSHLRPLGLRAHHWSEVRRLAPRMGSTAASSHSGSAPTTDQGFVGWPPKGSTAASEHAEQGMTLGSGAALANPAPAKPLTTSTYQPENLEPDYAPGLRPVRMRGQPDRPKHHEMR

SEQ ID NO: 52826 - protein, 256 aa, Zea mays
  Coding DNA Sequence Number=SeqID_9451
  Subcellular localization annotation: CTP_CleavageSite=41; ConfidenceScore=5.42e-01
MSSHSLHASRPSTFRAPGWGAPVVLPSCHRWRNATSRKLVPFIHRSASRIFIRQPGYIPSPVVTQDGDHQFDGGEKRAGLRPLPLPQLKGCSSSVLGRGVRRVGARLRVGSGPLLPSVIGGKGVRRPWRWQLPHVWLSGLSGFGAASGATSHRGNWKRFLYRRDSRCLPRTDLRLHGLGSLSSPLEWGCGRGPCRNSVCPEVIAAVVWPPGAEVVVAAARAGDGKPPGFCRPANPPMWGVVRTCGGGTRVPFVMAP

SEQ ID NO: 52827 - protein, 250 aa, Zea mays
  Coding DNA Sequence Number=SeqID_9452
  Subcellular localization annotation: CTP_CleavageSite=37; ConfidenceScore=5.39e-01
MQGLHGFTSGSARWLMSWATSSGSPPEREVKGKAWTRVSTGPLLTPGSSSFWDLAEVRTLLGGSGLIRIGVRCPFVEVRTPRYILGCVVFSCHVAPFGLPMRWGQAPSSAWPGDVAWVRRLHAVEEGTRDLGYRHMVRTIQTTQTNTNYIPPPRQVPVYRVVVEEIPVDLPRIRVENRVILEDSSEEFLPTSTPGAESLAFAAGLSSSAPPAPAIQAPAPRGDDPDYSGDDDEDDDEEEEENINEEANSE

SEQ ID NO: 52828 - protein, 307 aa, Zea mays
  Coding DNA Sequence Number=SeqID_9453
MRWGQTLSSVWPGDVAWVRRLHAVEEGTPDLGGAQPRGGWCSSTIARLQGFSSCSPAAVPRQWSSRRMTTSLVVGRSKPGYNLPPALSFKDVHHPCWGGRRSESGSCLPHGSVTRFFLQHSGEKVFTGLAEKANFGYAGPAGCKRCQLPRAWLPGSDGPGAASDAASCHLVGAWLSIHRTGDGRAVRGSATPTASPTPLAVLGGRTRRRTPRGWRRCSWMVLSSLCGRTGARTSSRVPRQPPSTGAEVVAIVGAEVVAATGEAAPCRGGCLRCRDHQSHLLLSPRLFGFNGLAVTPRRRTRARTYSQ

SEQ ID NO: 52829 - protein, 189 aa, Zea mays
  Coding DNA Sequence Number=SeqID_9454
  Subcellular localization annotation: CTP_CleavageSite=68; ConfidenceScore=5.57e-01
MYPPCNVVGPSPRSGEVVTPPRSRLRPSPGVGRGGDRLLRSRLSPSPGVGRGGDRLPRSRLSPSPGVRRGGGRALGSGEVELPMAPEAGLGCCQPHPGGWHSCRSRAGSAVFLSGDPCIECSCDTVGWRGDLAKVASLRSLPELGLGRVEACADGDYQPSLGVLGTWGGGAPDALDSLAWGVGGHVGLE

SEQ ID NO: 52830 - protein, 104 aa, Zea mays
  Coding DNA Sequence Number=SeqID_9455
MEHRPGPERLLETAHLELDGKLFVSTQQAPTWRANCRRLETGGSLSRRVGRRGGSSEAEVESVIHGSRPSPSPWVGRGGGRSAEARAESEPWGSGEAEFVVFWG

SEQ ID NO: 52831 - protein, 586 aa, Zea mays
  Coding DNA Sequence Number=SeqID_9456
MALPPLLLAERRRRGVCKKVDAACAAPTAVPLDRVKLTAARPGLRRHRKLRFARPQGSDSGSAPEDDELRFARPQGSDSGSAPEDSELRSARPRARTRAQPRKTANSAPPDPGLGLGLCLGRRRTPLRPTQGSDSGSAHEDDELCFARPQGLNSALASPDGLRLARPRGSNSTLASEDRLNLDLGGASTSPNLGHGSTTSTGGAIITLPQADSGYGEQDRRPIWLAPPDKLQRSSDGHDTTRIGCQNLSGCHDGMDPSVSKRRQVQTSTGRAAAPSASTPPSAESDPAPDSDMVGGSPPRRKMSAPRLGHRRQPLLQEPDPSRRLDRPLRSLSQLSPEDINPAHGLGSPTPGLVPLVDDLARFQLPLLRLLGLGSPDSHNEQTPALKVPLQMELWFHSRGYEQPPHRGACGTTNSSWLAAARSISSDNDLRSGQLNSSSDDRRADAAATRPSPASPLEGRGQAIKAKEPEPRSADGTDDLVGGETFSGCHHLSTDGGVHLPTNTAPASAGHPKAHRQVLTPVLTTKTRKGIVPEHEYRPRGVRRVVRPSGVAGRSRPDKGRNAAPWPGSSSSPSPAWLEDASSAEL

SEQ ID NO: 52832 - protein, 223 aa, Zea mays
  Coding DNA Sequence Number=SeqID_9457
MASGRTPLQPCPRPRQRSRGEDKYKEPEARSADGGGDPVGDGDFSSRPHLGTDDRGRQPSGRSPLKSSRMSGVPTSARRRRTGAKAGQPQNTNAALAARDFLGGPPVRAARQPPLRAGGGTGSQAGEPNALKVTTPAVDQPGVVEVRPSRRARGRPPFKGDSPYLHPQPSWAESSPTLSKVLPLWHGGWVPRVIQAGPGQKKPNRRARCMQPPSGYKRPPTFA

SEQ ID NO: 52833 - protein, 199 aa, Zea mays
  Coding DNA Sequence Number=SeqID_9458
  Gene Ontology: Mol. function=two-component response regulator activity; Cellular component=nucleus; Biological process=two -component signal transduction system (phosphorelay)
  Homolog annotation: Hit_ID=Q7FS86; Match level="QueryCoverage=27%, HitCoverage=63%, E-value=5e-17, Identity=80%"; Hit description =Putative response regulator
  Subcellular localization annotation: CTP_CleavageSite=18; ConfidenceScore=5.25e-01
MATTAAAPASVAPSPAPKANNSRKTVVPGMTGYELLKRVKKSAALMDILVIIISSKNVPTRISRCLEEFDQRLAAEPWGRARRRPSSEAEVESEPWGRARRRPSSKVEVESEPWGRVRQSFLWRLRLDSAAVSLTLAGGTTVRAGQAALFSCQAILALNAPAIRSVGEAIWPRLLHCEAYPSWASGESKLVLMVITIRV

SEQ ID NO: 52834 - protein, 49 aa, Zea mays
  Coding DNA Sequence Number=SeqID_9459
MAHRTVNSDCPVHHLTVRWPTCQKLQRSNPNGWVTWLAHRTVRLRLETY

SEQ ID NO: 52835 - protein, 307 aa, Zea mays
  Coding DNA Sequence Number=SeqID_9460
MVSPVSCKRVIRVDVRAPFVGGRLGAQRHAQKYLRHLARRLRDAWAWASMLACWESEKRVHLARLHAACMAARPFRPLVRAKVGGRFPAVSPRRWSPKTVTTSFWVERSKSGCDLGPTLSFKDVHHPRWGGGRAEPTLYLPRGFVGHPLPRRSGERALTGPAGGPDFDNAGPVNGARRHLQRVGLVGLAPGGPSRRRAAAAPYSPVDYLNRFTKHESPRVKVTSEPRPRTGLAPSEDGWPRPLGDVCASESCFSRKVMSEKVMSEKARKAFWQKRSFFEENFNAEGVSSLLAPEGGSGFAEARPTLP

SEQ ID NO: 52836 - protein, 160 aa, Zea mays
  Coding DNA Sequence Number=SeqID_9461
MNSAEGFGERLLRLTSESPDVHAEPNNGIMGQLMKPYQLQTQSTFQNPNGWLRWHNGVKINLFFTNIALFNICLLSFSSGCIFVRSALRFNQSRPPHNFGNRGSFSSFGFLSVAYCSILEIERSIAATVLDYFKKVYGHVEPLLKWSNMDLERETQSCLA

SEQ ID NO: 52837 - protein, 323 aa, Zea mays
  Coding DNA Sequence Number=SeqID_9462
MRLILWYLFLTCGGRLHIFTHKSFYPSAKGSRLPIHLYRGGEAGDPLPDRHRSKINQGPPYTDHSPTALAPFGRRLTFKGARSPEDAATDRKSGRNLLRLRPRREENAAEGAASRDLAERTGNRDGTYQRVPHSRSTSGVWRVRGQPKPRLTPRTHASEGKAAAHRAPCVTVYPEQENSTIHPVPTTVPTTRVKLMTVSHDLPRVQPRAQQGAPPRPTSGLGLSLSLSLGRRSPPRLTSGLGLGRRSPPHPTLGLGLSLGLSLGLGRSHNLAQPQPWPQEKSPPRPTSASDRLRHGGYIITLPLASCLRLRRNKTGVPSRLLR

SEQ ID NO: 52838 - protein, 495 aa, Zea mays
  Coding DNA Sequence Number=SeqID_9463
MARARAYKTPRDLDRTPPHALDLAGAQTHRRLPVHGVSATARSPATVDRRHTRRRREHPPAHVDRTIPATPAVEPYTVVTARTSQSQPRPSPDLSRRRKELPPHQRGCEITNSKRLAGDHCTSSDNDLRLSRLDSSSDCLRANATVKRPSPTSPYEGREPAIKAKEPEVRPQVALTVSSAEATASAGGSLTYGDHHLSTDDSGHLRANATPANGSRPSAHRQVLTLVLATGARTRLSKNTNTTLTTYDVLCDPPVRPTAREGPWMWLTCVLRDHRPYGGWIATPRPGSRWQFASSVRLVNALFPRMLEEEAGRQPMQKAGPQLGSPSSPSQMTNILEAEGKGEAAARFSLPHHKAGGHHPRTSTATRDSPARDPTVPIKCDDHGLASSPEAAGEPQSPLPQHKDDAPVFRSSNDSRTRNRHPANHPSRRINSLGSRKGIFRKDPSQRRKRAPSPPTDQGFEGCALWGSATAPEHPGFEPFTDQGIEGWPLVTPGV

SEQ ID NO: 52839 - protein, 294 aa, Zea mays
  Coding DNA Sequence Number=SeqID_9464
  Gene Ontology: Mol. function=DNA-directed RNA polymerase activity; Cellular component=mitochondrion; Biological process=transcription
  Homolog annotation: Hit_ID=P33544; Match level="QueryCoverage=100%, HitCoverage=100%, E-value=1e-153, Identity=93%"; Hit description =Uncharacterized 33.9 kDa protein in mitochondrial linear 2.3 KB plasmid
MTKTYRISSGLLREAVKKITIARDSAFFVDKEILSKSSELKNSLINPCHNVIREFVRESRDCDSDDYKREYRLNDYRLELTQPPSNISSGGDVVKTVRRWELINQKYNADLWIPPAKKGVVITPDIIDKLYLFWDNFLGSYEKEGINHKQNTDPVSKGKVFDLLASRSSNNTNQTPEELREIQTQIEHLTIHFDEGSVHESAGQLKGKFFNNDRQSARDYLLDKLKDDKDKDIVRGMGTYTLECVAIHVLSKLFNVFSLEKTSVLAAALISELDITAKTEYNNALLAKMQREKE

SEQ ID NO: 52840 - protein, 987 aa, Zea mays
  Coding DNA Sequence Number=SeqID_9465
  Gene Ontology: Mol. function=RNA polymerase II transcription factor activity; Cellular component=intracellular; Biological process =transcription from RNA polymerase II promoter
  Homolog annotation: Hit_ID=Q6AT30; Match level="QueryCoverage=96%, HitCoverage=99%, E-value=0.0, Identity=63%"; Hit description =Putative uncharacterized protein OSJNBa0001A14.17
MAWWSGKVSLSGLQDIAGAVNKISESVKNIEKNFDSALGLEEKRDDEEASGSRTSNSDGIGFFNPVMAFMGHNGEEDGTEVSEKPQFPKDLSVEEENHSTPTKKQTSEVDHSEVSVTTFPEQPSKSEEAHSISNESPVSKADVSEQSITPQTPAHPSVAEEKLDGCTEALASKVGDDEASETSQSPGHPSTVEENQDHQYSKHSCPSDEAEPNQLRESAGDLPDGSAFSSPIKIDKSGDTETGESIDTGKEDTSDGNASQSQPAESMLASSDNITEVEDKIAQEYNVPKELSSPQENCDTVDKVTRLEVKLHDGNIDTKKSEEESNKMEAGEVSVVVQEDNVMEQPEDLMSKSITAAHDSHSQNESVVSLTDVPAGLGGVGPADNFTEEEKIARITDFQIVDSVVSVGELEKLRREMKMMEAALQGAARQSQSKADEIARLMNENEQLKSTIDDLKSKSSEAEMDALKDEYHQRVATLERKIREFEEEKQRLNSKIQVEEAKVESIKRDKMATEKLLQETIERNQTELAAQKEFYTNALNAAKEAEALAEARVNSEAKVELENLLREAGEKENMLIKTIEELRLSLTRQEQEAAFREERLKRDYDDLQKRYQASELRYNELVTQVPESTRPLLRQIEAMQETSAQREEAWAGVERTLNSRLQEAEAKAAASEEKERSVNERLSQSLSRITVLETQITILRTEQTQLSRSLEKERQRASESRQEYLAIKEEAAMQEGRAKQLEEEIKDLRVKHKEELQEAAEHRELLEKDLEREKAARAEIEKTSSREAPKVPLPDQTRNAPLRKLPSSGSINSLEESHFLQASLDLSDNASLERRMSSESNMSYYLRTMTPSAFESALRQKDGELASYMSRLASLESIRNSLAEELVKLTEQCEKLRTEAAAVPGLRAELEALKQRHFQALELMGERDEELEELRNDIVDLKEMYREQVDLLVSQDDIALPKTDLGTKSLAQLVQDGITQQLYLGTW

SEQ ID NO: 52841 - protein, 626 aa, Zea mays
  Coding DNA Sequence Number=SeqID_9466
  Gene Ontology: Mol. function=galactosylgalactosylxylosylprotein 3 -beta-glucuronosyltransferase activity; Cellular component=membrane; Biological process=cellulose and pectin-containing secondary cell wall biogenesis
  Homolog annotation: Hit_ID=Q50HV9; Match level="QueryCoverage=59%, HitCoverage=99%, E-value=1e-131, Identity=58%"; Hit description =Glycosyltransferase
  Pfam annotation: Domain name=Glyco_transf_43; Domain location=454 -604; Score=36.9; E_value=3.7e-12; Accession=PF03360.7; Description =Glycosyltransferase family 43
  Subcellular localization annotation: CTP_CleavageSite=69; ConfidenceScore=5.41e-01
MAPRMLYDDGGSQPPYGSKRTSARTQPLRQLSLRQAPSLLRRPRHHTSWVPKSLRLPRRHGPLREGWPRGDEDETGALLGPLASLSCVDACNPLLQAHPTWARDEHEGRGIPISLTPVSGRLASPPFALALALDLSGLGHAATLTRRPKGPPGQRFPKREAWSGGEGRAKPPPPQQAAEPYAKRKRGKPSESGFLAPPPLPALSGVDRFPARPGLVARLPSLVRYNSIDYLTREGGCCIHGPRLHMSERDRNRRNSGIILREGSVRDWSEFNDPSPSPKPLYSQSYVAVRGFLLSSKLKSVYAAMTSQRHSRSQERSKSKGLSCRRVAVRLLFFFMLGIFIGFMPLFSVDVYKKIVSENKMLPFHEGVIETEMVGTKVKESETIVVEKEIELIDEPHIQESPPVPALLDDDVDFSESSPVLPAIRESDIPVKKLLIIVTITSVRPQQAYYLNRLAHTLKAVQAPLLWLVVEWPEQSYETAEILRRFGSWPVTIHIGTKYRAVLEGPICKANRVMRWHTVQTVQKKSSTRRFPIGFSAFAFNSTLLWDPQRWNRPPMDSVIIHTGGRGGLQESRFIEKLVKSERQIEGLPDNCNRVMVWNFNLEPPQLNYPAGWALYKNLEADMPVI

SEQ ID NO: 52842 - protein, 71 aa, Zea mays
  Coding DNA Sequence Number=SeqID_9467
MAMMGSTSEKVYLCQVPNFGFLNDKAETRRVKRSWERNFYKEKTCDDESIMAVMGSTSEKMYLCQVPNFGL

SEQ ID NO: 52843 - protein, 132 aa, Zea mays
  Coding DNA Sequence Number=SeqID_9468
  Homolog annotation: Hit_ID=A7P521; Match level="QueryCoverage=27%, HitCoverage=16%, E-value=4e-10, Identity=72%"; Hit description =Chromosome chr4 scaffold_6, whole genome shotgun sequence
  Pfam annotation: Domain name=ChaC; Domain location=3-71; Score=-67.0; E_value=0.0026; Accession=PF04752.3; Description=ChaC-like protein
MVLWVFGYGSLIWNLGFDFDDKILGFIKGYNRTFNLGGDTVLHVQFRYGFERLKSFTEIKLFLLVSMVQAYKEKVYPKNKVCLVHANPHLLPLLPSQPDDKYEFADFSVCVFPHIQVEEDEEPKEGEEANGC

SEQ ID NO: 52844 - protein, 202 aa, Zea mays
  Coding DNA Sequence Number=SeqID_9469
  Homolog annotation: Hit_ID=A3C4A1; Match level="QueryCoverage=50%, HitCoverage=27%, E-value=8e-07, Identity=35%"; Hit description =Putative uncharacterized protein
MCCVANENDSGSTNEDEEEERNFVHLYARLSQEDKAVMLKLLERAREQSEARQRLEDILSIKMQHFDELTKEHEELKCSHVDLVHSKSSFELEFAGTNDDSYQKLKEENERLKKSLTQLKGKCIAQPSQDNHDHMVKKLETGTTVACTTSLKENVKDLRIAMRRKQKMKFNTSSKSLNHASTKGNIQGIKRYFMFLKELGVI

SEQ ID NO: 52845 - protein, 59 aa, Zea mays
  Coding DNA Sequence Number=SeqID_9470
MPEGGGFESESPGATDSRKERIQVYNGGVAECYVSSGGRASALSTCQCGSRRDLGTLLV

SEQ ID NO: 52846 - protein, 161 aa, Zea mays
  Coding DNA Sequence Number=SeqID_9471
  Gene Ontology: Mol. function=aspartic-type endopeptidase activity; Biological process=DNA integration
  Homolog annotation: Hit_ID=Q10G21; Match level="QueryCoverage=82%, HitCoverage=8%, E-value=3e-09, Identity=33%"; Hit description =Retrotransposon protein, putative, unclassified
MQYQNSVKRVETSSRRYVIILCVQVIKWKGHKMKKVREYRDKKTILREESETNGKLGRITFVLYMKELEVSEVNGLGLTQISQPDVVRKILSVLPIDKYGHIVTVLHQLDLSVTTPTQILGKINAHEMYMHINDKDESSSKRKDLALKANQERKEKAKVQI

SEQ ID NO: 52847 - protein, 112 aa, Zea mays
  Coding DNA Sequence Number=SeqID_9472
MTWQGHRTVRCAPDCPLYADGGYQLRIRRLEGTPNYGPRHYSSSPTRCPAHDRSHEPTNARRHGYEASRSCSWPFYVCAAEEDTVAHATLRLSWRQHMAYAMELVVVLCEST

SEQ ID NO: 52848 - protein, 207 aa, Zea mays
  Coding DNA Sequence Number=SeqID_9473
  Gene Ontology: Mol. function=nucleotide binding; Cellular component =intracellular; Biological process=small GTPase mediated signal transduction
  Homolog annotation: Hit_ID=A2YNS8; Match level="QueryCoverage=77%, HitCoverage=53%, E-value=3e-81, Identity=93%"; Hit description =Putative uncharacterized protein
  Pfam annotation: Domain name=Arf; Domain location=38-207; Score =131.5; E_value=2.3e-36; Accession=PF00025.12; Description=ADP -ribosylation factor family
  Pfam annotation: Domain name=MMR_HSR1; Domain location=55-173; Score =11.2; E_value=0.0001; Accession=PF01926.14; Description=GTPase of unknown function
  Pfam annotation: Domain name=Miro; Domain location=56-173; Score =31.0; E_value=4.3e-06; Accession=PF08477.4; Description=Miro-like protein
  Pfam annotation: Domain name=Ras; Domain location=56-194; Score= -65.3; E_value=0.00019; Accession=PF00071.13; Description=Ras family
  Pfam annotation: Domain name=SRPRB; Domain location=52-206; Score= -73.0; E_value=0.031; Accession=PF09439.1; Description=Signal recognition particle receptor beta su
  Pfam module annotation: Pfam domain module=Arf::MMR_HSR1::Miro::Ras::S RPRB; Domain location=38-207::55-173::56-173::56-194::52-206
MAFLLRLLKTSMAVSVSSICRTDLEKHRFYFNLTLTTMFSLFYGLWKHVFSKAEFHVLILGVHKAGKTTLLEKLKSIYLKGEGLPHDRIVPTVGLNIGRIEDANVKLVFWDLGGQPGLRTIWEKYYEEAHAVIYVIDSASASSFEDAKSALEKVLRHEDLHGAPILIFANKQDSPAAVTEEELARHLHLKELDERPCMFQAGSAFNG

SEQ ID NO: 52849 - protein, 1911 aa, Zea mays
  Coding DNA Sequence Number=SeqID_9474
  Gene Ontology: Mol. function=ATP-dependent helicase activity; Cellular component=nucleus; Biological process=mRNA processing
  Homolog annotation: Hit_ID=A2YNT3; Match level="QueryCoverage=95%, HitCoverage=98%, E-value=0.0, Identity=63%"; Hit description =Putative uncharacterized protein
  Pfam annotation: Domain name=DEAD; Domain location=380-540; Score= -7.2; E_value=0.00015; Accession=PF00270.20; Description=DEADDEAH box helicase
  Pfam annotation: Domain name=DUF1605; Domain location=906-1011; Score= 54.4; E_value=4e-13; Accession=PF07717.7; Description=Domain of unknown function (DUF1605)
  Pfam annotation: Domain name=HA2; Domain location=775-871; Score =67.0; E_value=6.2e-17; Accession=PF04408.14; Description=Helicase associated domain (HA2)
  Pfam annotation: Domain name=Helicase_C; Domain location=622-715; Score=64.6; E_value=3.3e-16; Accession=PF00271.22; Description =Helicase conserved C-terminal domain
  Pfam annotation: Domain name=IBR; Domain location=1765-1831; Score =56.3; E_value=1.1e-13; Accession=PF01485.12; Description=IBR domain
  Pfam annotation: Domain name=IBR; Domain location=1844-1896; Score =4.6; E_value=0.019; Accession=PF01485.12; Description=IBR domain
  Pfam annotation: Domain name=zf-C3HC4; Domain location=1699-1747; Score=5.1; E_value=0.024; Accession=PF00097.16; Description=Zinc finger, C3HC4 type (RING finger)
  Pfam module annotation: Pfam domain module=DEAD::DUF1605::HA2::Helicas e_C::IBR::IBR::zf-C3HC4; Domain location=380-540::906-1011::775 -871::622-715::1765-1831::1844-1896::1699-1747
MLRSQDRRPFRPPDRAPRPPHPHRDQHNHNEHRYQPLSHPHIDRRYSNEHRYQPRGQHQRGCHVQPPLRPSQFEVFLVRPGPDLSAPTAIEVEALLAGLPSPAPASISVQSSGRHAARLVFTSIPAAAAAARELWALRLEGLHLLTLDLPHPALAAHASPLIASLFASHASRLLDSDIMVLSAARSAELEASVRDLDLEKKTLESEKEFVDSKIAEYKEAMWSIQRAMLRGSGDKEEGVDLFAAVDDGEVDFVKVHMMLLRECRRLKEGLPIYAYRRRILNHIFANQYNPREVGSRVPLHATSVGHSCEVARHTNQECTYNCILLWIEVVWFLVQYYNTETFTGVFAKRLAVFPNLPSDQYNQRVEPLFVFFLNLFNHPRPPTEKLAVSAEKKGHDLIGETGSGKSTQLVQFLADSGVAGGGSIICTQPRKLAAISLAHRVDEESKGCYGDSSVLSYSTLLSSQGFGTKIIFTTDSCLLHYCMSDVNLDGISYIIIDEAHERSLNTDLLLAMIKKKLLDRLDLRLIIMSATADADRLAEYFYGCQIFHVRGRTFPVEIKYVPDVSAEASLNSVPSISSVASSTASYVTDVVQMVNIIHKNEEEGAILAFLTSQLEVEWACETFSDPNAVVLPMHGKLSSLEQNLVFKSYPGKRKIIFCTNIAETSLTIKDVKYVVDCGLAKEYRFVPTSGLNVLKVNWISQSSANQRAGRAGRTGAGKCYRLYPESDFGMMEVHQEPEIRKVHLGTAVLRILALGVTDVKCFEFIDAPDPEAIAMAVNNLEQLGAIECKRSGFELTDIGHDLVKLGIEPRLGKIMLDCFSYGLMKEGLVLASVMANASSIFCRVGTNEEKYKADRLKVPFCHPDGDLFTSLAVYKKWETGYGNKNTWCWQNSINAKTLRRCQETISELEKCLKHELNIIVPSYWSWNPEKPTMHDTSLKKIILSSLRGNLAMFSGHENLGYKVISAGQRVQLHPSCSLFIYGSKPEWVVFSEILSAVNQYLVCVTAVGLNEVLTVHPMSFIKQLEESKLQRKVITGIGNKSLRRFCGKSGQNLQNIISLLRKDCRDDHIMVDLDFSSSEVLLFAKEHDMEKVFCKVNYALELEAKLLRDECDERRPGSSTIALFGSGAEIKHLELGKRYLTVEILHQNARVIDEKELVCLVDSLVPGIANFHKTGNFQTNLDETKWGRFTFLKPDYAEDAISKLNGIEFHGSLLKVSPVSIYSHSGLPFPAVRAKVSWPRKASRGVALVTCASGEAEFIVKDCFALGVGGRYVNCEVSNRYANCVFVTGIPLHVTEPELYDAFHSTTTRRILDIRLLRGQPTASSSVSECTEALMRAISLFMPNRNFPCQKFRVQVFPPEEKDLMMKATITFDGSFHREAARALDHLQGSVLPCCLPWQIIQCEHVFHSTVSCPMRIYNVISQDVGALLESFRSQKVTTTTTITGAKQIQAEGKQIEQLTNNAMELMGKMFTCQSELLVEDGFSVRALESRFLVYISGITRTTSDGVAYNLEKNENGNFRVKLTANATKTIADLRRPLELLMKGKIINHPDLMLSTVQLLWSRDGMEQLRSVERETGTYILYDRQSLNIKIFGSTDNVAAAEEKLVHALVQLHEKKPLEVCLRGRNLPPNLMKEVIVKFGADLEGLKNEVPAVDLQLNTRRQTLYVRGSKEDKQRVEGMISELITSSDHNAQLSSENACPICLCELEDPFKLESCGHMFCLACLVDQCESAMKSQDGFPLRCLESGCNKLFLLADLRSLLPDKLDELFRASLNAFVASSAGLYRFCPTPDCTSIYQVAAAGAQGDRPFVCGACSVETCTKCHLEYHPFISCEAYKEYKADPDATMLEWRKGKENVKNCPSCGFTIEKSEGCNHVECRCGSHICWNCLENFKSSEECYGHLRSVHLSYADLM

SEQ ID NO: 52850 - protein, 39 aa, Zea mays
  Coding DNA Sequence Number=SeqID_9475
MAEVTGAKAKPTIDLKCLKQPSDEYKVTSSLLRPRTASL

SEQ ID NO: 52851 - protein, 116 aa, Zea mays
  Coding DNA Sequence Number=SeqID_9476
MGQRTPAFTKLLIRDFLCNLLGKHRLLVVYVKESPGGGWVGAGTPEGGRFTAEQLGGGIKQLRRGIKRSRRQYTGLEGGGKVLYLKAGSGDSSAAAMARRWPGATVADLRGCTEDV

SEQ ID NO: 52852 - protein, 158 aa, Zea mays
  Coding DNA Sequence Number=SeqID_9477
  Subcellular localization annotation: CTP_CleavageSite=20; ConfidenceScore=5.56e-01
MGAIKVKAQSTQGTRSRLARAQPRVKAADPGGFTSPKSSLGRHRKLRLALTPGFGPSLGSGRRRTPPRPTPGLGHSLDLGRRFSPRPTLGLGLDLDLGRRTPPRPTPGVGLSLDPRARTRPRPRKMDSASPDPRGWTQPRLRKTDSTSTSEEPPPRLT

SEQ ID NO: 52853 - protein, 557 aa, Zea mays
  Coding DNA Sequence Number=SeqID_9478
  Gene Ontology: Mol. function=histone acetyltransferase activity; Cellular component=nucleus; Biological process=regulation of transcription, DNA-dependent
  Homolog annotation: Hit_ID=Q6K910; Match level="QueryCoverage=63%, HitCoverage=98%, E-value=3e-66, Identity=46%"; Hit description =Putative speckle-type POZ
MMVLALVVTTLFAILLLFSLRSYLHFRATPFSAEGVGAGAPSPYSSDNSPDTDSGSGYCTSTRTFHIMYTSSFSPLSDVPFVFPAFALFFLPNLLPPPMVVATSRQTLVDAGLARYSHSIVLLGVTPGADAQVFAVSFSGNEQTCPPVPFSSCSTKPWKWGRRWMRRQLYQYSSVLESCCIPVSQQERHGDPRAADIRVAMVFCADFAALRPSPADVRVVTSDGSAIRAHCSVLVSERGFPVPFRVSIDADRSPDADKGTRRGWDAGCTVHVLGAPADAVAAFLRFLYSSPRAEDAVGAHGAALLALAHAYRVPWLKRRAEAAVAARLTAERAVDALKLAALCDAPRLYLACARLAGKDLDAVERSEGWRFAGRHDAALQLNLLQLVHDAHQRKERWERERASQHVYGQLSDAMAFLDRIFAGDGEGWSACASAASSREDGGVRRGLEQLMRHLAACGGRTRKPAACPRCRRALQLLRLHASVCDRAGGEPCNVPLCSNLKAKMQEEGVGKTWKLLVKKVTRARVMSALASSSSREVPEVVKKSWAKYSSSRASRIR

SEQ ID NO: 52854 - protein, 219 aa, Zea mays
  Coding DNA Sequence Number=SeqID_9479
  Gene Ontology: Mol. function=transcription regulator activity; Cellular component=nucleus; Biological process=negative regulation of transcription from RNA polymerase III promoter
  Homolog annotation: Hit_ID=A2XYL6; Match level="QueryCoverage=84%, HitCoverage=64%, E-value=2e-77, Identity=78%"; Hit description =Putative uncharacterized protein
  Pfam annotation: Domain name=Maf1; Domain location=14-188; Score =206.0; E_value=9e-59; Accession=PF09174.1; Description=Maf1 regulator
YNCSSSSSTLVIVQSRGNHEAFSCKKLGTCFIASFVEHELHAFNKLILDYLGKSSDSDPSSPVEHLASRSSRKTLIYLVLTLGHIYPDYDFSAVRAHLFFQEEELESFKQMVDTYLSDASRQWAATNEGSSLLDSMTKAIDEVIKIKECDIYSYNPDSDADPVLEKGAIWSFNYYFYNRKLKRVVSFRCYCTSKLSGDDFLTGVASDGEEEDALIDMDI

SEQ ID NO: 52855 - protein, 447 aa, Zea mays
  Coding DNA Sequence Number=SeqID_9480
  Homolog annotation: Hit_ID=A2WK09; Match level="QueryCoverage=99%, HitCoverage=100%, E-value=6e-68, Identity=52%"; Hit description =Putative uncharacterized protein
  Subcellular localization annotation: CTP_CleavageSite=72; ConfidenceScore=5.33e-01
MDTALCDDLLQVVFGLLPPSAAPAVSLVSRRWLALLRAATSSLSLRLPASSAATLAALLSHYPFLAALTVVSAGTPVHDADAVLLAVAAAPAASRLSTLRLLPDWAVSPAALLTVCPALAGLTSLHLTAVRPLSFRWLKLLPRLKSFALVNSAATVDSAGSSSDDADGEAEDVAGHCRWRSCHFAASAPATAGLGAVAALRACRAVADRVLLLAADHCRTLTSLLVYDGGGSEALHRFIQQRAAGLHTLDLRLPLDLHNDHLLAIGADSVHNATHGLASLRLQSCVLITGDGLRSLARTAAGAGIEELALVSCDVVEREPGLLTFLSQSMPRLRRLNLSYNETLNDKVIGAMLSSCRNLIDIRLRGCRGLTGGSLLSLLRHCGQSLEILDISRCPGIAVGNVELFAQRAARLNHVIIEESAMSEELKAIAQKKGMKVGSLPCEGGPF

SEQ ID NO: 52856 - protein, 347 aa, Zea mays
  Coding DNA Sequence Number=SeqID_9481
  Gene Ontology: Mol. function=transcription regulator activity; Cellular component=nucleus; Biological process=regulation of transcription
  Homolog annotation: Hit_ID=Q5MP56; Match level="QueryCoverage=63%, HitCoverage=100%, E-value=1e-114, Identity=92%"; Hit description =Barren stalk1
  Pfam annotation: Domain name=HLH; Domain location=183-230; Score =32.8; E_value=1.3e-06; Accession=PF00010.17; Description=Helix-loop -helix DNA-binding domain
MAPYNFKAYRFYKLRGGKYDKTKKCVPLDIHHHFLEFQKEIQILIKVLFENLKKGRKTYTGGKCENAIQIVLCMCLTAHTRFHAMPYAEYIYPSWAPPKPIALGLKPAKPTELHSVVVAHRRPRVVLAMDPYHYQTMYDPRGFPIIHPQPYLQHPVAGALGDSRVRGGGSGARRRPGAKLSTDPQSVAARERRHRISDRFRVLRSLVPGGSKMDTVSMLEQAIHYVKFLKTQISLHQAALMQHEEGCHAELAAYSAVAVVGDNEVTLASHGRTGACDEMMQLQVAAEEALSYGVDAHQPYGLDPRQLSGGHELPPLPASCIFLEEPADACYSVCDLDDGDTGLPGSY

SEQ ID NO: 52857 - protein, 458 aa, Zea mays
  Coding DNA Sequence Number=SeqID_9482
MESHDLRAEWESRLVGGYEIDGSGYGYGAASPLQPNRILAEYVDVYSPLLYTPNPPQVVSIATTAQAKMKLWKETSRSSKITTSSRCGLAATPSRLPVKAALSTFLFRTLIYCKNYMDVSDMARLRHTARKSVIPFLPSRLAERPLRRPVAGQSSHLERLHHRLREEQERRRQEQRSSSLSLHQEIESVRSCSPVLSLEPPPAPPLGAPASGVAAGGDPDDGDGDDSSSHDTDFSANPEPEGWVARPITRDAARGCHFHDALDTLLRRAFDRHTWSVEYRCVVYQHSRGVYPDRWEATCLVRCPEDSLQGAEACSEHYSISERDSAEAAMQDAARRALSHYCSVFGGAADGLDLKYYPRRSSGSTGGVIVSPVGEGNPRLSSTVNLAAVLNTELDHALDELSRARAEIALLRAERAERRFLDGGSPTPVGTQHPYRSPQRGHQSYGNPACKTKINLEP

SEQ ID NO: 52858 - protein, 160 aa, Zea mays
  Coding DNA Sequence Number=SeqID_9483
MATSPSDSSASFVSHSSSREPTPEWDPISAYEKQGPLHWDADGWDFEVTSESDGDLTDGDDLQFLDGELDSDTSTDWFWTYDGESSDVESFDNDDDPMSGYWMSIVSSDDGDDENNDDSSDYDRSDEDSDRSGDDDGGARQYDEMPPCKRRRLLHGSLFW

SEQ ID NO: 52859 - protein, 268 aa, Zea mays
  Coding DNA Sequence Number=SeqID_9484
MWIGKRGNVFLQIRSLFKWLCDEGYSPSSPWEWDDQGLPGLGEGLRFFYEFHEQGNVWMEDSLAIRTSYCSEVEGFPHLLRSCALRMGIRKKPEYVWKEYLESGMEKCSMAVYLGESRNYPNHPSFQVNFTGYRFPDTCQNVARTALRQLCQNYNKMIFETPLRYFPPSNKNTPTWRKRLQALSGGDPIEDDPTIVYMAGYLHTLDNQYDDLTLHCTHLTSRVESLEQKVRELSRQKASLQESLAIAEGEETNTREAYRTLNMDYDKI

SEQ ID NO: 52860 - protein, 270 aa, Zea mays
  Coding DNA Sequence Number=SeqID_9485
  Homolog annotation: Hit_ID=Q6J9V9; Match level="QueryCoverage=32%, HitCoverage=34%, E-value=3e-31, Identity=74%"; Hit description =Putative uncharacterized protein
  Subcellular localization annotation: CTP_CleavageSite=60; ConfidenceScore=5.42e-01
MEARAHMSCNRRNGYYVQGNRTATRTNAASSRLRNQCLDSRTSDTSDKRSGRRFTFVMMTASKKDPSSEGNGPQALLLIRGLKVAPSGVRQQPQSTWAPCPLLIRGSKAGPSKGFDSRPRARRFRDDPGYVCYMAEARATLPRYPRENNVVRPAPATMPTTRVKLSHDLPRVRPRAQQGAPPRPTSGLGLSLGLGRRSPPRPTPGLDLSLGLGRRSLPRSTPGLGLSLGLGRRTLPRPTSASASEEASASPDPGLRPTALQGIHHYPTPS

SEQ ID NO: 52861 - protein, 200 aa, Zea mays
  Coding DNA Sequence Number=SeqID_9486
  Subcellular localization annotation: CTP_CleavageSite=73; ConfidenceScore=5.64e-01
MADKAQFKSGPRLPKDATSSEPGTVVPGGFTPRPRASSGTSASGEGLRLARPQASALALASGEGLRLARPQASASALASGEGLRLARPQPRPQKKPPPRPTRASDRLRYRGYIITLLLASCLKLRRNKTSVPSKVTPTTGNDGSSRAPMTSDRSQPPTEARQRQQDPCRPTAMLLQGSRHFSDDHVSSCTGLKALLCQPR

SEQ ID NO: 52862 - protein, 173 aa, Zea mays
  Coding DNA Sequence Number=SeqID_9487
  Gene Ontology: Mol. function=nucleic acid binding; Cellular component= cytoplasm; Biological process=multicellular organismal development
  Homolog annotation: Hit_ID=Q7FS89; Match level="QueryCoverage=32%, HitCoverage=32%, E-value=4e-24, Identity=91%"; Hit description =Putative argonaute protein
MAALTRCHGPLQLSIPKEGGNEGEPRQGVWVPPPLRSVESNQKRHHTRLFPGVHRRRDVTDRSGNNLPGTVVDTEICHPREFDFYLCSHAGIQIRFSREPTGQYTIMSSTMKTVSRLMGRRYLQTACATHTHNARALSQLIFAYFLVFMYHLSEIDELRQKPFKRNGPDFDAK

SEQ ID NO: 52863 - protein, 118 aa, Zea mays
  Coding DNA Sequence Number=SeqID_9488
MMSKALDDEVVSFNSRLRSINAHTKLLNFSSLVRLLLLEKVFSDSELWIWITTRTKAEPDEGRGQPKLCAGKLRLDGRRGNRLKDEKTSGASTDFHKPLANVMGMDVILRGLRPASIK

SEQ ID NO: 52864 - protein, 351 aa, Zea mays
  Coding DNA Sequence Number=SeqID_9489
MDGGNHPRSGEPSFPQHLQGLQKGLEILLSVVRGPVAPSIGGDGHHSLSKRREPPVVISEVEPPALPPFVRGRKDGENVLRRPRLPQLEDAATGPHCRVDPSLPRRRSKKLRGEEMSPQVPVRVNPQVSFANRCEDGGLRDGVRAEVVQLHPVNMQNRPHKAACRHSEPPLVEGDEAHDIPRRRGRGDSARGGIHSGCLSSERGRSKPSATRASRSSAVTVEKGHGSHGGIMDRRHRWQEKRATLRLRHNDRVKKGTGKGRYPKRVPSPRRKRAPSPLLIRGSKAGPSEGFNSRLRALGLRAHYWSEVQRPAPRKGSTAASGHSGSAPTTDQGFVGWPSKGSQPPQTQSEG

SEQ ID NO: 52865 - protein, 447 aa, Zea mays
  Coding DNA Sequence Number=SeqID_9490
  Gene Ontology: Mol. function=kinase activity; Cellular component =ornithine carbamoyltransferase complex; Biological process=amino acid metabolic process
  Homolog annotation: Hit_ID=Q6QP54; Match level="QueryCoverage=12%, HitCoverage=24%, E-value=2e-11, Identity=57%"; Hit description =Putative kinase
MEYRPGLERLLETAHLELDEKLFVNTQQTPTWRANCRRFEPGGSLDRRVNCRHVPQPRWVGARRSAKGEEAGGRQGNDGASCDVVGPSPGLGEVEAPPRSRSSLPSKAEVESEPESEPWGRAMRSSSSSGAEPEFEPWGRAMQNSSSSGAEPESEPWGRAMRSSSSSRAEPESEPWGRAKRSSSSFGAEPESEPWGRAKRSSSSSGAEPESEPWGRAKRSFLWRLGPVLAAVSITLSSGTAVRAAQAALSSCQATFALNAPAIRSVGEATWPRLLLGEDWASGEPKLCADGGYQLRFRSIEGGPKGKLMGFMVSDQGIEDSAKRYANLQALKEGATLVAERKSKGHALKVQKLVHFISEDVSGCIVKWSFELNKLDPQGHNFCYSIRHHFDATNNIAEYEGLVNGLKIAAEATPRKWALLGYTGRSVAPTSGVGRKVLRFCKIQSVL

SEQ ID NO: 52866 - protein, 456 aa, Zea mays
  Coding DNA Sequence Number=SeqID_9491
  Gene Ontology: Mol. function=metalloendopeptidase activity; Cellular component=integral to membrane; Biological process=proteolysis
  Homolog annotation: Hit_ID=A3ANI0; Match level="QueryCoverage=95%, HitCoverage=89%, E-value=1e-124, Identity=53%"; Hit description =Putative uncharacterized protein
  Pfam annotation: Domain name=Peptidase_M50; Domain location=239-421; Score=43.7; E_value=6.7e-10; Accession=PF02163.13; Description =Peptidase family M50
  Subcellular localization annotation: CTP_CleavageSite=24; ConfidenceScore=5.65e-01
MAAALASSPLVHLTTSRLRLPRPQASASSSGPVCSIGVCLGWRLKVGWRALRRRDRLRCFSTDGGGGEEGEKRGEEETSATAAASPASVPAETQTPGVSSEPPLLSFSVDNIDTVKLLELLGPEKVDPVDVKAIKEKLFGYTTFWLTKEEPFGDLGEGVLFIGNLRGKREEIFAKLQRQVRELTGDKYNLFMVEEPNSEGDDPRGGPRVSFGLLRKEVSEPGPTTLWQYVISLLLFLLTMFSCIELGIASKEIGHFLAAFPKNVKLGIPFFIPNFTLGTFGAITQFKSILPDRKTMFDISMAGPVAGAALSFSMFFVGLLLSSNPVGASDLVEVPSQLFQGSLLLGLISRATLGYRAMHAATVSIHPLVIAGWCGLTTSAFNMLPVGCLDGGRALQGAFGKDALFGFGLTTYSLLGLGVLGGPLSLPWGLYVLICQRCNDLIRSFLFLREHPRNHA

SEQ ID NO: 52867 - protein, 108 aa, Zea mays
  Coding DNA Sequence Number=SeqID_9492
MRSSSSSGAEPESEPWGRAKRSSSSSGAEPKSEPWVGRSGHHSVEWHNSQSGAGGTVLLSGQSVERQSDYGHFGSVDWRARVRIKGAEHGVSSELLTGNPSGRPCPIC

SEQ ID NO: 52868 - protein, 522 aa, Zea mays
  Coding DNA Sequence Number=SeqID_9493
  Homolog annotation: Hit_ID=Q69XF8; Match level="QueryCoverage=36%, HitCoverage=34%, E-value=1e-51, Identity=53%"; Hit description =Pentatricopeptide (PPR) repeat-containing protein-like
  Subcellular localization annotation: CTP_CleavageSite=16; ConfidenceScore=5.04e-01
MLWSLRDLNHHVTPSRATRHGCCPLPPGVPRPSRRWLCFLLAAVLLHRPQPPRLGYSLHARAAYAGLLADRYLANALLVFYVCLLDHLPHALRAFDDLPHRDVVAHSSVLAAFLHAGLPRRALLQLRTMASGGYVADDDVAPSAHALSASAKACAVLHDLRARAYVHGTTVVRGYGDDGVVLSALVDLYATRAMLRTDGVWLDGCTFGSMMSVLGNMKRARQGREAHTQELWATGALSFVGPSRRRPPAGRGPRAFTESSVLYTLHRFWKEEHDWGWKKFMELSELHDGFIAQDALTIKAKVQVIREKIDRPFRCLDGQYRRELIRVYLSNVEQIYRRFIDEKRRTFSRLIEDKLGWSRYLNSLSTFSRPTKERSPSNYQPMNLCTEGGRAACVLVERGSLVESDVSPYLYKKKKECAIAGDGYDDQGFSLLLVTVAGSWAPWQRRGTVSAHAVVGASRGYPCSTYFIEVSSAGIEPMKHGYLVTKFNFQSSFVQQGSNRDFHETDRFVVGVMYGNLWFRSS

SEQ ID NO: 52869 - protein, 29 aa, Zea mays
  Coding DNA Sequence Number=SeqID_9494
MGARLRPWARRWRGEGVGTAAALQGREHS

SEQ ID NO: 52870 - protein, 28 aa, Zea mays
  Coding DNA Sequence Number=SeqID_9495
MGTNGHLYLDTGDIMLSVCMCARFTLGS

SEQ ID NO: 52871 - protein, 306 aa, Zea mays
  Coding DNA Sequence Number=SeqID_9496
MDDVYEESHRLLGLDVGEASDLDSLGEFVDGDQQALSWQMEDSLVIRTSYCSEVEGFPHLLRSCALRMGIRKKPEYVWKEYLENGMEKCSMAVYLGESRNYPNHPSFQVTFTGHRFQILARMLPEKPSDNYARTTADNKNTPAWRKRLQALSGRDPTEDDPTIVYMAGYLHTLDNQYDDLASHCTHLNSRVESLEQQVRELTREKVSLQESLEIAEGEETNTREVYRTLKMDYDKKLKKLAPARKICKKTKSQGCQTEQKEEAPPALPPTRIGNSSDTEEMSLASLDDLLKEFGGHFREGVREYPR

SEQ ID NO: 52872 - protein, 88 aa, Zea mays
  Coding DNA Sequence Number=SeqID_9497
MEARRASRYEVHKRRCISSSTTILNRLSGHEKFFGKTPTHGPSGPLRRTVRGTKVPSDRNTAKTQVYPLDRLTEKRAPSKTKRGPSGR

SEQ ID NO: 52873 - protein, 36 aa, Zea mays
  Coding DNA Sequence Number=SeqID_9498
MGINSHLSTCVDTQSPKYLEMAQGHISLSAYLSGEE

SEQ ID NO: 52874 - protein, 189 aa, Zea mays
  Coding DNA Sequence Number=SeqID_9499
MALPVDMAPESEPWGRAKRSFVIFRVLARVRALGSGGAEFAVFRVLARVRALGSGGAEFAVFRVLARVRALGSGGAEFAVFRVLARVRALGSGGAEFAVFRVLARVRALGSGGAEFAVFRVLAPSPSPGVGRSGVRRLPVGVAQAALSFCQTGQWSGGVTAVTSALPGARVRMKLYADGGYQLRIRRLE

SEQ ID NO: 52875 - protein, 75 aa, Zea mays
  Coding DNA Sequence Number=SeqID_9500
MEAQAHASCNQRAGCYVRATAPPLAPLPCLLDCGTSTTTRGNPAYDPAVPARDRERGIPRKGSFPMKETGSEPPY

SEQ ID NO: 52876 - protein, 688 aa, Zea mays
  Coding DNA Sequence Number=SeqID_9501
  Gene Ontology: Mol. function=kinase activity
  Homolog annotation: Hit_ID=Q6QP54; Match level="QueryCoverage=8%, HitCoverage=20%, E-value=7e-11, Identity=63%"; Hit description =Putative kinase
  Subcellular localization annotation: CTP_CleavageSite=76; ConfidenceScore=5.04e-01
MAAPSLSRGGCRRHLTLDARHLPSRHLPHGAKPMAFLVLASPSRSYLQRWLPSPPRGVFSVATPCVIPLAGVLDYSAMEVAAPSFPHLPPSVLSSAPLLPAPVPPMDAAPSLSSLPLAAMELAPAQVRSMPEKTCVLDARQVFDGRVQMVLGDVVYTAVPFYKRVLMVEEDAFGLLVLLLVREKEPVVPPLSSSLRTSRSVASAAPAQSLADFCKDSSSSAAHAGAVVGFVVMGQRWQQDHWHLHQFKFSVSGEGVTSVHAGGSERPHASAVPSFPARTTLCNRAPGPSFYRRKERIQPEFAWGRVMMVPPVDVVGPCPGLGDVEAPPRSRSSLSSKAEVESEPLGRARRRPSAEARAESEPWGRAKRSLSSSGAEPDSEPWGRTKRKSSSSGAEPESEPWGRAKQSSSSSGAEPESEPWGRAKRSSSSSGAEPESEPWGRVKRSSSSSGAEPESEPWGRAKRSFLWRLRPGLAAVSLTLSSGSAVGAAQAALSSCETGQLSGEATFALNAPAIWSVGVAIWPRFLLGEDWALGEPKLCADGGYQLRFRSLEGDQAFSVAFCSGGCARAHPPGVAPEASEEWFDSFEVLMPRAMLRLGERTVKDRLDFFTYAPASPFRKEEGGKAPCCPRRAPNMVSPVSCWRVIRVGAHAPFVRSRLEARRRAQKYLRVIYRTRSPSDGVRGLDASL

SEQ ID NO: 52877 - protein, 119 aa, Zea mays
  Coding DNA Sequence Number=SeqID_9502
PSCRQWGSVYAARSTKVDLSLGEECGGYEIDGSGYDYGAGKWYSFRLERAKMKLWKETFRSSKTTTSSRCGLAATPSRLPVKAAAKQSSSSSGAEPESEPWGRAKWSSSSSGAELESEP

SEQ ID NO: 52878 - protein, 150 aa, Zea mays
  Coding DNA Sequence Number=SeqID_9503
MSIICCPRRGMMQLHILRGSNCDCRSRYQRFALNSPTQATPTAAPPKVAVVHRRIWLGFGQTPQSRSGTQEKHRGAHHESNRGGHTGDNGDTSLDHGDARRYVDDEEFPSPGCSRAPPIAARVFVKGFRCSDAPHRGSTVNIGVVRPRRR

SEQ ID NO: 52879 - protein, 100 aa, Zea mays
  Coding DNA Sequence Number=SeqID_9504
MGLGVCGSLCQGGNENDGFGISYGNGKWYSFRLERVVCIATTAQEKMKPWKETSRSSKITTSSRRGLAATPSWLPVKAACIYVSFPHFDYCKDYVDVSDI

SEQ ID NO: 52880 - protein, 121 aa, Zea mays
  Coding DNA Sequence Number=SeqID_9505
MVHGSLSRYCPGSWRIPVTTIVSSGMAQRWPRSMWPGEIKRWESAAPTPWLEERDEHILRAHSTAEDGGSGEILRPGLETKAAENVKLVLSGTIIRGTLKAPKSQLVTPISTKLQRPDGCD

SEQ ID NO: 52881 - protein, 87 aa, Zea mays
  Coding DNA Sequence Number=SeqID_9506
TAAEKGGGAYRRRDCSGEVVEDVGEVSGITTVCGSPSRMARVGRSTSPKSGEVDLGLPVKSGLVRGLGKLHRPLAELAEALARLGGG

SEQ ID NO: 52882 - protein, 78 aa, Zea mays
  Coding DNA Sequence Number=SeqID_9507
METELPPRPCGTNAITSDSRSPPRRRHFVGAYQVKMAHLATLKGEFDKLYIEDAKVLDDYANKISGIGGAVLRAPRGG

SEQ ID NO: 52883 - protein, 645 aa, Zea mays
  Coding DNA Sequence Number=SeqID_9508
  Gene Ontology: Mol. function=binding; Cellular component=nucleus; Biological process=ribosome biogenesis and assembly
  Homolog annotation: Hit_ID=A2ZID0; Match level="QueryCoverage=90%, HitCoverage=83%, E-value=1e-111, Identity=49%"; Hit description =Putative uncharacterized protein
  Pfam annotation: Domain name=Noc2; Domain location=321-588; Score =108.5; E_value=2.1e-29; Accession=PF03715.4; Description=Noc2p family
  Subcellular localization annotation: CTP_CleavageSite=60; ConfidenceScore=5.42e-01
MAKKLGKKARKFARKNLQSAAKRNRKIRNQFKHRRGPRGGESLLPTLLTPACLFFSKIFRLVTDDAAATLIHGLEFPEDDAELDADLSDSDGYLSEDPGCPYYSDSEDEKAAKDCIMEEGLDRQNDDMNRDIKKQKKKLKKLLDKDPEFANFLEKWQSELESSRSKGDSDEEGMDSMDDDDDSNDGNLPNAKVLTRKTISEWCQLVSKEPKAPALRNLLNAFRDACRYGVHSDGPLMQRFQSARVFYQIIMFVLSESDNIFRALLEIQDDVNKGKIMNLRNSKKWLTVDSLIKSYLSSSLDLLSQLTDNKILAFVLTRLRVSVVLFSAYPSTSSRLVKKSYERAIISVEQLNAILRQASKTKEKEDLRKIDNWQYISCVNLWVRFLCCHYKDYNLHPLFSQVLQVIRGVAHLFPGTRYLPLRLKLVQMLNELSTCSQMFYPIPSLLFDCLELREVSQKEQTQRTKINFSSLLKVPKNLLKSRDFQEECILSAIQILSAHFAQWSYHVSFPEVATIPLVLLKRLHEQTTVESLRRPIKRLIDQVTENKDFIERKREVVSFSPNDKASVDSFLQGEKHFKIPREFLRDISHLESVGFQVRATKNHINVEHFSADIRRGSYCVTSSETDSYESSSAQQFCTIVTLIPK

SEQ ID NO: 52884 - protein, 53 aa, Zea mays
  Coding DNA Sequence Number=SeqID_9509
MGEKRCHGWQHQVEEEEGRLEQTIAWRGREGAGAWGIKGGSKLQPLAVFYNGY

SEQ ID NO: 52885 - protein, 85 aa, Zea mays
  Coding DNA Sequence Number=SeqID_9510
MAQTEAAFFINDTKDPSAEATLTGEKFFNDVWVNAELSPPLEPFDPLADLEMKEALDIINMAESVVDEVVNKLLHEVAEKVLKEE

SEQ ID NO: 52886 - protein, 191 aa, Zea mays
  Coding DNA Sequence Number=SeqID_9511
  Homolog annotation: Hit_ID=O48967; Match level="QueryCoverage=92%, HitCoverage=37%, E-value=4e-23, Identity=43%"; Hit description =Putative uncharacterized protein
MMVQIVEHHDLSPEDFLMEEGATSSVPWGSYCLAPGAATMYTAQQHTPAQTSRAPSGAAHGGALSAAKELLRNPPGSMASPGGGMRQWHEDVDRLLSMGHSGSARPRPRSFQRQREVSTSVRSPSVRGARTDDLRAELNAGVRAKMLESLWRRCHTRVLGAPRPGHEHNHQVDPQAPNHDPRVKIQPVYTL

SEQ ID NO: 52887 - protein, 427 aa, Zea mays
  Coding DNA Sequence Number=SeqID_9512
MPTLDDPPRDPDLRCAGWRSPARRASSPSAPKVTPPPSHPRPTDESGSQQQESARGDAGGPYPAVAKTASAASHVPTRDPAAAAPASGGVAAVEEAPARAFVPPSDTGGDTSSSSPPPAPEDMEVVFRRRLRSSVEQEAAPVPLPRMLSRAHQVLSDTRVAILREWEALEAEHQRLSDWRTQLEERTQTASFQFISERSQLEQDNKEYKRDLQKVCARELEASRREKKVARREEVVSQREALTTEYQAKLSALDQTLEAQEAHQVKAVERLQKWEQELEGKASDAALVEENLKAKERPWTGGRRTSPSERRISSSGKKCSLGEASCWPSMSSRQRRKRGSWRSRSTSSTQRWWCRILRARLEAEGGKLCRAVVEYVLTCFRSHDPAISLAPVIAGSVAATEDAAREGVQDVVELVAERFQRDPADDL

SEQ ID NO: 52888 - protein, 76 aa, Zea mays
  Coding DNA Sequence Number=SeqID_9513
MGKPVPSLLMLLLNRVTALVPTITRMGDHVSGRVRGYVCGQVHSGLITLCKKKTKLRNNLGFLGHTGPLVVYAYHS

SEQ ID NO: 52889 - protein, 124 aa, Zea mays
  Coding DNA Sequence Number=SeqID_9514
MAHRRAWSTRGGGRSKSGEGDLDLPLKFCRVRGLGKLHKLMAKLTERLARLGSDWSGLATVAEALAAMAGGKELAGAKEGRLAGERFGAQKSGLSLCSDPRQIQGFVVSRARVPMPSSGMRQRG

SEQ ID NO: 52890 - protein, 78 aa, Zea mays
  Coding DNA Sequence Number=SeqID_9515
MVVAPWVKYLSQEYDPMLTWAASTYRSPSCPSFRGSTTDGEYVAPANSGDERHTPANSTGSGDERQTPAMNGNERQRH

SEQ ID NO: 52891 - protein, 520 aa, Zea mays
  Coding DNA Sequence Number=SeqID_9516
  Gene Ontology: Mol. function=two-component response regulator activity; Cellular component=nucleus; Biological process=two -component signal transduction system (phosphorelay)
  Homolog annotation: Hit_ID=Q689G9; Match level="QueryCoverage=84%, HitCoverage=84%, E-value=0.0, Identity=76%"; Hit description=Two -component response regulator-like PRR1
  Pfam annotation: Domain name=CCT; Domain location=414-458; Score =78.2; E_value=2.7e-20; Accession=PF06203.5; Description=CCT motif
  Pfam annotation: Domain name=Response_reg; Domain location=9-114; Score=10.1; E_value=0.00063; Accession=PF00072.15; Description =Response regulator receiver domain
  Pfam module annotation: Pfam domain module=CCT::Response_reg; Domain location=414-458::9-114
MAGGGEGDRVGVGGSPAVRGPEQVTCAKSPRQVINILNYEGGEIDIILAEVDLPVSKCFKMLKYIARNKDLRHIPIIMMSNRDEVSVVVKCLRLGAAEYLVKPLRTNELLNLWTHVWRRRRMLGLPEKNFFNDNFELVLSEPSDANTNSTTLLSDETDDRPKGNTNQETGTSKQLEYESNPSVAEPDQREKMEGVPGSALDASKKSSPRRAFSRPIKTNLRVAESSAFLAYVKPSTPATSSFDSELQRGGSRLDSLDNQGNCSSATDRSDTGTDVNIRSKEAFEMPAQYPMVWFSSSNMHMERSSEGHNDTSGTPPAYHFPFYYPGMVEHNMALSSAQDFQANINNAQAHTPPAMLPQYNVYPQCHGLPVIPSFQFNPSGMSTHSSHLPTQNVWSSASSTPPVPEETCSRSERRAAALAKFRLKRKERCFDKKVRYVNRKKLAETRPRVRGQFVRQPTNTDVISIGDDISEDEDDDPSSREDNLLRKTGLLLYIPPIIPYSMCLLDDQGSISGGMGNYVD

SEQ ID NO: 52892 - protein, 487 aa, Zea mays
  Coding DNA Sequence Number=SeqID_9517
MAAIGAIGEAVVTCGHGVLHGAGVIEPGEIPTRVGLVIFLRTQRPGAGAVDSLDSRRGAASCLAMPAPPPPPSAGKVTGQTRMLLFRHVGKTSSILPPVGGLMAAIVAVARRSKEYHVVAAVEGHELKTSETKHRPGLERLLETTHLELDGKLFVNTQQAPTWCANCRRFDPGGSLDRRVNCRRVPQPRWVGARRNTKGGETAKGKLAASVLSCAQVGCACSRGLQASARESERERETIRQPVLPRGQPSRMRALDLPFIGVRRAQVYNGGCSNVLTCLAERSQSPKYMPSWQSERFWHPVHVMSWPSEERLSFVEPEVGRGGGSSEVEVESRPEGRARRRPLSKVEAESEPWGRARRSPSSEVEAEFEPWGRARRSSSSKVEVESEPWGRARHSPSSEVEAESEPWGRARRSPSSGVEVEPEPWGRARRSFLWRPRLDLAAVSLTLSSGTAIGAGQAVLFSRQVGQWSGEVTAVTSTLSTEERASG

SEQ ID NO: 52893 - protein, 105 aa, Zea mays
  Coding DNA Sequence Number=SeqID_9518
  Homolog annotation: Hit_ID=A2XS04; Match level="QueryCoverage=82%, HitCoverage=13%, E-value=3e-14, Identity=44%"; Hit description =Putative uncharacterized protein
  Pfam annotation: Domain name=Transposase_23; Domain location=20-91; Score=0.9; E_value=0.00094; Accession=PF03017.5; Description =TNP1ENSPM transposase
  Subcellular localization annotation: CTP_CleavageSite=65; ConfidenceScore=5.03e-01
SKPPQSRREALHASRVSASIKVSTDIFLKSTRYPNRKVALGRVLSQDPKTKVGDVALGKEFWMVRVSLVSVRDEPLIRPYNNFKVLGQVGNNPIAWPSSCIEKVN

SEQ ID NO: 52894 - protein, 134 aa, Zea mays
  Coding DNA Sequence Number=SeqID_9519
MEDLSVQDDLTYAEYPIKILDTLTWVTRNKAFLWDHGGARSLPQPPIRLTVHRCSTNFSPSLLIRHGSCHAVTGDLRALISGMGYSIAFALSCTLRISNRQWGLSSVAVGALLTGKLCRGGQWRRRVLRIRLEA

SEQ ID NO: 52895 - protein, 206 aa, Zea mays
  Coding DNA Sequence Number=SeqID_9520
MRTRLKKKRMKIKTMSHLKRKTLIKGEMKMIEIGKMIKRYGIKDRHTQEPTKQFKEITPSTPYSMTFTRGIEDALRDLDWVVAMQEELNNFTRNEVPVTEPPKVLGPPTVVLVLRTLDNPVDAHNHSTSSVGGKHPPSTNFTVGALPWVPHLNRNNKTLLFPHLQQHGFENPEYRVYFCKSYPTKEKDSQGYAGLRESRLSKVTCI

SEQ ID NO: 52896 - protein, 135 aa, Zea mays
  Coding DNA Sequence Number=SeqID_9521
MAIALFISPLTGTVRGARYNGSDHTWASELDGVARWDDLVAGLRLMSYGAKGVPARFISVGPTTAAKGGVFAFAPTGGTTSMPSRTRAHDGAGTSRGREDTPNPPPVPPTSAEAIAALVNATADNTRFLHEMAGN

SEQ ID NO: 52897 - protein, 59 aa, Zea mays
  Coding DNA Sequence Number=SeqID_9522
MEPPGRWMESPLLCPSRMKEKWWGETQVHDSNSGDPKPGTRLRAHDKPTQVISGKDLHS

SEQ ID NO: 52898 - protein, 166 aa, Zea mays
  Coding DNA Sequence Number=SeqID_9523
  Subcellular localization annotation: CTP_CleavageSite=15; ConfidenceScore=5.40e-01
MVSSNGYINGYIAFNASSDVRQRQSQTVRSCTPDGKGVSLFPFHTANPCRSIGGGAVRPALHERPPTAAQPRGTHPQSAFASCGNESGALSGADGAWQGGLDPCQGRTVCSAARSDAQSPASGPPNPGPCSAATSRCCGGRSPSLGLGQAPVTGRDGGTTPSGVVL

SEQ ID NO: 52899 - protein, 265 aa, Zea mays
  Coding DNA Sequence Number=SeqID_9524
  Subcellular localization annotation: CTP_CleavageSite=45; ConfidenceScore=5.38e-01
MSSRSLMHRVFPPSKPPGGGCPPSFCPIVGGTQLRGSWYLSAIVRLQGFSSLSPVAPLRWWSPQDGDLQAPGWGEAKPGCDLGPTLSFKDVHHPRWGGCRAEPALYLPRGFVGHPLPRHSRERALTDPAGGPDFDNAGLVDGKRRHLQRVGFVGLAPGGPFCRRAAAAPCRCPTRPGGFEWGSAGGPMAPAVGAEAEAAREVPVTDGITATIRASGLRFFVLVLAPRASESLGSVGLAVRGSSSLVKETPRPLFDEPRPGVAISV

SEQ ID NO: 52900 - protein, 323 aa, Zea mays
  Coding DNA Sequence Number=SeqID_9525
  Subcellular localization annotation: CTP_CleavageSite=72; ConfidenceScore=5.05e-01
MAEPIPRLEATQRATQQRQPDAAANAAKSGPAVMTVAGAWEQRSRRQPSSRPIRGQQESPLSRREDNAPEIRSSNGSRTRNGCPANYSPRRINSAAGRAALLAGAAGDASPSPDWERRTPRKGSFPVKEPGSEPPPPTDQRFEGWPSEGFNSRLRSRGPYTHYWSEVRRPAPRRAPRPPQATRAPRPLLIRGSKAGPRRVHSRLRRRARDDQGYVRYITKARAALPSSPETPCSVPIEGNMALSPLLLAERRRRGVCKKAESIPDRPLALCGGSGAALANPAPAEPLTASTYQPENLGPDRAPGLRPVRMREPPDQPKHYARH

SEQ ID NO: 52901 - protein, 273 aa, Zea mays
  Coding DNA Sequence Number=SeqID_9526
MTSHGSSDDGNALTHTDGLAREGFPCILWEVLQGAGYLTPPQYAVQQFEKHRVPRCRVRMTLEPHPLQPGWRSLDSESLGYRAEDTIETIALHGLTTFCGFHPLELATHPMGLFPAEKEDDPMWRDRVEHAKDIWALYPGHTAHLTVRCMNALYRLQVMRGEAMSHLMALLEATKITLDNREELVLSGEVHELEELVGTRENTIEILEDQLLNTQQQLAEANEHLDMHHQEIHGEEADEDVDIEGGDESASSVDTAGSGRPPSPESSVASFAH

SEQ ID NO: 52902 - protein, 211 aa, Zea mays
  Coding DNA Sequence Number=SeqID_9527
  Subcellular localization annotation: CTP_CleavageSite=36; ConfidenceScore=5.39e-01
MNAVVTSQLLVSLYSAAGKKAKRRNCYTRRAVTCTRCAVDRKDQTVTLQGGTDTRSEVGSFLRNELREGVFWTFGFPKLKRLFSRVKLVTKNDLAPRKGLLLGSCFGAPKVSHEEAASAEVVSKRWPKGVSSLGTHTCEIALGARRSESAAAQPLCHHRPASRTIPNPVLPSEKLVHTSVRLPEQGIGVPFAGEASPRSPEFSPPPEHVDR

SEQ ID NO: 52903 - protein, 139 aa, Zea mays
  Coding DNA Sequence Number=SeqID_9528
MVTSSLMVGESEPGCGLCPSLSLKDFHHQGWRGDVPGSRTRAASEPLPAPASATAAGRGFSADEPAGGIRGPTSNSTAFCRSLPHEFGHGRGPPSSSIRPEVIAAAVRPPGQKSSSSPLLGRATASRSSVFCYSAAPPH

SEQ ID NO: 52904 - protein, 156 aa, Zea mays
  Coding DNA Sequence Number=SeqID_9529
  Subcellular localization annotation: CTP_CleavageSite=51; ConfidenceScore=5.36e-01
MVAFQGGHPPFKGGSPYLHPQPSRAESSPTHSKVLPYGAGAGSTRHASRLRAEEAKPPRAGPGKRNTPKRILPREGTRLRAPLLIRGSKAGPPEGFDSRLRSRGPYTHYWSEVRRPAPRKGSTAASGYSGSAPITDQGFEGWPPKGSQPPQTPSEG

SEQ ID NO: 52905 - protein, 176 aa, Zea mays
  Coding DNA Sequence Number=SeqID_9530
MPAACNCTKGAHPLDFDASSMEAQAHTSCNRRAGYYVRETAPPLVPVPCLLDCGTGAATRGDPAHGPTVPTEHIGHGAGGTFGRRSRRRFTSAIMTASKKGPGKGILRKGSFSAKEAGPKPPLLIRGSKVGPSEGFNSRLRALGLRAHYWSEVRGLAPRKGSTAASGHSGSTPTTG

SEQ ID NO: 52906 - protein, 198 aa, Zea mays
  Coding DNA Sequence Number=SeqID_9531
MNSGGYALDGNSSVNLASHGHCAGARNTRRPRRARYNGPDHTWASELDEAALWDDVVAGLRLVPNRRRVSLPVLSLSDQRLQRRLRAKGGVFAFAPTIALDYVHTSKNLAAQFTKGLSRSVIDSASNYRIDEANLHQKQLANPKGKTMELRLCISIAKVRTEADNFDAEGIRVRSKEEEDLEDLFSTKGERGKTTLPL

SEQ ID NO: 52907 - protein, 165 aa, Zea mays
  Coding DNA Sequence Number=SeqID_9532
MDSATPAAERDPPAGGGSSWQGGGSASGRGELMAALEIRRQEGGGAPGGVVELLAPWSVMGANGAPGGEVEGGLLRSRTFASIAERRWASLANFIAPTHARTSDRHTLTVRLVRQDPSPCVRVVDPAQRVPNSSEGGMIEKLRDLDKLGQGFTSVDPLEEIDIED

SEQ ID NO: 52908 - protein, 77 aa, Zea mays
  Coding DNA Sequence Number=SeqID_9533
  Subcellular localization annotation: CTP_CleavageSite=16; ConfidenceScore=5.27e-01
MGGKSLSLPAPVFAPSAGTATTRKEQAAFKSLPQPAYMSSPQERSKWELVWACWFTGSLGDALRMILLEEAVWTGNE

SEQ ID NO: 52909 - protein, 78 aa, Zea mays
  Coding DNA Sequence Number=SeqID_9534
MVHRFGRCEEAGTGGPAMREVAALLHLDMQQMSSSSDLEQQTGEAHGSGSGDSAPNGRTMRQGRGRDLRDARVDPVAR

SEQ ID NO: 52910 - protein, 201 aa, Zea mays
  Coding DNA Sequence Number=SeqID_9535
MRKVMKKIFVGTSKMILKDSIDEYYHHTEEEAKDYEPCTTVFNTRITKHCDLRGEGVGNGVACDYDRGDLFGVWFALSEMGVEGAGGGGFYRRVALMVVLGCGVAVMEQVTRGSRALAKVEKNFTTQCMQRTGHTNSDLAESSSATPAARPAIDPAIASILQSLTQQQAHLASERTRLSERMLSMFQTIQDRQDSLQQQLL

SEQ ID NO: 52911 - protein, 524 aa, Zea mays
  Coding DNA Sequence Number=SeqID_9536
  Homolog annotation: Hit_ID=Q6JAD6; Match level="QueryCoverage=52%, HitCoverage=38%, E-value=1e-130, Identity=83%"; Hit description =Putative uncharacterized protein
  Subcellular localization annotation: CTP_CleavageSite=12; ConfidenceScore=5.10e-01
QCAPDTALCNVRCTGSRALKFPFLCALSGGSPDSYCALSVTLIARVPYPVLPGLSPLVSGCRARRMCRRQGEAMMRILVAPSGRSRARQYTWSSRKAARSGVWTEQPVQQQQQQPLRRPSLEISHRLRPIRLHTVFVVSPLGLAPPLTPLLPLHHPLCLLPSPLLRHPPPQPYPLPPLHQLPLLLLPLPLQLLLSLHLDSGSAMRLRYDHLLRIPDFLTFSVLQRHGTRIQESFFRAQMSAHIALRVHRLLDLPAFLLTAGADSKVHLTYLPGLLTLLTTSGRYVEEWVRVFYATVWIDPDHHWMRFRFEREDVTITASLIRQLFGFPESSTRLHSLCYGTSDPPRRPHGGVAPGTAHVTALFRPPFSDGSRRSPADFTTAAKYLFELIRRTLLPRMGYREATTHIQLWLLGALVSHSEFDVVDFLICEIEDTVLDGIRARRQFPYAHYLCHIFAQLIRPPQFQGTLEASRLVFGSYRPAPEAPVPASAPVFDSQAEDAALRQFEAQDAAVDDDEASQSSGTQM

SEQ ID NO: 52912 - protein, 146 aa, Zea mays
  Coding DNA Sequence Number=SeqID_9537
MAGARISRDPLWHPGHVRALIGSRTGLTSPSCLPTLATATVVEIESGAKQRVGEIAPRGRRRWNPYLAHAASLVCFLSASLRHWEDARAPGKEKVAVGCGKLLTGVRGLPPSRLSVLAGPSPLHTEWRGVDSRLIKSGPFTGDPTT

SEQ ID NO: 52913 - protein, 351 aa, Zea mays
  Coding DNA Sequence Number=SeqID_9538
  Subcellular localization annotation: CTP_CleavageSite=51; ConfidenceScore=5.03e-01
MWNRRGKKPVVETRDDPAPAATPSSKKRKLGTAMGGLGVSDGFSRELMRTCAAPGGRMSSPELRESSARMLRVTGGCWPRNVPIPCAAGEDFFTSRMAEEAAGAAKATATVGGKPPLAAKSGVPVSSKMPEATAGAGGSKSTKAVPPSSRVPEVAKAARALPSAGKRVADFATDISVEDYLGVPKAKGGALSAGGEVLALAAVRDEAGAASRRLKEVTEALSQVADFANRTASGALTAVVSAEVERLRTQHADAVREKSAADSKCRKLADKVAALEGEKADLRRQLAGERRETNEALVKAQAAQAEANLARAEGNLARERAEQLQERLIALESRVERAEAATRAEAERTRK

SEQ ID NO: 52914 - protein, 106 aa, Zea mays
  Coding DNA Sequence Number=SeqID_9539
MESYIMLMHQVQAGSTGVQDKFNRVQGGSTGVHDKFNRGPGQVQLGSRLSYISGLCLKAHVKTHQNLTPILSSCTSTLVSYQKFKGQFTQLDRWTIGASIEKLEKG

SEQ ID NO: 52915 - protein, 98 aa, Zea mays
  Coding DNA Sequence Number=SeqID_9540
  Gene Ontology: Mol. function=protein serine/threonine kinase activity; Cellular component=plasma membrane; Biological process =protein amino acid phosphorylation
  Homolog annotation: Hit_ID=A2Y5T8; Match level="QueryCoverage=90%, HitCoverage=9%, E-value=9e-28, Identity=69%"; Hit description =Putative uncharacterized protein
MRGPFACSKWCPTGSQFGFSWLAPVPDVEVTLPAHVSTVVKGTPSYLDQEYFLTHKFTDKSDVYSLGVMFLEMLTGMKPIEHGTTHSERDVVHEIRWK

SEQ ID NO: 52916 - protein, 100 aa, Zea mays
  Coding DNA Sequence Number=SeqID_9541
  Subcellular localization annotation: CTP_CleavageSite=59; ConfidenceScore=5.38e-01
MPKGFGPKTSRWATWCFDYDKTPEGGTSSRLPRKGRSSSPSLTIKEGSALPRQSPTLPRGLEGANPLRVKIFLGKSLSSRISFVLFDYFGSGIMKTMEYT

SEQ ID NO: 52917 - protein, 266 aa, Zea mays
  Coding DNA Sequence Number=SeqID_9542
  Homolog annotation: Hit_ID=Q6QP51; Match level="QueryCoverage=45%, HitCoverage=62%, E-value=2e-08, Identity=35%"; Hit description =Putative growth-regulating factor 1
MQVACNRTKGAHPFDFDASSMEAQAHTSCGRKQQSSHQQAHAPSWDSERTLSHGVKTTRPCSVPRTARARTTAAPRTTRPVALTLRQDRRHLWQAKQATLHLRHNDRVKKGIGKGDTPKGILLREGSGPRAPLLIRGSKVGPSEGFNSRLRVLGLRAHYWSEVRRLAPRKGSTVASGHSGSAPTTDQEFVGWPPKGSTAASEHAERGMTLASASEDGLRLARPRARTQSRPRKTDSASPDPRGRTQPRSRKTNSTSTSEEPPPRLT

SEQ ID NO: 52918 - protein, 158 aa, Zea mays
  Coding DNA Sequence Number=SeqID_9543
  Subcellular localization annotation: CTP_CleavageSite=55; ConfidenceScore=5.03e-01
MATARGIDPFLKVALPTRILKRHGQSLHQRAPGSSPYDTGAGSRTSCKLTRNGISQTTAREAGERADRHAGVMQPHHGCAPFRLHRIRWVSVKALVHTSCNRRASYYVQETTPPLALIPRLLDYGTSTATRGNPAHGPTVPIEHNDHGPVSRGRRRDG

SEQ ID NO: 52919 - protein, 184 aa, Zea mays
  Coding DNA Sequence Number=SeqID_9544
  Subcellular localization annotation: CTP_CleavageSite=51; ConfidenceScore=5.38e-01
MAGNHHQYKLQRLMGTIQVKASSTQGAQYRLARAQPRAGTVAPDEVTSRPSASSGSGRTLGTPEAQLEQASSRSNLGQIASPTDRKQLRSDYCATHQDEADNSQVQPQAQQEALPRPTLGLGLNLGLGRRSPPRPTPGLGLNLGLGRWSPPRPTSGLGLGRSLRLARPWARTDRAMGDTSLPYP

SEQ ID NO: 52920 - protein, 144 aa, Zea mays
  Coding DNA Sequence Number=SeqID_9545
MSDDLVVPVHFEVGQEFCFRLLDHPLLVLLKLELLVSRQVCVVPSGVAKKYVDAFPERQTLNKNRGGALCTGADGPRPGARRGGTLCAGADYPRPGAGRSTAWCAARASLSDDRTVRAYAGAAEVAGGGLDLAPGRDPVGEERS

SEQ ID NO: 52921 - protein, 84 aa, Zea mays
  Coding DNA Sequence Number=SeqID_9546
  Subcellular localization annotation: CTP_CleavageSite=45; ConfidenceScore=5.35e-01
MQAAYNRAKWAHFFDSQHAQHGGPGPRVRQPAHRMLRACNCTATCATTAPPRLRNQYRDSRDRERGIPRKGSFPVKEPGSEPPY

SEQ ID NO: 52922 - protein, 110 aa, Zea mays
  Coding DNA Sequence Number=SeqID_9547
MRIKLKIMKKKIKKMSHLKRRTMIKGEMTMIKTRKMVKKYRVKDHHTQEFTKRFKEITPSTPFLVIFIRGMEDALRDSDWVLAMQEELNNFTRNEEPSGYSATSKMSMVW

SEQ ID NO: 52923 - protein, 362 aa, Zea mays
  Coding DNA Sequence Number=SeqID_9548
MLASLPTLDESGVTVRQISGRDPHRGIRIPGASAGGLQPAGVAPSATTGASSDSTVAPRPLDKGKGAASSSSARGGAGESEEERWRWLRRANGSFVLDPPSGTEEVGSQKRQKVVGRAEETGSQAQGVNNNNNSSSSSPLPRPLEGLPFPLLLRSCLPRLRLLPPKQRHRAPGSSWGSGSSGANAKRCRSGRGGPHCSDGCHSLNDGDDVDSISPPTLEETEVIFGQRLRSGAKPEAAPLEERTKAASRQFAFERSELEQGRKDYRKDLQKVFARELKVARKEKKVAKKEEKDLAFREEMFERREKLLADHELEAEEKERALEERVRQFRVAQAAQAAPGAQAVEVMKKTLEDLQAEQRARV

SEQ ID NO: 52924 - protein, 47 aa, Zea mays
  Coding DNA Sequence Number=SeqID_9549
MGSRHNACSAEAECRDDDDDGYDYGNGKEEGVEVDLQEFQDVDEFED

SEQ ID NO: 52925 - protein, 665 aa, Zea mays
  Coding DNA Sequence Number=SeqID_9550
MVSPVSCKRVIRVDVRAPFVGGRLGAQRHAQKYLREIEKEEKGKGYEIERRGVPFLTRLLRRRRSVVHFSCQRRRLSHRGVNATGRVVGGVAVARARAVRGTGHGRTVFTPWEEALLLSLDGTLALLGRALGRLESRHRPRNRRGVTVAQVAVRLLACSNWRAGCATRGPGPPSRRVRSRRSASTWRDCMPPAWLPAPSARWSGRKWGIACNRWAVVCTAHGGLASSASEPGESPLKGGRPLSEGNHVFFLPYASCLSIFQAPGWGVSAVFPPPRWRNATPWELVPFSHRSASRIFITQPGRIPPPAVTQDGDLQFGGGGKRAKLRPLPLPWPQGFSSSRPRWRMRRVGGLSPHGSAALFFPRRLGRKASSSLTGTSSSHAGIGRPPLLGWGAGSPGSPSPGLNGWFSSSAGESPPVVTPASKLLPKPLRRLGRGVVVVESLGSIDLVVRGSSSLVKGTPWPLFDEPRPGPGCPSAGLTPESISRGLGSGWRPWKMLGRGPRGNRPSRLLGPDSRRSPRTASPSEAGSDLAEGVVDAEGATSPFSVKTRACRIRLSCSVCLLRPPRPENTPSLRCKAASPFLLFRASGLSVGNRDVCVGESCFSRKVMSEKVMSEDPLFEVVKKHERNSAKKISFFEENFDAEGVSPLLALEGGSGYAEPRPTLP

SEQ ID NO: 52926 - protein, 1007 aa, Zea mays
  Coding DNA Sequence Number=SeqID_9551
  Gene Ontology: Mol. function=aminoacyl-tRNA ligase activity; Cellular component=mitochondrion; Biological process=embryonic development ending in seed dormancy
  Homolog annotation: Hit_ID=A2ZNN8; Match level="QueryCoverage=92%, HitCoverage=69%, E-value=0.0, Identity=72%"; Hit description =Putative uncharacterized protein
  Pfam annotation: Domain name=Anticodon_1; Domain location=860-969; Score=7.6; E_value=5.6e-06; Accession=PF08264.4; Description =Anticodon-binding domain
  Pfam annotation: Domain name=tRNA-synt_1; Domain location=75-780; Score=-194.2; E_value=9e-11; Accession=PF00133.13; Description=tRNA synthetases class I (I, L, M and V)
  Pfam annotation: Domain name=tRNA-synt_1g; Domain location=108-791; Score=-170.5; E_value=6.6e-09; Accession=PF09334.2; Description=tRNA synthetases class I (M)
  Pfam module annotation: Pfam domain module=Anticodon_1::tRNA-synt _1::tRNA-synt_1g; Domain location=860-969::75-780::108-791
  Subcellular localization annotation: CTP_CleavageSite=47; ConfidenceScore=5.27e-01
MALALQWPLQFPLQLQARPPAVTAGHHRRRHRVLAVCRSPPLPARCCASAAAAADTGKAQTAARRAYPFDEIEPRWQRHWEEHRTFRTLDIGEGLDTSKPKCYILDMFPYPSGAGLHVGHPLGYTATDILSRFKRMKGFNVLHPMGWDAFGLPAEQYAIQTGTHPKITTERNIERFRTQLKSLGFSYDWDREISTTEPGYYKWTQWIFLQLLKRGLAYQGSVFMFLVLHFWFSMIFRLALISYNQAEVPVNWCPALGTVLANEEVVDGVSERGGYPVIRKPMRQWMLRITSYADRLLEDLNDLDWPESIKEMQRNWIGRSKGAELIFSAVDQEGHDLGATLLVYTTRPDTIFGATYLVVAPEHVLLSSLTSEEQRAHKWQVEEYRELSARKSELERTELQKEKTGVFSGSYAKNPATGEIIPIWVADYVLGSYGTGAIMAVPAHDSRDHEFAVKYELPIIKVVSPPNGNCDPVEAYEDDGIMINSSSSSSGLNINGMLSQDAAKKVTEWIENNGFGKKKVNYKLRDWLFARQRYWGEPFPVSYLDDTNEMVPLTEDDLPLTLPELDDFTPTEEFEYGCGEWVRTIDPSSGKPARRETSTMPQWAGSCWYYLRFMDPKNCSILVDKAKERYWGPVDIYVGGAEHSVLHLLYARFWHKVLYDMGVVSTKEPFKCLINQGLILGEIEYTAYRDNEGRWVSADSDSSLIDCYQEKVAPDKVTKVGDHYVLKDNPNIRLNARAYKMSKSRGNVINPDDVVSEYGADSLRLYEMFMGPLRDSKTWSTGGIEGVHRFLGRTWRLIVGPQLSDGSYNDGTMTTEDEPTLDQLRVLHRCIARYALAITRVCYNFQVHNKRKAGPSYNIQVTEEIQETRFNTAISAMMEFVNAAYKWETQPKSVIESFVLLLSPFAPHLAEELWFRLGHPQSLAYEQFPEAKSEYLEESKLVLPVQINGKTRGTILVDKACSEDDVFQIAASDEKLSKYLDGKGIRKKIYVPGRILNVILDQQKSRT

SEQ ID NO: 52927 - protein, 124 aa, Zea mays
  Coding DNA Sequence Number=SeqID_9552
MARGRSDLVRIFFSNGCEFCLSSHLRLSTESGREGLRIRHSLMYTCTMYVHLLSYKIVGLGPSQGPFRFSQSTTRRRRRPSRTSLRRLYLRFVEPVNCGLRTRGKDLSPDFAILDDEIHNHNHV

SEQ ID NO: 52928 - protein, 211 aa, Zea mays
  Coding DNA Sequence Number=SeqID_9553
MADVVWSEASDALTLRFDLEDDALDLRLVAPNTFIALLPNVELADRMLSEGQSFYAPPLWMHVRRWPRQFMASGGREMPILLDIELRGLPVHLWDIHSTGQLLVGHCLVHELLPIPEDVFDLSSFWLRVWCDDPDNLPSSLDLHVEEPPVHVDVGPTSPHTVTYPVSILVPRPRSSPEVLPPPPPSPPPSDSQDEDCGHFFGSQQRRHFNS

SEQ ID NO: 52929 - protein, 247 aa, Zea mays
  Coding DNA Sequence Number=SeqID_9554
  Subcellular localization annotation: CTP_CleavageSite=18; ConfidenceScore=5.03e-01
MHCLMSGAPVWAALTSARAARAFNAAQGAVGAAPAPPVASVPEPAAPVSPPHLALEEPVIAPFIPGAPAAVTENMSASVMVDFPLAVSQISPASTPLGLPGFFPAPPQPWYCMPLKVYFRRGQRTQQHQLDTLADPRSVPNSISDIGLVAEPLRTPDLATLVQPSSSFSTMVIKVADHILSAPLPVRPGNNNSSAAPPRRIRHIAGIGVEFQFAFGDGQSRFRKKPLPPSHVQALAALFGWTAPELD

SEQ ID NO: 52930 - protein, 431 aa, Zea mays
  Coding DNA Sequence Number=SeqID_9555
  Gene Ontology: Mol. function=transferase activity
  Homolog annotation: Hit_ID=A2ZNN4; Match level="QueryCoverage=94%, HitCoverage=58%, E-value=1e-136, Identity=63%"; Hit description =Putative uncharacterized protein
  Pfam annotation: Domain name=DUF563; Domain location=38-289; Score =305.3; E_value=1.2e-88; Accession=PF04577.5; Description=Protein of unknown function (DUF563)
MADEGSEAEALEKDGGKASSPSGPDSETTPAREREWKPLCDVTSNRRIDWCELDGDVRVVGANASVTLVAPPGADNRTFRAESWRIKPYPRKADPNAMRFVRVLTVRSVASGSGEAACTDGGDDDVPALVFSDRGYTGNYFHAFTDVILPLFLTARRYAGEVRLLVADLQPWWVGKFLPVFRSISKYELVDLDRDPRVRCFRHVQVGLTSHADFSIDPRRAPNGYSMLDFTRFMRAAYGLPRGDVVAAAPARRPRLLVVARARTRRFVNTEEIVRGAEAVGFEAVVSEGTHEVAPFAELANGCDAIMGVHGAGLTNMVFLPTGGVVIQVVPLGGLEFVAGYFRGPSVDMGLRYLEYRIEPEESTLVDQYPRDHPIFTDPNGIKSKGWESLKDAYLDKQDVRLDMERFRPTLQEAIAHLRKAKAKANGDGNN

SEQ ID NO: 52931 - protein, 98 aa, Zea mays
  Coding DNA Sequence Number=SeqID_9556
MGSTMPSERKTDYAELALAEAKTKAKATPSRAMQEWKKRQNSEAHFIQAPVDATTGEHLKLPQPAAQFEHAAINVDATAKNGTPLGKVDFDFDTDDLS

SEQ ID NO: 52932 - protein, 476 aa, Zea mays
  Coding DNA Sequence Number=SeqID_9557
  Gene Ontology: Mol. function=transferase activity
  Homolog annotation: Hit_ID=A7PH06; Match level="QueryCoverage=92%, HitCoverage=89%, E-value=5e-78, Identity=38%"; Hit description =Chromosome chr17 scaffold_16, whole genome shotgun sequence
  Pfam annotation: Domain name=DUF563; Domain location=76-337; Score =297.0; E_value=3.7e-86; Accession=PF04577.5; Description=Protein of unknown function (DUF563)
MACEKKPVSSFTVRLGLALLAGCVLVAMISLAAMFRHDAVPLQTLSLLFSVGPVSSVMWGEERLGSHRFGRNRVPVLCDFSSSRSDVCELRGDVRVLPNATIVLHHPLARRQSWRMKPHGRKNDRHALARVTEVTVTVATASASPHHTSGAAAAAAPRCTANHTAPAVVFSVGGYAGNMFHDLTDVLVPLFITARRFGGDVHLLVGDAQPWWLDKFRPLLGGLSRHAVVDMSRGSSSGGVLCYPHVILGLEFHKEMSVDAARTAGGGEYSMADFTLLARRSYGLPRDKAIRVHGRGGGGVRPRLLLISRKSTRAFTNAGSIARAAASLGYEVVVGEPARHADLASFARVVNSCDVLVGVHGAGLANLVFLPAGAVVVQVVPLGGLDAMAADDFGAPARDAGLRYVHYGIAEAESTLATRYPRDHRVLRDPAAVRSEGWMALRAAYLVGQNVTIDVRRFSGALRRAMELLRQTHDHE

SEQ ID NO: 52933 - protein, 219 aa, Zea mays
  Coding DNA Sequence Number=SeqID_9558
MEHEGGKRGDGRKGETRGLRVCPTPRLGALAVGGYNPTGNAPSASAAAAQLPRQPSAALGSLPRARTRLHPLGPPRPSQIPARARARRPAQLAPAQLAARASPQLAQAAAQAARSAAHSAPCCARSRGGRPPPPPSSAPTSRAYRAWVVPRRSLFIFQKPEPSVSVAQFLGHQRFSSSRLCSLRPCTVGVSPSLAALAAQRISPSHRRRALVPLRSSAE

SEQ ID NO: 52934 - protein, 323 aa, Zea mays
  Coding DNA Sequence Number=SeqID_9559
  Homolog annotation: Hit_ID=Q6J9V9; Match level="QueryCoverage=36%, HitCoverage=41%, E-value=3e-52, Identity=87%"; Hit description =Putative uncharacterized protein
MEVVEAEGMRASDTSGRRSGHRFTSVMMTASKKGPGKGIFRKRILLSEGNGPRALLLIKGSKVAPSGVRQPPQSTRAPSPLLIGGSKAGPSEGFDSRPRARRVRDDPGYVCYMDEARATLSRYPRTFPRPAGTICNGIPPEGAAKSDLGRHRKLRLARPQGSGSGLAPEDDELRLARPQGSDSGSAPEDDELRLARPQGSDSGSALEDDELRLARPQGSDSASALEDDELRLAQPQGSDSASAPKDDGLRLARPPGLELDLDLGGQTRPQPRRSHRLTRPRARTNHVTGGAIITLPLASSGYREQDRRPIWLAPRSSDGHDIT

SEQ ID NO: 52935 - protein, 30 aa, Zea mays
  Coding DNA Sequence Number=SeqID_9560
  Homolog annotation: Hit_ID=Q8H6I5; Match level="QueryCoverage=100%, HitCoverage=3%, E-value=4e-07, Identity=83%"; Hit description =Putative RIRE2 orf3
MADKVTVVPPRDPWPFSTVAVEDLEALVAD

SEQ ID NO: 52936 - protein, 205 aa, Zea mays
  Coding DNA Sequence Number=SeqID_9561
MATPKRGKKRLVLDVDVELDSEAEVASAFSRLSVSIVAKPTGDHSSTGKDLNCTATSADPFYRQAVLGTSFSVGKYYEQFPSSIPTTLYVVSQITRFEMVRSDLAQAIAKMHVVGNELKDLARNKIMDSPDTAKEVSVNFAMWRVYELAQSLLEEAQHLEDLEAGPSLPLSECFNNQFTEDEDMGDGEWALDDVNSEEIVDRQMK

SEQ ID NO: 52937 - protein, 50 aa, Zea mays
  Coding DNA Sequence Number=SeqID_9562
MASALSWRLGRWRVLEEHQKDATAGIYTEAGYNSKPSIRPNVVTASRRRY

SEQ ID NO: 52938 - protein, 101 aa, Zea mays
  Coding DNA Sequence Number=SeqID_9563
  Subcellular localization annotation: CTP_CleavageSite=70; ConfidenceScore=5.27e-01
MPKLPCPQLRLCSILCFPCASSHCDFDSSPKGPSPKIAIWTKVLSRRFFSFSLKSTFSTFPKMSQDNKVVAETKLSLSEEKNLGFLESIAKTNTEKITREI

SEQ ID NO: 52939 - protein, 653 aa, Zea mays
  Coding DNA Sequence Number=SeqID_9564
MDKDRQGAAQKRQAVVMLHEARPKRQRGAAKAAAPGGGKPPLAAKAAVPASSKAPEAAAGAGGSKSAKAAPAPSRVPEAAKAARGLPSPGKRVADFATDISVDDYLGGSGEGQLVIVLPAVVTTAAAVVPKAKGGALSAGGEMPALAAVRDEAGAVSRRLKEMKEALSQAADFADRAASGALTAVVSAEVERLRTQHADAVREKSAADSKCRKLADKVAALEGEKTDLRRQLAEERREANEAIAKAQAALAEANLARVEGSLARERAEQLEERLSALQSRVERAEAATRSEAERMRKQLMDSYHELGARTADFEVPDREPGLCCLEWVQEELQALPTIVEGFMSYASLVTCEGAMNVLSREGCQHYGVFDQADEDFDRDIYKVEDPIVKESAGAIYDRMWGPHGREVVRERAKTARGQAARGERVDDFGALNSALPDPESNPVEAVSEATLVPPPGNRPKALLMPPQPLRPAEACPRRSPKALLMPPQPLRPAEARPRRPPKFSDFGDSGSSVEWTEESSEEDLDYFAALDVAAAEASPHAADAEDVPGPSTGRRRRRAVAKRRLCALAHSAMLARALHTWSGVIVMLDWCACSRSLRGQFGVVVFAFVTLRPAVPSGNCCASPAAPLGDFCADSLRGRLRFFALVVLVRLHP

SEQ ID NO: 52940 - protein, 53 aa, Zea mays
  Coding DNA Sequence Number=SeqID_9565
MVGTSAVTARGQPGSVEHCTLQDMVDGVTWPTTLPQGWTVEWDAASTGEEQEE

SEQ ID NO: 52941 - protein, 52 aa, Zea mays
  Coding DNA Sequence Number=SeqID_9566
MEEEATWETEDYLNKNYSEFLPKSVEQNGKLGHITGKLCFNGENNPSDENLK

SEQ ID NO: 52942 - protein, 145 aa, Zea mays
  Coding DNA Sequence Number=SeqID_9567
MEPRHGSRERVRDSRRIAELSAEVDSLQREIVERDKAIGWAINSRSIAWDCETTARARLEELSVAQENLQAYNNTLHEEVHVLYDQLHLNVPPKVVAMGAGASGAAGGGPYGELDLFGAPPSMNIADDHSSEASSGAEGANDVDN

SEQ ID NO: 52943 - protein, 218 aa, Zea mays
  Coding DNA Sequence Number=SeqID_9568
  Homolog annotation: Hit_ID=A2XFR6; Match level="QueryCoverage=69%, HitCoverage=43%, E-value=1e-21, Identity=36%"; Hit description =Putative uncharacterized protein
MFETGHFPNLLQDVLHALGTYIRPLYETRQVYEPPRACYYITHIHVKVMDAGDRGFRTLSVHESLTPLSTYVASVSDAVRRTLWSLSHTYQQQLHNTKYMHLPLCIRGENQASIVPGGANEDRLNTLVVVVAGLNTDLDSATLDLYRVDLEMEDAHARITALEAQLAGRNPPEVQVPAMALCAPRMKRPDPLGFKCDTITSPMRLVTTFLTSNSTEFE

SEQ ID NO: 52944 - protein, 611 aa, Zea mays
  Coding DNA Sequence Number=SeqID_9569
  Gene Ontology: Mol. function=transferase activity; Cellular component= endoplasmic reticulum membrane; Biological process=GPI anchor biosynthetic process
  Homolog annotation: Hit_ID=A2Z5D6; Match level="QueryCoverage=47%, HitCoverage=41%, E-value=1e-135, Identity=83%"; Hit description =Putative uncharacterized protein
  Pfam annotation: Domain name=Phosphodiest; Domain location=312-610; Score=-89.9; E_value=0.016; Accession=PF01663.13; Description=Type I phosphodiesterase  nucleotide pyrophosphatase
MKSDFNPTKQSIFADDEDEDDAEAGPFAQRRLPPTASVRPARTASPAAGALHRLTLARERIKSSPTPTGAAVSAPKPSNFQSHAREYTPERLLELQKNAHPLLGSLLRAQPRTPVTEPRSQKLSSTPASSTPATTTTAATETVVVLKAPDYISLDAGDVLSSRNAAGESSDEDDNEITDQIAMKVEDDRDDDDADEGERKWEEEQFRKGLGRRMDDASTQRDIKPRDPMVSGARSTPEVMSPPASHRRRSRFLSWPLLFIAILAIHSLAVYLFTRGFLLTRTELDLHSSRDDFSPQGNVSPGCDSWPPAAVDRLVIVVLDALRFDFVAPSTFFAGGDSERKNRFTKLAADEKTSSRIFKALADPPTTSLQRLKALTTGGLPTFIDVGNSFGAPAIVEDNIMHQLAKNGKRVVMMGDDTWIQLYPEHFNKSFPYPSFNVKDLDTVDNGVIEHLLPSLHKNDWDVLIAHFLGVDHAGHIFGVDSTPMIQKLEQYNQILEGVIDTLRSLSKPGGTHENTLLLVMGDHGQTLNDVETGLKVGEDTRRQPLGEDVGELQCVDEAGALEGAVELMEKLTQPGGLCHAVGYNMVLDLHAGVGDDGLPLGGLGDEVGVQ

SEQ ID NO: 52945 - protein, 189 aa, Zea mays
  Coding DNA Sequence Number=SeqID_9570
  Subcellular localization annotation: CTP_CleavageSite=44; ConfidenceScore=5.01e-01
MATDAAARQAAAASAFFNSGIDARAPHLLPTDSHNAALHFSTVVAGLQAAAGIFPSVLGAPVAAGASLQHVAGAVPICIAPAHSELAGDEASLISGVGPRPAVLLAASLRSNSTPGVPPMPFLQQPPSPAARPHPPGSHHPPPLWLHLRDSSFRHGSRPRSRSFSLIPFSGFVASLVTTTVRWSLIPGG

SEQ ID NO: 52946 - protein, 36 aa, Zea mays
  Coding DNA Sequence Number=SeqID_9571
MGSHDPRAKRKSRLMGKGEGVEADLQEFQDFDEFED

SEQ ID NO: 52947 - protein, 349 aa, Zea mays
  Coding DNA Sequence Number=SeqID_9572
PTGGYITMRCAPAAVFYAAEALPSNIKDRIIELGFGCLLDLNIDRLDVRVFGSFLMASVKNDDNGPRLVVGNKSLPITPEVVQIVTGLPRGEKQFPDWTYHEIRTARNTFRKLCDDQNMKDMFARSKCLAAYKKLSSYEVSRWVVERMDNVECPVTRLVGTPRWKFFTSKIMKSICDLDKTPRPGRQVKYDNLEFRNAAETAYAEIYHKGQDLPRPLFFAQPAVVWSSHQRHLKLGLLRTKKPYFTRGPMSSSASVEEPSSSRRQPTSSNLPFGLVSLQSALSEAISCLDHEPSKVAAMAALKDYDIAVSNVCRSINSNQKKTTRAQAQNSKDQKSIQQAYTSLYCTYS

SEQ ID NO: 52948 - protein, 127 aa, Zea mays
  Coding DNA Sequence Number=SeqID_9573
  Gene Ontology: Mol. function=RNA-directed DNA polymerase activity; Biological process=RNA-dependent DNA replication
  Homolog annotation: Hit_ID=Q7XBD9; Match level="QueryCoverage=21%, HitCoverage=1%, E-value=5e-09, Identity=92%"; Hit description =Putative gag-pol
MANPSNLYHLLHHEEGLVNLDDLNNRKGKEVEHSRASTERSTSSSEDTGQHPITFTRADQWLNFDHPGKYPLLVDPADSKPEGDLAIPANEAQAVTSMQPTKETKRINLGFADERKTAIISSSLDDK

SEQ ID NO: 52949 - protein, 327 aa, Zea mays
  Coding DNA Sequence Number=SeqID_9574
MAERYQLPWSCVPPTTRRKDGGYPPSGGLEGGKTRCIGEREDMVAFQEGHPPFKGDSPYLRPQPSWAESSPTRSKVLPYGAGAGSHTSCKPTQSRRSQTAARGACNRPAVTSGSPLLPRPAGERAGSHAGGMQLRQGPGKGDTPKRILPREGTRLRASLLIRGSKAGPSEGFNSRLRARGLHTHYWSEVRRPAPRKGSTAASGYSGSAPTTDQGFEGWPPKESHQREASSPRTLSPGDRVRQITHSSSETPCSTPTEGNMALSPPSLRKGDAGAHHRKLRFARPRARTRAKPRKTANSAPPDPGLGLGLGPGRRRTPLRPTQGSDSG

SEQ ID NO: 52950 - protein, 328 aa, Zea mays
  Coding DNA Sequence Number=SeqID_9575
  Subcellular localization annotation: CTP_CleavageSite=31; ConfidenceScore=5.09e-01
MQPGCTPPPAVTQDVAACLALGPEWIRSRSRCRLLSTPATAAGRGSSADETARATHGPTSNSMAFCPSLPHEFGHGRGPPGSSIRPEVIVEAVRPPEAEVVVVAAAGAGDGAPFVGLLLLRRPPLIEWGCSYPRRGTPRPLFDEPRPGVAVSARTEAELAQKEDLVGRSLAGSSVSGTDVGIDLLRPRAGLMSLGDSWPRPRGDRPSRLLGPDSRRRPWRRWPGLGDDVVLQSGDPWTVSPSEARSDLAEGVVDAEVEKARRIAPAEGLPNVKTCSVCGITYPNPKHQVAHLEVSGPDPSGVVASHGLLALVLGEPYSRSVGKMASAP

SEQ ID NO: 52951 - protein, 207 aa, Zea mays
  Coding DNA Sequence Number=SeqID_9576
  Gene Ontology: Mol. function=actin binding; Cellular component =cytoskeleton
  Homolog annotation: Hit_ID=Q84TX2; Match level="QueryCoverage=61%, HitCoverage=6%, E-value=8e-60, Identity=85%"; Hit description=SCAR -like protein 1
MATASRGHGLMLRLQQLEAEFPAVEKAIISQTEHSNYPHDDGAEWHSNVQLKQNVITQGDMPRFIMDSYEECRGPPQLFTLDKFDVAGAGASLKRYSDPSFFKTEHASNMIEADVLIENKPRRIKLKLNLCNNIPKPKEGRLASIPFLDPTHVGAFDTGLPIVGTYPFVWPLDSISRSINFLSGSLPDDTPSFDNGSPQVDTPSFDN

SEQ ID NO: 52952 - protein, 124 aa, Zea mays
  Coding DNA Sequence Number=SeqID_9577
  Subcellular localization annotation: CTP_CleavageSite=46; ConfidenceScore=5.12e-01
MAPPVDVAGPRPRLGDAKAPPRSRSSPSSVAEVESEPLGRARRRPLAEARAEFESWGRAKRSSSSSGAEPKSEPWVGRSGIRRLLGLSPSPSPGSGGTEFAVFRGLARVRALGRAEQSSPSSGA

SEQ ID NO: 52953 - protein, 154 aa, Zea mays
  Coding DNA Sequence Number=SeqID_9578
  Subcellular localization annotation: CTP_CleavageSite=21; ConfidenceScore=5.65e-01
MATPSRSASGSSSSPGAAYTSGSASPYSFRIWCRIILPARRAEPPLNALTNQRRPPSLTPRAPQGPAIGARVPLRRASGRLGGVRLARGFSAWRWRSEEDEAPPDPECEGNEIFYTASSRAHSFFTSSSQSQRVTGADDRGPRALVPREDILVH

SEQ ID NO: 52954 - protein, 250 aa, Zea mays
  Coding DNA Sequence Number=SeqID_9579
  Homolog annotation: Hit_ID=A2XND2; Match level="QueryCoverage=99%, HitCoverage=99%, E-value=2e-23, Identity=78%"; Hit description =Putative uncharacterized protein
  Pfam annotation: Domain name=DUF567; Domain location=9-242; Score =1.6; E_value=9.5e-05; Accession=PF04525.3; Description=Protein of unknown function (DUF567)
  Subcellular localization annotation: CTP_CleavageSite=83; ConfidenceScore=5.11e-01
MDTEAVPALAVVDARFCAAGAATLAVAKALSMSGSDFAVTDAATGAPVLRVDGVLFSLRRRCVLVDADRRPVLTVQESVRFLRLSLARSICPVGVGGYSSSSRVMTLRCLDGDENAGADAEHAVEGVPGRQHPPAGPHVQRREAVRDPAAGAHQGSPAATTTAPAPSPSATPTPSSPRQVRSRLSLLLPTRSWTDTYCLLVRLALQIDRRFSVVSALLGKNSYSVTVNPGIDYAFVVALVVILDEMHYQR

SEQ ID NO: 52955 - protein, 249 aa, Zea mays
  Coding DNA Sequence Number=SeqID_9580
  Homolog annotation: Hit_ID=A2WLA7; Match level="QueryCoverage=94%, HitCoverage=34%, E-value=4e-62, Identity=54%"; Hit description =Putative uncharacterized protein
MRSRRTGTPIRSRDDKAKPTMQKCYESEAEKYHASETISVPRASSLPSPPYRATGMYGTSRYVTDQSVLLQKSEALHHRGFTRPEDGENMNHVGKGNVDRWLHMLMDNQQEDHAAYHSSDEHDNDEENASDEQRTQSRVDEESCRNGITEYSDEIIEVEDEIVSDQGAERGRNNFGIKDREEKNIWFHRTDSTWGFWSLPSSPSMILGMRKGVERMAVDDDRKYGYEDSVSRSSTKFPRPAACAAAPRR

SEQ ID NO: 52956 - protein, 72 aa, Zea mays
  Coding DNA Sequence Number=SeqID_9581
MEKGVNRAEKEKGVDRAEEWIADLPSAASGRTTGDHYELNDCQTDVYARYGRRPMRKMFVLVAVAETEEMER

SEQ ID NO: 52957 - protein, 129 aa, Zea mays
  Coding DNA Sequence Number=SeqID_9582
  Homolog annotation: Hit_ID=A2XNC9; Match level="QueryCoverage=55%, HitCoverage=9%, E-value=2e-10, Identity=50%"; Hit description =Putative uncharacterized protein
MDPKQQLALRPISTRRAGSSVAGEAAASFRVYYSLRPRAVPFLWESKPGTPKSGGATAAVSPAPAETTAARRQLPPISPPPSYHSSSQLKRGRRCRPRASCHAAVGLVRALLAALGVRRPQRRQAASLV

SEQ ID NO: 52958 - protein, 211 aa, Zea mays
  Coding DNA Sequence Number=SeqID_9583
  Homolog annotation: Hit_ID=A2XNE1; Match level="QueryCoverage=28%, HitCoverage=37%, E-value=1e-12, Identity=63%"; Hit description =Putative uncharacterized protein
MEKNMIAVASEIERLRGELANAEKGATAVNPAAAVGNSGYAAPYGNSASTYTGMYGNPDATDDDASSLLRMRPSMLAEIKLRAYLGVKTVVSALPELISGKEYNTEATYKHLMRIPTPCSFAAGLNLETNSASPEPGLGYLTSASPKPGFIIDIINEKHPTSSETVELTYYPRAFRHIQHCTNYYDMDNLTGLGFASSPYAANPDTPSSPP

SEQ ID NO: 52959 - protein, 151 aa, Zea mays
  Coding DNA Sequence Number=SeqID_9584
MGKSKKGGSSSHHSGDKRKRELTPPLEDFGNSEYSEEEFSSESEGSSAPASPPTSSDDSDDSQGIVAEVWTYIRAIERAGLEGSDESEYSSDEEDSSDSSEEGSGGDGGDGDDDEGDGDGGSSSDKGGDGSGKGGSGDGGGGSKGSNKASG

SEQ ID NO: 52960 - protein, 53 aa, Zea mays
  Coding DNA Sequence Number=SeqID_9585
MAVAKPLPATPHRVPTGYRAGGDKDDGYDYGNGKEEGVEANLQEFQDFDEFED

SEQ ID NO: 52961 - protein, 250 aa, Zea mays
  Coding DNA Sequence Number=SeqID_9586
  Homolog annotation: Hit_ID=Q6J9V9; Match level="QueryCoverage=19%, HitCoverage=25%, E-value=9e-07, Identity=52%"; Hit description =Putative uncharacterized protein
MAERYQLPRSCVPPTTRRKDCGSPPSGGSEGGKTRCIRERGDMVAFQGGHPPFKGDSPYLRPQPSWAESSPTRSKVLPLRRGGWVPHVMQTGPGQKKPNRRARCMQPPSGYKRSSTFAQTSGRSKRRFAFAIMTASKKGPRKGDTPKRILLREGNRPRASLLIRGSKAGPSEGFNSRLRALGFCAHYWSEVQRPAPRKGSTAASGHSGSAPTTDQGVRRLALEGGNDLVTESHQREASSPRTPSKGDRVR

SEQ ID NO: 52962 - protein, 201 aa, Zea mays
  Coding DNA Sequence Number=SeqID_9587
  Homolog annotation: Hit_ID=Q7XBD4; Match level="QueryCoverage=90%, HitCoverage=16%, E-value=2e-09, Identity=31%"; Hit description =Cinful1 polyprotein
  Subcellular localization annotation: CTP_CleavageSite=43; ConfidenceScore=5.08e-01
MEPKMPTSVGDQQKLTTIVTGTPSKWKRMANILMVVLNPSKVDSSVVPKIIESPPSFIVAENVTSKLKVDDGKEVSLDMGTTGALKTYSIIDAAREKEQEKIKASNAEDSTKGKTILVSEEAPPATREYIIFHALSGKLTNEQIVEVQDYTEDLKYPSVSLIHGGYDEDDYLYCILDSREIDGRFDRQTAGVVSAAMAPSR

SEQ ID NO: 52963 - protein, 58 aa, Zea mays
  Coding DNA Sequence Number=SeqID_9588
MSMELMDTFGWRSEWRLHLEVSQAHSMFIGEGIESKNSEISDELCSPAAVEHMLSCKD

SEQ ID NO: 52964 - protein, 366 aa, Zea mays
  Coding DNA Sequence Number=SeqID_9589
MWNAIDLMVKRRNRKKKKRRELQRARLCTAKAAQSGTPDCPVVHRTVSGGAPDSVRCARLNSSKQAALGRSLATIGYNSPDCPVYTGLSGEPTVGLGNGRPRNPRVTRGRANGRMGAPDCPVCTGHVRCANGSRICNGRLCHRRKEIGHRTVSGVHRTVRSEQTEEGVEIDSKPSILVDSLSRGAYFAIMSRDNDLMVDAHDLWNRIKVKYFVANCTTSTPYIACDANHSKGEDQERWTPNDESTSSIGLVSTNNKCFIAYNDGGDKSHDEEEYEDDSEDESSSSQGTFSYIASTDINDRENETDDVEEEEIHRFYNHLNKADKALLVKLLRRNKEQGETLLRLEETLIKTNNSLEKMTKEHEELR

SEQ ID NO: 52965 - protein, 51 aa, Zea mays
  Coding DNA Sequence Number=SeqID_9590
MRLHILRGMKAEVILAFADICTHEFDIILLAEMCHLTLALLNAGVEQSDDG

SEQ ID NO: 52966 - protein, 140 aa, Zea mays
  Coding DNA Sequence Number=SeqID_9591
  Subcellular localization annotation: CTP_CleavageSite=79; ConfidenceScore=5.22e-01
MPFTFINNSMITLRGLIWFFIFKSVSFSAATPKLFYKLRLCANLCASSYRGSDPNPKSVFFSAATPKLFYKLRLCANLCASSYRGSDPNPKGHGSRDTMAHRCWGAALRNPRSPGVARAPPLSPTCSTYMKKALDLLTGH

SEQ ID NO: 52967 - protein, 157 aa, Zea mays
  Coding DNA Sequence Number=SeqID_9592
MRRVEDAVMSPAGRWRTGNTRLVDLRLGVAAITATQATYLNSSSKVTSISLNIRLYISVSTSSSTRGISLSSNNITVRATNKEEIRTSARATRHLAFLPHQPTRTTKQLQRKEEATHVSIVGNKAPTRQNAPQQGGNNHGQPRAQYRKVNHLEAETI

SEQ ID NO: 52968 - protein, 223 aa, Zea mays
  Coding DNA Sequence Number=SeqID_9593
MDGKHTLQDNPILQARILTLEGSSSTLGVDNTFGEVRPSLGRRRGPKISTLKDDVIATPGPSPPGSSPRIRLGQAARLATPEASASCPPRTSARPEASAGLDSNNEQKHWHSKCHYKQNSGSTSAGGGTGSQADEPDALRLTTPAVDQPRVVEVRPARRASERPLPRTPQERPTHGPAREVELRLSPASTPARMMNILEVEGGTKIAARLASPHPGAGGHRLG

SEQ ID NO: 52969 - protein, 237 aa, Zea mays
  Coding DNA Sequence Number=SeqID_9594
MSPAPPQGNSTAGGDPDRDGNDDDVGGSSSHNMELSEEQEPEGWISRPITHDAARGCHLHDALDTLLHRAFDRHTWSIEYHCVVYQHRHGLYPDKWEATCLRPSQSIILITERGIVKAAIQDATRGVADGLDLKYYPHCSTDNARGVIVSPVGEGNPRLSSMVNLVVVLNTELDHAIDKLGKVQVEVAELRAKRAARHYQDGSSSAPIGIQHPYRSLPHGRYDYDTPDSRTQIDLEP

SEQ ID NO: 52970 - protein, 227 aa, Zea mays
  Coding DNA Sequence Number=SeqID_9595
  Gene Ontology: Mol. function=kinase activity; Cellular component =ornithine carbamoyltransferase complex; Biological process=amino acid metabolic process
  Homolog annotation: Hit_ID=Q6QP54; Match level="QueryCoverage=31%, HitCoverage=36%, E-value=1e-17, Identity=53%"; Hit description =Putative kinase
MAPPVDVAGLRPRLGDVEAPPKPRSSLSSVAKVESEPLPKSEPWVGRSGVRRLPGLSPSPSPGSGGAEFAVFRGLARVRALGRAKRSFLWCLRPGLTACQPHSVKWRRSRSGAGSAVFLSGRSVERRSDGGHFGSVGWGARVRIKVSGHLCIKCSCDLVGRCGDLVRVASWRRQGLGRAGNIFAVGGGPRARWKSSGLYADGGYQLRIRSLEGTPDYGPRHKYTAQN

SEQ ID NO: 52971 - protein, 156 aa, Zea mays
  Coding DNA Sequence Number=SeqID_9596
SSPPVDEPALALLDLEADSSPIPSSPSLLAVVEATEEPLADHPLPPSSTPLLAFGVVGDVSLRVYTRTRWQHKTQEEVYVGTPAANVSDAFLGKVTKPLDQLLPCPNVPKQRHKAPPQGSLPRRSRRVADDRAGAVLGIGEDSTPDWEQEPNRFPQ

SEQ ID NO: 52972 - protein, 74 aa, Zea mays
  Coding DNA Sequence Number=SeqID_9597
  Subcellular localization annotation: CTP_CleavageSite=23; ConfidenceScore=5.42e-01
MADITPSNTVVATPQAWLLHRPSCQAPARHSTMLLRPLGNVVHSATPPGAKAKRQQCRRRYAFQVGVYFSMFSK

SEQ ID NO: 52973 - protein, 142 aa, Zea mays
  Coding DNA Sequence Number=SeqID_9598
MPLMGLGVTLPRWLVLDTLHKSQSFLSSLLISRSVRFGVRWLHSRGVYPDHWEATCLVRRPENSLRGADICSEHYSISERDSAEAAMQDTARRALSHYCSVLGGMSDNRRRGGRRAQQEHAAPQDEAPQQQQLPPPPPMTIE

SEQ ID NO: 52974 - protein, 83 aa, Zea mays
  Coding DNA Sequence Number=SeqID_9599
MELLSKSYPTKEKTLKGMLVIRKSRNFKEGNQIQGRFPKFYRKRKGKILNSIGSEAAQTAQVQGKCARARARVGSFTQRSLRF

SEQ ID NO: 52975 - protein, 196 aa, Zea mays
  Coding DNA Sequence Number=SeqID_9600
  Subcellular localization annotation: CTP_CleavageSite=64; ConfidenceScore=5.09e-01
MSRPDSSPSPPAHVDRPTSTIPDSDPHIAVIPETSPTSSTTSPEQSRRRKIIFASVLNLRKFVDCNLADGEYVLIPEQGTVQEEDQEQASEAAIEDLPTALAIEGKPRSTRAISPEDVNVKTEHAPSSANRKGKTGRSSKEVPKGMQSMTKLQKAVPRGVQRKFSAQKSFLRECRTYSEKSTLIPPKYKAKRENST

SEQ ID NO: 52976 - protein, 201 aa, Zea mays
  Coding DNA Sequence Number=SeqID_9601
MVVIGRLYASTHDEVINECVAPVSNNTSAILLRVLPLKLLLLRWARVLSELLRWIARETRAIAASRLRPTDLALAILHLFALPLRHDRSVNQVLKREEDEQYSRTVHADLVLASRLYPYFPSSRRYLRTRIGTTVGEAQRIRRLTQRRIYEQESFGVIAEKETDLKMKRLFRPRWITIELLPNVKGMDVILYELCPVPINR

SEQ ID NO: 52977 - protein, 1256 aa, Zea mays
  Coding DNA Sequence Number=SeqID_9602
  Gene Ontology: Mol. function=microtubule motor activity; Cellular component=microtubule associated complex; Biological process =microtubule-based movement
  Homolog annotation: Hit_ID=Q75LL2; Match level="QueryCoverage=99%, HitCoverage=99%, E-value=0.0, Identity=68%"; Hit description=Kinesin- like protein
  Pfam annotation: Domain name=Filament; Domain location=835-1082; Score=-191.7; E_value=0.059; Accession=PF00038.12; Description =Intermediate filament protein
  Pfam annotation: Domain name=Kinesin; Domain location=41-366; Score =452.1; E_value=7.3e-133; Accession=PF00225.14; Description=Kinesin motor domain
  Pfam module annotation: Pfam domain module=Filament::Kinesin; Domain location=835-1082::41-366
MHLDGVDDELGGGSCAPSPARFELQEDPSFWKDNNVQVAIRIRPLSGSEVSMQGQKRCVRQDSSQSLTWIGHPESRFTFDLVADEHVTQEGMFNVAGVPMVENCIAGYNSCMFAYGQTGSGKTHTMLGDIENGTRRNNVNCGITPRVFEHLFEKELRRDEKLMFTCKCSFLEIYNEQILDLLNPNSVNLQIREDARKGIHVENLTEHEISNAREALQQLIEGAANRKVAATNMNRASSRSHSVFTCLIESKWESQGIKHHRFSRLNLVDLAGSERQKSSGAEGERLKEATNINKSLSTLGLVITNLIAVSNKKSQHVPYRDSKLTFLLQLPFHFESYTFDISRFLSSCAAETLSTLKFAQRAKYIRNNAIINEDASGDVLSMRLQIQNLKIIIHLKLTCFCRKVISRLQGQLGSDKTESIASHGFVCESPSTFKWDQGHGMFTPLTFDKRATQRNDCDAALVAAFRREQEKEAQLKAVIDAKQTAEQLVAQKTEEVRSFKMRLKFREERIKRLEQVASGKLSAEAHLLQEKENLVKELEVLRGQLDRNPEITKFAMENLQLKEELRRLQSFVDEGEREMMHEQIIVLQDKLLEALDWKLMNEKEPINKGLSLFGESAGDEENEFLRLQAIQNEREIESLRKKMTFCLEAKDNLERHVNELTTELELTKKHNNTYKEFKAAQLQEQGEADLHNLSDAQMELKTLVDAIASASQREAEAHETAIGLAKENEELRLQLKVLIEDNKRLVELYEHTVVNVEANQDGNPVDDLLNAQPAATSDFHAHNSSSVAQESKIVDEKCTNEDNFSRVTSVELRLQLEEMHEENDRLMGLYEKAMQERDEFKRKILEQSDSEAVKHIQLDEKDVEMSEAAENPEVKHIHDSTIAALKEVLQIVRSKLELVQDKVVSAQDAVKYFKALEIASGKAEELSARIELQRLGAQRGQEEITFLKSVLSESQKKKNAFEGKYFLPAASCWNLVLKTKSLAESKFDASFGSMNQKKEQLNHLQTRKIELSAARTRARESETELKSKIDGLKAKLRAHEAQRKEEEKVLFAIDNLDTSTTLMHKPKNYGKATDLLKSEEDRMKLLCELQKAREQRSMVHKEIRSMNECDYIDREIGVLEAEIEDSCISILETDIEKFVRDNTLAEIWEGSAKDLEALLVDYQDCVFQVNLKEEEIKVCSESLQYQARDMDKLQSKLNQAIRELGELLQDRRSLTACSLDEPTLPVGEKVAADLEAVRIHVDEAKQLLILDNQANS

SEQ ID NO: 52978 - protein, 662 aa, Zea mays
  Coding DNA Sequence Number=SeqID_9603
  Gene Ontology: Mol. function=transferase activity; Cellular component= nucleus; Biological process=regulation of transcription, DNA-dependent
  Homolog annotation: Hit_ID=Q8L8G6; Match level="QueryCoverage=100%, HitCoverage=100%, E-value=0.0, Identity=82%"; Hit description =Histone acetyltransferase complex component
  Pfam annotation: Domain name=C1_3; Domain location=51-81; Score=6.4; E_value=0.094; Accession=PF07649.3; Description=C1-like domain
  Pfam annotation: Domain name=SWIRM; Domain location=571-656; Score =18.8; E_value=0.0011; Accession=PF04433.8; Description=SWIRM domain
  Pfam annotation: Domain name=ZZ; Domain location=47-92; Score=41.6; E_ value=2.8e-09; Accession=PF00569.8; Description=Zinc finger, ZZ type
  Pfam module annotation: Pfam domain module=C1_3::SWIRM::ZZ; Domain location=51-81::571-656::47-92
MGRSRGVQNSGDDDTVHRSKRRRVASGGDATDSVSAGIGGAGEGGGKKALYHCNYCNKDISGKIRIKCSKCPDFDLCVECFSVGAEVTPHRSNHPYKVMDNLSFPLICPDWNADEEILLLEDMSHVNGKNRKELLAMAKVQGESKKELFYVGNPNPSGWVLYCMYIRKRVTWAGPRSITLKTEYNKQTQESNTPTLETLAVGDVETGPKPQEQRRGKTLVEAVGVAAGGGGGAAMGRSTVSTAKTVGAAAFASALGEGALAAAGPWACTTKAEEWPGKGWVASMAGTSLLPGELTPKAESPFSPSRVKVEDALGEGLAGRSPSHIAVGANKKASNVGHIKDGSNVSKVEDGHVDRSVGVKKPRYSADEGPSLTELSGYNAKRHEFDPEYDNDAEQALAEMEFKETDSETDRELKLRVLRIYLSRLDERKRRKEFILERNLLFPNPLEKDLTNEDREVYHRYKVFMRFLSKEEHEALVRSVIEERKIRRRIQELQECRSAGCRTLAEAKIHIEQKRKKEYELNAQKAKESNHLIANTKLVQKMNRPMKIESDGNLDPKKGGVGLDSPKTTGLTSVKQWDDWDIVGLPGAELLSASEKLLCCQNRLLPSHYLRMQEVLMQEIFKGSVLKKEDAHVLFKVDPTKVDSVYDMVTKKLGNHVELPTV

SEQ ID NO: 52979 - protein, 403 aa, Zea mays
  Coding DNA Sequence Number=SeqID_9604
  Gene Ontology: Mol. function=strictosidine synthase activity; Cellular component=endoplasmic reticulum; Biological process =biosynthetic process
  Homolog annotation: Hit_ID=Q9C586; Match level="QueryCoverage=49%, HitCoverage=47%, E-value=4e-71, Identity=65%"; Hit description =Putative strictosidine synthase-like
  Pfam annotation: Domain name=SGL; Domain location=97-352; Score= -105.3; E_value=0.0043; Accession=PF08450.3; Description=SMP -30GluconolaconaseLRE-like region
  Pfam annotation: Domain name=Str_synth; Domain location=196-276; Score=53.4; E_value=7.6e-13; Accession=PF03088.7; Description =Strictosidine synthase
  Pfam module annotation: Pfam domain module=SGL::Str_synth; Domain location=97-352::196-276
MQSIQQLRLPKAADMRNKRKADIQPEAKGLDRSSLSGSRHRAAPTSNLDPPPCLRNLPNLRNKLDHKEGRSRLRHSGRLRRPADAPTPNTTLAHALVRDQPAGASDGWHAEAANLARTRFQPSARGAAPCPGGDRQHRLRACDPLPATCPLAARAPSQDPHPPDVPYKRLALCRQDAAEALASPAALAKGRRPTRAVATSWNFMQLVFSGDPSGRLLKYNPQTKETTVLHRNLQFPNGVSMSKDGSFFVFCEGSRGRHSIFVFFGDRLSRYWLKGEKAGTVDLFAILPGFPDNVRTNEKGEFWVAIHCRRSLYARLMSRHVKLRKFLLSLPIPAKYHYLMQIGGRLHAVIIKYSPEGQVLDILEDTKGEVVRAVSEVEEKDGKLWIGSVLMPFIAVFDLAKAS

SEQ ID NO: 52980 - protein, 116 aa, Zea mays
  Coding DNA Sequence Number=SeqID_9605
MEDSIKEYHHHTEEETKDYEPCTTVFNPRITKHCDLRGEGVENGVACYLAEGILSGDTRQQVLQGVGNDVVGDNGSGGVRSKGGWAAVLVRMEAGTRAGGTEKTFLKKKENTQAQQ

SEQ ID NO: 52981 - protein, 64 aa, Zea mays
  Coding DNA Sequence Number=SeqID_9606
MVPVVRTSLGQGLWCVRVIDYRPSAPTLLHGTTPRRGRVSLWRNSCAEVGDAPWAVGSGVFGQD

SEQ ID NO: 52982 - protein, 171 aa, Zea mays
  Coding DNA Sequence Number=SeqID_9607
  Subcellular localization annotation: CTP_CleavageSite=23; ConfidenceScore=5.79e-01
MVPATPPPHPSPRAGGDGRRSVRSSPRPRIFTPRRRVLPASGSSALVSGTAPSRPAKGGSGVAGQPAPGFKHSVIGNLQRCPTPIVALLISFLTKQSLQCEVSKLVRLTQMSHGCRCNARPCCSLFKDATFLHCGIVDKADLAGVHSLSYMNNIKLGRILGLRLRLPDIVM

SEQ ID NO: 52983 - protein, 136 aa, Zea mays
  Coding DNA Sequence Number=SeqID_9608
  Gene Ontology: Biological process=positive regulation of growth rate
  Homolog annotation: Hit_ID=Q75LL8; Match level="QueryCoverage=63%, HitCoverage=71%, E-value=6e-43, Identity=96%"; Hit description =Expressed protein
  Pfam annotation: Domain name=DUF423; Domain location=38-136; Score =67.0; E_value=6.4e-17; Accession=PF04241.6; Description=Protein of unknown function (DUF423)
MAMCDAQHSTRLHLERMHQAAIPDRYPISARYPMGTGTGVAALGLGTYGAHMFRPKNPAYKEVWHTASLYHLVHTAALLGAPITKRPNVFGGLLTAGIVLFSGTCYTVAYLEDRKFSSPAPLGGFAFIAAWASLLF

SEQ ID NO: 52984 - protein, 43 aa, Zea mays
  Coding DNA Sequence Number=SeqID_9609
MSRTFDDYYIKDCGVISAPEPEKSQTQETLKKFLRRAQNEFGL

SEQ ID NO: 52985 - protein, 171 aa, Zea mays
  Coding DNA Sequence Number=SeqID_9610
MVPPVDVAGPRPRLGDVEAPPRSRSSPSSVAEVEFEPLGRARRRPLAEARAEFESWGQAKRSSSSSGAEPKVRRLPGLSPSPSPGSGGAEFAVFRGLARVRALGRAERSSSSSGAEPKSEPWVGRSGVRHLPGLSPSPSPGSGGVEFAVFRGLARVRALGRAERSSPSSRT

SEQ ID NO: 52986 - protein, 170 aa, Zea mays
  Coding DNA Sequence Number=SeqID_9611
MQESLAGPPSQQNPPEGLPTLTTPLLPLPLSDLFWAKGSEIHGSAQFHPNAAELLIVVVGWDPTVSTNLLATAEPQLRRRTHHGGGITGVPNPCLQAFSSRFPSATRSRDLSELDEGLLTALEAGLNASYDERCSAAVRCGISHGSGCSHALGCPPKLRCDLADPSRLNP

SEQ ID NO: 52987 - protein, 120 aa, Zea mays
  Coding DNA Sequence Number=SeqID_9612
MKTPHPCDVSWPHGGRCLTPPHGQAKGRHMAREGNTSQYVSWGPDLHRRTHDPYTYKSGASERRQGHPAGGVPAGSAANSAPVPSSALCYPFYKKLPLHAEDTQISDDRTQGDCPGIKYL

SEQ ID NO: 52988 - protein, 222 aa, Zea mays
  Coding DNA Sequence Number=SeqID_9613
MAAQGQEGRFPLLWLSLSGCENLRGRQEAEQRTVTRPSPGASGRRSGRRFAFAVITAPKKAPSLPTDQRFEGWPPEGFDSRLRSRGPYTHYWSERERSCNGIPSEEGIEPSDPVARGPGPADHPQLTGDTMFGAHRGQHGAFPPSSLRKGDAGAYVKKAESVPDRPLALRRGSGTALANPAPAEPLTASTYQPENLGPDRTPGLRPARMREQPDQPKHYARH

SEQ ID NO: 52989 - protein, 18 aa, Zea mays
  Coding DNA Sequence Number=SeqID_9614
MAVREMLAAYWVRLYLRL

SEQ ID NO: 52990 - protein, 78 aa, Zea mays
  Coding DNA Sequence Number=SeqID_9615
MATGTYPSGSTIPYPYPSKKFYPSGYPYILAGIKSYPYPYPRGYFYPSAYYRGAMGILLVYDVTDESSFNSTCTVHFN

SEQ ID NO: 52991 - protein, 160 aa, Zea mays
  Coding DNA Sequence Number=SeqID_9616
  Gene Ontology: Mol. function=hydrolase activity; Cellular component =nucleus; Biological process=mRNA transport
  Homolog annotation: Hit_ID=A2XHC0; Match level="QueryCoverage=78%, HitCoverage=31%, E-value=1e-32, Identity=56%"; Hit description =Putative uncharacterized protein
MAIAGLRLLEERAQEAILASCRDVLRASGFRFEDAWAKVIPGSDKGVYAWVAANYALGRLGGDPNKTVGIIKLGGASAQLQDWNNRLPFNVASDFYSQEATSENFVSQRISKDCHSNRGAVEDASALANSLGVLCKACKPEKLQSNWRDRCLAFSFRRPI

SEQ ID NO: 52992 - protein, 273 aa, Zea mays
  Coding DNA Sequence Number=SeqID_9617
  Subcellular localization annotation: CTP_CleavageSite=4; ConfidenceScore=5.40e-01
MSSRSLMHRVFPPSKPPDGGYPPSFRLIVGGTQLRRSWYLSAIVRLQGFSSASPAAPLRQRPPETATTSPWVGRSKPGCDLGPTLSFKDVHHPRWGGGRAELELYLPRGFVGHPPLRRSRERALAGPAGGSDFDNAGLVDGGHRQSQRVELVGLAPGGPSCRKAAAAPSGSSVGGTDAGVDQPKPRVGLAPSEDGWPRPWGDRPSRLLGPDSRRRPWQRLPGRGDDVVLQSGNPRTASPSEARSDLAEGVVDAEGATAPFQRQDPSLQDQIVL

SEQ ID NO: 52993 - protein, 15 aa, Zea mays
  Coding DNA Sequence Number=SeqID_9618
MGTPDSPMVHRTVDS

SEQ ID NO: 52994 - protein, 71 aa, Zea mays
  Coding DNA Sequence Number=SeqID_9619
MVFDEWLKPDSLVEIIAPSRFGHGKRIHLFPVRELTTRCGEPELIDHKMVLMNGTGDGQTKQVSGQRMVVK

SEQ ID NO: 52995 - protein, 61 aa, Zea mays
  Coding DNA Sequence Number=SeqID_9620
MRTEANTVVFGGASLEPTNSYTKYLYMKPNSVLNTAREKATEKLSDFSRSGHTPARLVDDD

SEQ ID NO: 52996 - protein, 377 aa, Zea mays
  Coding DNA Sequence Number=SeqID_9621
  Gene Ontology: Mol. function=flavin-containing monooxygenase activity; Cellular component=intrinsic to endoplasmic reticulum membrane; Biological process=electron transport
  Homolog annotation: Hit_ID=A2XQN3; Match level="QueryCoverage=24%, HitCoverage=16%, E-value=9e-38, Identity=78%"; Hit description =Putative uncharacterized protein
MYQYSDFPWPDTVTEVFPDHRQVMSYLDAYARHFGVLDCVRFGRRVLGMEYHGVAEDDVAAWEEWGGNGQAFGCAGAGEWRLKVADAEGRIEYSYRYPYDPPPYRLYGASPCYAPPFGASHAFPLLTVVLLVLLFVLRQSRIFLKFVKWLVHFDLVEGNGKKPSRLDDAMPLKAGAQVACSSSLAQVVCVAQLSFLLVKIGMMPSALCFGGIHCVPCTDVTVLKNILIIPGCPPQWVWARDGLDFGDSEYSEEEFSSESEGSPDPIPLRESSDDSDDSQGLAAEVWTYIRAVERSGLEGSDESEYSSDEEDSNGGGEDEGGDDDDDDEGSGDGDGDGSGKGGGSGSKDGDGGGSRGGSGGGGSSRGSNRGGSNRASG

SEQ ID NO: 52997 - protein, 326 aa, Zea mays
  Coding DNA Sequence Number=SeqID_9622
MESHDLRTERESQLVGGNEIDGSGYDYGTGKWYSFHLERMARLRHTARKSVIPFLPSRLAERPLRRPVTGLSSHLERLHHRLHEEQERRRQEQQGSSFSLQQEIESEPEGWVARPITRDATRGCHFHDALDTLLHRALNWCTWSIEYRCVVYQHSRGVYPDRWEATCLVRRLENSLQGAEACSEHYSISEWDSAEAAMQDAARRALSHYCSVLGGVADGLNLKYYPHRPSGSTGGVIVSPVGEDNPRLSSIVNLAAVLNTELDHALDELSRAHAEITLLWAERAERRHLDDGSPAPVGTQHPYRSPRRGHQPYGNPDCKTKMNLEP

SEQ ID NO: 52998 - protein, 100 aa, Zea mays
  Coding DNA Sequence Number=SeqID_9623
MTELLLSTDRDHTGLSLCHRTERTLVPRHLRHLRLGWGLLLLLLNSGQSLTDGLNCLSLHQEHLFDGHWGRGRQLLLLGYLFRLSGLLLLSTPSSSAPVL

SEQ ID NO: 52999 - protein, 294 aa, Zea mays
  Coding DNA Sequence Number=SeqID_9624
  Pfam annotation: Domain name=zf-CCHC; Domain location=151-168; Score =28.5; E_value=2.4e-05; Accession=PF00098.14; Description=Zinc knuckle
AFLEKVGRAGPRTGQALSWGRSLPSPAWTLVTPLLQAHPTWARDEHEGRGTSTSLTLDSGHLASPPFALAHALDPSGLGHAAHSLVGLGTPLSRNADMISPPQPQAKATKHMDTQTEESSQAQPYEIQTPNQPSPPIGQAKLTRKELKARGACYYCKNEGHIIRECPKKLLDRLEKKAAKHDLSDNSEEQPFYKYDDEGTRQPTPTAPKAPTADAPADRTTPTPCPRPPGATRSPQPSDAQRATPTAPRTAPCPNTDAPAADLATRPRPDRAATPRHDLEHLGRALRAVSSAKP

SEQ ID NO: 53000 - protein, 165 aa, Zea mays
  Coding DNA Sequence Number=SeqID_9625
MGIPAAEGDPDGDGDDDDAGGSSSHDTKLSEEPEPDGWIARPITHDAARGSHFHDAIDALFRRAFDRHTWSIEYRCVVYQHRRRLYPDQWEATCLVRRLDDDLRGAEAFSEHYSITERDTAKAAMQDAAQHALSQLCSLFSGVADGLDLKYYPRCLAGSAGGVIV

SEQ ID NO: 53001 - protein, 402 aa, Zea mays
  Coding DNA Sequence Number=SeqID_9626
  Subcellular localization annotation: CTP_CleavageSite=46; ConfidenceScore=5.62e-01
MVGVPAAGLANRHATPLRVGSQAKIAALNPRSSQSGGMSWGGIRVSGMKDSPVIPFTRSSSSSQDKSEPGPRWIRPMSFEPVNQQHRHALFCSGHQLQALDPIQYGLELRRQRWPGPPLLPVKPWPVARQRQAVVGLHTGDHPVDTPVFPPRATKGRDVCEDGRLEDRVGGEVLKLEAELLQQQQKEGRDRQRQPAGEVGDEEHELPDGEIAEGSGAGADPPSKRRRAPSKQAAHQVEHHLGLETLGTNQRGHGDRGNGELKSANAKGRRGLGGERTQQLERMRKRNRCTRGDSLFKEELPHSCPKKFLLTRTLRPSNSITDMGAQACKSCSWGAGLRVRRRRTATQGANHRARSCVASGPLRGNIFNLGGGNEAPRVWPDKTAMRGGHTSVKPRGQTRQLM

SEQ ID NO: 53002 - protein, 182 aa, Zea mays
  Coding DNA Sequence Number=SeqID_9627
  Subcellular localization annotation: CTP_CleavageSite=42; ConfidenceScore=5.14e-01
MGTDVAVDVTEGGLTASHGSPQSRATTMGPRQRPTPPHGRVQSRHVSRKGGILQGVNSESKPPRESAGPLDIQSGPPRLVSDPWIYSPDLQGWSRTSTCASRTPRMGFGPPRMGSRPPTGRSQGPKTEHTRALNWTGLELDLGGGPVSTCVQTQSGADMSAYTSTLRPGGDLMLPHGLPHVT

SEQ ID NO: 53003 - protein, 161 aa, Zea mays
  Coding DNA Sequence Number=SeqID_9628
MTSLIITILIDYDKNKYIGDETYGYPLTDGYEFGQNIKPVTGIPLTTVRRRYTRTTTSSHVVNNTLLHRVDGSRVATWPGKTIYTKMSTVGLDPHGKAPDPCTYRPDLQARSRTPAGATRTPGTGLGPFVWGPNYPHPGPGTLGQRILRPCSGRGPVPTRV

SEQ ID NO: 53004 - protein, 265 aa, Zea mays
  Coding DNA Sequence Number=SeqID_9629
MDKGKGAASSSSAPGGTGGTEEERRRRLRRADGSPVSDPPSGAEEVDAQKRQRTADGAEEASPQAQGAQRRASPPPPPPPSVIMRTGLNASLFARASSPTASKAVPAGGLGSQQQALPGSHAPAGGSAAVEPPMAYGATTAEGVPTAPLAAVEEAPATSTPVIEVDAGGASSSVPPLTPEETEVIFGRQLRFGAEPEAAPSELARDRQDYKKDLQRVFARELEASRKEKKLAKKEEHLNQREEVVTELSTKLSALNTILEEQQTQ

SEQ ID NO: 53005 - protein, 153 aa, Zea mays
  Coding DNA Sequence Number=SeqID_9630
  Homolog annotation: Hit_ID=O48967; Match level="QueryCoverage=97%, HitCoverage=32%, E-value=2e-27, Identity=50%"; Hit description =Putative uncharacterized protein
MVHIVKHHDFVPEDFPMEEEAASSTPRASNRPTPGAAAVRSVPQHTPAQASRASRAAPGALSTARELLCHPPSSTASSGAMKQWRDDVDRLLGMAHSGSTRPRPRSSRRQYEASASVRSPSVRAAPTEDLRVELNRRRAREDALVSLERPDDL

SEQ ID NO: 53006 - protein, 32 aa, Zea mays
  Coding DNA Sequence Number=SeqID_9631
MGKPVPSLLMLLLSRGFNNIMLKKEELSQFVT

SEQ ID NO: 53007 - protein, 105 aa, Zea mays
  Coding DNA Sequence Number=SeqID_9632
MEQRITRSTLAGGRVESGDRGLVSPAKQTSIPRSGSFTEVCTVFSEGWTRLGRVWLAGLRWQGDRAAEDTPCTGKRRGCLRWYATFLVYNSSGFGAIIKVNTVDL

SEQ ID NO: 53008 - protein, 154 aa, Zea mays
  Coding DNA Sequence Number=SeqID_9633
MGVLVFGAVIQGVRAHGLASQAKSCSSCCMNQRVEDTSWWDLWIYLLIIGRIPLEALDHHLHATGPAITGSKEMAGSWLRKHVKMYSITARQSLPPSASRRAPSIWSRHQRRSTAESSTESASEMDVGSSDIGMGLTPSGTSAVLALPAQAAMR

SEQ ID NO: 53009 - protein, 106 aa, Zea mays
  Coding DNA Sequence Number=SeqID_9634
MAMMGSTSEKMYLCQVSYCNCFHTFVSPMYCNVCETGETLLGKRLSDWRTQLEERTKVASQRFAFEQSELARDRKDYKKDLQKVYDRELEASRKEKRMAKKEEHLN

SEQ ID NO: 53010 - protein, 204 aa, Zea mays
  Coding DNA Sequence Number=SeqID_9635
MAMNRYRAGLPMMALKGSMADDVEVCPTVDQHMAQPHVGDDRAVMSGSIPTPAILLRQSDAPKEMVVLLHRWCGAAFGTPGVADRTSRRRDLTFLWEDPLRRLVPEVPLSCGHITVVGPLLVRLATRWGTILGGLLAPFADALHELDNLAALHGAMATVEPLVAAVLLLLAVLGNGPWATRLGNPGLWGRVPCVALGGSGTLVG

SEQ ID NO: 53011 - protein, 274 aa, Zea mays
  Coding DNA Sequence Number=SeqID_9636
MDKDRQGAAQKRQAAVRLVEARPKRQRGSAKAAAPGGGKPPLAAKVAEAAKATRALPSAGKRVADFATDICVEDYLGGSDEGQLVMVAPAAATAVAAAAPKAKGGALSARGEVSALVVVMDEAGAATRRLKEVTEALSQVADFASRTASGALTAAVAAEVERLRTQHADAVREKSAADSKCRKLADKVATLEGEKADLRRQLAGERRETNEALVKAQAAQAEANLARAEGNLARERAEQLQERLTAPGEPRGEGRGHVARGGGADAPAACGYIP

SEQ ID NO: 53012 - protein, 114 aa, Zea mays
  Coding DNA Sequence Number=SeqID_9637
MTATWVSSIGMVAPTPDSPGTQLFWWKNTSFDEVQKVSLGDNEHVVAGKWKLLGSIGGIIGMATLYLFLLGAITISQAKRVDSRAQETEKRLREKRELGFEFKGIRQQKYGLAR

SEQ ID NO: 53013 - protein, 78 aa, Zea mays
  Coding DNA Sequence Number=SeqID_9638
MRHPAVISHFQVPERRTSQDKDSYVLGYSDYPQNIPIKEENEEETVVEAEVVSQAENPPAENNFYFDICGVDPEPRAT

SEQ ID NO: 53014 - protein, 432 aa, Zea mays
  Coding DNA Sequence Number=SeqID_9639
MESHDLRAEWESRLVGKVVMRLMVMVMIMVLVVSIATTAQAKVKLWKETSRSSKITTSSRCGLAATPSRLPVKAALSTFLFRTLIYCKNYMDVSDMARLRHTARKSVIPFLPSRLAERPLRRPVAGQSSHLERLHHRLREEQERRRQEQRSSSLSLHQEIESVRSCSPVLSLEPPPAPPLGAPASGVAAGGDPDDGGGDDSSSHDTDFSANPEPEGWVARPITRDAARGCHFHDALDTLLRRAFDRHTWSVEYRCVVYQHSRGVYPDRWEATCLVRCPEDSLQGAEACSEHYSISERDSAEAAMQDAARRALSHYCSVFGGAADGLDLKYYPRRSSGSTGGVIVSPVGEGNPRLSSTVNLAAVLNTELDHALDELSRARAEIALLRAERAERRFLDGGSPAPVGTQHPYRSPQRGHQSYGNPACKTKINLEP

SEQ ID NO: 53015 - protein, 139 aa, Zea mays
  Coding DNA Sequence Number=SeqID_9640
MEREPASKAPLAQRWSSATDELGAQPATLGEVQKDRALEVENADFMANARAWVEELSAALENLQAYCNTLHEEVHVLYDRLHPNVPPEVAPMGAGTSGAANGGPSGELDLFGAPPSMNLADEHSPKADSGAGAAKDEDN

SEQ ID NO: 53016 - protein, 95 aa, Zea mays
  Coding DNA Sequence Number=SeqID_9641
MEREPASKAPLAQRWSSATDELGAQPATLGEVQKDRALEMENARRGGRVSSLEKIAGEGRHERELGDQERKSSAHSTWADVRPWRKSSFSLLHPN

SEQ ID NO: 53017 - protein, 88 aa, Zea mays
  Coding DNA Sequence Number=SeqID_9642
  Homolog annotation: Hit_ID=Q8W0X6; Match level="QueryCoverage=63%, HitCoverage=18%, E-value=8e-07, Identity=48%"; Hit description =Putative prpol
MTPQEIKHGSPRTVPSAVPDVDEPTSKDLIDGDRVFALQALNKYQAQTKAWRDHAVIPREFVTPGFKKANRMRTIGLALCGDKSSSCF

SEQ ID NO: 53018 - protein, 231 aa, Zea mays
  Coding DNA Sequence Number=SeqID_9643
MAGSAAPARPAPCPPGSAAPVPARKLNLEFRYASGNEIDGFGYGYGAVRHTARKSIIPFLPSRLAERPLRRPVAGQSSHLERLHHRLREEQERRRQEQQGSSSSLHQEIESVRSCSPKLPLEAPPAPPLGVPASGVADGGDPDDGGGDDSSSHDTDFSANHELEGWFARPITRDAARGCHFHDALDTLLRRAFDRHTWSIEYRCVVYQRCRGVYPDRWEATCLVRRPENSL

SEQ ID NO: 53019 - protein, 827 aa, Zea mays
  Coding DNA Sequence Number=SeqID_9644
  Gene Ontology: Mol. function=phosphotransferase activity, alcohol group as acceptor; Cellular component=cytoplasm; Biological process =metabolic process
  Homolog annotation: Hit_ID=Q6YX79; Match level="QueryCoverage=22%, HitCoverage=18%, E-value=6e-59, Identity=63%"; Hit description=GHMP kinase-like protein
  Pfam annotation: Domain name=FAD_binding_6; Domain location=137-217; Score=13.8; E_value=2e-05; Accession=PF00970.15; Description =Oxidoreductase FAD-binding domain
  Pfam annotation: Domain name=zf-C3HC4; Domain location=313-344; Score= 8.5; E_value=0.0097; Accession=PF00097.16; Description=Zinc finger, C3HC4 type (RING finger)
  Pfam module annotation: Pfam domain module=FAD_binding_6::zf-C3HC4; Domain location=137-217::313-344
MVAVADAGSPARLNPLPNTDAEEEEVLTITPTKCSTIYLNRGIYSVRNPILHRQHLLRDCDGNHVDILPTSEFDEGPIFDEEPCFHRNLLDSDPDSPYDWVVPVIAVHSSGYTEMSHSEADKVPATAALPNLREKICCRFVDRTKLSSHVRLIHFSLPSPDQALGIPIGTHVFDCTSVDGKPCMRSYTPTSKEDEVLATTPIRCLTNCFSIIQCRFLHSCNCRRDAVQHRQSWPPPVQYGILGDGVQVWLPPWPPPVWEFWLSLKITGPQMMHSVGYFGLPVMPATCITISEIVSGSSEQIFPEIFLQSLHECRVCLSENTGRSLLQLPCHHLFCLMCMKSNCRIHVIEADLTQVWLREDAVAYFKNMFDGGLRPTSNAFNKVIDGWVKVDMLNEAHGFFDMMPEKDIDDVTVVIFYFGGQHVGWEMKTEWLSNGWLCLVCGASDTQELPLHFIKLAKDTYTSDCMFKKIGYGTVSEALVYMLSLLFVRRDYCNEEPFFRNVLEHYQCGVEMIRRDLFIGHWKHYLQSAIPLQPCFDGLINVGKVAARTLQDTVVGNSCIVSRQPPWPPPTRHHFRTMHAETVANWNHLFSWCFANSDLGELLTLNCPADRAMVLLMYQIELRLLNWAWEDECVFNLCLLGLHSAVHSSLANAYKSWLITMIHRTHSIGQDHFWHNVDRCVVCGIKDRCCARLAKLVLSATLTQDSGKLSQLELHHPLLLNTQSSGLRTSRISSSGECQHIIFSSSQRWYQKNTDNAATTTMTIHGVYEDGGIAGKGTGVPGERARCLMKTSVRLAWAGVGLVNVGRSIGRVDRVVVWLQVTPKPWL

SEQ ID NO: 53020 - protein, 57 aa, Zea mays
  Coding DNA Sequence Number=SeqID_9645
MGSSSLRAEWESRLVGGNEIDGFSYDYGAGCQHCNHCSGEDEAVEGDFQEFQDYDEF

SEQ ID NO: 53021 - protein, 865 aa, Zea mays
  Coding DNA Sequence Number=SeqID_9646
  Gene Ontology: Mol. function=glucose-1-phosphate adenylyltransferase activity; Cellular component=chloroplast; Biological process =glycogen biosynthetic process
  Homolog annotation: Hit_ID=Q3SAE3; Match level="QueryCoverage=27%, HitCoverage=52%, E-value=1e-105, Identity=76%"; Hit description =Glucose-1-phosphate adenylyltransferase
  Pfam annotation: Domain name=CheB_methylest; Domain location=321-464; Score=-115.4; E_value=0.05; Accession=PF01339.8; Description=CheB methylesterase
  Pfam annotation: Domain name=NTP_transferase; Domain location=570 -804; Score=146.3; E_value=8.5e-41; Accession=PF00483.14; Description= Nucleotidyl transferase
  Pfam annotation: Domain name=Trehalose_PPase; Domain location=259 -440; Score=-65.0; E_value=0.014; Accession=PF02358.7; Description =Trehalose-phosphatase
  Pfam module annotation: Pfam domain module=CheB_methylest::NTP _transferase::Trehalose_PPase; Domain location=321-464::570-804::259 -440
  Subcellular localization annotation: CTP_CleavageSite=75; ConfidenceScore=5.38e-01
MDANRPRKRGSVDCPRSLPRNRLPHLTPRRPPHSRASQPLRIQLPRAASAANPAPARPRQRLPTPARPPAPATSRAEAATEAQGKQAPRFCRYFAVSGLPTSASSSRPRPRLLATAPAEKRKQRWSRSGGDDSGISIASAKLSEVRDLLRGALFLPLFEGLREERPVFCLSADPQDFNREGGAPVPLASCIVSDAWQPSDQAGMRERDLGGEPIHPRRSHHPHPAAFKSASTFCSPTPPAPLALPAVQHWRGPSPSVPLADVSFSSRHRQVTAPHPTPRLGSFWGRPRLTELAAPPPAGTTIVPHWTLSWCSTTWRTSTWTGGVGREPAASPPVVYTQHHNEADPDFGSCWYKEMLDHLDNVLDNEPVVVKRGQDIVEVNPQSISKGMVDSLLSSIVRTGTDLVDGMEDAAKVFDEMLTKGEEVPSAVMYNALINSYCTGANMEGLCADKTRQLVDITDWIVDTEITLLRDNNRPKPGGNVTFGELLKSSVLTEGVRVLMLVWNARTFVECPLKQYPWEQEHMASMKEYIARFGPGSAKLVRGMKQPWPPPRAVPPRLDYSDDEASIGSAGSAGTRLYPLTKKRAKPAVPLGANYRLIDIPVNSCLNSNISKIYVLAQFNSAFLNRHLSRAYGSNIGGYKNEGFVEVLAAQPSPDNPNWFQSTADAAHRETYADITVAALPMAEKRATAFGLMKIDEEGRIIEFAEKTKGEQFTEMMVDTTILSLDDVRAKEMPYIASMGIYVFSKDVMLQLLREQFSEANDFGSEVIPGATSIVKRVQAYLYDGYWEEMWAVLIRIFAHQEKVDWMYFVPFAGTTVGLVIYSYRGSRQNPKETARVTQAMDAEAAAANSTTQVPGAFGACLQFP

SEQ ID NO: 53022 - protein, 36 aa, Zea mays
  Coding DNA Sequence Number=SeqID_9647
MEVRYDDKLTAFAERLEIFPPRRFGTSTSLYADVDL

SEQ ID NO: 53023 - protein, 183 aa, Zea mays
  Coding DNA Sequence Number=SeqID_9648
MDFGLTRPQGSDSASAPEDDELRLARPQGLGLSHGSGRRRTLPRPTPGLGLSLGSGRRRTPPRPTPGLGLSHGSGRRRTPPRPTQGSDTASAPEDDELRLARPRARTQPRPRETVSASPDPGVGLSLDLGRRTRPRPRRSLRLARPRARTDRVTGGAIITLPLASSGYGEQDRRSIWLAPVNK

SEQ ID NO: 53024 - protein, 513 aa, Zea mays
  Coding DNA Sequence Number=SeqID_9649
  Pfam annotation: Domain name=DUF662; Domain location=312-455; Score= -73.1; E_value=0.081; Accession=PF04949.4; Description=Family of unknown function (DUF662)
MSYFAATELQLGHKVEFGVSRISSIHAATSYGGRPSVEVFAKNYCLHWQKRKVGDMIAQFGSCTFTPRTGKTSAEVVELVPYARNKWGNWWDYWFYVSGGEVEDLPGLSAAVMCSHFYVAFPQFEVAEDDEDEGALRCAARMSSGRDLVEEFIGYGVWPLAHGWMLGEVCPRQMPTLGQQLVRSPAFSLDLRGRDPAAFVREVEDEAVRIVGRYALRTEGEDVFARALGIFGANAEGYRGSMAKERSDPPRGRRRHGLGLKQDHGAGSDVGQLAVLPAPVAATSPTTAVGAKGASQDPWAAFCASGAISLATTAKDVAGSVSHQLRHALQQLKHATDFADHVASGALTLEFAAEIERLRAQHTDAVREKSAAENKSHKLTERRRPKLARAEASLARQRAEELEARLNSLHNRVDRTEASTRTEVERTHAQLVDAYRELGARTAAFEVFGQEVGLRFLEWLQEELGVLPTIVTGLMSFASLVTCEGAVNALSREGCGHFEVVDQSDEGFERKIF

SEQ ID NO: 53025 - protein, 58 aa, Zea mays
  Coding DNA Sequence Number=SeqID_9650
  Subcellular localization annotation: CTP_CleavageSite=36; ConfidenceScore=5.31e-01
PTTAAGSSAAGSTTAFEASTPVGAGAGTGSSPSPVSAGVDKCHTRISGHQDPSANIIT

SEQ ID NO: 53026 - protein, 213 aa, Zea mays
  Coding DNA Sequence Number=SeqID_9651
MGKRKGKKKKRRNSPANWARGGDFGPLSADALAAQLAQLQGSDGGGRRRSAGPPAREREGADGVDGNGGGERARPGPDGGELRGGSPPPVRFFGGEVVAKYGRVKWVTGVGLIGPTGAYGGRSAARWRVSAVAKPPVRFPAIIEWGKWRVVNVRVWRSSWHNLIERKIAREGEGSSPGQGARGGRGMGETANTGELAMMAGMALTPIGMARAG

SEQ ID NO: 53027 - protein, 263 aa, Zea mays
  Coding DNA Sequence Number=SeqID_9652
MELSVDDYLVGGVAMFDAHTGLAPAGAESGQLAVVSVAESAGAAAVTTVGRIERLRTQHTEAVRDKLAAENRSHNLLEKLTAVEAEKDNLSRQLAEERDGAEKARAEVQTACAEASLALKRASNVESGLKSLRGYVNMMETSTRVGVDRAHALLIDAYRHLGVRTALFDKSGEEVGLRFLGWLQEELETLSSIATGLMSYTSLVTYEGAANALSREECRHFKVFDRVTEDFDRGIFQVGYEVLKRSIGALYDRMWGPHGRDTV

SEQ ID NO: 53028 - protein, 224 aa, Zea mays
  Coding DNA Sequence Number=SeqID_9653
  Gene Ontology: Cellular component=intracellular; Biological process =signal transduction
  Homolog annotation: Hit_ID=Q53LV1; Match level="QueryCoverage=65%, HitCoverage=26%, E-value=4e-29, Identity=55%"; Hit description=Rac GTPase activating protein 1
  Pfam annotation: Domain name=PBD; Domain location=108-152; Score =40.3; E_value=7e-09; Accession=PF00786.19; Description=P21-Rho -binding domain
  Subcellular localization annotation: CTP_CleavageSite=50; ConfidenceScore=5.49e-01
MTEVALLRGPTNLASTVSRASVSSPSSTLCYLANADSDVLLRSGSPERTAGSARSRRLLEQRGQEAVEEEDERWSFLALLFELLQKSLLGCRTVGGDGEGEHGGGGMEIGLPTDVQHVAHVTFDRFHGFLGLPVEFKPEVPLRAPSVSKTKVIKLDGELIKPFEEKYQKDAYTYQARHGAKAKAKSQTKHTQKHLESWSSDNMTLLSEDIRLSNEALSDKSNEA

SEQ ID NO: 53029 - protein, 720 aa, Zea mays
  Coding DNA Sequence Number=SeqID_9654
MQPRKAGPLAKKCDESLQASANTPFEARGLLSGTIIRGTLKTPNFQLEDGELRSARPRARTRAKSRKTANSAPHDPGLGLGLSPGRRRTPLRPTQGSDSGLSPRRRRTPLRPTEGSDSGSAPEDDELRFARPQGSDSALASADDLRLARPRGSDSASASAMEDRLDLGFGGASASPNLGRRPATSTGGAIITLPRADSGRREQDRLRRSSDGLNITPAGCQNLSGCHIGMALLEEVGRAGTRTRQALSWGRSLPSPAWTLVTPYCKRTRPGRGTNTKAAGFPPLSRWPPAASLLPPFTLALALDPSGLGHTATLTRRPREVELRLSPASTPARMMNILEAEGGTKIAARLASPHPGAGDQRAKEAGSHAGGMQPRQVDALLRLPTRPAWRPRPTRHATGAPDASCKQLHRHLRHRRASSIAEPIPRLEATQRTTQQRQPGAAVNAAKSGPAVMTVAGGREQRSRRQPSSRPIRGQQENPLSRREGNAPVIRSSNGSRTRNGYPANHSPRRINSAAGQAALLAGEAGDASPSPLAPRRVRQPPQIAWALHPLLVRGLKAGPPKGSTAASGYSGSAPITDQGLRSRGTLGHFRDQRERSCNGIPSEGGIEPSDPVARGPGPADHPQLTGDTMFDAHRGQHGAFPLLLAERRRRGICKKAESVPDRPLALCRGSGAALANPALAEPLTASTYQPKNLGPDRTPGLRPARMREQPDQPKHYARH

SEQ ID NO: 53030 - protein, 218 aa, Zea mays
  Coding DNA Sequence Number=SeqID_9655
  Subcellular localization annotation: CTP_CleavageSite=44; ConfidenceScore=5.77e-01
MALVSGGPRTNATIVAIPTTSLPAAPRRANKSLARATITLVGARASTPPASTSPREDSTRRRSRISTFRSDLDHDPDDVVSYLSDEETERRVEDKLNKLCFIADTAGGFCTMALGEDAVSTSDDKDISDDTTSEALPSTDDLVAEIEELKASLASQDKLLRQAAFERRQDTRGHICMAMEIEKVSNNLIQHPMKQMMSSTSSKYERCFETKKRRGTNE

SEQ ID NO: 53031 - protein, 145 aa, Zea mays
  Coding DNA Sequence Number=SeqID_9656
MVGYLHTLDNHYDELSSHCTHLNSRVESLERQVKELKQEKASLQESLNIAEGEEANTRETYRTLKMDYDKKLKKLAPKKKIHKKTTNQGCQTEKKKKAPLALPPPKIDDWSDEEDISLASLDDLLKAFEDTLDKEFASTSGNALV

SEQ ID NO: 53032 - protein, 206 aa, Zea mays
  Coding DNA Sequence Number=SeqID_9657
  Subcellular localization annotation: CTP_CleavageSite=17; ConfidenceScore=5.15e-01
MASSPVFTVSPIPLPPRAPIKGPIRAPSSPHQLRPPPLLSLEPIELASPCCLPCPAEEGSDPPELLAPEEGQEPEPSEINLLCQESFDEGKSIFPLMHYLPISLYHCLSLEYGMGIELHVMNVVTSLLGLVIVSHLSPKGLGRFNDEEVEDFGGLESSLTQTEDAGTGAEEQSVPQAGPGEDPTTMTAPPAKTLQRRLLRPARTLQ

SEQ ID NO: 53033 - protein, 111 aa, Zea mays
  Coding DNA Sequence Number=SeqID_9658
MKAPALWPAIRLIRWKKTAIHFRASRNRRSSFDDQEIELFEFYEAEDPKHLCGEGKNWGVVRFAVVPLMGLGVCGSLYQGDDEDDVYDYGNGKEGVEADLQEFHDVNEFED

SEQ ID NO: 53034 - protein, 145 aa, Zea mays
  Coding DNA Sequence Number=SeqID_9659
MDLDAAQRRRQGCSPVGEAVPAEHGEGVARQVLRPGAMRARASRPGARPRGLPGSRAVDIYGKGRELLVVGVGGVDHQEQERRGVAATRKGCYKGSEQIVPRNHYTTAPLVITRDTRVTSPRRLIPASAIKNISKNMKETQPNLY

SEQ ID NO: 53035 - protein, 174 aa, Zea mays
  Coding DNA Sequence Number=SeqID_9660
MTLHVWHLLREAFQVGDEVLGLGEGLGVLHALHVAFERVFVCADDGDDPVGARHLELQVGSSEPDHLERQSLPSEVGGRSEADGKVESSEGLDALPGNDPVEGRSACSDGGQIDTQEPEGLGVDDVEAAASIHKDLGEPDIADDGVDDERVFPRARHVVGVVGLVEGDGLVGPV

SEQ ID NO: 53036 - protein, 268 aa, Zea mays
  Coding DNA Sequence Number=SeqID_9661
MTRRTDYAGSVGYSPCVWQGARRHDLRRRVRPRKCALGPFLSILVIEYQHKCFCVDLCNVVDKVQIMSKVLETGENKLERDSFVSAKASSVWVHRTVRWCTGQCSVCQAGSGELAALGKELMAYDYNSPDCLVCTGLSGEPTVSRANGRLRDPRGTRGRANSREGAPDCPVCIGQCPVRQRLQDCQRSASPKKERNPHRTVSGGAPDCPVRQTTEGKNCLPRLLSTAPSCLGAIKGAPRRMEEYTKYTQSIPKHQDFDSTHLFLRDSI

SEQ ID NO: 53037 - protein, 97 aa, Zea mays
  Coding DNA Sequence Number=SeqID_9662
MGMLLDVKKSSHKKHTNTHDNDSTDKNGEPDVGGDHPGSIHTENEQIGEPRPKRSKRLMKSITDKELAAAAGDEEPAENHRAHDYDGTEEVQDGTAA

SEQ ID NO: 53038 - protein, 335 aa, Zea mays
  Coding DNA Sequence Number=SeqID_9663
MSMNYEVVETRRTPTSPTATRLLTKWRSISMCFALVLHGIGREVDHANVVEVDQCGASEGGVELLEQLTEPGRLGHTVGHNAILGLNAGARDDGLSLKDQKTRSRRGPNKKTIIEDTVEVAKNPLRSGEVGLPRGVHVKAPVLDCVGDVGSSEVWRKRGGVELLEQLTEPGRLGHTVGHNAILGLNAGARDDGLSLKDQETRCRRGPNKKTIIEDTVEVAKNPLRNGEVGLPRGVHVKAPVLDCVGDVGSSEEEVDDVIAAPKDEQGRVRLGLDEAEGEQVGGKVTVPSLWRLPKAIQERLSLHTIPERVVDKDDGLAAVHRLIKSAMKEGLFDV

SEQ ID NO: 53039 - protein, 107 aa, Zea mays
  Coding DNA Sequence Number=SeqID_9664
  Homolog annotation: Hit_ID=Q6J9V9; Match level="QueryCoverage=43%, HitCoverage=25%, E-value=5e-07, Identity=48%"; Hit description =Putative uncharacterized protein
  Subcellular localization annotation: CTP_CleavageSite=61; ConfidenceScore=5.41e-01
MATARGIDPFLKAAPPTRILKRHGQSLRRRAPGSSPYDTGAGSHTSCKLTRNGRSQTTACEAGTGKGDISKGILLREGSGPRALLLIRGSKADPSEGFDSHPRALGL

SEQ ID NO: 53040 - protein, 207 aa, Zea mays
  Coding DNA Sequence Number=SeqID_9665
MRGKANCCCLDRVQLSVLHPGDSRRLHQGVAQHVVRREGGTRVPGQSRSCSCGESGSEDLPVRFGAAAARWCGVGGQVAAVVGAEVVAAREGFSADETVGATCGRTPGSLALTACPRPSCGDVGEGLLTAAFALRSSLLLFSRPRRRSSSLLVQRSPASHLEFVVPQALWCGGCSYPQEWNQSPICNGTLSMGVCSLWLSRPEHLGI

SEQ ID NO: 53041 - protein, 55 aa, Zea mays
  Coding DNA Sequence Number=SeqID_9666
MESHDLRAEWESRLVGKRHYGTGGYEIDGSGYDYGTGEDEAVEGDFQEFQDYDEF

SEQ ID NO: 53042 - protein, 147 aa, Zea mays
  Coding DNA Sequence Number=SeqID_9667
MMLKSIRLSRLELIRSCADPLRQTFLPRLTKGWLYEISGPKPFARSSSLLVDPGDICPPQNPKSPLMHKINCHLSIKHLHQLKMRIRLKTMKMKIKRMSHLKRTTMIKGEMKLIKTRKMIKRFRVKDRRTQESTKQFKEITRELHSR

SEQ ID NO: 53043 - protein, 224 aa, Zea mays
  Coding DNA Sequence Number=SeqID_9668
MVDSNGRLQREQCADSSHRVRAAPEGAPDSETVTVRCPSCQSSNGDFHYRAVGQAHGTTSPALHPQGNAAHCLPGGLRPRRVRQVHGHGHAALRSHRLAANAGNLEAAVDKVQVVPRGGGEGPERGGRELVDFVREVGVEVVGDEGDGGERGVREMKLALEAPDRSTLEGDEVYELRRRSRVLMEPSEERGYRTDRGLAAEAARGGGWSGWHCNCWWLWKESGN

SEQ ID NO: 53044 - protein, 716 aa, Zea mays
  Coding DNA Sequence Number=SeqID_9669
  Gene Ontology: Mol. function=transporter activity; Cellular component= membrane; Biological process=transport
  Homolog annotation: Hit_ID=A2X8W8; Match level="QueryCoverage=51%, HitCoverage=35%, E-value=1e-152, Identity=70%"; Hit description =Putative uncharacterized protein
  Subcellular localization annotation: CTP_CleavageSite=25; ConfidenceScore=5.41e-01
MGPACDLLGPRRASGFASLLAALAVAATTSSPAGFVALCFVAGLSLANFVANQHWMSGIFVPSAVGLANAVTASWANVGSTAAQLVMPLVYELVLRLDVPITVAWRVTYLLPCVLLITTGLAVITFPYDLPCGAGVGGGAKTDHQCGTMRVGWQDGRSESAVAGGHHGGHGAVRRVCAGLVGVHLRHPGQLYDNMNKNELLLNGLLDISPSLILIEMDMPPSVSESSKTARCDGLIEKGLPDLDSLKLPHFSSSQAAPQLMVYSRRQVQKARYMESKPTHWHPAHTVNLKDILDVNKINMSLSVQHTMNFQNIREKNIRRSELVAIYAEFRRDWPEALKFYEEGVCVLREMIGTSTRLPPTQRLVEIKAVAEQFHFKISTLLLHAGKVVEAITWFRKHIKSYERVVKLLFFTGNGLAGSSLSLLAATYMREKRYAIECSSSMANLTTEVNGVPESVMPSVYVGQYVRLFEQGDTVSLLPLSDTEYTSYALSEAERFQDSYEIIALFRKAYESFQSLGATRMASACSSGMAIEYYAAGDFSNAKQLFDSVAGLYRQEGWTSLLWENLGYLRECSMKLNSPKDFISYSLEMAALPLFSGSGEENRENKIKSGPAGSPTISRRENIQQEVINVLERKQSSEGTYDGFNNAIEEVTHLDIDQISPLRMVLTASVAFHDQSVKPGSPLLVSVSLLSHLPSPVVVDQLEPWRFCSINLTVTL

SEQ ID NO: 53045 - protein, 162 aa, Zea mays
  Coding DNA Sequence Number=SeqID_9670
MNPRLLGFNVGWAGDGGGGQVTEAILAFGLLQHRCEDKVLEVAQRDHELVTEPAQQPRTLDLDPTGDPCCGLLSRITPHLELHRRLDLPGQGHVPCEGYKNARGLYNSIASSRRRPTSLFAMDLNHSRLDLLLTAGVHQHRQRSCIPQFVYRYFGRSRVNIW

SEQ ID NO: 53046 - protein, 130 aa, Zea mays
  Coding DNA Sequence Number=SeqID_9671
MGIRKKPEYVWKEYHENGVEKCSMAVYLGESRSYPNHPPFQVTFIGHRFPDTCQNVARKALKQLCLNYSREALSGRDPTEDDPTIVYMARYLHTLDNHYDDLSSHCTHLNSRVESLEQQVKELKKEKASL

SEQ ID NO: 53047 - protein, 110 aa, Zea mays
  Coding DNA Sequence Number=SeqID_9672
MDYDKKLKKLAPMKKVQKKTKSQGCQTEQKKKAPPAPPPPRIENLSDIEDMSLASLDDLLKEFGDTLEKEFGNKTTPTASGIGAGFPLRAKREAGGEGSETTSPHLRSYL

SEQ ID NO: 53048 - protein, 45 aa, Zea mays
  Coding DNA Sequence Number=SeqID_9673
MPWSSVYAARSTEGGLPLGEECGKEEEEGIEADLQEFQDFDEFED

SEQ ID NO: 53049 - protein, 291 aa, Zea mays
  Coding DNA Sequence Number=SeqID_9674
  Gene Ontology: Mol. function=DNA-3-methyladenine glycosylase I activity; Biological process=base-excision repair
  Homolog annotation: Hit_ID=A2XV82; Match level="QueryCoverage=55%, HitCoverage=44%, E-value=8e-46, Identity=64%"; Hit description =Putative uncharacterized protein
VSSRLAGVPPPLAIAAGRSAARGTRIETRELFVLIPAEPCGCDSAASGGEVLTPVGVWIEGPELCLRNAGLGEGAVGRFEIARSRWLGPMSGASARGRLSPASGGAGDSEPRSAGGRTRSVSATRGRKPSPRPGRDAAAAAGATEERKPAAVPTLLPSLSAPAGMRRQELLLRSGLSLDASCSSDASTDSFCSRASTGRIGRPAFGARKKKTLSQTDYKPVSMLEREGGLAYQTDAAGVKRRCAWVTANTGACFWFCLHVLAFDVGELESLPKNTQNGRRECYAPRILANL

SEQ ID NO: 53050 - protein, 315 aa, Zea mays
  Coding DNA Sequence Number=SeqID_9675
  Pfam annotation: Domain name=IQ; Domain location=115-135; Score=20.9; E_value=0.0048; Accession=PF00612.18; Description=IQ calmodulin -binding motif
  Pfam annotation: Domain name=IQ; Domain location=73-93; Score=25.0; E_ value=0.00028; Accession=PF00612.18; Description=IQ calmodulin -binding motif
  Pfam module annotation: Pfam domain module=IQ::IQ; Domain location =115-135::73-93
  Subcellular localization annotation: CTP_CleavageSite=50; ConfidenceScore=5.35e-01
MDQRSMTPGISSRLSSPPPAAHPSPPPAVVPSAAATPSHPPSPTPDAFTRLEEKWDQFVVMFHRYKEKTEKELQAAVRLQAAARGFLARRQVQSLRGEKHLVVASRATPWPSSHEQAVVRLQAAVRAFIVRRAVRKLHLLISSSLHQLAACASNHQVSSILFEPLQKSRSGYAAPCTAKEGRLPHSGNCLGAGQTQGLVPPSPFIQREVRISALFLGSRRTGGHSRSSNLYCIFVLNNKDRWDFSAASGYLGFRFYTFTSFAVCLGRTVHTVQALNQSNLLSTTPDEVAMAVEVSRGRDIDAWFKESYKQQVQKE

SEQ ID NO: 53051 - protein, 259 aa, Zea mays
  Coding DNA Sequence Number=SeqID_9676
  Gene Ontology: Mol. function=DNA-3-methyladenine glycosylase I activity; Cellular component=cytoplasm; Biological process=base -excision repair
  Homolog annotation: Hit_ID=A7PFS3; Match level="QueryCoverage=86%, HitCoverage=57%, E-value=3e-84, Identity=69%"; Hit description =Chromosome chr11 scaffold_14, whole genome shotgun sequence
  Pfam annotation: Domain name=Adenine_glyco; Domain location=34-210; Score=342.3; E_value=8.4e-100; Accession=PF03352.4; Description =Methyladenine glycosylase
MEGENVMHQGSLLTCSLIMKTTEIESAVEGYKFSQDPCYSAFHDEEWGVPVHDDRKLFELLVLSGALAELTWPAILNKRDIFREVFMDFDPVSVSKLSEKKIIAPGSPSSSLLSEQKLRGVIENARQILKIIEEFGSFDKYCWSFVNHKPILSRFRYSRQVPVKTSKADAISKDLVRRGFRSVGPTVVYTFMQVSGMTNDHLISCYRFAECVASSAGAAKLTDGSLADASDSNHATAEQKVNGTNDIELSRAIDELSIS

SEQ ID NO: 53052 - protein, 301 aa, Zea mays
  Coding DNA Sequence Number=SeqID_9677
MASGSRQCPSAQGTPGRDKRPLLCDPARDSASVAALETTHVGLATGHSTQSAAGLEGGVNAMFGAMNITGSDAAQDGRLRVQSPVGAPFLDATGVWSGAEMPDLLTGPAPFGMAPIPAPPASVARQMPLVRIEGPSQDHLHTNDTVILPTADNGVSMSTPSSEVQDEDSDIQAFLKEHFVPRSAPLLLINNEDSISAPSPVLCRDVEERGGLVADRGAAAGEVGEGADGDEGGVVLVSEEGHDVALHLHEVPSGCVLQDIPNGCKNIEDKSCVQINVCFTTHTFLRYLQAPWRTLEKENIG

SEQ ID NO: 53053 - protein, 147 aa, Zea mays
  Coding DNA Sequence Number=SeqID_9678
MALLKERLEEMILLKAGELVGGEESGLSRAKLTNQTGQRASPGIKEGERPKSGEGDLGLPVKFYRVRGLGELHGPMAELTEAPARLRGDWSGLATVAEALAAMASGKELAGAKEGWLAGDGRQALGACAANASARSGTWHSVEHEAA

SEQ ID NO: 53054 - protein, 107 aa, Zea mays
  Coding DNA Sequence Number=SeqID_9679
  Homolog annotation: Hit_ID=Q7XBD4; Match level="QueryCoverage=96%, HitCoverage=10%, E-value=8e-08, Identity=38%"; Hit description =Cinful1 polyprotein
MGYPKLECGAYPTMPKDQLAAFPGLTNSMKGLILSKAFKEQKDNDDDSTWIAFRNLQSKVIELWHKVEDKVEMLNTLANDLIVDRHEFQKISKQQNNKISKLQANNT

SEQ ID NO: 53055 - protein, 319 aa, Zea mays
  Coding DNA Sequence Number=SeqID_9680
GSGALQVVSELLGWPQDMEVRCQTSFCQNEDGFPMLLRACTVRLGIRSQPEYDGHSKTPAKSSLKALRTLCQLYEEEVADTPLRFFPPFQRDRPVWMARMCALEGKQILEDDPTVTYLTAYLLTLDAQYDFLARHHRQMIAQAEDAEKLNPLKQAKDEHVQKLMDAYLVTHNQRRALRIQEPAPSNPVQPRRAEDSQILEGHPVSIRGEKKAWELPEGAIVLEGIPVFPQAMDKQEHPESSQDPLPELFEPLTMKKIPAPSLEVKEEATSTPPAPLPSKELQEPVPLEEEFDLVLPSQSPQEEAVNISSLLTHPGDVSD

SEQ ID NO: 53056 - protein, 48 aa, Zea mays
  Coding DNA Sequence Number=SeqID_9681
MPKLPYAQLRLCSILRSLCVSSYNDFDSSEESMFEDFDNNRQADMYVV

SEQ ID NO: 53057 - protein, 116 aa, Zea mays
  Coding DNA Sequence Number=SeqID_9682
MALFSQSLRSLGAPDCPVRQAGSGELAALGTSTAVYGEVVGHVKPSTTYGYNSPDCPMRHRTVRVRCANGSGSATVGFAKEGKKSAPDSVRWCTGLSGAPVDRRQELPSYNALNGF

SEQ ID NO: 53058 - protein, 163 aa, Zea mays
  Coding DNA Sequence Number=SeqID_9683
MPPAPPQGIPAAGGDPNGDKDGDDAGGSLSHGTEHSKEPEPEGWIARPITRDAARGCHFHDALDTLLRWAFDRHTWSINGADGLDLKYYPRRLIGSAGGVIVSPVDEGNPRLSSMVNLAVVLHTELDHALDELGKVRAEVAELRAECAACHYLDGGSPAPIGI

SEQ ID NO: 53059 - protein, 102 aa, Zea mays
  Coding DNA Sequence Number=SeqID_9684
MAHRSYIDPPETFSPPFTLLCPWIHGLFPAIEFAVVPSPSLLNSGDLTAMERTGAARSRQFPPDNEQLMVRECVAEDPSEQQPGGEVGNMDDFEEFQEYDEF

SEQ ID NO: 53060 - protein, 302 aa, Zea mays
  Coding DNA Sequence Number=SeqID_9685
MLPSVGNEHDVYDELLTVQPLETVWAVTQSELVRSDPRVMKAGEHREDKEGECFVRFGHGDGLTASGITVKIRTCEERKRFGIRVSRRCALRMGIRKKPEYVWKEYLENGMEKCSMVVYLGESRNYPNHPSFQVTFIGYRFPDTCQNVARKALRQLCQNYSRVIFETPLRYFPPSNKNTPAWRKRLQALSGRDPTEDDPTIVYMVGYLHTLDNQYDDLASHCTHLNSRVESLEQQVRELTMEKASLQESLEIAEGEETNTREAYRTLKMDYDKKLKKLAPQEKSARRPEAKDVRLSRRKKPL

SEQ ID NO: 53061 - protein, 98 aa, Zea mays
  Coding DNA Sequence Number=SeqID_9686
  Subcellular localization annotation: CTP_CleavageSite=18; ConfidenceScore=5.04e-01
MQAACNRAKWTRFSDSQRASMEAQAHASRNRHAGCCMQATAPPLAPPSRLFGCGTNAATRGDPAHDPAAPAWRDGTGKGGYPRKGSFPVKEPGSEPPY

SEQ ID NO: 53062 - protein, 82 aa, Zea mays
  Coding DNA Sequence Number=SeqID_9687
MVGGFLRRRRGRRSRTADDAEQAAQQHEAEQAAQQHEAEQAAQQQAAPQDDDDQQQGQSGAASNNPPEGFSPTQPRPNRPPP

SEQ ID NO: 53063 - protein, 148 aa, Zea mays
  Coding DNA Sequence Number=SeqID_9688
MAVAGGQEQRPRRQPSSRPIRGQQENPLSRRCLWQEKRATLRLRHNDRVKKAGTGKGDTPKRILPREGTRLRASLLIRGSKAGPSEGFDSRLRSRGLYTHYWSEVRRPAPRKGSTAASGYSGSAPTTDQGFEGWPSKGSQPPQTQSEG

SEQ ID NO: 53064 - protein, 220 aa, Zea mays
  Coding DNA Sequence Number=SeqID_9689
  Subcellular localization annotation: CTP_CleavageSite=53; ConfidenceScore=5.63e-01
MGAIKVKAQSTQGTRSRLARAQPRAKAADPRGFTSRPRAPSSNGHTFGSPEAQSSQRSNLGQIATPTDRLGLNHDLEDDELRLARPQGSGSTSTLDDGLRLTRPQGSDTASASEDDLRLARPQGSGSTSTLDDGLRLARPQGSDTASASEDGLRLARPRARTRPRPRRSLHLARPRARTDHVTGGSQPLTEARRLQQGFDGPDNCPSAGLQLSSDGHDIT

SEQ ID NO: 53065 - protein, 162 aa, Zea mays
  Coding DNA Sequence Number=SeqID_9690
MVAPPPPPSAGEVTGQTRMLFFHHVGKTSLIPPPAGGLMAAIVAVAPRRKEYHVVAAVEGHELKTPETEHHPGLERLLETTHLELDGKLFVNTQQTPTWRANCRRFDPGGSLDRRVNCRRVSQPRWVGARRSMKGGKKQAKGIPAAFVLPCAQVGCLCSRGL

SEQ ID NO: 53066 - protein, 414 aa, Zea mays
  Coding DNA Sequence Number=SeqID_9691
  Homolog annotation: Hit_ID=Q6QP51; Match level="QueryCoverage=61%, HitCoverage=76%, E-value=4e-16, Identity=30%"; Hit description =Putative growth-regulating factor 1
MEAQAHMSCNRRAGYYVRETTPPLALVPRLLDCETGAATRGDPAHDPIVPTEHIGHGSVSRGRRRNGRYGKKWAGSNGGGRRDRRHLWQAKQATLHLRHNDRVKKGTGKGDTPKGILLREGSGPRAPLLIRGSKAGPSEGFNSRLRALGLCAHYWLAPEGFDSRLRACRARDDPGYVRDITKARAMLPRSRLSPLKGHGLASPEPSLGQRQPTPEDSRLARGPPQSNGHTFGSPEAQSSQRSNLGQIATPTDPSGAIETPPRPTPGLGLNHDLEDDELRLARPQGSGSTSTLDDGLRLARPQARRQPWPRKTVSTSPDPRARAQPRHWTTDSASPDPRARTQPRPRKTVSASPDPGLGLDLDLGGASASPDLGLGPTTSQGPLTEARRRQQGFDSSDSCPSAGLQLSSDGHDIT

SEQ ID NO: 53067 - protein, 452 aa, Zea mays
  Coding DNA Sequence Number=SeqID_9692
  Gene Ontology: Mol. function=zinc ion binding; Cellular component =intracellular; Biological process=regulation of transcription
  Homolog annotation: Hit_ID=Q5Z6R0; Match level="QueryCoverage=94%, HitCoverage=94%, E-value=1e-128, Identity=58%"; Hit description=Zinc finger protein-like
  Pfam annotation: Domain name=CCT; Domain location=397-441; Score =84.3; E_value=3.9e-22; Accession=PF06203.5; Description=CCT motif
  Pfam annotation: Domain name=CCT_2; Domain location=394-421; Score =13.2; E_value=0.085; Accession=PF09425.1; Description=Divergent CCT motif
  Pfam annotation: Domain name=zf-B_box; Domain location=19-66; Score =51.2; E_value=3.6e-12; Accession=PF00643.15; Description=B-box zinc finger
  Pfam module annotation: Pfam domain module=CCT::CCT_2::zf-B_box; Domain location=397-441::394-421::19-66
MIATTRGSSAKAAAAVGGKAARACDGCLRRRARWYCAADDAFLCQGCDTSVHSANPLARRHERLRLCPASPLQTPPDRSAAAAATATNKRERHDEVAVPAWFGRKARTPRGGHAKSVGQVALSRRLVVPHAAGGDSDSPDERNGGEEEQLLYRVPILDPALAEFCSPPPLEDAAGLALDASVCNEDGAIEDPAKPDPAAPLAQFCPVSGHFNFGPTDAELREFAADMEALLGHGLDDGNEEDSSFYMETLGLLDPMEVGDDATQVKVETDGSSACCEASGTLACGLELDLEASDEMLDIDFDYASPQDTATDERAASSDTGADAQFLQTSLSLTLNYEAIIQSWGSSPWTGGGERPHVKLDTRWPHDYTNMWVVGGVVGHGGEDLPGTPRLGMDGGREARVSRYREKRRTRLFSKKIRYEVRKLNAEKRPRMKGRFVKRATAGGSLAIAGLA

SEQ ID NO: 53068 - protein, 170 aa, Zea mays
  Coding DNA Sequence Number=SeqID_9693
MEEGILDVELMDHLVPGEGEGEDDTNGGELDDVAEGLIVVHSGALGEAPMHPIGLVAVEGAIRGQLVAKEPLAGDHVGAWWTRHLVPEPLSNRWQGETPRREGNILYWGGANHVFGPIVLGKGVGARETQLDAIGEKERTRGTTVELTTIVTLQGTDRVTKLGGYMWSGG

SEQ ID NO: 53069 - protein, 441 aa, Zea mays
  Coding DNA Sequence Number=SeqID_9694
MDFSWQATAFADHVASGALTSEFVAERQRLEGKIERLRAQHADAAWDKSAVENKSRRLTERLAATEAEKEDLRRELAAERKDTNRAYAEVQAAQVEAKLARAEASLARQHAEEMETRLGGLRDRLDKAEASTHAEVDRTHAQLVDAYRELGARTAPFEASGQEVGLRFLEWLQEELEVLPTIVTGLMSFASLITCEGVVHAVSREGYRHFEVFDRLDEDFEREIFQVEDPMLKRSVGALYDRMWGRHDCETVQERSDRAMDQMAHDEEVPTFGPAQATATGNTNFVAAATVVPADDNLSGSGSECFESDGGSGSSFSWTEESSDEGLDYFAALDVAATESSPCVEVGEVADLPSARTKCRRRRAMSKHSVGNFSRSGRRRRMGIERDRLRGDRNGKRELLTSTIRTSIGEGDLRNLFEGEELRIILFNYREMGIIPKVELM

SEQ ID NO: 53070 - protein, 84 aa, Zea mays
  Coding DNA Sequence Number=SeqID_9695
  Subcellular localization annotation: CTP_CleavageSite=14; ConfidenceScore=5.06e-01
MPMTSPSSAASSPSGGAKSGGGAYGSPPELQVPECPPSSGKDVYALGNTEYPQNIPPRGGYRPSLQKRLLQVRPVTRLSLRGPL

SEQ ID NO: 53071 - protein, 304 aa, Zea mays
  Coding DNA Sequence Number=SeqID_9696
MSSIPPPAGGLSAAIVVVARRWKEYHVVAAVEGHELKTPETEHRPGLERLLETAHLELDGKLLVNTQQAPTWHANCRRLETGGSLRPTSECAACPSPDGSSAWASAKGGSEVAGDGRERGENPAAFVFVPRPGRVGRRGGSSEAEVESVFHGRGRARAPGSGEAEVVRQRPGRSPSPGVGRSGVRRLLGLSPSPSPGSGGAEFAVFRGLSLSPSPGSGRAEFAVFRGLSPSPSPGSGGAEFAVFRGLSPCPSPGSGGAEFAVFRGLSPSPSPRSGGAEFAVFRGFSPSPSPGSGGAEFPMAPLR

SEQ ID NO: 53072 - protein, 526 aa, Zea mays
  Coding DNA Sequence Number=SeqID_9697
  Homolog annotation: Hit_ID=Q6QP51; Match level="QueryCoverage=15%, HitCoverage=55%, E-value=5e-26, Identity=54%"; Hit description =Putative growth-regulating factor 1
MEAQAHTSCNRRTGYYVQETAPPLAPMSRLLDCGTSAATRGNPAHGPTVPIEHIDHRDRERGYFERDPSPRRKRAPSPPTDQGFEGWPPQRGSTAAPEHLGFRLITDQGFEGWPLGRVQQPPQSTQAPRPLLIRGSKAGPSRFALPLTDLTGKQCRSPRSNCCATRQSEAGNSQVQPQAQQEAPPRPTLGLGLRRRSPPRPTPGLGPHLDLGRWSPPRPTPGLGLNPGLGRWSPPRLTLGLGLNPGLGRWSPPCPTPGLGLNLGLGRNRVLALPRPRPQEESPPRPTLGSDRPCHGGCIIILPLASSGYGGTRPASYPDSPRPDSCASTGLKRSSDDHDTAALMREGRAGGRADEQAHSLSLANACNPYCKRIPLAQNNTSRVFPLEPPGSKRLVFQCFGPVARQDRRVGPPRRGDFEDEENKYHRPWWCPDGLSHTQKHRVQRLRNLEEAEAKYLEVHRKAHPNLLVKVWCPRRAEQRSQKKEWCPKQQEADAEVDEEADETPLASINMGDEKLGYEFASADELE

SEQ ID NO: 53073 - protein, 328 aa, Zea mays
  Coding DNA Sequence Number=SeqID_9698
  Subcellular localization annotation: CTP_CleavageSite=41; ConfidenceScore=5.53e-01
MSSHFPHASRPSTFRAPEWGALVSLSSCRRWRNTTSRKLVPFSHRSASRIFIGQPGCIPSPVVTQDGDHQFDGGEKRAGLRPLPLPQFQGCSSSVLGRGVRRVGACLRAGSGLLLPSVIGGKGVRRSWRWQLPRVWLSGLSGSGAASGATSHRGSQKGFLRRRDSRCLPRTDLRLHGLGSLSSPLEWGRGRGPCHNSVCPEVIAAAVWPPGAEVVVAAAGAGGDKPPGVLSPRRPSNVGGCSYLRGRNRSSICNGTLSAGVCSLWLSGPEHESLGSVGLTARGFSCLVKETLGRSAMSRSRRQRRQHGQRQSWLEKKLRRPESGRAVH

SEQ ID NO: 53074 - protein, 509 aa, Zea mays
  Coding DNA Sequence Number=SeqID_9699
  Gene Ontology: Mol. function=translation elongation factor activity; Cellular component=eukaryotic translation elongation factor 1 complex; Biological process=translational elongation
  Homolog annotation: Hit_ID=Q5Z627; Match level="QueryCoverage=81%, HitCoverage=99%, E-value=0.0, Identity=75%"; Hit description =Elongation factor 1-gamma 3
  Pfam annotation: Domain name=EF1G; Domain location=348-456; Score =155.3; E_value=1.7e-43; Accession=PF00647.10; Description=Elongation factor 1 gamma, conserved
  Pfam annotation: Domain name=GST_C; Domain location=192-289; Score =47.9; E_value=3.6e-11; Accession=PF00043.16; Description=Glutathione S-transferase, C-terminal domain
  Pfam annotation: Domain name=GST_N; Domain location=95-168; Score =68.2; E_value=2.8e-17; Accession=PF02798.11; Description=Glutathione S-transferase, N-terminal domain
  Pfam module annotation: Pfam domain module=EF1G::GST_C::GST_N; Domain location=348-456::192-289::95-168
MWNWSFNYFHVQIESMHSEVYHAKADRNMVEWAQAMGGMNALVLNNTTGRGNYVVKRVLPMYSVGHGRVGPSNVRDVGAGGATDSLVQSVRWVNQVLHSGAGNKNAFKALIAAEYSGVKVELTKDFEMGVSNKTPEFLKMNPLGKVPVLETPDGPVFESNAIARYVARLKDDNPLFGSSRIEQAHVEQWMDFAATEVDPGVGWYLYPRLGYIPYAHTTEETAIASLKRSLGALNTHLALNTYLVGHSVTLADIVLTCNLYHGIARILTKSFTSDFPHVERYFWTMVNQPNFKKVIGEVKQAESVPPVLKKGVPPKESKAKDVKKETPKEAPKPKVVEVPAEEEAPKPKPKNPLDLLPPSKMVLDDWKRLYSNTKTNFREVAIKGFWDMYDPEGYSLWFCDYKYNDENTVSFVTLNKVGGFLQRMDLCRKYAFGKMLVVGSEPPFKLKGLWLFRGQEVPKFVMDEVYDMELYEWTKVDISDEAQKERVNAMIEDQEPFEGEALLDAKCFK

SEQ ID NO: 53075 - protein, 218 aa, Zea mays
  Coding DNA Sequence Number=SeqID_9700
MDCPIYAPRGYMTLLPGTALLRRKGFGMGKILFTGCVSASVLDDVGMSFAADVKKRCPRSSSASGEAEFALEGQSVVLDVLSGGDDEYMPKASNVEDQAQDGDHESLRLEGLDEAEDSFVPAAEERAEGLTGGEIAPVKGPRAGELVGDEGSGLSRAGLDSRLEKLHVSSGKLSKGLVEAEGLWKWLDVVAGARVARVGGTELAGAKGGVWPANVSVE

SEQ ID NO: 53076 - protein, 325 aa, Zea mays
  Coding DNA Sequence Number=SeqID_9701
MAMSGHDARRVCGSFATSTSNWQGVGEQLHPRRICYDYHFLKFNHQFKCTDKKPNSTTMMNKDTGIQSAITNGTSVPSPRVRITPQDRGTRGAIANRRAARRRPIRQQRQPPSPRAAKQLRQRLRGRCYDRRALTRRGREPAIQAGRRRPRATGGIGNLIGREAIFGCRRLEARRQVFALVRTGQSVGAALAGRSATVVRTEGVVLRPSRVIAAHLSRHGWGKSPRNWRMPFSPRRWGKKRAADPRGGSPPTRLILHLGLDDENPRGRGRGRGRDPTRFPPPSSRRSPSWVTAGGGVQPGCMMKILEAERWLKGTNSPGVAFLQR

SEQ ID NO: 53077 - protein, 414 aa, Zea mays
  Coding DNA Sequence Number=SeqID_9702
  Homolog annotation: Hit_ID=A7PYF0; Match level="QueryCoverage=82%, HitCoverage=88%, E-value=1e-126, Identity=66%"; Hit description =Chromosome chr15 scaffold_37, whole genome shotgun sequence
MAVPRPRIRALRRGTLLLFLLVPLIYSGTDLSFLSSSSPRNEDAPLTIQSAPVSRLQPWAPEKGVCLPPPTAPKRPDHLVLGPAAGQGRPDRLQCRGLRALNKIGLSSEENYSGEHVSFVTVFTTYNSVSAGDGNVPPDSVTVGNSSYSKIERSMTILNTFISFIKVSMPRSDVIILTDPGSKFSVNQGSATLLPIEGNYSRGNLMLQRIKTYIAFLEQKLVEFDRTERLNHFVLTDSDIAVVDDLGHIFEKYPHFHLAVTFRNNKGQPLNSGFVAVRGTRDGITKAAEFLKQVLKAYSLRYIKAARMLGDQLALAWVVKSHLPSALGKFSKHEAFTGEVNGTSVLFLPCAVYNWTPPEGAGQFHGIPLDVKVVHFKGSRKRLMLEAWNFYNSTSKMSDMLCLILRSGRTKYDF

SEQ ID NO: 53078 - protein, 29 aa, Zea mays
  Coding DNA Sequence Number=SeqID_9703
MADASQPGPGEPSPPKALSGGFVALVQGR

SEQ ID NO: 53079 - protein, 294 aa, Zea mays
  Coding DNA Sequence Number=SeqID_9704
  Subcellular localization annotation: CTP_CleavageSite=41; ConfidenceScore=5.58e-01
MPSHSPHALRPSTFRAPGWGAPVLLSSCCRWRSATSRMLVPFSHRSASRIFIRQPGCIPSPMVTQDGDHQFDGGEKQAGLRPLPRPQLQGSSSSLLGRRARRAGACLRVGWRPASSSGFWGWKPSSSSAEEAPSSRAREGELLLPSPGCRISSFVRATVASRTEGSHNTSYAARADGSEDLSVRFGAPGARWCGVGGQVDVTVSAEVVAAGESFSTDETVSATRGPTLGSLALMSGSCPSSGDANESLLAVASVLGPSLLLQRSLASHPEFVVPQALQCGGFFVPAGVEPEFRL

SEQ ID NO: 53080 - protein, 82 aa, Zea mays
  Coding DNA Sequence Number=SeqID_9705
MGLGVCGSLCQGGDENDGFGIDYGNASPLQPNRTFVEYVDVYSPLLYTPNPPSPGCSCCNHCSGEDEAVEEDFQEIQEYDEF

SEQ ID NO: 53081 - protein, 105 aa, Zea mays
  Coding DNA Sequence Number=SeqID_9706
MVINGQVELCYSSLSCFLLGPCKRTRLNNPVECQISVRELISQMADVSSQFIYSVAICDPYIHPAVEFRLEPTYFCFEIPYRIVASTTTIIMSWGQQGDMAHQSV

SEQ ID NO: 53082 - protein, 46 aa, Zea mays
  Coding DNA Sequence Number=SeqID_9707
MAMMGSTLEKMYLCQVMKQQIFVASVPRWCPKKKTKTEAVGGSVLL

SEQ ID NO: 53083 - protein, 46 aa, Zea mays
  Coding DNA Sequence Number=SeqID_9708
MAMMGLTSEKMYLCQVMKQQIFVASVPRWCPKKKTKTEAVGGSVVL

SEQ ID NO: 53084 - protein, 90 aa, Zea mays
  Coding DNA Sequence Number=SeqID_9709
MYHHKMVNTRKGGGIDLPPNRHTRRIFRQQQQQPEMDPPQPPPTGADPAVVAQMWIMQHMADTMADMHAQMQQEHQEMRQEREYICQEMR

SEQ ID NO: 53085 - protein, 149 aa, Zea mays
  Coding DNA Sequence Number=SeqID_9710
MERPSLDPFLFYNSFSFSLTLNHTQMTSHGSSDGGNAQSHTDGLAREGFPHILWELFEKHRVPRCRVRMTLEPHPLQLGWHSLDSKSFGYRAEETIEAIALHGLTTFCGFHPLELSTHPIGLFPADNEDDPMRKDRVEHAKDIWALYPG

SEQ ID NO: 53086 - protein, 204 aa, Zea mays
  Coding DNA Sequence Number=SeqID_9711
  Subcellular localization annotation: CTP_CleavageSite=66; ConfidenceScore=5.60e-01
MARARPLRPSPGMLPRPAPCPARPGAARLGTPARGHGARPTRFAAAPGSPPSRARPGSTSRPSPVRARSRGGARLVASPAAMAATAPALGPGHGGVPTRPGLAPPGALPSPRPGGARFRRGSASPACGARPRRGALPGVASRRGGPAWLACAAASAAPAWLTAPSRDQRGSSSLGTATRTIARRAGLVRGEMDCGHTGYHRIES

SEQ ID NO: 53087 - protein, 59 aa, Zea mays
  Coding DNA Sequence Number=SeqID_9712
MGLGVCGSLCQVWVRPLGRSARHCGTGGYEIDGFGYDYGIGEDEAVEGDFQEFQDYDEF

SEQ ID NO: 53088 - protein, 117 aa, Zea mays
  Coding DNA Sequence Number=SeqID_9713
MGSPGSGGVDGQPASQVLLRLILIEVGDLEVRGALNGPKTWSERRYSTPVLLPTMMMSVPGRGSCRRGASTVPGSCRQLKPSPTQLWWFDFAQGRHDPGHTLLGAESRSRAVASTKH

SEQ ID NO: 53089 - protein, 99 aa, Zea mays
  Coding DNA Sequence Number=SeqID_9714
MATMKRATAAAEKHRREIEGATGLNPNQGDYEQLPGNHPKLHGPIPRCQHQRTGLAPAAAATGQALLCSRHVAPGCAAATNVNSVEAVSTGDEWTEPQT

SEQ ID NO: 53090 - protein, 148 aa, Zea mays
  Coding DNA Sequence Number=SeqID_9715
MGKSKKGGSSSHHSGDKRKREPTPPSEDFGDSEYSEEEFSESKGLPVHTSPPVSFDDSDDSQGITAEVWTYIRVVKRSRLEGSDESEVSSDEEDSSDSSEEGSGGDDDDEGDSKGGGDGNGNGDGDGGKGDGKGGSDSGKASGKAPLA

SEQ ID NO: 53091 - protein, 48 aa, Zea mays
  Coding DNA Sequence Number=SeqID_9716
  Subcellular localization annotation: CTP_CleavageSite=28; ConfidenceScore=5.17e-01
MGAVPGRSSMANSTFRSGGIPGGTNSVTTSSPSGDTNLIVLLSQLITA

SEQ ID NO: 53092 - protein, 196 aa, Zea mays
  Coding DNA Sequence Number=SeqID_9717
MALSFIKWTRKVHSSMDESRKRSMLSNLSALKILGQSQLHTTISLNPDHIFAWNSHGKDRTWRREETVHGIFAEIYTLRRTNMPLNTDRSKPPRVRRGQALGSVPRARPHARPLAPSAAPMPMPVSCPRVAIKPAFMHDHLPCHPLCTAPSLPEPARSSGNLPATRQSRPRAPTVTKPLPPTSARSEPSDSFLKRP

SEQ ID NO: 53093 - protein, 305 aa, Zea mays
  Coding DNA Sequence Number=SeqID_9718
  Homolog annotation: Hit_ID=Q10RI3; Match level="QueryCoverage=29%, HitCoverage=12%, E-value=5e-20, Identity=56%"; Hit description=YT521- B-like family protein, expressed
MLQPFLDVVRSVDADATITSVSRYYSSSLGCLTSVLPSRGRRGGRWISLDSIGLGRDHRGQKLSLDSQPKPADATQPAAATAKKGAAASQPLSVAIPPEPSITPVIQDFTDPNLFYLPAYYYGGYGSSMSEWDDYPRYLNSDGVEIAPKIQFVFSADGIDFIMEYISEPLWGQHCRNKRAPIVPFDGSYLPYYAANITSRYFFTKHKGIASQIEIENPNLVKTKNVKVKDIDTAYCSSQVHGTISQRRLFDFVPLWFVVVLNWIMCVLLNWMSGFTHNLQLQEQFFTNTTSEHRTSKTETPSTTL

SEQ ID NO: 53094 - protein, 120 aa, Zea mays
  Coding DNA Sequence Number=SeqID_9719
MERRRYEEDEDVRRRNGGGAYVTFAGGMKMLGSNRTRYTYFFGCAFLSSDTIKTSKQDTIRIESANGRFEYNVGPSFNTISFLRDYQRIADAINIVEDKENNGNEQNTPKEMKFDYNIEL

SEQ ID NO: 53095 - protein, 143 aa, Zea mays
  Coding DNA Sequence Number=SeqID_9720
MADLCHVSQPVDITDIKKQLVQGFTQEIRQRRIVANLTGSKVFTSFLRRDDAQDTKTTDQAKDGDKKSFEVPSAREKVKETRNPKPEVKKKTYKVKVDRVKSYESNIDLKHAKLGKTMKKVKESTILSSAGGETEKLGEEQER

SEQ ID NO: 53096 - protein, 918 aa, Zea mays
  Coding DNA Sequence Number=SeqID_9721
  Gene Ontology: Mol. function=nucleotidyltransferase activity
  Homolog annotation: Hit_ID=Q2QTU0; Match level="QueryCoverage=89%, HitCoverage=90%, E-value=1e-178, Identity=42%"; Hit description =Nucleotidyltransferase domain containing protein, expressed
  Pfam annotation: Domain name=NTP_transf_2; Domain location=100-194; Score=13.3; E_value=0.007; Accession=PF01909.14; Description =Nucleotidyltransferase domain
  Pfam annotation: Domain name=PAP_assoc; Domain location=270-355; Score=2.3; E_value=0.031; Accession=PF03828.10; Description=PAP25A associated domain
  Pfam module annotation: Pfam domain module=NTP_transf_2::PAP_assoc; Domain location=100-194::270-355
MAAAAYLGGRGQGADGGWFVPGAGDGWAPPWGRRGGGGAAAAAAAAAGERETLAVVMARRAPPPSAIRRDAVRVAEAAAGEVLLRVHPTREAERRRQDVIAYLTRLIGSSLGCEVFAFGSVPLRTYLPDGDVDITVLGNTWLNSTLIDDVRSMLQSEQENCDAELKLTGLHFIDAEVKLIKCVIENIIVDVSFNQIGGVSTFCFLELVDRQVGKNHLFKRSIMLTKAWCYHESRILGAHHGLISTYALETLVLYIFNMFHKSLHGPLEVLYKFLEYFSKFDWDRYGISLNGPVDLSSLPSLTVEPTEVQGELLLGKDFHQGSLDRLVVIPNEFDGCDTQFRQKFLNIVDPLKANNNLGRSVSKANFYRIRSAFSFGAQKLGQILLLPSEYICDEIYGFFSNTLKRHGKGERLDIDASSAFQPLLGPESTLSEDGSMFKSSCINEGENGSSCHSSELPDMGSSVTDVHKNSGKYLPGLFQDLPWNKIWFMEYASDLKENPQTSASSRSHSSFSQDNGNGNSKECFENYAAEEGLHQISRLNVPQQIYAGHPSHRLANSTSANILDFSSSCFVDESDWTAPLAGKKLLPPLLLSNMLDLSGDLELYLGCLRKVQYHLESLFDELLQAVEEACFADVLDEDSFNMPDMILKLKTSTRSSSLPLDSSTDSERRKLSPVYCSHSIGDDSQQSHGEAQVDMFWQQNVPLSPNGSTFPSSPSTNSDNYPVSWFCFSPKTHGTGTYIPNVSYQTYRERIMLERDTIRARKQRQRLPGRRYYSAEQGFSGSQTEEDTIAQSATNQSPKKQNSVQQSGYSGKSTVPDADFVCFREHVATEGGTKQLAVGRETMPPSSSSGIALAQNGQGNRICEPSSPATADLLHAAESLEFGSLGPFSLGLVSTSTQFEEAFPALPTRKRAEGAENH

SEQ ID NO: 53097 - protein, 133 aa, Zea mays
  Coding DNA Sequence Number=SeqID_9722
MGTFDTQPRLGLRSQGTLGHFRDQRERSCNGIPSEGGIEPSDPVDRGPGPADHPQSQSDHSHFAAPLTGLTEGQRRLRRSDCCATRQSEADRQPGPASGTIGNSTSLDPGLGLGLSPGRRRTPLRPTQGSDSG

SEQ ID NO: 53098 - protein, 121 aa, Zea mays
  Coding DNA Sequence Number=SeqID_9723
  Subcellular localization annotation: CTP_CleavageSite=18; ConfidenceScore=5.45e-01
MPQPAAFVSVQPSDGQPTPSNVSNKNMKHGGKVLFLDGAGEVAITISRNSQQPLSTVPAPERKTLKGTESSAPSVPPDGGVSKEPKKGGDYPMGEFLSAYWNHSSGGQLVQHAAHPRATGL

SEQ ID NO: 53099 - protein, 442 aa, Zea mays
  Coding DNA Sequence Number=SeqID_9724
MAGKSQKETTKLASRQLQTRPRRHIAAVVLDLAPQPRPDSASSATLLLGSADGGIWHRRTWGDTAVTTIVNLAEEAKLAREGVKAPGHQILTICKSLVAGGSAGGVLLVQGIGGFRDAWHGGRGTSGQLGNGEIVDRRFCLQEAGVIHDSPVRRSGVHNLHGARFCHLPLRCINDRGFCLSLTLSRLPPLHPSTSPLPQPWIHRTPRPGAAVPRHRRPGSTSSSSPHHYAAHLHRAPVPVSGGGYGAHAGGSEVRERDPHGVPVPIRARDAHGRCSGSLESRPRIPIRTRRMTSIPRPAGDAADARVDASTSAASSRSRRALAGSEVRERDPHSDREARGGSKVWEGDPHGVPVLVPIRARDAHGRGSGSLESRPRIPIRTRRMTSIPRPAAYLEHSSKFCYMFRKVVFTEIAIPIVPTVRVVITFTKFVPLIEPEEFFTID

SEQ ID NO: 53100 - protein, 150 aa, Zea mays
  Coding DNA Sequence Number=SeqID_9725
MELLKKHGLVVDGRRHLQRRVPTVVERSVSSAATSDSNSVTVSGDPKQSNHIRSHASEEEGERRGSPYLLELNALLARGAGSMRQVWGEGAWVDGVVAVRGDQRERRYGVREARVLRAVEIRREAWDEGLRVNPRKTEGDFCKKMTHDNR

SEQ ID NO: 53101 - protein, 257 aa, Zea mays
  Coding DNA Sequence Number=SeqID_9726
  Gene Ontology: Mol. function=binding
  Homolog annotation: Hit_ID=Q69NX2; Match level="QueryCoverage=83%, HitCoverage=17%, E-value=1e-61, Identity=58%"; Hit description =Putative fanconi anemia, complementation group D2
MPRFGTPPARNERCLDDWSSHSSSAGNPDIPYVVVSKSSIVTVVCKEILGYYRKLLGIPDLLNQPNMSILKQLLQTLQPTENFDDVLFEFQSSLGPCNVDYLYYGACKMLEDIMDSVSSFSYLLSSDVLITIQSIVNSVVVLLDKSGEPNGENIHMGCSKAIISFLRKRLGYSAHKLLSADFPSEDVGKDGRGDFIQKILQIYLRNSDSTSYLLAEIGRELPKVGHLFFSSDALELCICHHSALKRTSGIILNPAEE

SEQ ID NO: 53102 - protein, 218 aa, Zea mays
  Coding DNA Sequence Number=SeqID_9727
  Gene Ontology: Mol. function=nucleotide binding; Cellular component =plasma membrane; Biological process=small GTPase mediated signal transduction
  Homolog annotation: Hit_ID=Q10DH8; Match level="QueryCoverage=28%, HitCoverage=30%, E-value=8e-14, Identity=69%"; Hit description =Expressed protein
  Subcellular localization annotation: CTP_CleavageSite=47; ConfidenceScore=5.31e-01
MLTSILLPTSTATPPLPPRLLPRPRHVLLGRNDRSPTVVPAGKPKLVGEKSKGAQRLAYLARRGPMEIQHHRGWATPRWRRCRARRRGIYSPIKRAMKAGPGSVCCCAAKAFRVPMLDTKERFDSAGVKLIAIGVGTLAKARILAEERLPFPLEYLYADPDRKIPSPHYRDSFGTSGRRVLIGDSGVGKSNLLSRFTRNEFSLESKSTIGDEFANHSL

SEQ ID NO: 53103 - protein, 970 aa, Zea mays
  Coding DNA Sequence Number=SeqID_9728
  Homolog annotation: Hit_ID=A3C392; Match level="QueryCoverage=84%, HitCoverage=87%, E-value=0.0, Identity=56%"; Hit description =Putative uncharacterized protein
  Pfam annotation: Domain name=DUF1723; Domain location=195-244; Score =65.6; E_value=1.7e-16; Accession=PF08330.1; Description=Protein of unknown function (DUF1723)
  Pfam annotation: Domain name=DUF724; Domain location=776-968; Score =134.5; E_value=3e-37; Accession=PF05266.5; Description=Protein of unknown function (DUF724)
  Pfam module annotation: Pfam domain module=DUF1723::DUF724; Domain location=195-244::776-968
MEKDAKAAAFQVVRYEKVQGHIKVGGPLAGQGLGHGHALWLYLAVVMLLIVFLLGLIAFGFVVTAGGGGAQVYCRPYREYLTVDYSPWLQSLPARRRLLGGHRTREMRAFNGRRLHDPKPPSFLPLPLAPRTTTPPPPPPSSPPHAIPPLNFRYLTPCPRWSAWVATALSDPVFAPILASSAISGAVAASTAVVSPDRAALSALLSLWDPDTHAFRLPAGPATFTLEDALVLAGLPPAGAPLDRTLTPEEDDLRVRLVVEREKIKELHPCARAARRVSAEVWLEWFDGGGIRPGEDDELRWLGFLAYWLAFFVTPRLRSRGGELPERVFAHAARLSLGERIALGQGMVANLYAEMDKIVTCTVADGVCGRLDVCVPVWMLQVWMWERYKRLCPPELKAPQFPVSNVRVLYWSRRKKKSTSEEALKILLDEVCFEWRPYRHNSLNWMEPKWFNKDTILVTCHGKDKPEWLLDYIAVISQTMLTGFHSDDTDNSVLYNPQLVARQFGYDQAAPVSIVREIHFEGIELWIPSIGRYGMPGEDYVAWCSSSGQFYKHQNDVQYGCSVLRNHENGAISSQLNVNEKCVVVPTLDQFITQVTRRDHINYIVEGQPEKMDNGSHEDETEVIVCGLEACVKDSRTTSVKQNVQKQRDKFAEDGGDSKKKRKVESNTKRSSLQLEGQKYSSLQKALNSDSKKCEELAQVDSDDECIVLEQPKNKCEVINLDDDEEQSVSNREHHNMQLVLELEEFVRSGLLSQWEESSDEDDVSGSKQETQKKSNNDPYAEAAMREYPLFFEFIPQKPHYRGFVNYDETLGDLPYSGLWFLLIGLAKEVLKTSCDTDASEIAYLMKKAQHLEQLGFNVTHLIARLKEPQIRLKKLQDSRARLDHAREKEEGNVVESLSSHLNKLKGNIRMMDSHLDGTKQAFISNIQDKLNEGINLASLEKEVETAEKCCQAMKDEVAAMRMRYSDRGI

SEQ ID NO: 53104 - protein, 211 aa, Zea mays
  Coding DNA Sequence Number=SeqID_9729
  Gene Ontology: Mol. function=protein tyrosine/serine/threonine phosphatase activity; Biological process=protein amino acid dephosphorylation
  Homolog annotation: Hit_ID=Q9ATY4; Match level="QueryCoverage=28%, HitCoverage=9%, E-value=3e-23, Identity=88%"; Hit description=MAP kinase phosphatase
  Pfam annotation: Domain name=DSPc; Domain location=27-151; Score= -11.5; E_value=0.0013; Accession=PF00782.11; Description=Dual specificity phosphatase, catalytic domain
MDPMKAPPARSPAERRKHTTGATGYEFVSISLPISLLMGSNGNPTDVFFLHGYGFGQVIPNGFLPIAISSSVRAGQRVRAVGVVAAEILYDVFDYFEDVREQDGRVFVHCCQRMWRSTSLVIAYLMWREGQSLDDAFQFVKAVRGIAKALCCRFFGAPNTQQEPWWCPLVRRGRSAALGRTISSPGGKDLKVLRVDRSPGASPDNVESPRN

SEQ ID NO: 53105 - protein, 360 aa, Zea mays
  Coding DNA Sequence Number=SeqID_9730
  Gene Ontology: Mol. function=oxidoreductase activity; Cellular component=nucleus; Biological process=electron transport
  Homolog annotation: Hit_ID=Q93WC0; Match level="QueryCoverage=72%, HitCoverage=48%, E-value=1e-100, Identity=71%"; Hit description =Flavin containing polyamine oxidase precursor
MDVVRQIAYNKQGVVVKTEDGSSYRADYVVVSTSLGVLQTDLIQFKPQLPFWKIAAIYSFDMGVYTKIFLKFPERFWPVGEGKQFFMYASSRRGYYALWQSFEREYPGANVLLATVTDDESRRIERQSDDQTKAEVAEVLRDMFPGADVPGPDQIDIYVPRWWSDRFFKGSYSNWPVGVSRYEYDQLRAPVGRVYFTGEHTSERYNGYVHGAYLAVWGSAAHTLANTSSTGIDSANILINYIFKNEEYKVRGKYDVEDDLIAQSGSRHRDRSRPIINGLGLGTTTPCVMGRMGAPKQDPEGGENEFLGQAHEASSLGAMDKTGRGNPPYLTFLFLHSFLRERDRLHLIIVHVKIKMATPE

SEQ ID NO: 53106 - protein, 179 aa, Zea mays
  Coding DNA Sequence Number=SeqID_9731
MEGRIPSCAGKNIRLRGGLNPALGLRGASSDLKQPKLQESGGLHPARGLRAASSEPRQRNGQKPTPLHLHVQGCQRFIYNYTKSTVRNTVDYSGQEKLFGKTGQARTVRALAADRPHHQDDPRTEPMQKSEFALWTVRRKRADRLRPRADRPASGADRPARTVRTRRADRPRWAEWSND

SEQ ID NO: 53107 - protein, 149 aa, Zea mays
  Coding DNA Sequence Number=SeqID_9732
  Homolog annotation: Hit_ID=Q2QP23; Match level="QueryCoverage=40%, HitCoverage=5%, E-value=5e-09, Identity=51%"; Hit description =Transposon protein, putative, CACTA, En/Spm sub-class, expressed
MPLCSGFLDGFQGLVNKLLRNDETMGCCTESTSTFFPHAGMALGNPRSYVIRGLVKLQAHIKEALPLSIFLLYKLAMDPLCVASTRKQDLCPSVMLIVDRSSHFFTSRWSPFDIWGVWFKVMLAKIKVKIERGGAIRQELAKLKKAYMA

SEQ ID NO: 53108 - protein, 566 aa, Zea mays
  Coding DNA Sequence Number=SeqID_9733
  Gene Ontology: Mol. function=cysteine-type peptidase activity; Biological process=proteolysis
  Homolog annotation: Hit_ID=Q5NKQ2; Match level="QueryCoverage=93%, HitCoverage=75%, E-value=1e-141, Identity=59%"; Hit description =Putative uncharacterized protein 9C20.3a
MQTADEDDDFIPLSKKRNFDDSPPKVLKKIVTKWRKVVDPPDRLELMQRLNVRCNPQDILVSIQILNDRQRQAIARRGFSSILDMRVDALGSRSHLAWLMEKLDHNDMTIRAGPGKELKITKETVHLILGLPNAGGVTTLGIDEAVAANILRAELGLSKEEFGVAALQDRLRKGSDDDLSIRSFFLILFNRLLFPTASWGITNHEVLLTKEMDRFHEMDWCQLIFNDLCQAAKKWHTSSVTNVSTTIYGCSIVILLYYLDHLHDSAAPQNKRGTPRIKYFDRNIIQALTRADKGKIRQGQEPFGHCLHNTRANTFDVPRPDPSGQHTIHIELPLIRDLIFFPSRQGKHGDVGKNMPTNTNVTPQATPHTESCSPIFDATPQIKVSVETDPATNTPQVDQVSLDSEMQTVLDLREYLCGTQSDTSRTIIDYGEYCSTCSDIYESCADGKCLDNVFMQCFIQCVDDDAKNQQPSMSLNRLIIDVNVGSLLNFEEQERHSRNPQPFDESVLHTLLDNALPKTDEMDKCKAIMVPMGNTSEIRSLALHYITFHPKNKALSLLEDIQSFKA

SEQ ID NO: 53109 - protein, 174 aa, Zea mays
  Coding DNA Sequence Number=SeqID_9734
MRIKKQRYASLCTKRREGVFRLRLKKYKFRSHQSNSYTDEKSFFQQLHQYPSSFGSLTFGFVILCITKRYKAKLGMSVKSAGDSLKFGLFTIFPCVQPAFIKATVVPREASRAQKSPCPAITSSSASTSPLNMFEGARAGLLKWKWCPLGHFYNVLVIKCPHIACTVHLSVGVA

SEQ ID NO: 53110 - protein, 241 aa, Zea mays
  Coding DNA Sequence Number=SeqID_9735
MTSHGSSDEGNALTHTDGLAQEGFPRILWEVLQGAGYKTPPQYAVQQFEKHRVPRCRLATHPIGLFPAEKEDDPMWKDRVEHAKDIWAIYPGQTAHLTVRCMNALYRLQVMRGEAMSHLMALLEATKITLDNREELVVDLSQEMVEKDLQVEQLSTDIQELEELVGTRENTIEVLEDQLLNTQQQLAEANEHLDMHHQEIQDQEANEDVDIEGGDEPASSVDTAGSGRPPSPESSVASFAH

SEQ ID NO: 53111 - protein, 109 aa, Zea mays
  Coding DNA Sequence Number=SeqID_9736
  Homolog annotation: Hit_ID=Q46858; Match level="QueryCoverage=69%, HitCoverage=24%, E-value=7e-35, Identity=98%"; Hit description =Uncharacterized protein yqhG precursor
MEFPRVAGLKLYDLVHQTLSNGTSDNPDTSTWSGKESLFSRVDEIRVLEKTADSARIHVRFTLTNGNNEEQELVLQRREGKWEIADFIRPNSGSLLKQIEAKTAARLKQ

SEQ ID NO: 53112 - protein, 83 aa, Zea mays
  Coding DNA Sequence Number=SeqID_9737
MGNTSSCRSKEWLRRIPFDMDTSMLGRVAALLIRDLGRSRVIFLALVRGSLEYMVAGVTWPSILPPGWTVEWDPTSAEEEDEE

SEQ ID NO: 53113 - protein, 94 aa, Zea mays
  Coding DNA Sequence Number=SeqID_9738
  Subcellular localization annotation: CTP_CleavageSite=35; ConfidenceScore=5.32e-01
MASAGRWRDAGRAQACSGAHRARQTRGAFRLPVFHSSHKSQTCESWQKSGASLFLALRAVSHPINRNIIELQVYLQLEGDDSTSVTQKANAKSA

SEQ ID NO: 53114 - protein, 281 aa, Zea mays
  Coding DNA Sequence Number=SeqID_9739
MEDQAIPLARVPARIGQDQGLGYVRPDINARGRRSPEAPNRATAEEATPVLLDIPALCDDPGLRMVILAALPTLDDSGMAVHQTGGRDPLRGIRISDAPAGGPPPAGVASSANPAVAPSPLDKGKGAASSASTPGSSGGSEDLCPIPTLGVTQEARPAPTPACSGGDGGGVWAMTPVGCRARSYASPLPRMLSHAHQVLSDTEAAILRKWEALEAEHQRLSDWRTQLEECTKTVSRQFTSERSQLERDRMEYKRDLQRVCAKELEASRREKKVARREESVT

SEQ ID NO: 53115 - protein, 464 aa, Zea mays
  Coding DNA Sequence Number=SeqID_9740
  Homolog annotation: Hit_ID=A2XBA1; Match level="QueryCoverage=21%, HitCoverage=9%, E-value=1e-07, Identity=37%"; Hit description =Putative uncharacterized protein
  Subcellular localization annotation: CTP_CleavageSite=25; ConfidenceScore=5.09e-01
MSWPSSGTSVSPSLCLNIAVLLGATAALPPPFVAGCCGGRGGTGTEAHIGRMLAVDTGTEAHFGGMLAVSTGAEAYTGSMVVVPARDVLAVQMELTAADMGTGPGTDCSKVGPVGCAVDASVVQQPQMDGHGGPMWTRLAGSLKSLGSDSSRQRFVGLQRLTKTVSPRNSFNVGIELVPRLTSTQSLVGTSEADKNSPAGMSLDAQVLESPRLKLEEATPIMKLVAYITRDIDCLLPQPPIQKRRTKQLPPDFVPRRSSRLSKKREGLNSTVRQVQAELMLKLNVTNSQVAVTDEMLEEFGQLFDKPLSNSHIKALAALFGWPVPDNVQECLDVPLLRELSIETEFTLNLGVFHRPASNLEVLDHGFSEEEGDSSKFYLLNSAYVTLLPKKAEAVEPNRNELSVVKELLRVFGKASGLITNINKCTYVSPELIPSQYLGPSAQSLVYQSLGGDHRRLLVHLAVT

SEQ ID NO: 53116 - protein, 25 aa, Zea mays
  Coding DNA Sequence Number=SeqID_9741
MAVGVSEALYAKALMRLLDPCCYIE

SEQ ID NO: 53117 - protein, 264 aa, Zea mays
  Coding DNA Sequence Number=SeqID_9742
MTSHGSSEDGNALSHTDGLAREGFPRILWEVLQGAGYTTPPQYTVQQFEKHRVPRCRVRMTLEPHPLQPGWRSLDSESFGYRAEDTIEAIALHGLTTFCGFHPLELATHPIGLFPAEREDDPMWKDRVEHAKDIWAIYPGQTAHLTVRCMNALYRLQVMRGEAMSHLMALLEATKITMDNREELVVDLSTEMVEKDLQVEQLSTDIQELEELVGTRENTIEEIQDMEANEDVDIEGGDEPASSVDTAGSGRPPSPESSVASFAH

SEQ ID NO: 53118 - protein, 459 aa, Zea mays
  Coding DNA Sequence Number=SeqID_9743
MGAQAHASCNRRAKCFVHATAPPLAPLPRLLDCGTNTATRGDPARDPAAPAWRDEGFDSRLRSRGPYTHYWSEVRRLAPRKGSTAASGYSGSAPITDQGSPETPCSAPIEGNMALSPPSSLRKGDAGAVNIPGRELGTRPYTRATTSSHEGTTRPAEALREALRPRRSETTPPRPRGLHPAGALARTHRNKTQPRKADPLAKKCDESLQASANTPFEARGLLSGTIIRGTLKAPNSQLAVRPGRRHHRKLRSARPRARTRAKSRKTANSAPPTPGLGLGLSPGRRRTPLRPTQGSDLGSAPEDGELRSTRPQGSDSALGLSRRPPPRPTQGARNSTSATEDRLDLGFGGASTSPNLGRRPATSTGGAIITLPRADSGRREQDRCPIWLAPPDRQRWRPAYSVTTTALSPLTEARGRQQGLNRSDSCPSARLHRSSDGHDITPAGRQNLSGCHNGMYLGR

SEQ ID NO: 53119 - protein, 172 aa, Zea mays
  Coding DNA Sequence Number=SeqID_9744
  Gene Ontology: Mol. function=carboxyl- or carbamoyltransferase activity; Cellular component=ornithine carbamoyltransferase complex; Biological process=amino acid metabolic process
  Homolog annotation: Hit_ID=Q8SA97; Match level="QueryCoverage=58%, HitCoverage=18%, E-value=2e-16, Identity=50%"; Hit description =Ornithine carbamoyltransferase
MEPGGGIAVGAVESLLTSSCFRKGAESHRRHRVCGAPSLPIWRSEPDGTPVLFLAARVSSGLGDVEAPPKPRSSLSSVAEVESEPLGRARRRPPAEARAESEPWGRAERSSPSSGAEPKSEPWVGRSGVRRLPGLSPSPSPGAGGAEFTVFRDLARVRALGRAERSSPSSGT

SEQ ID NO: 53120 - protein, 150 aa, Zea mays
  Coding DNA Sequence Number=SeqID_9745
MEQRITRSTLTGGRVESGDRGLASPAKQNPIPRSGSFTEACTVFSEGWTGLGRARLAGLRWQGLGWPRARRAWGKRRWFRAPVRSSVRGGNASNTWRCSSARVQKLAEIANVRILAKIRRRPLPGTYGYLLNGLHQKSKNVTFGKKTYVG

SEQ ID NO: 53121 - protein, 235 aa, Zea mays
  Coding DNA Sequence Number=SeqID_9746
  Subcellular localization annotation: CTP_CleavageSite=3; ConfidenceScore=5.25e-01
MTRARAYKAHSGVDHTLPRTLKPHRSSTHRRLPVHGVSAATRAPAARGIEVCFAGEASPQSPEFTTPPECMDRITVIWPAHPPPTRTPACARGPSDSGHPRRRAVHRCDRQSLPEPTLYLTGPPSPPEVAPDPAPESAPEDLPATALEGKPRYGGYKCGHCKTAVGVSEALYAKAVSPDLLTGNRWGRLMCVGTECLATSCSLEDMVAGVTWPSILPPGWTVEWDPTSAEEEHEE

SEQ ID NO: 53122 - protein, 241 aa, Zea mays
  Coding DNA Sequence Number=SeqID_9747
MASHGSSYDRNALSHTNGLAREGFPCILWEVLQGAGYTTPPQYAVQQFEKHRVPRCRLSTHPIGLFPAEREDDPMWKDRVEHAKDIWAIYPGQMAHLTVRCMNALYCLQVMRGEAMSHLLALLEATKITLDNREELVVDLSTEMVEKDLQVEQLSNEIQELEELVGTRENTIEVLEDQLINTQQQLAEANEHLDMHHQEIQDMEANEDVDIEGGEEPASSADTAGSERPPSPESSVALFAH

SEQ ID NO: 53123 - protein, 59 aa, Zea mays
  Coding DNA Sequence Number=SeqID_9748
MATTLFGGRGPPHGSSEATEPSFIVWTPNPTQREKISTPPLIPPGFNYQKVYMKYTSMM

SEQ ID NO: 53124 - protein, 144 aa, Zea mays
  Coding DNA Sequence Number=SeqID_9749
MGKNNKRKREPTPPSEDFGDSEYSEEEFSSESEGSPAPIPLHESSDDSDDSQGLAAEVWTYIRAVERSGLEGSDESEYSSDEEDSDGGGEDKDGDDDDDDDEGSGDGDGSGRGSGSGSKDGDGGGSRGGSGGGGSSRGSNRASG

SEQ ID NO: 53125 - protein, 118 aa, Zea mays
  Coding DNA Sequence Number=SeqID_9750
  Subcellular localization annotation: CTP_CleavageSite=15; ConfidenceScore=5.34e-01
MTKVKKKKKMSRRISRSSRTSTSSKMRLVTSQSQLPVQLAQQAGDPMPTYGMLPLDLALPSPMLSPPPPPQFPVCFKTPPTSVTAPGDVSGQDDASTSQVNNLFNTQSATGGIGYNSN

SEQ ID NO: 53126 - protein, 117 aa, Zea mays
  Coding DNA Sequence Number=SeqID_9751
MADVGAKAKTLPFAPAIVFLVVPTEAEEPARNIPGIVQQESKFQHLVPTVRATKNPPAMAPKRASSKAAPSVDEAAKAALLAEKKGKALADTTHQEACEDDALSKRQLKGKQAYTFS

SEQ ID NO: 53127 - protein, 190 aa, Zea mays
  Coding DNA Sequence Number=SeqID_9752
MSKVTCSLRALGATLKERGELYFADRKACHAAVDNHGIDVGGTAQVDVSGVEGQWHMGPLCLHDWTGDGDMVDAAVVVSLLSLRVKVDAGPPSDHVNDSAIRLISEVFLFWCLGVVDIWLLLVWRWEWGSLRRGTSNKICAAAASVLGPDHEFRCCGPGGIILAARGLTSGVLVGDVVYLLLAAAVPTGV

SEQ ID NO: 53128 - protein, 121 aa, Zea mays
  Coding DNA Sequence Number=SeqID_9753
MKTLTTFCGYHPLEMVMHPLGLFPAEKKDDPMWCNRVSHVKDVWAMYPDLVGRALQSDAMALLTNTAQTAKLTLDSREDFVVDLSTELVEKDLQVERLSQRIATLEQQVEIRDNTIDVLEN

SEQ ID NO: 53129 - protein, 233 aa, Zea mays
  Coding DNA Sequence Number=SeqID_9754
VPHSHANKVLAKPQACKATTTRSNASRARRRGHGDGDFAAVHDIELHSGITSNTREAPMLRGCGGKSRLRGAALYRVGHALAKVEGGGGAVHWTVQNREPTEHGVAAAAAQGEGAEGGAAVLLGKRGGWAASSMDREEGRHGKLGCRGCLPWREGAGEGGVGCSLEASARWAERVAAGESIGEGGAREEPELAGEKLGRRAAAEPRIAAPCAMLHGGDSRDADPHHGELLLDF

SEQ ID NO: 53130 - protein, 54 aa, Zea mays
  Coding DNA Sequence Number=SeqID_9755
MSIPACARGPTDSDHLRRRPAHRCDPRDLPYVLDHFTGAISPPSLKLKTETYQT

SEQ ID NO: 53131 - protein, 351 aa, Zea mays
  Coding DNA Sequence Number=SeqID_9756
MPDGEAGLCFLEWLQEELLVLLTIVEGFMSFASLITCEGAMNALSSEGCRHYEVFDQSDENLGHDIFKAEDPVVKQSAGALFDRMWGPHGREAVREQSDRAREQMERAKDVEDLGGLVGAPPEAEVNLVPPSSAGEGSSTAPVPTVAGEGPLPAPAPTTEEPPKVVAEPATEDPMAAAEPSQVQDFGPAHAIATVNANFVAASTVVAEDDSDDSVSKCFESDDSGSLIVWTEESSDEDLDYFAALDVAAAEASPRVMGDDDPPGASVGHRRRRAVAKRRVSELSQSDRRHCGEVEGGLLRVGGTGKWELLSSPAGASVGEGELRSLFVGEELRIMLFNYREMGITPKVEPM

SEQ ID NO: 53132 - protein, 160 aa, Zea mays
  Coding DNA Sequence Number=SeqID_9757
MDTGSMPPAARIATAPAEFGRVVEDGPNMLAPLTSELRSAWMMTSGVHPVSCSGEAVTPVRVELGCPEGAGYTTPPQYAVQLFEKHRDSESFGYRAEDTIEAIALHGLTTFCGFHPLELSTHPIGLSDNEDDPMWKDQVEHAKDIWALYPGRLLTSRYDA

SEQ ID NO: 53133 - protein, 187 aa, Zea mays
  Coding DNA Sequence Number=SeqID_9758
MSHGGGPITGEGSTAVAGNFHGDARRSEEEEEYWRSGLVSSAVAIALAINGELDAPKGPFVSIILCHLKLWGTNSTTSIEVFPILGTIMLCEDLHRGLTTIRSHRPDILRQGQHGIRRKLVNLDLEPPQYLHHESMCRQTKASGEKSFKHDQLALRLGDLLHPRNTPHSAAKIPKLLHILNADRGDP

SEQ ID NO: 53134 - protein, 110 aa, Zea mays
  Coding DNA Sequence Number=SeqID_9759
MRQWWNRDLFRKIIQKIKISGKSRARRGLDEGKGGFVEHNMAGDDDTISGEIKTTVAFVFGRVTKEDTHGGAGSEFMGGSGRDVGIALKAKDIEMVVRWGRPKSARWGVE

SEQ ID NO: 53135 - protein, 171 aa, Zea mays
  Coding DNA Sequence Number=SeqID_9760
  Gene Ontology: Mol. function=aspartic-type endopeptidase activity; Biological process=DNA integration
MTSRSLGLGLHLPPGLTCLGRQLPQGRRLDLSCLDCRLQPGRVPDQLHPEGTSDNLPWRWGTTSRQRSTRHLVATSSSTPMGSVPALPVVNCHGMHTRAKSGFHQPCLNLQAMTAAISPIPSTYRHALDDPLYVVRWRTSSMPSSPTTLGLSFRTRLMPTSSQASGYLKVA

SEQ ID NO: 53136 - protein, 145 aa, Zea mays
  Coding DNA Sequence Number=SeqID_9761
  Homolog annotation: Hit_ID=Q33AJ2; Match level="QueryCoverage=57%, HitCoverage=41%, E-value=9e-09, Identity=42%"; Hit description =Putative uncharacterized protein
MWFPRIMHVEAHLLNNVGDIGTSESQVLKSTNQIAVEGGIRHKFTRRRQLCLCIRWGGAGLVASHAGALQYLKRVLALREQHAGGGTSHVLVKSQAKDGADGGRLHNRVESLVEIDARAPSKSAKDQTRFVALKGTIGVKLVFEY

SEQ ID NO: 53137 - protein, 132 aa, Zea mays
  Coding DNA Sequence Number=SeqID_9762
MGKNNKRKREPTPPSEDFGDSEYSEEEFSSESEGSPAPVPLRESSQGLAAEVWTYIRAVERSGLEGSDELEYSSDEEDSSEEDGGGGDGDGSGSSGGKGDDGGSSRGGSGGGGSSRGSNRGGSGRGSNRASG

SEQ ID NO: 53138 - protein, 101 aa, Zea mays
  Coding DNA Sequence Number=SeqID_9763
MTPALGGRTAAAQASGWALLQSCPRPRRRSRGEDKYKEPEARSADGGGDPVGDGDFSSRLRLGTDGRGHQPSGRSPLKSSRTSGAPTSAWSRHTGAKAGPP

SEQ ID NO: 53139 - protein, 101 aa, Zea mays
  Coding DNA Sequence Number=SeqID_9764
MPESAIQGQSRGACVVGRCFQGTLVSIDSAARCSGKVDAPTVMKVRWLMDWVRSATSWRLPLLASFYCLLFSDDGWECSLMMAGNMCCCAWMTSLTERREC

SEQ ID NO: 53140 - protein, 116 aa, Zea mays
  Coding DNA Sequence Number=SeqID_9765
  Homolog annotation: Hit_ID=Q6QP51; Match level="QueryCoverage=50%, HitCoverage=26%, E-value=7e-12, Identity=60%"; Hit description =Putative growth-regulating factor 1
MKAYGSGQSQSFVYQETRSHLAEPGLGRNSGPGRVHASPEGLFGHRQGRSDRSHFALSLTDLTGKQRRPPCSGCCANHPGETDNDRVQPRAQQEAPPRLTPGLGLGLGLGRKLCLA

SEQ ID NO: 53141 - protein, 113 aa, Zea mays
  Coding DNA Sequence Number=SeqID_9766
MRQSLEASITTPLEAQGLLSGTEIRGTPNTPNHGCLASGATRSSASPDPRARPREEAPPRPTSGLGLGLGRKSPPRPTLGLGPSFGLGGVAASPDLRLGSTTPRGMHHYPTPS

SEQ ID NO: 53142 - protein, 231 aa, Zea mays
  Coding DNA Sequence Number=SeqID_9767
MMVFGNDYGTGEDEVVEEDFQEFQEAFASPSSDWSVQPLGEATPPPARGAGASTTGAGAEGLFVLALAEDRVCEELFPCAPAGGAPAPPLSAPATAVAARGDLDDGGSDSSSSHNTDLSEEQELEGWVARPITRDAAQNYSISERDSAEAAMQDAARRALSHYCSVLGGVADGLNLKYYPRRPSGSTGGMVVSPVGEDNPRLSSTVNLAAVLNTELDHALDELSRARAEIA

SEQ ID NO: 53143 - protein, 267 aa, Zea mays
  Coding DNA Sequence Number=SeqID_9768
MTYTLHSYAYIEVIFADKTGFLRIHFSKHFCKTESLIIEKPYLDSLNQHTLESLFFSRVRKRQTFVASVQRWYQRKNARNEVREERILHLELLCNNLSGGVFASLESSSGSNDPIGDLEAQVELLQSEHHHRNDLWVADAAIRYLQDQLAKRDLALDWAVNSRPFAWAKEAKARARVEELSSTMDNLQVYYNTLHEEVHVLYSQLHPNVPADPVRMEAGPSRVAGEALYGELDLFRPPPSMKLVDEWSSPPDSKATKSEKKWLIKCL

SEQ ID NO: 53144 - protein, 158 aa, Zea mays
  Coding DNA Sequence Number=SeqID_9769
  Homolog annotation: Hit_ID=Q6J9V9; Match level="QueryCoverage=28%, HitCoverage=15%, E-value=1e-11, Identity=82%"; Hit description =Putative uncharacterized protein
MEAWAHRSCNRRTGYYVQGNRTTTCANVASSRLQNQCRDSRQPCADRERGYSERDPSQRRKRAPSPPTDQGGSKAGPSEGFDSRPRARRVRDNPGYVRYMAEAWATLPSLGLGRRSPPRPIPGLGLGLGRSHILARPRPQEKSPPRPTSASDRLRYRG

SEQ ID NO: 53145 - protein, 94 aa, Zea mays
  Coding DNA Sequence Number=SeqID_9770
  Subcellular localization annotation: CTP_CleavageSite=52; ConfidenceScore=5.34e-01
MSGAPEDSNSKLATFGIFQRHSRYNSPDCPVYTGQCPVFVKVSSPAKGVPARFASVGPAAAAKAWSEGWRLCLRPNICPPRDQFDKVTWCRRRR

SEQ ID NO: 53146 - protein, 50 aa, Zea mays
  Coding DNA Sequence Number=SeqID_9771
MAGSVREETGAENHLRVEKKSRNNIKLQMYLRLERRRKYKREAKANVKSA

SEQ ID NO: 53147 - protein, 156 aa, Zea mays
  Coding DNA Sequence Number=SeqID_9772
MKAFGAGFRIRPSEDDFSSWGIGTGRRGRGQLGGVEAEGGAGQEIGPFRPTLLRRGWPEVRMPLLLVAASASAVAAEAVGLVDGGERFDRAGSLGVPAWLGEQESKRGGHRGERQSQFEAGGSGGMGALRIPSGLGGRHGRELSGEGAAVRSRRAR

SEQ ID NO: 53148 - protein, 632 aa, Zea mays
  Coding DNA Sequence Number=SeqID_9773
  Gene Ontology: Mol. function=amylo-alpha-1,6-glucosidase activity; Cellular component=membrane; Biological process=carbohydrate metabolic process
  Homolog annotation: Hit_ID=Q75GI5; Match level="QueryCoverage=94%, HitCoverage=95%, E-value=0.0, Identity=71%"; Hit description =Expressed protein
  Pfam annotation: Domain name=DUF221; Domain location=175-606; Score =452.3; E_value=6.5e-133; Accession=PF02714.6; Description=Domain of unknown function DUF221
MPGSSIVNSQFFHGWIVRIPNWKQPHNFSVYFGRRLAEERFQRQDDYFSFERLLPTAGWIVKAYWLWVHCSALYVITISACILLFHEYKYISRKRLAHVTGYPPNPGLFTVLVRSIPRFDNELLDDTIRNFFVNYHGSSYLSHQMIFRKGHFQKFVDRAERAYRRFVRLYRNKFIEAKKSDLTNPEVVEAQKTRYAAVVASRVFQSSNPMLWVTDLAPEPRDVYWSNLWIPYRQIWLRKLATLAASIVFMFVFIVPVAFVQSMMQLEQLKRMFPSLTGLLNKSFFARVITGYLPSVTLLLSLYTVPPLMMLFSSIEGSISRSGRKRSGCLKILFFNIWNVFFVNVLSGSVLNQLNVFSRPKDMPTMLAELVPKQATFFITYVLTSGWASLCSEILQVFNLVYNFFSRFVCCCHRQNKEYVYSFPYHTEVPKVLLFNLLGFTFSIMAPLILPFLLVYFCLGYLVYRNQILNVYYPKYEMGGKLWPVMHNAIVFSLVLTQVIALGVFTIKRSPVTAGFTILLLVGTVLFNEYCRHRFSRIFEAYSAQDVIELDRDDEQSGRMQEIHQHLLDAYSQTPPGEGSSRGGSQVPIELIMEDPAQEASESSQELCDTVQEVSGAIHDHDHVVEDKAHSV

SEQ ID NO: 53149 - protein, 326 aa, Zea mays
  Coding DNA Sequence Number=SeqID_9774
  Homolog annotation: Hit_ID=Q6J9V9; Match level="QueryCoverage=14%, HitCoverage=16%, E-value=6e-11, Identity=69%"; Hit description =Putative uncharacterized protein
  Subcellular localization annotation: CTP_CleavageSite=56; ConfidenceScore=5.26e-01
MAYDVLSDPPVQLTQFAFPRMAGGRLRRAEGCPSPPNARGRKGSPTHAEATPHSVRSSASARMTKILEAEGGAEVAARLASPHHQAGFSPYDTGVGPHTSCELTRNAKEANCRTKGMKPPCGYKGSLILAGTSGRKGEPPRRERATAPRLCTLSTSSLPVDQHEGPVPPTMQPARRSLCARKLHRHLRQCRDFSTAEPVPRLEAAPRVTQQCQLGAAVTGQSVAGVGTTVDVAKSGPTIAATTDGRKQRSDHPPDSRLFLKQRGSPLPRPSDTVGRRSERRFTSAIMVASKKAGPSKGFDSRPRTRRVRDDPGYVRYIAEAQATLP

SEQ ID NO: 53150 - protein, 162 aa, Zea mays
  Coding DNA Sequence Number=SeqID_9775
  Homolog annotation: Hit_ID=Q6JAD6; Match level="QueryCoverage=75%, HitCoverage=16%, E-value=6e-38, Identity=66%"; Hit description =Putative uncharacterized protein
MSAQIALRAHRLLDLPALLLAAEFDVVDFLIYEIEDIMLDGLHAHRQLPYAHYLCYIFAQLIRPPQFQGTLEASHLHFGSYRPAPEDLLPIPDPVPNTHAEDAAFHQFETQGTTVPNDDDDDDFGIPPLPPVPPRSHDHEDRSSSAAPTAPPAIDPALAAIL

SEQ ID NO: 53151 - protein, 129 aa, Zea mays
  Coding DNA Sequence Number=SeqID_9776
MAMMGSTSEKMYLCQVSLCNHFRIFVSPMIYNVCVTGETLLGKLYMHHAKNYDNKISPLEKCRRAQGKLRASILAQLVCHVINLPKDTRIAVVGVMIRSGILKRKLISFKQNSDAGLTYGSWMATESMN

SEQ ID NO: 53152 - protein, 37 aa, Zea mays
  Coding DNA Sequence Number=SeqID_9777
  Homolog annotation: Hit_ID=Q7XBD2; Match level="QueryCoverage=100%, HitCoverage=3%, E-value=5e-08, Identity=58%"; Hit description =Retrotransposon Opie-2
MELLHMDLFGPVAYLSIGEDKSETQGTLKCFLRRAQN

SEQ ID NO: 53153 - protein, 97 aa, Zea mays
  Coding DNA Sequence Number=SeqID_9778
MQAACNRAKWARPFDSNAPSMEVQAHASCNRHAGCYVRATAPPLAPLPRLLDCGVNTAIRGNPAVPAKRDGQMRDRERGIPRKGPFSVKEIGSEPPY

SEQ ID NO: 53154 - protein, 211 aa, Zea mays
  Coding DNA Sequence Number=SeqID_9779
  Homolog annotation: Hit_ID=Q6J9V9; Match level="QueryCoverage=33%, HitCoverage=24%, E-value=4e-28, Identity=81%"; Hit description =Putative uncharacterized protein
MAGPSEGFDSRPRACRVRDDPGYVRYMVEARAMLPRYPRTFPRPAGTICNGIPPEGGIEPSDPIEWVQENNVVHLAPATVLAIREGPTTASHDLPRVRPRAQQGAPPRPTLGLGLSFSLGRRSPPRPTLGLGRRSLPRPTLGLGLGRRSPPRPTLGLGLGGVAASPDLGLGSRHSSDGHVGTSTGLKDNISLIPSLVFHLASTHLDSGTRH

SEQ ID NO: 53155 - protein, 43 aa, Zea mays
  Coding DNA Sequence Number=SeqID_9780
MAMMGSTSEKMYLCQVSLCNHFRIFVSPMICNVCVTGETLLGK

SEQ ID NO: 53156 - protein, 260 aa, Zea mays
  Coding DNA Sequence Number=SeqID_9781
  Homolog annotation: Hit_ID=B0JCV8; Match level="QueryCoverage=15%, HitCoverage=5%, E-value=1e-11, Identity=84%"; Hit description=Misfit TNP1-like protein
  Subcellular localization annotation: CTP_CleavageSite=30; ConfidenceScore=5.02e-01
MAWLMHCRHLELPRQSRLNHQDVVRRIFVCASRVLSKRRRRRQRAIVGSSASTNAREVVLAPMHLEPVAPVIILSDDEDGKIDWTALMDDDDSMSSVNKDQELMPDHMNKGVSQEHSSDEGYETPTDPCPSIDRVARRQLHHDPNYDPQECEPLAPEEALPRFRNALGFLVRDNLGITIRHWKDVSDDVKDQIWNKLLTRAHLMSRGLVSCLRGGRRRVLSAINAEAARLYGPYVGLGPMAYVTGHKPFGSRGTPPEREA

SEQ ID NO: 53157 - protein, 199 aa, Zea mays
  Coding DNA Sequence Number=SeqID_9782
  Homolog annotation: Hit_ID=O48967; Match level="QueryCoverage=99%, HitCoverage=38%, E-value=1e-31, Identity=44%"; Hit description =Putative uncharacterized protein
MVGIAEHRGETSEGFSMEEKAASSTPQGSGHPTPGAAAVRPARRRTPGWVSRTPSGDTPAGALSAARELLRHLPSPTASPGAMRQWRDDMDHLLDMVHTGSIRPRPQSPWRRHEASALERTPSVRTAPIGDLRTELNRRRVEGDTQVPLEGPGDLRDKLNHRRAGRDACISSEKTLEHCGGLGQDSAEVAPRAPGDARF

SEQ ID NO: 53158 - protein, 146 aa, Zea mays
  Coding DNA Sequence Number=SeqID_9783
MALGDSGALVSQSKECGDVVHIMHDQLLQHLLITYPLAESSDDGCIRNTGDCPTYLGEAGNERSEGLPGSLSHCVEVCLHSVPLVSTGEVRYEPRTELFPGVDGSWGLVHEPSPGWSRQGYMEVGCQYGGVSTCCCNGSNINLQEF

SEQ ID NO: 53159 - protein, 265 aa, Zea mays
  Coding DNA Sequence Number=SeqID_9784
  Subcellular localization annotation: CTP_CleavageSite=22; ConfidenceScore=5.45e-01
MPAGGSGSHQHTSAGNVTGDPSAATAAPSASTPSPPSAAAEEVPVAFAPTMQDDAGAEATPSGSQVPAGGPEVAASPTAIADPTAAIPSDAPSVVGVGGAYGSVPPPTPEGPEVILGRPLRSGVEPGATLTPLPQVLTCAHQALQETEAAIRREWEALETEHQRLGDWCSQLERRTKEASFQFASERAELEQEREDFKEEIRKVSDREEEEEDLAFREEMWARRNKLLDDLELEAEEKGKHLEGKVRTLEEQFQAAQATQMAPSS

SEQ ID NO: 53160 - protein, 96 aa, Zea mays
  Coding DNA Sequence Number=SeqID_9785
MVVGELCCQRAYRTVREKMLERRDKLLVDYELEEEEKERALEEKEQTLGERVHQFEAAQAAQAAQVAPGSQVVEAMRKTLEDLRAEHRAGVQHIGA

SEQ ID NO: 53161 - protein, 150 aa, Zea mays
  Coding DNA Sequence Number=SeqID_9786
MNKLTGIRDAITNGTPVPPPQVRTTPLRGGRPAEQRKADERRAVTCSSSGDDDDFCSGGSNSGSTDPRADAAARRPPPTTKLVRQGRTEGRRVGGQSVAGPGYRAGGRTSSSCRGGRRRHERLRSYSRLKTGHAAAASATDNNRPPPITE

SEQ ID NO: 53162 - protein, 28 aa, Zea mays
  Coding DNA Sequence Number=SeqID_9787
MPKETVTKTGEGELVRLKYTFRYEGPHS

SEQ ID NO: 53163 - protein, 192 aa, Zea mays
  Coding DNA Sequence Number=SeqID_9788
MVALCRSGGERESEGIGPGSSRVSEGETPGSFVRRAGHVGLGPAQGCQRFIYNYTESTVWNTVDYSGQEKLFGKTGQARIVRALAADRPQHQDDPRTEPMHKYKSTLRTVRRKKKDRPRPCADHPASGADRPVVKRPNPLGLKCDTITSPRRLVNTFIHQMITDLLKRDKPIKVAINFKSWSTTRDISSEWG

SEQ ID NO: 53164 - protein, 82 aa, Zea mays
  Coding DNA Sequence Number=SeqID_9789
MAAMEWSDGGDLVTGLAQGGWAFGYGTRLSGHTGSDQQVGLMRADLTRLAYTALLGLVLVVGLGPDPGFPSAFDDGVLVLVM

SEQ ID NO: 53165 - protein, 66 aa, Zea mays
  Coding DNA Sequence Number=SeqID_9790
MTMEGEGALALGSGGGGGHADGTRVPDDRTDERGESRVGVRAHGKLTLCISEAYLQCNHPIGEPIL

SEQ ID NO: 53166 - protein, 47 aa, Zea mays
  Coding DNA Sequence Number=SeqID_9791
MAVGALQKGALGGGKVHGGGHACRGARLIPGFKGKLLGIFLGKALFS

SEQ ID NO: 53167 - protein, 37 aa, Zea mays
  Coding DNA Sequence Number=SeqID_9792
TLWYRGYEIDGFGYDYGAGEDEAVEGDFQEFQDYDEF

SEQ ID NO: 53168 - protein, 70 aa, Zea mays
  Coding DNA Sequence Number=SeqID_9793
  Subcellular localization annotation: CTP_CleavageSite=57; ConfidenceScore=5.41e-01
MAKPTVTDARAVGAPDMSGAHRTVRCPLPTVGSATCPALIARPTVGPSRPLAHRTVRCTPDSPFTVILGV

SEQ ID NO: 53169 - protein, 142 aa, Zea mays
  Coding DNA Sequence Number=SeqID_9794
MNVCELTLAVSHTPQVKTRTPVIYNVVTFDPVPLYIICVRLGPSIPGVYVNPGFWTPKIRKMNPPNPPPVEINQVVATQRLVIQQLTDLVTEMQNQIRQQREEIRQARQEIKQARVERQQQQPPPPPPPASPSYINIDYDDL

SEQ ID NO: 53170 - protein, 114 aa, Zea mays
  Coding DNA Sequence Number=SeqID_9795
MTGKKTTASSDGDTPKKAKVVVEDEEEATVTLSVEKDALECDICCLPFQSEVFMAMQERAFWMCKVLHPHGRKNYMLRFVGALLLIVRNDLFSIEDLCSTISKDPWVIFVTYLT

SEQ ID NO: 53171 - protein, 138 aa, Zea mays
  Coding DNA Sequence Number=SeqID_9796
MSSIPPPAGGLSAAIAAVARQWNECHVVAAVEGHELKAPETEHRPGSERLLETAHLELDGKLFVNTQHAPTWRANCRRFDTGGSLSRRVKCRRMPQPRWVGARPSAKGGSEVAGDGREKGGNPAAFVFVPCPGRVRLQ

SEQ ID NO: 53172 - protein, 142 aa, Zea mays
  Coding DNA Sequence Number=SeqID_9797
  Gene Ontology: Mol. function=kinase activity; Cellular component =ornithine carbamoyltransferase complex; Biological process=amino acid metabolic process
  Homolog annotation: Hit_ID=Q6QP54; Match level="QueryCoverage=85%, HitCoverage=36%, E-value=1e-27, Identity=58%"; Hit description =Putative kinase
MAPPVDAAGLRPRLGDVEAPPKPRSSLSSVAEVESEPLDRARRRPSAEARAESEPWGRAKRRPSAEARAEFEPWGRAKRSLSSSGAEPESEPLVGRSGVRRLPGLSPSPSPGSGGAEFAVFRGLARVRALGRAERSSPSSGT

SEQ ID NO: 53173 - protein, 704 aa, Zea mays
  Coding DNA Sequence Number=SeqID_9798
  Homolog annotation: Hit_ID=Q6JAD6; Match level="QueryCoverage=97%, HitCoverage=97%, E-value=0.0, Identity=75%"; Hit description =Putative uncharacterized protein
MPRTKNASASGGGDDEDPRRPFRQVKGKTVYLEQQEGRKKRRSDREARAAAAAAAAAAQATLGDQPDVPSDQIAFRARRLASRSRSSTHTSASTPPPTLPAPVTPIAPSTSTAIPTTSTTPASTATPAPAPASAPPVPPPRFRERDETEVRPLASDPRLFDLQCATAAWVRRFRYVPVESWLPAQRDPAAGVLFSTQIQESFFRAQMSAQIALRVHRLLDLPAFLLAAGAESEAHLTYLPGLLSFLTISGRYVEEWVRVFYASVWIDPDHQWMRFRFEREDVTITASQIRQLFGFPDSSTRLHSLCYGTSDPPRRPHGGVAPGTAHIAALFRPPFTDGSRRSPADFTTAAKYLYELVRRTLLPRMGYREATTHIQLWLLGALVSHSEFDVVDFLICEIEDTVLDGIRARRQLPYAHYLCHIFAQLIQPPRFQSILEASRLVFGSYRPAPEIPVPAYAPVFDTQAEDAALRQFDTQGTAADDDDDDFGIPPPPPPPMPPRSHDHEAGSSRAAPAPPPAMDPALAAILANLAAEQARLSETMLSMFQSMQDRQDALQQQLIQDRAENRAFMALMLQHSGISAPPVQSAPPSSLHAPVVPSILSAPPAVTSPLRPVTLAFTSPVLSSVCPQPPVPPASAVTTTAVAVSVTASVPVAPAALPASESVPAPASTADPGSETDSDPPSAFALLPRPRPDAPPPPPPASDD

SEQ ID NO: 53174 - protein, 59 aa, Zea mays
  Coding DNA Sequence Number=SeqID_9799
  Subcellular localization annotation: CTP_CleavageSite=27; ConfidenceScore=5.17e-01
MAAGSPPLTTKSGRWKAVCSMAHRTVRCTPDSPVPPATSSLPLDSDLWARLDVRCTPDR

SEQ ID NO: 53175 - protein, 111 aa, Zea mays
  Coding DNA Sequence Number=SeqID_9800
MPMLFDDHRDEDFYGLPRKYSIVARVEVKFPIEPRYRDRQHFILSDINSSSSLRIIPQYTSIRSITTPTILDQFKKLWWRGTTVSLLLHFLKSKGVDRFYNFTKSNNWNYV

SEQ ID NO: 53176 - protein, 86 aa, Zea mays
  Coding DNA Sequence Number=SeqID_9801
MAKRIARSTRGRGRPKSGEDDLGSPVRFCWVRGLGELHGPLAKLTEGQAQLGRDWSGLASVAEAWAVVVGGGKARWSKEGASGQRG

SEQ ID NO: 53177 - protein, 58 aa, Zea mays
  Coding DNA Sequence Number=SeqID_9802
MDGLVQIARRSDAAATDPPCGMVNHVVDSIAEEHVTEDPGEQQVEVAEQELIEGKLCP

SEQ ID NO: 53178 - protein, 107 aa, Zea mays
  Coding DNA Sequence Number=SeqID_9803
  Subcellular localization annotation: CTP_CleavageSite=80; ConfidenceScore=5.41e-01
MAEAWGGFIGTARCTGGRGPASARGHALGGAGARTGVNRRLGTGSCSVTKVPVSECLVPRSNCAKTVSNEFGLSSNFSRACSREFGTTLIFGSPGFEFRKTENVVDP

SEQ ID NO: 53179 - protein, 112 aa, Zea mays
  Coding DNA Sequence Number=SeqID_9804
  Subcellular localization annotation: CTP_CleavageSite=56; ConfidenceScore=5.79e-01
MPINPPQASAIPPRALSRLAQVRDHRKLPRARRATARQAFRASAVVASSLQSRPSRANTSIGRTPRRRRAPPPAHVDRPTLTIPDGDPHIAVTLRTSPTPSTTSPQQSRCRV

SEQ ID NO: 53180 - protein, 57 aa, Zea mays
  Coding DNA Sequence Number=SeqID_9805
MESHDLRAEWESRLVGGYEIDGFGYDYDAGCQHCNHCSGEAEAVEGDFQEFQDYDEF

SEQ ID NO: 53181 - protein, 79 aa, Zea mays
  Coding DNA Sequence Number=SeqID_9806
MKSVRTCDLIDVLGSKVMCDSKAVACSGPQAKSFAPSNVLRKGGQSACQSLDIPGGLRGCHVDDRLDLSWVGLDTSVRH

SEQ ID NO: 53182 - protein, 124 aa, Zea mays
  Coding DNA Sequence Number=SeqID_9807
MLGRRGWSESAGPRAQVGELVGGEESGLTRARLVNQMGQRASPEIKEGGRPKSGEDDLGPPVKFCRVRGLGKLHEIMVKLTEWLARLGSDWKELATVAEARVVMAGGGAACSRQSQANLGSDKT

SEQ ID NO: 53183 - protein, 132 aa, Zea mays
  Coding DNA Sequence Number=SeqID_9808
MAGAPKPPISHLNSDPKVATDGGNDEELLWKVLIVDRSRGNPVHGMSRTRSDVDELGAPRSFPHHDSTAKEFRVTRRSTTTPPRRRGDSRVSKSEKEEERREERRYDSAYMGARSCVKLSDEAPGLRAYQPP

SEQ ID NO: 53184 - protein, 316 aa, Zea mays
  Coding DNA Sequence Number=SeqID_9809
MGRIARGPLSWARLHCGMTPLQAFARCRIERRTSDCSEGLERRVASLPSPQHSHRGAGYAMPPQYAVQLFEEHRVPRCRVRMTLEPHPLQPGWRSLDFESFGFRAEDTIESTALHVLMTFCGFHPLEVSTHPIGMFPTEKEDNPMWKDRVEHAKDVWALYSGQTAHLTVRCMNALYRLQAVRGEAMSQLIGIVESTKITLDNREDLVVDLSTELVEKDLQVEQMATQNQELEDQVGARENTIEVLEDQLLTTQQQLEEANQHLDLHHQEIQDMEAEGANEDVDIEGGEEPEPASSLDTASSRRPPSPESSVASFVH

SEQ ID NO: 53185 - protein, 124 aa, Zea mays
  Coding DNA Sequence Number=SeqID_9810
  Subcellular localization annotation: CTP_CleavageSite=29; ConfidenceScore=5.11e-01
SRRRPSPPVLVARVALTTSDADPHTDVTVATSRTSLTTPPELYCRRRNQVREKLAVYSQKAVRSGAPDCPVVRRTVSDCNLADGEHILVPEQGAAQEVAPDPAPEPAPEDLPATALEGKPRFYA

SEQ ID NO: 53186 - protein, 161 aa, Zea mays
  Coding DNA Sequence Number=SeqID_9811
MAHLMTNGQVERANVWQAVDKRTTLGGLESEDDAEPSHGFLAVLSSLRGRGHLTHRLGIRFPEDKGLRRPKQPDQPRGFIGPAGRGLGRGLTTLGAVSAVSATLPRPKGSAPRLLSGRLGTSAVTRRPRAPQAYSSLGRALYHCQDFAARDYGGTTRIIPA

SEQ ID NO: 53187 - protein, 141 aa, Zea mays
  Coding DNA Sequence Number=SeqID_9812
MNKNRNLHNRVGIQMSQIQMVKVKETAKEGRNRKSKATDKKRDVNNGLVGILYRDSNPTIDPPRAKLLQRKNSDRDKMEKVQLGNNKHMITCERQLAVGIDGRNNRSGKILTLPLGRHLNLVGELSGSEIKGKQRRSGGRK

SEQ ID NO: 53188 - protein, 152 aa, Zea mays
  Coding DNA Sequence Number=SeqID_9813
MGKSKKGGSSSHHSGDKRKHEPTPPSEDFSDSEYSEEEFSFESEGSPVHTSPPASSDDSDDSRGIAVEVWTYIRALERAGLEGSDESEVSSDEENSSDSSEEGSGGDGDDEGDDDVRGDGDGDGDGDSGKGDGKGDGKGDAKGGSGSSKASG

SEQ ID NO: 53189 - protein, 53 aa, Zea mays
  Coding DNA Sequence Number=SeqID_9814
MEGTSAVTARRQSRSVRHCSLEDMVAGVTWPSVLPPGWTVEWDPTSAEEEHEE

SEQ ID NO: 53190 - protein, 355 aa, Zea mays
  Coding DNA Sequence Number=SeqID_9815
MRRKDGGFPPSGGLEAGKTRPTGERGGQPCRRQETAPSGRTSPTPDTPAWRPRPTRRATGAPDAACKQLHRLRHHRASSTAKPIPRLEATQRATQQRQPDAAANAAKGGPAVMTVAGAREQRSRRQPSSRPIRGQQENPLSRREDNAPVIRSSNGSRTCNGCPANYSPRRINSAAGQAALLAGAAGDASPSPKQPRQKKAPSLLTDQGFEGWSPEGFNSRLRSRGPYTHYWLAPEGFTVASDAERGMTRGDRVRQITRSSPETPCSVPIEGNMALSPLLLAERRRRGVCKKAESVPDRPLALCGGSGAALANPAPAEPLTASTYQPENLGPDRAPGLRPARMREQPDQPKHYARH

SEQ ID NO: 53191 - protein, 49 aa, Zea mays
  Coding DNA Sequence Number=SeqID_9816
MDRVARRDDLVTGLRPVVYEAKARTAKASSEWWRLRLRPNICPPRDQFD

SEQ ID NO: 53192 - protein, 71 aa, Zea mays
  Coding DNA Sequence Number=SeqID_9817
MASPLHALSTGEVDTFVLLLNWVGIYLYLVIANKILTNIKSNAQLQPSSLCSRGDVGNMEDFEEFQDYDEF

SEQ ID NO: 53193 - protein, 154 aa, Zea mays
  Coding DNA Sequence Number=SeqID_9818
MARTNRVTISEIMLGEMVGVDPISCPPLGSAGHGPVRPVGGVFSKIKLDAGSVKGLDGFNIGKDVPLPGLMTEDPLTGHMPRHGIHFSKHFCKIESLIIEKPYLDSLNQHTLESLFFSRVRKRQIFVAFALRWYQRKSARNEVREERILHIELL

SEQ ID NO: 53194 - protein, 52 aa, Zea mays
  Coding DNA Sequence Number=SeqID_9819
MRVEWDALSWLIRGTRGVVGFAVGPSMGSGHSKEEGVEADLQEFQDFDEFED

SEQ ID NO: 53195 - protein, 132 aa, Zea mays
  Coding DNA Sequence Number=SeqID_9820
MELSKRSDSTEPHRRPKIILTGLRSPAAACRLSNPTPRRRRAPPLAHVDRLTPTIPDGDPHIAVTLRTSPTSSTTSPEQSRCRQDCNLADGEYVLIPEKGAVHEQDQEQAPETAIEHLPAAPAIEGKPRFYA

SEQ ID NO: 53196 - protein, 142 aa, Zea mays
  Coding DNA Sequence Number=SeqID_9821
  Subcellular localization annotation: CTP_CleavageSite=73; ConfidenceScore=5.71e-01
MAHARAYKARSGVDFTLPRTLKPHRSSVHRRLPVRGVSAATRATAAVDRLAQLSPTPSNPRRRACTTQGSSPSEESKPASPERPVHGRRSSQPRRNCNLADGEYVLVPEQGAAQEVAPDPAPESASEDLLATALEGKPPFYA

SEQ ID NO: 53197 - protein, 204 aa, Zea mays
  Coding DNA Sequence Number=SeqID_9822
MQVACNRTTETHPFDFDASSMEAQAHTSCNRRAGYYVRKTAPPLALMSCLLNCGTGAATRGNPAHGPTVPTEHIGHGSVSRGRRRDGRYGQKWASSNGGSRRAEAAVKSSTGSRPLLEQQGSPLPRREDDAPVFRPSNGSRNGCPTNHPSRRINFVAGQATPLVGEAGERFTSAMMTASKKGLGKGIFRKGSFSMKEAGPEPSY

SEQ ID NO: 53198 - protein, 156 aa, Zea mays
  Coding DNA Sequence Number=SeqID_9823
  Subcellular localization annotation: CTP_CleavageSite=50; ConfidenceScore=5.06e-01
MLEVFFASPKFVFPSWLCAFVVLYTTFLPISHSQVPNPPPPPRRGIHTCNCNYEPTKSSRAPTAPNRAASEIQQGLEEPGETPSEEEGQQQPEEEGQQQAGGGGEIVSGCRGICDDNPVEAGGAAARLPDPIPAQVNLPPTSVPLKPRPETLPSPC

SEQ ID NO: 53199 - protein, 50 aa, Zea mays
  Coding DNA Sequence Number=SeqID_9824
MATKLGEKLNSGAMVANRRRGLLFWFRNKQEEQTAHSIYIVHERWLRIRE

SEQ ID NO: 53200 - protein, 57 aa, Zea mays
  Coding DNA Sequence Number=SeqID_9825
MGKPAPSLLMLLLSRVTALIPTITGMGDHVSGRVRGKVYCQVQSGFNNIMLREEKLS

SEQ ID NO: 53201 - protein, 29 aa, Zea mays
  Coding DNA Sequence Number=SeqID_9826
MAMMGSTSEKMYLCQQIIDVVDSEEMGKA

SEQ ID NO: 53202 - protein, 233 aa, Zea mays
  Coding DNA Sequence Number=SeqID_9827
MALGAWLGLGRDCPHRMPTLSGQLVQSPAFVVELRGQDATAFVPEVEVEAVKIVDKYALGMAILPAGSASHHQPPETKRQPPRLQSLHVSISIVSLRLFLQSPTLPAAAVCNLLGTMPSVIIPTGIRYLPDTRWVRARVQNPTRGYSRGSQGIDVFAQAPGNLFANAKENEEEVEVEEARTTPPPPPEEPQAGNCFYFDIYGAEPDSPVKQGKPRCICHLLVTFKIFLTCLMH

SEQ ID NO: 53203 - protein, 162 aa, Zea mays
  Coding DNA Sequence Number=SeqID_9828
  Subcellular localization annotation: CTP_CleavageSite=58; ConfidenceScore=5.05e-01
MAEASLHVFDTSWHPGARSEHARTRITGIAQSRSPEFKNPPAHVDRSRSRRRPPPPVLVARVAPTTSDTDPHIGVTVVTSWTSLTTPPELYCRRLYPSRDLRRGLPFRLWWVQVRSLHDGQSGSVGHCSLEEMVAGVTWPSTLPPGWTVEWDPASAEEEREE

SEQ ID NO: 53204 - protein, 136 aa, Zea mays
  Coding DNA Sequence Number=SeqID_9829
  Pfam annotation: Domain name=RVP_2; Domain location=28-123; Score= -62.3; E_value=0.074; Accession=PF08284.2; Description=Retroviral aspartyl protease
MAQQQAAPNAPTRQNVPQQGAGNHVHMHYNHGRLNHLEAKAVQETPGMIVEAHNLPITTMSTPIQIDSAGGKVRADSVCLNATFNYGPWWSELLGLHAQAMVVDDGFDYRSTTAIAFNSTSKEASWEDEGDTSARN

SEQ ID NO: 53205 - protein, 87 aa, Zea mays
  Coding DNA Sequence Number=SeqID_9830
  Subcellular localization annotation: CTP_CleavageSite=15; ConfidenceScore=5.39e-01
MAAAGRGTPATGTQRAGARRGSGGGSARRSSNGENCAGGSWAFVARKLDNGWKKSCATSEENSARAVFFSGNSHRRSDLEEAQRASF

SEQ ID NO: 53206 - protein, 473 aa, Zea mays
  Coding DNA Sequence Number=SeqID_9831
  Gene Ontology: Mol. function=ubiquitin-protein ligase activity; Cellular component=intracellular; Biological process=protein modification process
  Homolog annotation: Hit_ID=A2Y0M4; Match level="QueryCoverage=72%, HitCoverage=36%, E-value=1e-147, Identity=70%"; Hit description =Putative uncharacterized protein
  Subcellular localization annotation: CTP_CleavageSite=25; ConfidenceScore=5.27e-01
MAADGHWRRATQRRSAHRKKTADPRAGRRRRTPGGAPGCGRRRQDPRRTPGGQTAQWQLDPRWQIEEEAADGAQTEIHPWRRTLQARGRPRDGERQRDGQRADRRAGRDGSTVTARRRQKFGTGSGADDDDETPMDVDIKINLDVDLERQITAAIDPKLLQHLVNALFRGTLSINDSDLSEPSDAEVDAVGCICAFLHVTFNTFPLERIMTVLAYRTEIVPALWNFIKRCHANRRWPFFSKFASSLPADAPGWLLPMSVFCPIYKHMLKIIDNGEFYEQEKPLSLKDLKSLVLILKQALWQLLWIIPSSSTQKVSSNPSGLKKLSVENVKIRARVGLSELLTQLQDWNNRLPFTSASDFYSQEATSENFVSQAILGNTRASEIIKLAPFLAPFTSRVKIFTIRVSFINEHGEEEAGIDGGGIFKDFMENITRAAFDVQYGLFKETADHLLYPNPGSGLVHELHLQYFNFLEVY

SEQ ID NO: 53207 - protein, 128 aa, Zea mays
  Coding DNA Sequence Number=SeqID_9832
MQELMAQQNEILRQLAQRQPPPQHHEGGDHHQRVPAAATYQEFLSTSRCCSLGQKIPSMRMFGLGWWNPNSHYLMEIVQMWPRRIALQPIRQKRRERPLWQDHQLSLSASGLCPTLRVEDLSSSKDDG

SEQ ID NO: 53208 - protein, 129 aa, Zea mays
  Coding DNA Sequence Number=SeqID_9833
  Homolog annotation: Hit_ID=Q75L75; Match level="QueryCoverage=28%, HitCoverage=2%, E-value=5e-07, Identity=67%"; Hit description =Putative reverse transcriptase
MVLRRCRVIGEKSPETHNHPGLTTFVFELYTTRQTTQIGFSTPNNGDAEDKVIGAILTQEAEGKEHVVTYLSWRLVDTETRLLAPIRAPITTVRNSGGALYGGAEGGGGVRRQPLDLAPERDPAGEERS

SEQ ID NO: 53209 - protein, 58 aa, Zea mays
  Coding DNA Sequence Number=SeqID_9834
MGEAEGGRSGGRRGRGRARATVGQAGGAGGLRSGDPKDDPYPHGYGYEGKFISISGYG

SEQ ID NO: 53210 - protein, 182 aa, Zea mays
  Coding DNA Sequence Number=SeqID_9835
MAGGNELAGAKERWLAGEGFELGIKVNIPDLWLKVHKSSTQTNKRSKLGFKTKEQKNQSVLWFGAPDCPVCHRTVSGAPRPYNCELLTFGFLQRHYAIIHRTVWCATGLSGVPSGATATSAIVDCNGHLQCYSARTVRAEVRAAARGAPDSEQFLSGAAPDYSVPHEDKAPTIETARTLTVG

SEQ ID NO: 53211 - protein, 167 aa, Zea mays
  Coding DNA Sequence Number=SeqID_9836
MRKKHGFTPKIHTCSGPDSHNEQTPALKVPLQMELRFHPRRYEQPPTLEGLQGDETPGWLADARSGSSDNDLRSGWPNSSSDDLRADAAATRPSPTTALEGRGQATKAMESEVSPRVASTISSAEKPLPTTSVGGGTGSSVEAAQAGELDTRQLPAPRTANALPPDH

SEQ ID NO: 53212 - protein, 57 aa, Zea mays
  Coding DNA Sequence Number=SeqID_9837
MEARRASRYQVHGRKSKRLRNPKPRVKKKTCKVKDLSKWRKELKQTPSPGVANSNED

SEQ ID NO: 53213 - protein, 57 aa, Zea mays
  Coding DNA Sequence Number=SeqID_9838
  Subcellular localization annotation: CTP_CleavageSite=35; ConfidenceScore=5.24e-01
MTNSKRHVRLSDASATSVVCRVIYPRRPKSYPCARSIMRSPRTSTNAIWVPKALLDD

SEQ ID NO: 53214 - protein, 56 aa, Zea mays
  Coding DNA Sequence Number=SeqID_9839
MEARRASRYQVHGRKTKRLRNRNPRDVGAQKRQSRSSQADLMIYESNIKAQACQML

SEQ ID NO: 53215 - protein, 137 aa, Zea mays
  Coding DNA Sequence Number=SeqID_9840
MGKNNKRKREPTPPSEEFGDSEYSEEEFSSEPEGSPAPVSPPASSDDSDDSQGIAAEVWTYIRAVERAGLEGSDESECSSDEEDSDGGDEGEDDDDDDDGGDDSGRGGGDGGRDSTKGDSSRGSTKGGGGGRGRASG

SEQ ID NO: 53216 - protein, 166 aa, Zea mays
  Coding DNA Sequence Number=SeqID_9841
  Pfam annotation: Domain name=IQ; Domain location=79-99; Score=23.6; E_ value=0.00072; Accession=PF00612.18; Description=IQ calmodulin -binding motif
  Subcellular localization annotation: CTP_CleavageSite=29; ConfidenceScore=5.30e-01
MDRTPGISSRLSSPPPAAHPSPPPAAAPSAAATPSHPPSPTPDAFTRLEESFGRLAEKWDQFVVMFHRYKEKTEKELQAAAVVRLQAAVRGFLVRRAVRKLHLLISSSLHQLAACAPNHQVSSILFEPPTEVEIWLEDELVLKGGGDVMGIIGSERQQPGWDKARE

SEQ ID NO: 53217 - protein, 246 aa, Zea mays
  Coding DNA Sequence Number=SeqID_9842
  Homolog annotation: Hit_ID=Q108Z7; Match level="QueryCoverage=98%, HitCoverage=12%, E-value=6e-94, Identity=62%"; Hit description =Transcriptional regulator, putative, expressed
MCLGRLDDDFDSHISKIGEQISLSDIISELGCGCTCNTTHCKEMLSLLEPLDDMGISKLLGAVVCTRIGVGEAQNTYSIFLLTFGNNQTIDSSQLTSWNIDVLVDSINEIDPFPLHAICGLLWNNIKGQLSFLKHAVALPNDTFTFAHCTRKMVFPDLGNCNQGNQAWYCLVLLEVLCQLAELGYSKPVRAIQPILGYPLINYPEVLLLGVSHINTAYNLIQHEVLSCVFPAVVKNTMHSSLMNYL

SEQ ID NO: 53218 - protein, 170 aa, Zea mays
  Coding DNA Sequence Number=SeqID_9843
  Subcellular localization annotation: CTP_CleavageSite=64; ConfidenceScore=5.39e-01
MQPGCTPPPAVTQDGDLQFDGGGKRTGLRPLRLPQPQGFSSPGLGSCRVPGSRTRVALEPLLVPASATAAGRGSSADEMARAAHGPTSNSTAFCPSLPHEFGHGRGPPGSGIRPKVIAAAVRPPGAEVVVVVAAGAGDGAPFVGLPMLRRPPPVEWGCSCLRRWNRSSVL

SEQ ID NO: 53219 - protein, 157 aa, Zea mays
  Coding DNA Sequence Number=SeqID_9844
  Subcellular localization annotation: CTP_CleavageSite=93; ConfidenceScore=5.64e-01
MGTDPNAQLTSLTHRTLSGASATSAGRWGSTVGALTGGASGLSGGAPDKSCRLSGAPTARALSSAAQARIKCVVVDRCARSNRCSAGTPDTVRCDTGHCPVNYSRAASHFPEGGKFSVECPGAPDTVRWHTGQSGGTPDSPVCQTRVPFGMSLALFV

SEQ ID NO: 53220 - protein, 87 aa, Zea mays
  Coding DNA Sequence Number=SeqID_9845
MVPSTGPDCLSVSLYQVAPQSEWRRRCCPSVRPNLYVVVAISDYSNRQLKKRIDLFYGRSVEDGFGEGNVLLASSKWRHHNSYKLVP

SEQ ID NO: 53221 - protein, 86 aa, Zea mays
  Coding DNA Sequence Number=SeqID_9846
MAMTSKFVLPLLLAVLMLLAVSGSARRVEGDRWAGGETAASVVGRPTIQFLKRLYLQQLAAPSAAVGDADAVGCVSVRVGAPIGRR

SEQ ID NO: 53222 - protein, 67 aa, Zea mays
  Coding DNA Sequence Number=SeqID_9847
MGTYSCLRYLTQGATTIVFRNLSGLLRIKRVMLETLMEFLTTRNSKSNDTPVNFLWDIAQLFISALL

SEQ ID NO: 53223 - protein, 116 aa, Zea mays
  Coding DNA Sequence Number=SeqID_9848
  Homolog annotation: Hit_ID=Q6Z733; Match level="QueryCoverage=69%, HitCoverage=98%, E-value=7e-08, Identity=40%"; Hit description =Putative uncharacterized protein P0487D09.36
MTGELEAIRMDCSKSSMAMRKNMGGGGGDEKREMAMTSKFVLPLLLAVLMLLVVSGSARPLQDDEWAGGETSSASASVVGHPTIQFLKRLYLQQLASPCPSNMTYDPNSNPHCHRR

SEQ ID NO: 53224 - protein, 76 aa, Zea mays
  Coding DNA Sequence Number=SeqID_9849
MELGLRLKADVILLLFVRSTGRAYEGGPHRVGIHPFLHGFVRSLDPWGVQKGFRGKVPKVHNKPIKIPRMGSNKES

SEQ ID NO: 53225 - protein, 114 aa, Zea mays
  Coding DNA Sequence Number=SeqID_9850
MVYKLNKFVYDLKQAPRARYSSDTVYLLLYVDDIMHIASSSNTQAKLSGDGTSVSNPIAYRSLANALQYLTSIKPDIAYGSNRFVPTCTIPGNRTWARLSGSSDTFKILSAMME

SEQ ID NO: 53226 - protein, 477 aa, Zea mays
  Coding DNA Sequence Number=SeqID_9851
  Gene Ontology: Mol. function=ubiquitin-protein ligase activity; Cellular component=ubiquitin ligase complex; Biological process =protein ubiquitination
  Homolog annotation: Hit_ID=Q6Z5P5; Match level="QueryCoverage=93%, HitCoverage=99%, E-value=1e-130, Identity=58%"; Hit description =Putative immediate-early fungal elicitor protein CMPG1
  Pfam annotation: Domain name=Arm; Domain location=238-279; Score =10.8; E_value=0.47; Accession=PF00514.14; Description=Armadillobeta -catenin-like repeat
  Pfam annotation: Domain name=Arm; Domain location=284-326; Score=3.1; E_value=4.4; Accession=PF00514.14; Description=Armadillobeta-catenin -like repeat
  Pfam annotation: Domain name=Arm; Domain location=328-368; Score =11.3; E_value=0.41; Accession=PF00514.14; Description=Armadillobeta -catenin-like repeat
  Pfam annotation: Domain name=Arm; Domain location=374-410; Score=6.7; E_value=1.6; Accession=PF00514.14; Description=Armadillobeta-catenin -like repeat
  Pfam annotation: Domain name=U-box; Domain location=66-140; Score =72.9; E_value=1.1e-18; Accession=PF04564.6; Description=U-box domain
  Pfam module annotation: Pfam domain module=Arm::Arm::Arm::Arm::U-box; Domain location=238-279::284-326::328-368::374-410::66-140
  Subcellular localization annotation: CTP_CleavageSite=60; ConfidenceScore=5.51e-01
MQHNSSAAQQTEVRGTSSILARGAGMVTPAVSRYRLRPRLVRVAVSEIPLATRRTRQQPVAATEPAIPSNFLCPISLEMMKDPVTALTGITYDRDSVEGWLQRGHSTCPVTARPLRAEDLIPNHATRRMIQDWCVANRALGVERVPTPRVPLSAADAAELLAAVSAAARRGDAMVCRQLAAKARALGKESDRNRRCLAAGGAARALSSAFLRLVDQPASFGGALGEILATLVVFFPLDEECRSHIASPASLDAIVSILSHDGEATSKSSAAVVLREIASSSDSDPECLDALSETNGVHDALIKLLQKPVSAQATKAALVTAYYLVRGSDLAARRLVDLGMVELLVEMLVDADKGTTEKALAVLDSLLLTEEGRGKACAHALAVPVLVKKMQHVSEMATEFAVSALWRLCKSFSGEGPCKAEALQLGAFQKLLLLLQVGCMGVTKERASELLRLLNGSRDGVECIETVDFKGLKRPFS

SEQ ID NO: 53227 - protein, 125 aa, Zea mays
  Coding DNA Sequence Number=SeqID_9852
MASEHFFFPSPPLAAAAREYRLVAVRGKGVGHEDGGPGDAPCGPAWGGPSPAHPSPSREPAHLKMPDLGSSVGFPLSLVTPLRPSNVTMVRSSITLGRSPPPMVYSSGCPALTLPPRMVSVLACY

SEQ ID NO: 53228 - protein, 107 aa, Zea mays
  Coding DNA Sequence Number=SeqID_9853
MAGMYCNARDCLNKRMQPPARTAARILLSLVDKGPGKGDTPKRTLLREGTGLRAPLLIRGSKTGPPKGSTVASDRVGPTPTTGQGFEGQPPEAFHGRLRLLGLRAHY

SEQ ID NO: 53229 - protein, 183 aa, Zea mays
  Coding DNA Sequence Number=SeqID_9854
RRQQGLDRSNSCPSARLRRTSDSHDITPARCQDLSGCHIGMAFLEEVGRAGPRTGQALSWGRSLPSPAWTLVTPLLQAHLTWARDEHEGRGTSTSLTLDSGHLASPPFALAHALDPSGLGHAAHSLVGLGTPLSRNADNNVTRNFNLPSGLVKDSICPCGVDRLGPKPIRSLVLIKHGPCHVQ

SEQ ID NO: 53230 - protein, 531 aa, Zea mays
  Coding DNA Sequence Number=SeqID_9855
  Homolog annotation: Hit_ID=Q6BTJ4; Match level="QueryCoverage=43%, HitCoverage=29%, E-value=1e-08, Identity=28%"; Hit description =Similar to CA1621|CaIFF6 Candida albicans CaIFF6 unknown function
  Subcellular localization annotation: CTP_CleavageSite=61; ConfidenceScore=5.50e-01
MVAFQGGHPPFKGDSPRLRPQPSWAESSPTRFKVLPLRRGGWVPRVMQTGPGQKKPNRRAQCMQPPSGYKHSSTFAQTSGPTRHATGAPVAMCEQLHRHSHHYHASSTAEPVPRLEATLRTTQQCQLGATVNTAKNGPAVMAVVGGQEPRSRRQPSSRPIQGQRENSLSRREDGAPVFRSSNGSRTRNGHLANRSPRRINSAAGQTTPQAGEASDASPSPPRASLLIRGSKTGPSEGFNSRLRALGFCAHYWSEVRRPAPRKGSTAASGHSGSAPTTDQGGNDLVTESHQREASSPRTPSKGDRVRQITRSAACAAPTAVPLDRVRLTAAKSGLRRHRKLRFARPQGSDSGSAPEDDELRFARPQGSDSGSAPEDDELRFARPQGSDSGSAPEDDELRFARPQGSDSGSAPEDDELRFARPQGSDSALTSADDLRLARPGGSDSTSASEDRLDLDLGGASTSPNPGHGPTTSTGGAIITLPHADSGYGEQDQRPIWLAPPDRLQRSSDGHDTTRTGCQNLSGCHDGMYLGR

SEQ ID NO: 53231 - protein, 346 aa, Zea mays
  Coding DNA Sequence Number=SeqID_9856
MARLRHTARKSVIPFLPSRLAEHPLHRTVSGQSSHLERLHHRLREEQERRRQHGEQQGSSSSPQQEVETVRPRSSVAQLGAPLVPPRDVPAVGGPVGGAVGGAVGGATGGDPDDDSDHNTESSEPQEAEGWVARPITRDTARGCHFHDALDTLLRQAFDRHTWSIEYRCVVYQHSRERYPDRWEATCLVRRPEDDLRGAEAVSEHYSISERDTAEAAMQDAARRALSQYCSLFGGVADGLNLRYYPRRPTGNTESVVVSPVGEANPRLSSIVNLVAVLNTELDHSLDELSRARTEIAELRAELAERHHQEGGSPAPVGTQHPYRSPPRGHHTYGSPVCKTRIDLDP

SEQ ID NO: 53232 - protein, 173 aa, Zea mays
  Coding DNA Sequence Number=SeqID_9857
CLFDGAPDSLVYTGHVRCPSHDTNDIGSQTVGVSDFWARLDVRCTPDMYCSMSGAPVWARLPSARAARAFNALQVALDADIAVAPLLHRTVRCTPDSPVNYSRAAQVNSRGWRVPEAILPWSTGHVRCTPDSPVNYSRVPLEIPEGGEFEFESSGAPDTVRWCTGQSGAPRPE

SEQ ID NO: 53233 - protein, 917 aa, Zea mays
  Coding DNA Sequence Number=SeqID_9858
  Homolog annotation: Hit_ID=Q7XBD1; Match level="QueryCoverage=11%, HitCoverage=28%, E-value=3e-09, Identity=33%"; Hit description =Putative retrotransposon protein
VLQRFEVKIHQLTPNAVVALAKYVWVVTSYGGQPSVEVFTKNYCLHWQKRKVGIKIAQFGSCTFTPRTDKTSAEVVELVPCARNKWGNWYDYWFYVAGGEVEDLPGLPAAMMCSHCYVAFPPFDVAEDDIVREAEDGAVQIVGRYVPRMEALRSRDIHGSNVRLNRVFELNRLPYDGYPGNDAATTVDRRGKRSVAVTEEGPSQEAAPAAKKRKIGTAVGGLGVSESFAVELMGTCAALGGGGGMSSLELRESSARMLKVTGGRWPKNVPVPRAAGEDFFTSRMARNLKIFPYGRNIATVVSAVMEKDRQDAAQKRRAVVRLGDPFREAKKARVAAKSAAPGGSKPLSYAKPAAPRPSKASAGAKAAASGVGKPPSGGPTKGRRLPSPARTEGSDGGQLAVVPPPVAATSPMAMVGAKATEAADFADHIASGALTVDFAAEVESLCVQHVYAVREKSAVESRSRRLSEKVATMEAERADLRRQLVEERREANKAIADAQAAPDEAKFARTEGSLARQLAEELQARLDALRSRVDKAETSMHVEVERTLAQFVDAYRELGARTAAFEAPDQEAGLHFLEWMQEELGVLPTIVTGLMSFASLITCEVAMNALSREGCRHFEVFDQNDENFEREIFKVEDPVLKQSAGALFDRMWGPHDRETVRERSDWAIEQMTHAEGVEDLGGLDGALPEAAEVDPAPPYDVGEGPSSTPEPTVPTGASEYPEPTGEDALKAVAEPAAEDPTTLAGPSQVLRFGPAHATATDNTIFVAASTVAADDDSFGSVSKCFESDDSGSSIAWTEESLDEDLDYFAALDVAAAEPSPRVEGSEALPGASTGYRQRRAVVKRRVSELSRSGRRHRSEMESGRLRVDGTGKREFLSSPIGTSVGEGELRNLFEGEELRIMLFNYREMGIIPKVEPI

SEQ ID NO: 53234 - protein, 237 aa, Zea mays
  Coding DNA Sequence Number=SeqID_9859
MGVAPDLQMDFFKDNPFEGLPFTCGNWHEAILHYALEVSIMSSIFCCPVTAVRSERLPFPSINNPFASLVSSHLFAASYCLFPFFSPKASIMGKNNKRKREPTPPSEEFGDSEYSEEEFSSEPEGSPAPVSPPASSDDSDDSQGIATEVWTYIRAVERAGLEGSDESEYSSDEEDSDGGDEGEDDDDDDDDGGGDDSGRGGGDGGRDSTKGSSRGSTKGGGGGSAKGGGGGRGRASG

SEQ ID NO: 53235 - protein, 205 aa, Zea mays
  Coding DNA Sequence Number=SeqID_9860
MSDLAAELHPGHMVEFGVSRISSVREQDMQQLSTPARAPACPALRQSQAGAVAHARAYKASLDVDRTPPRTLDLIGARDHRRLPCKRRARGHPIPRHRRPASRALPSHARPSEETVHATVKLPEQGIVLCFTGEASPRSPDFTRPPVNVDRIAVVKPEHPPPTSSPACARGSADSGHHRRRAVPRCDRHDLPKPAPPLAGPFSPP

SEQ ID NO: 53236 - protein, 111 aa, Zea mays
  Coding DNA Sequence Number=SeqID_9861
  Subcellular localization annotation: CTP_CleavageSite=78; ConfidenceScore=5.18e-01
MAQPTPVYVVAVAFPWKQASMAGPVARALGLVIGYFASSLGKRLWPSQGGTVVAATQSLAGALQTSLDCVMPWLGLLVVQAIGKIVPVTLVLTPAMIVTHRIRVRDIDAVD

SEQ ID NO: 53237 - protein, 89 aa, Zea mays
  Coding DNA Sequence Number=SeqID_9862
MAGIAWSTRAGGCSRRRRVYRPNHGDLVQSKGTASIPCSGSFTELCTLVSEGWMGLGQAGLAGLRRQWLGWPRSRCARANGGELGSGEA

SEQ ID NO: 53238 - protein, 46 aa, Zea mays
  Coding DNA Sequence Number=SeqID_9863
MGEMSALSQVRNPAENRLNRPLTGQQTVYQSDWQTDWQTDLQAGQT

SEQ ID NO: 53239 - protein, 91 aa, Zea mays
  Coding DNA Sequence Number=SeqID_9864
MTNARTWRGRHMKPLPEIDIIGWEKTLSVPSDAGGPQAEVVAAGEQGLRVIDLELEGYWAVVQNSMNEGLQGAAFFDMKKQTHTSNEGKAK

SEQ ID NO: 53240 - protein, 179 aa, Zea mays
  Coding DNA Sequence Number=SeqID_9865
MDEATFRDPQEHRLEIYYTIVRPQKIVYIFREVQQCTLLSKTECSEECSYALSHQDTTLDRTLKNDGAAKKGYCYCLGDDDEKVLITFASYNGNYNNKSPVAVVAIASVTTAYAVITTTDEKPRDIVVTDDFDIKRTQPASNSKKIVAEIDVLTGQNVLTGQMILISRELNLEIKLSLC

SEQ ID NO: 53241 - protein, 124 aa, Zea mays
  Coding DNA Sequence Number=SeqID_9866
  Gene Ontology: Mol. function=aspartic-type endopeptidase activity; Biological process=DNA integration
  Homolog annotation: Hit_ID=Q8S474; Match level="QueryCoverage=63%, HitCoverage=10%, E-value=5e-10, Identity=47%"; Hit description =Putative pol protein
MGISTSTREGKSVDQKGSTFDLIGYSDADWAGCAKGSHLANKKTKYWVQQKSKGATEGTSGSGAPDCPVCHRTVSGAPEDSKSNSSPSGKSRALRYNSPDCPVYTDSVGAQESGPGLTASDSHG

SEQ ID NO: 53242 - protein, 163 aa, Zea mays
  Coding DNA Sequence Number=SeqID_9867
  Gene Ontology: Mol. function=nucleic acid binding; Cellular component= nucleoplasm; Biological process=RNA splicing
  Homolog annotation: Hit_ID=A2XH96; Match level="QueryCoverage=49%, HitCoverage=39%, E-value=2e-34, Identity=81%"; Hit description =Putative uncharacterized protein
  Pfam annotation: Domain name=RRM_1; Domain location=32-101; Score =62.8; E_value=1.2e-15; Accession=PF00076.13; Description=RNA recognition motif. (a.k.a. RRM, RBD,
MVGVEVVGGIYSPQPPIQPLGQAAVDGRTGHSGVPPDSVRPDDLHRPFGKFGPVKDIYLPKDYYTREPKGFGFIQYFDPEDASNAKYHMDGKMLLGREIDVVFAEENRKKPSDMRARKKKIIFVSTLMCTLGYLDVYYVLGIPKSLMSEVGCEPMNLDVGRAD

SEQ ID NO: 53243 - protein, 75 aa, Zea mays
  Coding DNA Sequence Number=SeqID_9868
MNVRELTLAVSHPPQVKNSKWRTLWQTCTLRCDRSIKRCAKKERIYAGRCAKSGRRYVKREGRNSNKHPCLPHHH

SEQ ID NO: 53244 - protein, 175 aa, Zea mays
  Coding DNA Sequence Number=SeqID_9869
  Homolog annotation: Hit_ID=Q6JAD0; Match level="QueryCoverage=49%, HitCoverage=55%, E-value=3e-30, Identity=81%"; Hit description =Putative uncharacterized protein
  Subcellular localization annotation: CTP_CleavageSite=67; ConfidenceScore=5.03e-01
MEAGRHPSPPPCPTSAAPLRISPPADLALATTVHPSTRDGSSPPCPSHHNHTTPSPAELETSELAVEAMPLGDSAEAADLVLPDKLLAALPRDPYEQLDLARRITALAVSGLEREAGRLRAEATGKDRENAELRERVVLLDIALHETNARLRSPMLTTADLVPSCGHEATAFDDS

SEQ ID NO: 53245 - protein, 152 aa, Zea mays
  Coding DNA Sequence Number=SeqID_9870
MGKNNKRKREPTPPSEEFGDSEYSEEEFSSESEGSPAPVPLRADDSQGLAAEVWTYIRAVKRSGLEGSDESEYSSDEEDSDGGGEDEDDDDDGGDDDDDGDGDGDGSGSGSGRGSGGGSKDGDGGGSRGSNRGGSSRGSTRGGGGGSNRASG

SEQ ID NO: 53246 - protein, 173 aa, Zea mays
  Coding DNA Sequence Number=SeqID_9871
MEARAHMSCNRRTGYHVQRNRTATCANAASSRDYRTSAVTRGSPARDPIVPIKCNGHGPVSRGDRRDGWYDHRRTDGNCHNRRRQRSNHQPGPGPTYRLASSHEAAGEPSPTAGSKAGPLKGFDSRPRTCRVRDDPASGATGISASPDPGLSLGLGRRSLPRPTPASALASGE

SEQ ID NO: 53247 - protein, 250 aa, Zea mays
  Coding DNA Sequence Number=SeqID_9872
MKGSSRSDKNELPPHRKSCEITNSKRLTGDHCTSSDNDLRLGRLDSSSDFPRANATVKSPSPMSPHGGREQSIKANEPEVRPLVTLTVSSAEATTPAVGSLTYGSHHHLSTDDSGHLRTDAALVNGGRPSAHKEVLAPVLAMGVRTRPSRDVDAAPAAYDVFRWQFASSARLVNALLPQMLEEEVGRQPMRKAGPQLGSPSPPARMMNILEAEGRGRPQHGSLFSATRPVVIILGDHWRGTAAGLHDENP

SEQ ID NO: 53248 - protein, 162 aa, Zea mays
  Coding DNA Sequence Number=SeqID_9873
  Homolog annotation: Hit_ID=Q7XBE0; Match level="QueryCoverage=79%, HitCoverage=13%, E-value=7e-07, Identity=26%"; Hit description =Putative gypsy-type retrotransposon
MGMGMGVNPYPPVYMGDPVGLFLCRGSRCTAVDSRRPAYLRIPLQTSIPHYEGEWFYVKNIDWSAPPFTDHKMESHAEWTRDVESRYKKKVDYITGKIVVLKGQGLSGERLICTFMQRWLQSLMARQNLMWKYAGESDPDRHSNEVLSQSEVEARINDITAG

SEQ ID NO: 53249 - protein, 88 aa, Zea mays
  Coding DNA Sequence Number=SeqID_9874
MPATIQGSILTTRTRGDANKVYVNLSWGVDNLALANLFTEQGPSMTDLDDRSVLRYQHQSRLEAILNFHLRCTFGLRITNMKCGQDEA

SEQ ID NO: 53250 - protein, 496 aa, Zea mays
  Coding DNA Sequence Number=SeqID_9875
  Homolog annotation: Hit_ID=A4FMG9; Match level="QueryCoverage=56%, HitCoverage=18%, E-value=5e-08, Identity=26%"; Hit description =Chromosome segregation ATPase
  Pfam annotation: Domain name=Tropomyosin; Domain location=91-324; Score=-117.5; E_value=0.07; Accession=PF00261.11; Description =Tropomyosin
MDKDRQEAAQKRRAVIRLPEARPKRAWGTAKSAAPGGSQSMLAAKSAAPGSSKVPEAVKAAGTGGTKFASAVAAKARELPSPGRRVADFATNIRSGEGQLVVVPPAVAPAVSAAVPAAKGSALSAGGEIPALTAVKDEAGAVSRRLKEASQRLSQAADFTDRVASGALTAVMSAEVERLRTQHADAVREKSAADSKCRKLAEKVAALEGERTDIRRQLAEERREANQSLVKAQSAQAEANLAWVEGSLASQRAEEWEERFNALQARMERVEASTRSEVERTRKQLMDSYHELGARTADFEVPNRESGLRCLEWLQEELLALPTIVEGFMSFASLVTCEGEMNALSREGCRHYEVFDRSDEDFEREIYKVEDPVVKESAGALFDRMWGPHSREVVREWFNRARGQAARAETVEDFGSLNSARPEAETDPVAAEAEVVPAPPRKPAKAPSLPLRLLRPAVARRQPLCRGLRIPQRRRRSRQRRIPRRLGLRRWLSGCG

SEQ ID NO: 53251 - protein, 260 aa, Zea mays
  Coding DNA Sequence Number=SeqID_9876
MPSSSSSAAATPPAGASSEETLSNVAAEELRAGDTVEFGVSRMSSVRVQDMQQLGYFGSGVARVPGAEEVPEPEGELVVFEAFFADGLRLPAHRFVGEVLRRFNVQKRMIGNKIAQFGSCTFTPNTGKTLMEVVELVPCARNKWGNWWEFWFYVAKGTIEDHPGLPVAEMCSHYYSAYPQFEVAEEDADEGALRCAAGMSSERDLVEEFVAYGVWPLAHGWALGEVCPRQMPSRGGMQVRSPTFALDLHGRDLTTFVREV

SEQ ID NO: 53252 - protein, 141 aa, Zea mays
  Coding DNA Sequence Number=SeqID_9877
MGKNNKRKREPTPPSEEFGDSEYSEEEFSSESEGSPAPIPLRESSDDSDDSQGLAAEVWTYIRAVERSSDESEYSSDEEDSDGGDEDEDDDDDGGGGGDGSGKGSGGGSKGGDGGDSRDSNRGGSSKGSTRGGGDSSRASG

SEQ ID NO: 53253 - protein, 156 aa, Zea mays
  Coding DNA Sequence Number=SeqID_9878
MMLVDYTTVLDRPCVSVESPTQQGIESVVEVTPGLLQQLGCPKVVQGTSLAEVQVKAASQTPPLAEARGKSPAAPGPAPASGIGAPAPRAGDDAVSPAGWTDLTLCDAGDAPPGEKGKKGITDLRAVHLRRAIYKTHRKHKSKNRTMRPESKQKGK

SEQ ID NO: 53254 - protein, 139 aa, Zea mays
  Coding DNA Sequence Number=SeqID_9879
  Gene Ontology: Mol. function=RNA-directed DNA polymerase activity; Biological process=RNA-dependent DNA replication
  Homolog annotation: Hit_ID=Q2QXU0; Match level="QueryCoverage=73%, HitCoverage=7%, E-value=3e-08, Identity=33%"; Hit description =Retrotransposon protein, putative, Ty3-gypsy subclass
MKQEEFMKLKQGGDTFTQYLNKFNHLSQYTIDQVNTDLKKRNCFMRGLNDRLQRKMATCLDLSYSRDVSTTLEVEAKYAGPGKSKDYGGDRSNQGLKSDKDYPYPKRNNSNNQQNPESSSQGKGNTENNATGKNMNKNG

SEQ ID NO: 53255 - protein, 185 aa, Zea mays
  Coding DNA Sequence Number=SeqID_9880
MAVMGSTSEKMYLCQLSPRHEDSSSDNNDPIGDLEAQVEQLRTELRHRNIVWVEDGQRINELRTNIQHLQDKLAERDLALDCAVNSRSIAWDREAKARARVEELSTAVDNLQVYCNTLHEEVHELYSRQHPDIPVDPVGMGAGPSGTTGEALGGELDLFKPPPSMNLADEWTPTPDNKVAKDNKY

SEQ ID NO: 53256 - protein, 112 aa, Zea mays
  Coding DNA Sequence Number=SeqID_9881
MGYKFAADRLACSGTKIRDLGVASYSVRRFVECFHWYSEWIGSGSENLAAEIEEEIEVEEARTTPPPPPEEPQAGNCFYFDICGAESDSPITQGKPRCIGHLLAILKSFSLA

SEQ ID NO: 53257 - protein, 102 aa, Zea mays
  Coding DNA Sequence Number=SeqID_9882
MAAGGAAPLCGDEVTGVEAGAGFGGSRVVGVGQRGRGCHGELDGGEWAMNPRAKRGERRDRDDTGNYSSELDRAKSVGHHASTTDHRGRAPAKAKLDEHKAQ

SEQ ID NO: 53258 - protein, 345 aa, Zea mays
  Coding DNA Sequence Number=SeqID_9883
MQAACNRTKGEHPFDSDASSMGAQAHTSCNRRAGYYVREAAPPLAPVPRLLYCGTSAATRGDPTHGPTVPTEHIDHRSVSRGRRRGGQYGQKWAGSNGGDRRAEVAVESSAGSRPLLGQQESPLPWREDDAPVFRSSNGSHTHNGCPANHTSHRINSAAGQAAPLAGEAGDAYLRHNDRVKRGTGKGYTPKGILLHEGSGPRAPLLIRGSKAGPSEGFDSCLRALGLRAHHWSEVRMLAPRMGSTAASGHSGSAPTTDQGFVSWPPKGSTAALEHVERGMTLGTSDTWPRLGLCSRGTLEHFRDQQERFCNGIPSEGGIEPSDPIKWDRVRQITCWYFWSAPLGH

SEQ ID NO: 53259 - protein, 113 aa, Zea mays
  Coding DNA Sequence Number=SeqID_9884
AGELVGGEEYGLSRAQLTNQLGQRASPGIKEGGRPKSDEDDLGFLVKFCRVRELGKLRKLLAKLSERLARLGSDWNGLAAVAEARVAMAGGRELVGAKEGRLAGEGFADWIKR

SEQ ID NO: 53260 - protein, 236 aa, Zea mays
  Coding DNA Sequence Number=SeqID_9885
  Subcellular localization annotation: CTP_CleavageSite=71; ConfidenceScore=5.27e-01
MKSIQTSEDSNHSSEASGATPGRKLRLARPQAPASGGGLRLTRPPDSASTSASGGIASSPDPGLGLKRSLRLARPWARTDRANRGHIITLSLASSGYKEQDRRPIWLTPATGNDGAACATMTPVALSPLRQQGDVSRILAALPVVLLQDSGAPPTATLSRVQGSSSPPTATLACTQGLGTSLPDTLAYSYTPHCTSGPSPYIYKREVQGHPGGGFAQGRSGRTGSLSISLPLATFL

SEQ ID NO: 53261 - protein, 87 aa, Zea mays
  Coding DNA Sequence Number=SeqID_9886
MTRGGRRRGNSLARVIGGKPRGIYSGDQRRAKAGHGDAVEMPRNTAQGRKAAVTGVLIRFHRDELCTVAGILYWPELIHGGVTPSVI

SEQ ID NO: 53262 - protein, 196 aa, Zea mays
  Coding DNA Sequence Number=SeqID_9887
MGHGCVVFTPWERALLSLQEGTRACRRFDRCFRSSAAAITASPLLAMPTVVPIPAADCPVAVAFNWHCWVTRRAASSRGTGSAAEKAWHWRSPPVREDLSGDLPVQAGASSIRRRGAGAQVAAVVGAEVVVARDGFSADETVGAIYGRTPGSLALMACPRPSSGDVGEGLVTAASALRSSLLLFSHSKRGSLSLLV

SEQ ID NO: 53263 - protein, 136 aa, Zea mays
  Coding DNA Sequence Number=SeqID_9888
MAGGIELAGAKERWLAGEEIWSQEIWSVSLPKPKANPRFRHRKGEQQRPRRCFQPRRNLARPQMVTPAKGPPPKGGRQHRASGCLGQASAAATTSSSVWEAASSRADEVSFRADSASIRANTAASGSGSSQSSRGS

SEQ ID NO: 53264 - protein, 155 aa, Zea mays
  Coding DNA Sequence Number=SeqID_9889
  Homolog annotation: Hit_ID=Q7XGQ1; Match level="QueryCoverage=34%, HitCoverage=17%, E-value=5e-07, Identity=45%"; Hit description =Retrotransposon protein, putative, unclassified
MDYDKKLKKLAPTKKIRKKTKSQGCQAERKKEAPPALPPSRIENLSDVEDMSLASLDDLLKEFGDTLEKEFGRFPLGAEGEAGGEGSETHLPAPPELPLDLAQVLANQTRLIKVLTRSLENQRPNGGRPQDRMGYFLRLKPPTFAGSSNPLDADD

SEQ ID NO: 53265 - protein, 200 aa, Zea mays
  Coding DNA Sequence Number=SeqID_9890
MWMGKGHVFTKRCFQKVYDEGYSPSSPCEWDDQGLLGLGEGLRVMKAGEHREDKEGECFVRFGHGDGLTPFGITVKTLLFLYQMEGSLVIRTSYYSEVERFPHLLRSCALRMGIRKKPEYVWKEYHENGTEKCSMAVYLGESRNYPNHPPFQVTFTKHRFPDTCQNVAQKALRQLCQNYSREVFETPLRYFPPSNKNTPA

SEQ ID NO: 53266 - protein, 942 aa, Zea mays
  Coding DNA Sequence Number=SeqID_9891
MPVVELVPCARNKWGNWNEFWFYVAEATVEGHKGLPVSEMCSHYYSAYPPYEVAEDDADEGALRCAAGQSSGRDLVEEFVAYGVWPLAHGWALGEVCPRQMPFHEGRVVRSPAFALNLRNRDPAAFVRDAEDLAVRLVGRYVPRTEGQRSFDIRGSNERLNRVFELNQLPYDGYPGQDEADRRGKEPAVETGGDPTLVAAASSKKRKLGTAMGRLGVSDSFARELMRTCAAPGERMSSPELRESSARMLRVTGGCWPKDIPIPCAAEEDCFTSRMVHRWRVFPYGRNIGHVVWAVMDKDRQGAARKRQATVRVHEARPKRQRGTAKAEVSGGGKPPLPAKVGASAPGKAPEVTVGAGGPTLTKVVPSVSGVAEAAKAARTLPPPGKRVADFGTEINVEDYLGGSDEGPLALVMPGAAIATAAPAPKAGGETLGAGGEVSALALVRDEAGVATRRLRGATEALSRATEALSQVADFTSRTASGALTAALSAEVERLRTQHGDAVAALEKEKADLRRQLAGERREANEAIAKEQAAQAEARLARAEGNIAKELAGELQRRLTALESRVEGAEAAMRAEAERTRTQLMTAYRELGVRTGDFEVPEREAGLRCLEWVQEELQELPTVLAGLMAFTSLVTCEAAMNALSREGCRHFEALDQADEDFGRDIFDVEDPVVKESAGALYDRMWSSYGCEVVRARAEAARAQAERGKRVDDFGALNSAPPDPETTPAEAATGVAPGPTPETAEDAPGAPAPAAAGEDLPPKVAEGAPDAPAAAVPSAEDPAEVGAEAAAEASAEAPAAAGPSQVRDFGPAHATATTEFLAASTAEDGNEYGGSVSEFCDFTDSGSSVEWTEESSEGTWIILQPWTWLRRRLRHTLRTRQTCPVLAPGTDDEGRLQSVGLVRRKGPGSALAGLVGRSCCLCRPPLVQGKGSCEAFLRVRSLG

SEQ ID NO: 53267 - protein, 202 aa, Zea mays
  Coding DNA Sequence Number=SeqID_9892
MNKDRNLHNGIGIQMGQIQAIEIKETAEKRRNGKSKTAEEKRNVDDGFVSAFCWNSDPTTDPPGTEVLWRKNSDGYKMEKVGFRDNGHMVTCERQLTVGIDGGMTATDELEAFCLGAISTLLANGAEEVLQENREGLDAEKQELGHGMRRRTTVRYIWGFPEPGATSKMWACHVITRPLFLKHGCATSSLGRYFQNGRCGPF

SEQ ID NO: 53268 - protein, 133 aa, Zea mays
  Coding DNA Sequence Number=SeqID_9893
MPNQREQYRITVHLFIGTGRNPCKITLMPLTFINNSMIILRGDLRKPKAPNNANVVPSRLRNRCRDSRQRCAWTNSANQAHRSQGPGKGILRKGSFSAKEAGPEPPLLIRGSKASPSEGFDSRLRALGLQAHY

SEQ ID NO: 53269 - protein, 142 aa, Zea mays
  Coding DNA Sequence Number=SeqID_9894
  Gene Ontology: Mol. function=serine-type endopeptidase inhibitor activity; Cellular component=extracellular region; Biological process=response to wounding
  Homolog annotation: Hit_ID=Q6E658; Match level="QueryCoverage=42%, HitCoverage=82%, E-value=3e-21, Identity=80%"; Hit description=MPI
  Pfam annotation: Domain name=potato_inhibit; Domain location=83-142; Score=102.2; E_value=1.6e-27; Accession=PF00280.9; Description =Potato inhibitor I family
MTPPDVKHKAITKDLCVEYGDPRYRRECVPVTGGGIRVVITPNPSFRELETKNSRGSLTRPVSVRHRQPSTMSSTGGGDDGAKKSWPEVVGLSLEEAKRVILCDKPDADIVVLPVGTPVTMDFRPNRVRIFVDTVAEAPHIG

SEQ ID NO: 53270 - protein, 389 aa, Zea mays
  Coding DNA Sequence Number=SeqID_9895
MHCALPPSEPPDGERPRCFRLADVGGAQLRGGWHLSAIAQLQGFSSGSPAASSHRWSRRRVTTGSMVGRSKPGCSLCPALSFKDLHHPCWGGGRGEPGPAFVVAGVLPLPPASRGGNHHPALRRRHPPAMPGKANCCCPARVQHSVLCTGDCGRPHRRVSQHVVRREGGTRVLGRSRSRFRGEDGGEDLPVRFGAAGARWCGVGGQVDAAVGAEVVAAGEGFSTNEIVSAICAPGLRLFGFNIWFSSSARGHEREPSNGSVRPGTIAAAAEVAGESPGESLGSVGLATQGFSCSVKETLGRSAMSRSWRQRCQRGQRQSQLEKKLHRPRSRGLPRPRRHSSGGWNLARHGADVILRGGDPSPVSLSEAGSGSAEGGVDAEGAAAPSVDV

SEQ ID NO: 53271 - protein, 98 aa, Zea mays
  Coding DNA Sequence Number=SeqID_9896
MTKDEGLNIESFAKKAQPTMMDGMMTFTMECSSDVVFFPSPENDHVMTKAEGHAGNLLPGFPNEASDCPSIVSKYGRPRRVLAGIRREDSCDSEPRRQ

SEQ ID NO: 53272 - protein, 295 aa, Zea mays
  Coding DNA Sequence Number=SeqID_9897
MKSATTASVVRPLSFSEQISASNTLASVISEEVGDSIQLGVQTSGCLPYQGGRDLQWFSIINHSRRHPLMMSLRGMSRYSVFLPDEAQELRRQQVGAAPSHPDSTMIKTFLETEVGENPKKGLAQMYENGNLQNGIRVQMRQVQLVEIKETAEKGGDGKSKTTNKKRNINDRLMGILCWNGDAATNSPRAELFWKQNPNLNEMKEVRFRNDRHMVTSEWQLAIGVDRRDDCSNGALPLPLWRHRNLSSETSRIKISGKQRSGSKVKGEVRAQKSKKHVGHIGVSINGVSRVEHYF

SEQ ID NO: 53273 - protein, 71 aa, Zea mays
  Coding DNA Sequence Number=SeqID_9898
MAQWVRVLSRGELTGDDLMAVKSHGDVTEVFGYVAQGHAMGVTGVLICFHRGEHGVSNICNANAYDVMLKF

SEQ ID NO: 53274 - protein, 54 aa, Zea mays
  Coding DNA Sequence Number=SeqID_9899
DVEKVGGMFSKIKLDGGSIMAVMGSTSEKMYLCQDRLDVGLMTEDPLTGHMPRH

SEQ ID NO: 53275 - protein, 80 aa, Zea mays
  Coding DNA Sequence Number=SeqID_9900
MAHSCDGMTRAEGSDGIARGRRKGQGRKAPRLAGEEVSLLSCGSFGLLSEESLLAFLGTEDPSKSGLPLLRCDFLVPLFQ

SEQ ID NO: 53276 - protein, 217 aa, Zea mays
  Coding DNA Sequence Number=SeqID_9901
MGCAGVLWRNPHQGCLFQRLHRRRACACGGVVDLVFFFATVGGVQPHGSWHPSTTIWLQGFSSCSPAAVPRRWSPRRMTTNLVVGRSKSGCNLSPTLSLKDVHHPRWGGRRVEPGSYLPYGSVTRLFLQHPEGVHQSCGRGGPWPHGAGRLQAVSCSVTGPLGLDGSDAASDAASRRLGALGPPEAEVVVAAGVEVVDVVGGAVRSQLLAWLLLVRR

SEQ ID NO: 53277 - protein, 117 aa, Zea mays
  Coding DNA Sequence Number=SeqID_9902
MQMIALCVDNVEIAVEEVADAEDDAVNPPWTSRFQVHRRSTGVPTQLAGVEQLADRAHETRTDEVDDDVDATNLDHKLNTTEIDVPAKRRKNSMRASPGTPLATPCSRVREDGAGVV

SEQ ID NO: 53278 - protein, 52 aa, Zea mays
  Coding DNA Sequence Number=SeqID_9903
MGKPIPSLLMLLLGRVTALVPTITGMGDHVSGRVRRAICGQVHSGCGKHYAK

SEQ ID NO: 53279 - protein, 218 aa, Zea mays
  Coding DNA Sequence Number=SeqID_9904
MQSLDTTEIEGEEAPKSFLSFIQQPIDYFVDDGISDTYYIQRLFHDRIGQGVVWLGQHGQFSAIVHPNIGVKLSAHQSSFDRRVFRVVCGEGGFGLGHSFNMVVTSLLQNCRNPSSAGEGTNVPTITEYLFKSFGFSAYPIKNTLGVTSDEFSSEEYAPTLAKMVFNFLTQSKDFSKHLSLDSQSSSTFFSSLVFDHSLISCFTFASSKFSLASASFF

SEQ ID NO: 53280 - protein, 94 aa, Zea mays
  Coding DNA Sequence Number=SeqID_9905
MARVACTLRGKRLDSGVSVLSLGVNPICGLSGVLGTLGRILLSYLVHMHNRLRSLRQGQVHVGQITWEVLPHPTRGTSDWRDCEVGTSPNPRSG

SEQ ID NO: 53281 - protein, 243 aa, Zea mays
  Coding DNA Sequence Number=SeqID_9906
MTSHRSLEGGNTQSHTDGLAREGFPRILWEVLQGAGYTTPPQYAVQLFKKHRVPRCRLSTHPIGLFPAEKEDGPMWKDRVEHAKDIWALYLGQTAHLTVRCMDALYRLQVKRGEAMSHLMALLEATKITLDNREELVVDLSTEMVEKDLQVEQMSNEIQELEVLVGTKENTIEVLKDQLINTQQQLVEANQHLDMHHQEIQDMEANEDVDIEGGEEPEPASSLDTAGSGRPSSPESSVASFAH

SEQ ID NO: 53282 - protein, 163 aa, Zea mays
  Coding DNA Sequence Number=SeqID_9907
MALHKLYDDGWPPSSLTEAGRRQQGLDRSNSCPSARLRRTSDSHDITPARCQDLSGCHIGMEDQGLLRGGWPRGTEDGTGALLGPLASLTRVDACNPLLQAHPTWARDEHEGRGTSTSLTLGSGHLASPPFALAHALDPSGLGHAAHSLVGLGTPLSRNADNI

SEQ ID NO: 53283 - protein, 212 aa, Zea mays
  Coding DNA Sequence Number=SeqID_9908
MGPTSGLGATSSAGARRPWKARDRGGSHLARGKKLREREKEKKDSGRIFLFCQEQGLTTLESHPLQPGRRSLDSKTIGFRADDTTKAATLKALTIFCGYHPLEMMMHPMGLFPTEKRDDPMWCNRHIATLEQQVEIWDNTIDILEIQLHDVQKELEEANNHLEMHHQYMEANEACSEGEEDPEELEPAPGPNATPSRVPPSPASSVASTTQG

SEQ ID NO: 53284 - protein, 258 aa, Zea mays
  Coding DNA Sequence Number=SeqID_9909
METIHLELDEKLFVNTQQAPTWRANCRRFDPGGPWTDEADALAVGGYKRSRGRERACSSARPPARPPLSYEGPGPSFYRCKERVQGNDDPPVARSVRAQGRARRRPPSEVEVEAEPRGRARRSPPSEVEVEAEPWGRARRSPPSEAEAGVEPLGSGEAELPVAPEAGLSCCQPHPGGWHNSRSRAGGAVFLSGQSVKRRSDCGHFGRLRNARQDKVSGDPCFECSCDTVGWLGDLAKVASLRNLSELGLGRVEGAPVA

SEQ ID NO: 53285 - protein, 371 aa, Zea mays
  Coding DNA Sequence Number=SeqID_9910
  Gene Ontology: Mol. function=ATP-dependent helicase activity; Cellular component=nucleus; Biological process=mRNA processing
  Homolog annotation: Hit_ID=A3A5W2; Match level="QueryCoverage=27%, HitCoverage=8%, E-value=1e-33, Identity=73%"; Hit description =Putative uncharacterized protein
MKLSPSKKARRRTSPCCELETHIGVGDKVLAEFITELGRDSKTVPEFDAKLKEKGADFPDYFVRTLLTIIHAILQPTASNPSSATVAEGSTGAESAKFPGLARPDDPDHARNLRLELERDADAAPPAPMRDDRDRRWDGRVLFSLSEGIHYALQFLCIYLPGNAISRVENGAPILKRKSVEGGSGSKRLKGLGIGSPDGPVSLDDVRRLEKSNVDLREQLEAHVVTIETLRAEIKTAQVQHGKRLQEVGKYITLDKFDKTARPFAILAEDFPPTAPQPLHVRFCKDIELQGGKLPGRGGGDGEQPLSRIAMERVVDDAAHQGPIPLPISHSCFYSTPRCPNDPSLPLRPSGQLRLLTERQQPPTVVFSSQQ

SEQ ID NO: 53286 - protein, 238 aa, Zea mays
  Coding DNA Sequence Number=SeqID_9911
MDKRLVFGMIVGFLGKHRSDLAPGLYPLAWRKNKSVPEQLTNLSWTRGLWRYGGWKTHNSLLNSSISGTFLRAFNSMINWTISSGFGLTMAPTPPNQLILRSLKGLSVPSEQSQGSVHSSDTISPRPSPASGRNSRPRRIHASPEGLLKQRAHLRLARGPARTGFAVKQPWLDRLANRPYRRSIQSKDRLTPYPDARSSVDRSDRSHFASSLTDLTRKQRRLPCSDCCATRQGEADNN

SEQ ID NO: 53287 - protein, 187 aa, Zea mays
  Coding DNA Sequence Number=SeqID_9912
RIGMLHVGYLNRFTKRESPRAKVTSESLAGSFTGRTDAGVELPRPQAGPMPSGDSWLRLRDPPTASPSEARPDLAEGVVDAEGAAAPFNCQDPSLQGRGSVTDAVEKAQKIVSAEELSSVKTCSVRGITYPSASYLSQKVMSEPKHQVAHLEVSGPNPSSVVASQGLLALVLGEPYSKSVGKMASAP

SEQ ID NO: 53288 - protein, 225 aa, Zea mays
  Coding DNA Sequence Number=SeqID_9913
MGTEHGVSGELQAGNPSGRPCPVRWGSARGAEARPKKYLRQLARWLRDAWAWASKLACQKSEKRVHLARLHAACMAARPFRPLVWAKVGGRLGGPWSVLEKTQPVAFGGARRESCLQKGGRPLSEGDHVFFLPYAPCLSIFQAPGWGVSAVFPPPRWRNATPWELVPFSHRSASRIFITQPGRTPRPVVTQDGDLQFDGGESEPGCGLYLSLGLKDFRHPGQDGG

SEQ ID NO: 53289 - protein, 65 aa, Zea mays
  Coding DNA Sequence Number=SeqID_9914
MIYYDQYDSSYIEVNCRVFFFSEFVRVIVRVNGTERDCESGMGTERLRPVDFLERNGSGSEENIP

SEQ ID NO: 53290 - protein, 328 aa, Zea mays
  Coding DNA Sequence Number=SeqID_9915
MALPVDVAGLCPRQGDMGAPPKPRSSLSSVAEAEPEPPGRARRRSFGRGQGGVRALGSGEAEFRRLPGLSPSPSPGVGRSGVRRLPGLSPSPSPGVGRSGVRRLPGLSPSPSPGSGGAESAVFRVLARVRALGSGGAEFAVFRVLARVRALGSGGAEFAVFRVLARVRALGSGGAEFAVFRVLARVRALGSGGAEFAVFRAALSFCQTGQWSGGVTAVTSALPGGACQDKGLLLSEAKASGEPELYADGGYQLRIRRLEDDNSIKGLTSMLSVEQVLNAKLTKFNTKTTDQAKDGGKKSFEVPSAREKVKETRNPKARGEEEDLQSQG

SEQ ID NO: 53291 - protein, 424 aa, Zea mays
  Coding DNA Sequence Number=SeqID_9916
  Gene Ontology: Mol. function=metalloendopeptidase activity; Cellular component=integral to membrane; Biological process=proteolysis
  Homolog annotation: Hit_ID=A2XIU5; Match level="QueryCoverage=82%, HitCoverage=83%, E-value=1e-127, Identity=70%"; Hit description =Putative uncharacterized protein
  Pfam annotation: Domain name=PDZ; Domain location=139-240; Score =10.8; E_value=0.049; Accession=PF00595.15; Description=PDZ domain (Also known as DHR or GLGF)
  Pfam annotation: Domain name=Peptidase_M50; Domain location=63-413; Score=196.6; E_value=6.1e-56; Accession=PF02163.13; Description =Peptidase family M50
  Pfam module annotation: Pfam domain module=PDZ::Peptidase_M50; Domain location=139-240::63-413
MITTHLSPALKHRSPSPLHSTYHSHHHLPVHLPLPLPRRHCHLAKPAAAASPDLLASIESVASAASVLAAIVLVHESGHFLAAASRGIHVSQFSIGFGPALARFRLGAVECTLRAIPLGGYVGFPDDDPESGFAPDDPDLLRNRPVPDRLLVVSAGVAANLAFAFLVVYAQALTVGVPVQARLPGVLVPEVLPGSAAARAGLLPGDVILAAPGAAPDPSVPVLVDLMKASPGRKVPLTVFRAAPGKLEPDPRPVELTVVPDTSADGTGRIGVQLSPNVRVTRVRPENLADATVLAAREFALLTVTVFDGLRQTLLNFSQSADKVSGPVAIIAVGAEVARSSADGLFQFAAVINLNLAAINLLPLPALDGGTLALILLEAARGGRKIPREVEQGIMSSGILVVLMVGMFLIVRDTLNLDFIKEML

SEQ ID NO: 53292 - protein, 201 aa, Zea mays
  Coding DNA Sequence Number=SeqID_9917
  Subcellular localization annotation: CTP_CleavageSite=73; ConfidenceScore=5.06e-01
MACMMRWSPPLGRLPGAEVVATGGKPTVQRWSPPLMWPPLLASRWCRGGRLRWQATRSRGGRRRWRAVGAEVAVAAGEPLGASYPCDPTGVEVVHTYRVDMELGLRLKADVILLLFVRTYSSKYYGTRHGVVECAGFWVRDQAKRPYRLRTTPWNGLPFFRTGPQAVGPSCFRREVLNCKPGCSIRMSSCLMGWELLGWVR

SEQ ID NO: 53293 - protein, 110 aa, Zea mays
  Coding DNA Sequence Number=SeqID_9918
MATTRGRGLRHQTQMGNQGRDLVLWQVPNQEGLHNSPPATKDPSSTLLVKHVSERREQSSKDGSQPHRRPGKERVDDGEVAAAERDIGYQSPEGDLKDVFAEDSYSGGDN

SEQ ID NO: 53294 - protein, 204 aa, Zea mays
  Coding DNA Sequence Number=SeqID_9919
  Subcellular localization annotation: CTP_CleavageSite=61; ConfidenceScore=5.25e-01
MKGPCTPTCCTLLCASFFCFLLAGSKLGPPVIGSTSFVAEGATTLLLNEAISSTVEMARLRHTARKSVIPFLPSRLAERSLRRPVTGQSSHLERLHHRLHEEQEHRRQELEQQGSSFSLQQEIESVRSCSPVLPLEAHPAPPLSAPATGVAVGGDPDDGGGDSSSSFSTDLSADQEPEGWVARPITHDTARGYHFHDALDTLLH

SEQ ID NO: 53295 - protein, 298 aa, Zea mays
  Coding DNA Sequence Number=SeqID_9920
  Pfam annotation: Domain name=zf-CCHC; Domain location=221-235; Score =3.7; E_value=0.43; Accession=PF00098.14; Description=Zinc knuckle
  Pfam annotation: Domain name=zf-CCHC; Domain location=31-48; Score =17.9; E_value=0.003; Accession=PF00098.14; Description=Zinc knuckle
  Pfam module annotation: Pfam domain module=zf-CCHC::zf-CCHC; Domain location=221-235::31-48
MGMIRKINLMGVPLQVEDLLFNIDKKKQRKRGCFACMEKGHFRDSCPTMVEPKKGRSKGEALTSVKTWDDSSSEDEPPRTRSHQSSSRSSQSSRKCLMARGKMEILSIHNNEQTTKLESIGSTLGASLVEIPEIIKKDASTFCFDLIDNSNPCNQVLVKNVVIETCSNEIAMENEQLKQEVARLGKALYDKKGKDKQIQPPQDNTTAGVNKPVEGEIVIYRLCHKEGHKSFQCKAKTGDKKNQKLKQKPISKISNAYISKVDKMAATPYQKEKEWKGDSNQDQQASQQRKGGQTHLGA

SEQ ID NO: 53296 - protein, 85 aa, Zea mays
  Coding DNA Sequence Number=SeqID_9921
MALVSREEQVESLGSENLALVACRFTSNDGCYNYGNLDHFITSFPKKRKSETDKCDHHIGRCKAKKEYTFDKRKSKGMFDKKTLK

SEQ ID NO: 53297 - protein, 561 aa, Zea mays
  Coding DNA Sequence Number=SeqID_9922
  Gene Ontology: Mol. function=protein binding; Cellular component =nucleus; Biological process=cell division
  Homolog annotation: Hit_ID=Q2QQS5; Match level="QueryCoverage=81%, HitCoverage=78%, E-value=1e-105, Identity=50%"; Hit description =Cyclin-T1-4
MARSCCLQQLPACRCGQGCLQKPDTLAFACPCYLNRIIATVCMFLAGKVEETPRPLKDVILVSYELIHKKDSTAGQRIKQQKEIYDKQKELILLGERIVLVTLGFDLNIDHAYKPLVEAIRRFNVGSKSSLPQVAWNFVNDGLRTSLCLQFEPHHIAAGAIFLAAKFLKVKLPSDGDKVWWQDFDVTPRQLEEVSSQMMELYVQNRTPQAQQSQGSEAEGSSAGVRNQHSSVKSEGNSKEPSAHGYHPAFKPSNLHHSSLAGAPGDHDSGHSNSDKHVSGHKMLQNDNGNHVGSKEKNKSGGKSDAGMDRFCHEKSPPGHHYSKVSHESHNPVEEQKPHQSHDNPNERIDGILGGNEVPGVSTSRIDAMNKIDKGKVKAALEKRRKTKGDITTKVDVMDDDDLLERELEHGVELAIEDEKIKQDKMQNLSHIKDKKITQDNMQNLSHIKDEQDNMQNLSDIKDEKIKQDERQNMSHAPVDLQTTDQVMENGHHVEPSVPTTVEDTGFPLDNKEHPPFDKQNDVPEHESQQLEHTLKHDLPQLVGGPEQDDGTDCKRPKLEE

SEQ ID NO: 53298 - protein, 65 aa, Zea mays
  Coding DNA Sequence Number=SeqID_9923
MGDSDKDTNDGSTSKVSLSINNLAAERKEYKTKYESTLRELESTKVYVMVSDETECDECALHMWN

SEQ ID NO: 53299 - protein, 157 aa, Zea mays
  Coding DNA Sequence Number=SeqID_9924
MEANEDVDIEGGEEPTSSLDTAGSGRPPSPESSVASQKPTLQELLAQQNEILRQLAQRQPPPQHYGGGDHQRHPAAATYQEFLSTQPPLFTRVEDPLDADVLLRVVEFKFSLIPGSCSEVTKVRFTTPTASRTRQGLVGTFFLLCSPKTERWDGKEV

SEQ ID NO: 53300 - protein, 195 aa, Zea mays
  Coding DNA Sequence Number=SeqID_9925
MAHRTVRCTPDSPVPLPRHHCRWILAVGASDLWARLSVRCTPDMYCLMSGAPDLRKTKAPNSYKYVTLLSIPVSVYPYTIMCCHNPTKLSVPCTPILALKASDGYVSLIEVKRVKNLHCNNIGNKILSRQLLSKTDPTKEKTLKGMLANMGIKMTIHTGSCHADQHVDARFTRVQQIKVAGHNKTIEMERDQQMG

SEQ ID NO: 53301 - protein, 133 aa, Zea mays
  Coding DNA Sequence Number=SeqID_9926
MATAENRAPAKSAEAPSTVELNPRVRTDATDPTQTTCEDIDELSFFVRHLGEGELSEKEALELDHKGESMVYGPGAMLFGGGDKMLMCVPNPDESRIKIFSSNGVTLRAISYTPGDIEGAPGWMEKELAEVEY

SEQ ID NO: 53302 - protein, 219 aa, Zea mays
  Coding DNA Sequence Number=SeqID_9927
  Gene Ontology: Mol. function=hydrolase activity, acting on carbon -nitrogen (but not peptide) bonds; Cellular component=cytosol; Biological process=amino acid metabolic process
  Homolog annotation: Hit_ID=A3CH80; Match level="QueryCoverage=72%, HitCoverage=36%, E-value=4e-79, Identity=92%"; Hit description =Putative uncharacterized protein
  Pfam annotation: Domain name=Amidohydro_1; Domain location=1-210; Score=-14.3; E_value=7e-05; Accession=PF01979.11; Description =Amidohydrolase family
MAETLVLCCRTQALALVALILLALVQGWPLEGVVVHTGVVVTSLQHIAEIPYENQLILRTKGIDHGTVTYLDKIDFLRSNLLAAHSVWLNVPEIGFFSKAGVKVSHCPASAMRMLGFAPIREMLDSGVCVSLGTDGAPSNNRMSIVDEMYLASLINKGREAYISGTTNPTALPAETVLKMATINGAKAVLWDNEIGSLEVGKKRLINLIFFIVKPLKVA

SEQ ID NO: 53303 - protein, 22 aa, Zea mays
  Coding DNA Sequence Number=SeqID_9928
MAGDEARSHLKPMNIGTHVQKP

SEQ ID NO: 53304 - protein, 72 aa, Zea mays
  Coding DNA Sequence Number=SeqID_9929
MKLKRKNIVATIKLQVVILQLCHTSASSYFSFVILPSLQKSGRCAPRSYQDAEVGMATNNFVKSINLAFNIF

SEQ ID NO: 53305 - protein, 244 aa, Zea mays
  Coding DNA Sequence Number=SeqID_9930
  Subcellular localization annotation: CTP_CleavageSite=70; ConfidenceScore=5.18e-01
MESDIRFVGRDLVAAGATVVSVILVNPSKSLSYLPRTAPLSPADRSAPPVSPHPLALSRSLSGERAPPVSAFLASVTGASDTIAAGHCPPRRLAIIAFTSSVWRLASARAIPSPVCPIHPVVTTAPSAKLALTYPYLARARYHSPIATRPAETTWAHASSQAAEGKEANTREAYRTLKMDYDKKLKKLAPTKEIQKKTKSQGCQTERKKKAPPAPPLFRIEKLSDVEDMSLTSLMTFSRNLGTP

SEQ ID NO: 53306 - protein, 292 aa, Zea mays
  Coding DNA Sequence Number=SeqID_9931
MAGTMSQRLREASQRLSQQLSQQLSQESREANQAIAEAQAVQAEAKVARAEGSLASQRTEEWEARFNALRGRMDKAEASMRSEVERTLAQFVDSYRELGAWTADFEVPDREAGLCFLEWLQEELLVLPIIVEGFMSFASLVTCEGAINALSREGCRHYEVFDQSDESFEREIFKAEDPVVKQSARALFDRMWGAHGREAVREQSDRAREQMERAEDVEDLGGLVGAPPKAAEVNPVLPSDAGEGPSTVPVPAMAGKDPVSTPAPTVEGALKVAAEPTVEDPKAAAGPSQVAK

SEQ ID NO: 53307 - protein, 33 aa, Zea mays
  Coding DNA Sequence Number=SeqID_9932
MGKPVPSLLMLLLCRGLTALAYNAPLTPAAAVQ

SEQ ID NO: 53308 - protein, 236 aa, Zea mays
  Coding DNA Sequence Number=SeqID_9933
TWRGCTTAYMRSCSPVLPLEAPPAPPLSAPALGVAAGGDPDDGGGNSSSSHDTDFSADLEPKGWVARPITRDAARGCHFHDALDTLLRRALDWKHYSISERDSAEAVMQDAARRALSHYCSVFGGVADGLNLKYYPCRPSGSTGGMIVSPVGEDNPRLSSTVNLAAVLNMELDHALDELGRARAEIALLWAERAERHHLGDGSPAPVGTQHPYRSPRRGHQSYGNPDCKTKINLEP

SEQ ID NO: 53309 - protein, 462 aa, Zea mays
  Coding DNA Sequence Number=SeqID_9934
  Gene Ontology: Mol. function=protein serine/threonine kinase activity; Cellular component=plasma membrane; Biological process =protein amino acid phosphorylation
  Homolog annotation: Hit_ID=A9NWM8; Match level="QueryCoverage=69%, HitCoverage=46%, E-value=8e-53, Identity=42%"; Hit description =Putative uncharacterized protein
  Pfam annotation: Domain name=Pkinase; Domain location=173-461; Score=- 46.8; E_value=8.1e-06; Accession=PF00069.16; Description=Protein kinase domain
  Pfam annotation: Domain name=WD40; Domain location=310-349; Score =17.4; E_value=0.055; Accession=PF00400.23; Description=WD domain, G -beta repeat
  Pfam annotation: Domain name=WD40; Domain location=354-392; Score =17.5; E_value=0.051; Accession=PF00400.23; Description=WD domain, G -beta repeat
  Pfam module annotation: Pfam domain module=Pkinase::WD40::WD40; Domain location=173-461::310-349::354-392
MGQCYARNVHGVDADDGGMEATTIMVSAAGGPEDAGSVGGGQGGEGRRSARPSPAGKPRGGRAGATPERLSTAGSPWTGSPLDLPDGIAPSPATSVSTPRRFFRRPFAPPSPAKHIKASLARRLDHRSPPSASQVPRPPVEVPIPEQGASGAGEVERELDKSFGYDRHFAAKYELGKEVGRGHFGHTCLACPCKGDMRGQVMAVKGDQFFFPMVLALALAFPRRMTTTISIEDVRKEVKIFEGVIWTFQSCSSFMMLVRTPFNVYIIMELCEGGELLDRILSRGGRYNEGDAKIIVEQILKVVAFCHLQGVVHRDLKPEGDQGVNATQWLHNEPVLVTVSGDSSVGMWDVTLGQPCVRHIVAHTRCANAVAVAPNDKYLCTGGSDQKVAVAPNDKYLCIGGSDQKVVSCLFVLLVSYVAYVMSYWKRFYIITEVGVHILIGVFHILCKEMIDMLPEIIELFR

SEQ ID NO: 53310 - protein, 73 aa, Zea mays
  Coding DNA Sequence Number=SeqID_9935
MARGVPRRDFPSPVLGRRRELPCASMQRGTQRVQPSARGQRGAQSPELVLAHAFFRCGARSSAPSLHELAFAP

SEQ ID NO: 53311 - protein, 73 aa, Zea mays
  Coding DNA Sequence Number=SeqID_9936
MARGVPRCDFPSPVLGRRRELPCASMQRGTQRVQPSARGQRGAQSPELVLAHAFFRCGARSSAPSLHELAFAP

SEQ ID NO: 53312 - protein, 73 aa, Zea mays
  Coding DNA Sequence Number=SeqID_9937
MGKPVPSLLVLLLSRVTALVPTITGMGDHVSGRVRGKVHCPGSIRYPHVNPLFQFHPVAHASPWIRVYRPLSV

SEQ ID NO: 53313 - protein, 139 aa, Zea mays
  Coding DNA Sequence Number=SeqID_9938
  Gene Ontology: Mol. function=DNA binding; Cellular component =nucleosome; Biological process=regulation of transcription
  Homolog annotation: Hit_ID=Q6WS85; Match level="QueryCoverage=50%, HitCoverage=36%, E-value=4e-23, Identity=60%"; Hit description =Single myb histone 1
  Pfam annotation: Domain name=Linker_histone; Domain location=28-88; Score=19.4; E_value=9.8e-06; Accession=PF00538.10; Description =linker histone H1 and H5 family
MTGSGSGLLHQPVLGERSGGGRGCGRLNDLILEAIRKLKEPSRSSKAAIAAYIEDQYWPPADFQRLLSTKLKALVNSGKLIKHQVIAEPEKMKGMTKEETAAFAAKAVAEVEVAIAEAEEAARVAEAAENDAEAAKAFS

SEQ ID NO: 53314 - protein, 79 aa, Zea mays
  Coding DNA Sequence Number=SeqID_9939
MAHGAGRTVVARSTGVLLGTVGYAGASGRAIIQHTVKKTTHLPSIPRWAAMIDEQVTEDSEVQLVETVEQELVEGKLCP

SEQ ID NO: 53315 - protein, 78 aa, Zea mays
  Coding DNA Sequence Number=SeqID_9940
MKTFLDRLEMSRRTLNRHHSTLLNVGFQTSSISKKIQNLSNNIKVTSDGISLEHLEDSLLLTVLCSPLASRGQLDCPL

SEQ ID NO: 53316 - protein, 203 aa, Zea mays
  Coding DNA Sequence Number=SeqID_9941
MGLMSFASLITCEGTANAFSCEGCRHIEVFDRSNEDFDREIFQVEDEVLKRSAGALYDRMWGPHGRDTVRERSDRALEQMANDEEVNDFGGPESSVTQVPMSGPAQATPTDTNFVVIANAVPANDSLSGFESGSWSSDGGEFGSPFSWTESSDEDLDYFPVLDVAAVESSPRPEVCEAFDPPAGVRTERRRQKVVSKHSVGEM

SEQ ID NO: 53317 - protein, 372 aa, Zea mays
  Coding DNA Sequence Number=SeqID_9942
  Homolog annotation: Hit_ID=Q6QP51; Match level="QueryCoverage=22%, HitCoverage=41%, E-value=3e-07, Identity=41%"; Hit description =Putative growth-regulating factor 1
MAAERTGWAVSFSLAKSLRLRKPKKGARSEAKNRRQTLPRVYKDQGETRSTFHPDLPRDSKTQSETAVPRTARARATAAPRTTRPVALTSRWDRRRLWQGKRATLRLRHNDRVKKKPPQSAWAPHPLLVRGSKAGPSKGFNGRLRPLGLRAHYWSGVRRLALEGFTAASDIERGMTLEGRRRLRRSDCCATRQSEADRQSGPTSGTIGSSASPDPGLGLGLGPGRRRTPLCPTQGSDLGSAPEDGELRFARPRARTWAQPRKTANSAPPDPGLGLGLSPGRRRTPLRPTQGSDSGSTPEDDELRFARPQGSDSTSATEDRLDLDLGGASISPNLGRGPTTSTGGAIITLPQADSGYGEQDRRPIWLAPPDKQ

SEQ ID NO: 53318 - protein, 138 aa, Zea mays
  Coding DNA Sequence Number=SeqID_9943
MVAFVMTPISSLRDLGTGIIPWLFPEGRGKEKGVEADLQEFQDFDEFEDEASDLPQSAACGGCVRGRVSRLGWKNRAKAGKTNETSDDGKNDGRRRLLLCPLPRMGWRRHEGREKKKVEMANDVVATEARTHHYHADV

SEQ ID NO: 53319 - protein, 466 aa, Zea mays
  Coding DNA Sequence Number=SeqID_9944
  Gene Ontology: Mol. function=serine-type endopeptidase activity; Cellular component=cell wall; Biological process=negative regulation of catalytic activity
  Homolog annotation: Hit_ID=Q5Z852; Match level="QueryCoverage=18%, HitCoverage=13%, E-value=2e-31, Identity=66%"; Hit description =Putative meiotic serine proteinase
  Pfam annotation: Domain name=Asn_synthase; Domain location=133-308; Score=-74.5; E_value=0.077; Accession=PF00733.12; Description =Asparagine synthase
MFTLRRAGALPSRCRDIFRPFRALAWLLDAFASATFDQIDSAYREAGGDPFVAATPPRAFIVAVNRSLALTSPKRDTVVRVPYKVSIPLGRVKTATPGGNKGRPEQKYVQASSSCSWASLGTRCPCTNWRRPSSRQTFGAGSTDSHVPFGVLLSGGLDSSLVAAVAVRHLAETEAARRGGTKLHSFCVGLEGSPNLKAARTRTCRSPCRHRISRQGQAAPPHAFVVVVDRSLALTSPKRDTVVRVPYKVSIPLGRVKTATPGGNKDRPEQKYVQASSSGSWASSGTKFDPVPVSIPGILITDVSKTEDLIDYYNSSTIRDWAGRATAFKATADFSFQDADVLKLKLDILAPSNLIWAAWAPNGTDESNYAVNCQNFLVANAIVLKVAKDLTKRVLNDEANYDRQIVTISSIDGKIIRYARPDHPTRKGSDASTESGSEVEDVTSPTASRNLITHPILTPVHEEASG

SEQ ID NO: 53320 - protein, 143 aa, Zea mays
  Coding DNA Sequence Number=SeqID_9945
MEHREEAGDTIAGAEVGWMTTGSWSAEQKRRIQQQVRRRALRGMGGSGCWRGEVTTGASSVDRGAEMEVEAAGAEASVARHARGRGCIWRIDFKKMKGDICKILIQDGRQNWCFKNSRDIDIIILYYFGLQVYGAPSFCYFGG

SEQ ID NO: 53321 - protein, 228 aa, Zea mays
  Coding DNA Sequence Number=SeqID_9946
  Subcellular localization annotation: CTP_CleavageSite=59; ConfidenceScore=5.44e-01
MARPRHGCGPAWRALPPARLARATARFSLGAAPSLALVPSSPACPPSPFPARSWRPGVPARHGSPAPAPSLRSPALATSAYLWRGPDVPARHGRGAPARTSLTRRGPDPCPCPAQDDPTGRCGDANRVSARDGNSSVHLASQGHCAGVFTAATQGLLQWAVWSWACMLDEVARWDDLVIGLRPVTYGTKGELARCLVSVGPTITAKASSEGWRLRLRPNICPPRDQFD

SEQ ID NO: 53322 - protein, 471 aa, Zea mays
  Coding DNA Sequence Number=SeqID_9947
QIKVAALEGERTDLRRQLAEERKEANEALAKAQSAQAEANLAWAEGSLARQCAEELEGRLNALQARVERVEASTRSESERTRKQLVDSYHELGVRTADFEVPDREPGLRCFEWIQEELLVLPTIVEGFMSYASLVTCEGAMNALSREGCWHYEVFDQADEDFERDIYKVEDPMVKESAGAFYDRMWGPHGREVVRERAETARGQVMFGFCLVFVECGLNVGLLNLCAVSQAARGEKVDDFEALNSVQPDSEANPMVAASKTAPELPPETVKGVLDAPATTAAGGGPSPTAAPRAEDPVEMAAEPAAEDPATAGSSQVQDFGPAHATATTNFWRLRPWMMVINRMSLHLSFSDFGDSGGSVEWTEESSDEDLDYFAALDVAAAEASPHAADAEVVPGSSAGRRRRRAVAKRRVSEVDGGRLRVSRAGRQELLSLPATVSAGEGELRSLFAGEELRIMLFNYREMGIIPKVQP

SEQ ID NO: 53323 - protein, 62 aa, Zea mays
  Coding DNA Sequence Number=SeqID_9948
MAGSGKEATVRPMPEPRSRAQIKDDHYPANTREVRVGYGYPVSGYPVQFLRVSVPGTSPVQA

SEQ ID NO: 53324 - protein, 99 aa, Zea mays
  Coding DNA Sequence Number=SeqID_9949
MESHDLQAERESQLVGGNENDGWALTMVMHCVMMFVTEPPKSLGPPTVVLVQRTSDNPVGAPESLDKFGICFPYLSQECFTRHADITSIGDTKMRKQLH

SEQ ID NO: 53325 - protein, 59 aa, Zea mays
  Coding DNA Sequence Number=SeqID_9950
MDAALVQGRGLRAMKKQAAVYLFPKFSVFKGKTIQYWRSFAFGALEVEGNGDKKGGSQN

SEQ ID NO: 53326 - protein, 255 aa, Zea mays
  Coding DNA Sequence Number=SeqID_9951
MARLRPPARKFVIPFLPSRLGERPLHRPVKGQPSHLERLHHCLQKEQERRRQGAGAAGLFFLAPAGDRVYEELLPVLPLEAPPAPPLSAPAPGVAAGGDPDDGGGNDSSSFSTDLSADQELEGWVARPITRDAARPVSLPRCARHPATSGTRPTYLVHRVSLCGLPAQSQAEAAMQDATWRALSHYCLVLGGIANGLNLKARAEIAQMRAERTEHRHLEDGSPAPVGTQHPYRSPWRGHQSYGDPDCRTKINLEP

SEQ ID NO: 53327 - protein, 46 aa, Zea mays
  Coding DNA Sequence Number=SeqID_9952
MAMMGSTFEKMYLCQVKKRQTFVASVQRWYQRKSIKTKAAGRKDPP

SEQ ID NO: 53328 - protein, 127 aa, Zea mays
  Coding DNA Sequence Number=SeqID_9953
MAALIGDDQMAKVSHDDAMDVPRYVAQGREVAVTGEFIRSDRGKLGRTMEQLGTQGFVKFFPKFGYKLRSTIRHYGLRNTVQTENTSNVQFCICSYWIFYFDWKEVGDLCESVNDNPNGVKAFCCSG

SEQ ID NO: 53329 - protein, 368 aa, Zea mays
  Coding DNA Sequence Number=SeqID_9954
  Gene Ontology: Mol. function=voltage-gated potassium channel activity; Cellular component=integral to membrane; Biological process=potassium ion transport
  Homolog annotation: Hit_ID=A2YDM4; Match level="QueryCoverage=72%, HitCoverage=52%, E-value=2e-96, Identity=69%"; Hit description =Putative uncharacterized protein
MRATFHFIEIEEKHKHKRERHEVLPLHTNYLSYIRATRKEKKTTTQDSSSSQPSRPANQLMESCVSGQKKFQDWRSEQSVSSENIVAPHRDDVSLFSSLKERTATVFTFLGNILHTETSNKSMLDERKSTTGTLHPQGPFLQKWNRIFVISCIFAVSVDPLFLYIPVINDEKPCWYLDRKLEKAASVLRFFTDIFYILHIIFQFRTGFIASSHTTFGRSVLIEDRYAITKRYLSTYFFIDVFAILPIPQVIILVVLPNLHGSKVMKAKNVLMLIIICQYVPRLIRIRPLYLQITRSAGVITETARAGAAFNLLLYMLASHGNTVGYLSEVHYKKAQYDGFNLSTVSGPWSSLVLAFYSTPRFLLETVL

SEQ ID NO: 53330 - protein, 253 aa, Zea mays
  Coding DNA Sequence Number=SeqID_9955
  Homolog annotation: Hit_ID=Q6JAD6; Match level="QueryCoverage=59%, HitCoverage=65%, E-value=2e-24, Identity=65%"; Hit description =Putative uncharacterized protein
MVCTKNVSAPGGGDDEDPPRPFRQVKGKTVYLEQQEGRKKRRLDRAARVVLAEAAVAEQAERGEFDVVDFLICEIEDTILDGLHVRRQMSYGHYLYHIFAQLIRPPQFQGTLEASCLHFGSYRLAPKDPVPVPDPVIDTQVEDTTYHQFETQGTTVPDDNDDDDDFGIPPPPLCLHAPMTMRLGVPVLPLLPLLPLNLLWLRSSRLLLSSRLIWQQFSSRCSRECYRCFRLFRTDRTLCSSSFWQTGLRTGPS

SEQ ID NO: 53331 - protein, 736 aa, Zea mays
  Coding DNA Sequence Number=SeqID_9956
  Subcellular localization annotation: CTP_CleavageSite=20; ConfidenceScore=5.31e-01
MSTATGRIRRQRLKTTPAPVAAPSTKKRKLGTVMGGLGVSDSFAVELMGTCAAPGGRMSSPELWESLARMLKVTGGWWPKNVPIPRATGEDFFTSRMVRDLKVFPYGRNIAAVVSVVMDKDRQEAAQKRQAVIRLPEARPKRARGTAKAAASGGSQPTLAVKSAAPGSSKMSDVVKAAGVGVAKSASAGAAKARDLPSPAKRVADFGTYISVEDYLIGNLQDRARGNLLFRLRWRPRCLPRCLGRRVALSALAAADFTDRVASGALTAVVSAEVERLRAQHADAVREKSAADSKCRKLTEKVAALEGERTDLRCQLAEERREANQALVKTQSAQAEANLARVEGSLASQRAEEWETRFNALQARMERAEASMRSEVERTRKQLMDSYRELGARTADFELPDRESGLRCLEWLQEELLALPTIVEGFMSFASLVTCEGAMNALSREGCSHYEVFDRSDEDFEREIYKVEDPVVKESAGALFDRMWGPHSREVVRERSDRARDQAARDETVEDFRALNSGQPEAESSPVAPPSETAEGSLAAPAATVSGGGSSPTAVPRAEDPPKTVTEPAAEDPTAAGPSQVQGFGPAHATATANFLAASTVDAGNESDESASKFSDFGGSGSSVGWTEESSDEDLDYFAALDVAAVESSPRAADAEVMPGPSAGRRRRRAVAKRRVSEVDGSRLRVDKAGKQELLSSPAIASVGEGELRSLFEGEELRIMLFNYREMGIIPKVEPM

SEQ ID NO: 53332 - protein, 127 aa, Zea mays
  Coding DNA Sequence Number=SeqID_9957
  Subcellular localization annotation: CTP_CleavageSite=48; ConfidenceScore=5.31e-01
MSGVHRTVRCILGAAPTATCNALKCPRSARRRQARPYRRIGHCTVHVRCATRTSRRAQKSELQRSDSNGTGDVAGAPDMSGMHRTVRCAIDRQPPPTVKFGGWGYKYPNQPPFIASKFFSFQPLYKS

SEQ ID NO: 53333 - protein, 1056 aa, Zea mays
  Coding DNA Sequence Number=SeqID_9958
MPSSSSSSDTTPPAAASSEETLSSVMVEELRAGDSVDFGVSRMTSARVEDMQRLGYFGGGVARAPGTEEVPEPEDTSADTECHGGAGEKRMVGDGVAQFGSCTFTPKTGKTTMPVVELVPCARNKWGNWNEFWFYVAEGTVEGHKGLPVSKMCSHYYSAYPPFEVAEEDADEGALRCAAGQSSGRDLVEEFVAYGVWPLAHGWALGEVCPRQMPFHGGRVVRSPAFALNLRNRDPAAFGRDAEDLAVRLVGRYVPRTEGQRSFDIRGSNERLNRVFELNQLSYDGYPGQDEADRRGKKPAVETGGDPALAAAPSSKKRKLGTAMGGLGVSDSFARELMRTCAAPGERMSSPELRESSARMLRVTGGCWPKNVPIPCAAEEDCFTSRMVHRWRVFPYGRNIGAVVWTVMDKDRQGAAQKHQATVRIHEARPKKQRGTAKAAASGGGKPPLAVKAGASAPSKAPEATAGAGGSKSTKVAPPASGVAEASKAARALPLAGKRVADFGTDITVDDNLGGPDEGQLAIVAPGAAIATAAKAPKAGGEALGAGGEVSVLALVRDEAGAATRRLKVVTEALSQATEALSQVANFASRTASGALTAAVSAEVERLRTQHADAVRWPPWRGDKADLRRQLAAERREANEAVAKGQAAQAEAKLARAEGNLAKELAEHLQERLTTLESRAKEAEDATHAEAERTRTQLMDTYRELGARTGDFEVPDRESGLRCLQWVQEELLELPAVVGGLMSYASLVTCEGAMNALSREGCRHFEAFDQADEDFDRDIYKVEDPVVKESAGALYDRMWGLYGREVVRERAEAARAQAERGERVDDFGALNSALPDSELTLAEAATGVALETTLETAEGAPGVPTSAVAGEGLPPKVAEGAPDAPAAAAPSAEDSAAVVAEAAAEATAEAPAAAGPSQVQEFGPAHATATTEFFGGFDRGRSSVEWSEESSEEDLDYFTALDVAAAEASPHAADAPDVPGPSTGRRRRRAVAKRRVSAEEGARLRVSRVGRQELLSLPAAVSTGEGELRSLFAGEELRIMLFNYREMGIIPKVELM

SEQ ID NO: 53334 - protein, 149 aa, Zea mays
  Coding DNA Sequence Number=SeqID_9959
MGKNNKRKREPTPPSEEFGDSEYSEEEFSSEPEGSPAPISPPASSDDSDDSQGIAAEVWTYIRAVERAGLEGSDESEYSSDEEDSDGGDEGEDDDDDDDDDDDDDDGSGRGGGDDSRDSTKGGGSRDSTKGSSRGSTKGGGGGRGRASG

SEQ ID NO: 53335 - protein, 147 aa, Zea mays
  Coding DNA Sequence Number=SeqID_9960
MGKNNKRKREPTPPSEDFGDSEYSEEEFSSESEGSPAPIPLRESSDDSDDSQGLATEVWTYIRAVERSGLEGSDESEYSSDEEDSSEEDGDDDGEDDNDDDDDDEGGGGGDGDGGGRGGDSGSKGDGGGSRGNNKGGSGGGGNRASG

SEQ ID NO: 53336 - protein, 88 aa, Zea mays
  Coding DNA Sequence Number=SeqID_9961
  Subcellular localization annotation: CTP_CleavageSite=53; ConfidenceScore=5.13e-01
MSNSSSPRTPHPQRLQQSGSRHANEPPKPGLAGAAALTAWFGSGGYTRERKTAAATIGMESTEQGRYPETFLQLRYMKDIMNIRKVIR

SEQ ID NO: 53337 - protein, 148 aa, Zea mays
  Coding DNA Sequence Number=SeqID_9962
MGFVKLSFAIVPTLAINRKRLPVHAFDSHSAFRSRRTRNDGLEVHECHPVVGGDAVLAPQRRPHHPPTADGLPPQGEPQVRQAGIPLPHHPWPLVTLTLLPLMVVILLEAMGTDPDDDQPSSGIQAPPPLVSALILSLVLVFIATIHI

SEQ ID NO: 53338 - protein, 139 aa, Zea mays
  Coding DNA Sequence Number=SeqID_9963
MGKNNKRKREPTPPSEDFGDSEYSEEEFSSESEGCPAPIPLRESSDDSDDSQGLAAEVWTYIRAVERSGLEGSDESEYSSDEEDSDSGGEDEDDDDDNDEGGGDGDGDGSGKGGGSGGGGSSRGSNRGGSGGGSNRASG

SEQ ID NO: 53339 - protein, 369 aa, Zea mays
  Coding DNA Sequence Number=SeqID_9964
MDFGYGMPEPVGKMKLCFFREQWELVLWWVLHKYRQSVDVVLEVEVLDEVGKPAGGSEAQHDRRHDRDPLNSRREDRSLGDGKEPDDTDRGHLQGSLERLHGLERRVAAPVLHHVRPVPVMSVHSYVSVATHGHTPSRLRPPHPANVAATAHASVFVSPALISPRQCVLRPTPSRKCRRPNHRVGRPPSPHDDCAPISRLPPSLPFRANQATTWPDALFPAAFFPGWCLMPSPSSRSPSSLAPPSTIPEPAAGRSSPSRPWPCAPLRLFHGSLEPSPPTAWCPPPPPPGTTMAGRQRPQRRRLPPAEIVEALHSYGIGPSSSLTEVLTLFLASIVGDNQHLAGITSTLTSYGHSPTFSIWHPKQTQRWM

SEQ ID NO: 53340 - protein, 117 aa, Zea mays
  Coding DNA Sequence Number=SeqID_9965
MSSLGLRGMGGREGDVRWGHNHRAVMGVGPRGDWGDGIFGKYRSCNAALKAMKALEAALTHQSTNSHCSLKLHGLILNPRTSADNIPSKNMEPMSKTHEQHTTYKQSFIFPTGSGMP

SEQ ID NO: 53341 - protein, 176 aa, Zea mays
  Coding DNA Sequence Number=SeqID_9966
  Gene Ontology: Mol. function=nucleic acid binding; Biological process= RNA splicing
  Homolog annotation: Hit_ID=A2XH96; Match level="QueryCoverage=30%, HitCoverage=26%, E-value=2e-20, Identity=83%"; Hit description =Putative uncharacterized protein
  Pfam annotation: Domain name=RRM_1; Domain location=93-158; Score =6.3; E_value=0.039; Accession=PF00076.13; Description=RNA recognition motif. (a.k.a. RRM, RBD,
  Subcellular localization annotation: CTP_CleavageSite=81; ConfidenceScore=5.07e-01
MTDTATVLPLPDIGIKDATTKAVGLAASVHALVSTMIGLGVSPATLFMYNFFSVSDPMHTDLLELGRYRSKRLQISCLQLKSGMKTSLASLEIMKSTIDQEIDLFYLFGNDRVENPKRWGSVREPKGFGFIQYFDPEDASDAKYHMDGKMLLGREIAVVFAEENRKKPSDMRAREK

SEQ ID NO: 53342 - protein, 100 aa, Zea mays
  Coding DNA Sequence Number=SeqID_9967
MSLTQLKGKCIAQPSQDNRDLMVKKLETGTTVACTTSLEENVKDLRIAKRKKQKKKFNTSSKSLNHASTKGNIQGSEEISCAKIKAYNMEESQRIVTLIF

SEQ ID NO: 53343 - protein, 237 aa, Zea mays
  Coding DNA Sequence Number=SeqID_9968
MGENSSEARRRRKVKNGAAARNQQRLACCAFRRAHSKRQQRTAQQHASRGNGARVPSVHHGRDDELGSVKRSRGWRPWTGRGLRSREKRSRGRAELLLDHTPLEPRRKGAMQGRLEPWRGARRVELLGDGSGCSLPLGKKGAAEGGEAKGESRTPPSRSMGKTTDCGEEGRRHHGQPAVWPSREAPHALQGEMSQGRPPWERGQRRSAVVGRRAEHHGEEEEPSSLLAVVWKKGTAK

SEQ ID NO: 53344 - protein, 123 aa, Zea mays
  Coding DNA Sequence Number=SeqID_9969
MEHRPGLKRLLETIHLELDGKLFVNTQQAPTWRANCRRFDPGGSLDRRVNCRRVSQPRWVGARRSTKGGETAKGETRGLRVVLRPGRPEVGRGGDSSEVEVELEPWGRARRRPSSEVKVESEP

SEQ ID NO: 53345 - protein, 124 aa, Zea mays
  Coding DNA Sequence Number=SeqID_9970
MSAPDLCPSKAWVFSALESQDPVVGSPDSTQRGPGPDPEVRVALVGVLDLAPEPHGDPGAIHVVESGVVHHVTRDSRMGTASSGCNNEQSEVPECVVGDLPEQQPGGDAGNMDDFEEFQDYDEF

SEQ ID NO: 53346 - protein, 155 aa, Zea mays
  Coding DNA Sequence Number=SeqID_9971
  Subcellular localization annotation: CTP_CleavageSite=32; ConfidenceScore=5.01e-01
MLVDYTTVLDGPSVSVEGPTQQGIKSIVEVTPASSVTSVGSSDPSLWLRLLRELRAMWLELPPTGASLAEVQGKVASQTPPPAEVRGKSPAAPGPAPAPSIGAPAPHTGDDAVSLSDWTDLAPCDVVDAPSGGKAKGDHRLTCSAPDIGHLQKTL

SEQ ID NO: 53347 - protein, 114 aa, Zea mays
  Coding DNA Sequence Number=SeqID_9972
MQSAQQPLHQAQGRLVAHGVEEVNLLLQHEVLRHEILVLDEVDHGVEQENKQKPKAKAPYLACQMSERKSPVGWRNAPALSPKMRRGLGILPVTRLGGEHKNTPGFRVVRAAEA

SEQ ID NO: 53348 - protein, 246 aa, Zea mays
  Coding DNA Sequence Number=SeqID_9973
  Homolog annotation: Hit_ID=Q6J9V9; Match level="QueryCoverage=15%, HitCoverage=13%, E-value=4e-07, Identity=71%"; Hit description =Putative uncharacterized protein
MAEARATLLRYPRTFRDQQERFCNGIPSEGGIEPSDPIKRDREALPCPTPGLGLNLDAGRRTPPRPTPGLGLSLDLGRRSSPCPTLGLGLNLDAGRRTPPRQTPGLRLSLDLERRTPPRPTSGLGLSLDLGRRTQPRPTLGLGLNLNAGRRTPPRPTPGLGLSLDLGRRSPPRPTPGLGLSLDLGRQTLPRLTLGLGLNLDLGRRSPPRPTPGLNLNLDLGGVTASPDPGLGPTTSQGGHHYPTPS

SEQ ID NO: 53349 - protein, 104 aa, Zea mays
  Coding DNA Sequence Number=SeqID_9974
MLTSRPCALCLLCPCVPFFLCAETEAPGYGQTLRLSQLDHLFEHQTVRAQVPDRPRCSSQGVVFGCSIEYAPLTPPYLLVFLTGAFLAIPPCDMFDMRGSLKGK

SEQ ID NO: 53350 - protein, 275 aa, Zea mays
  Coding DNA Sequence Number=SeqID_9975
  Homolog annotation: Hit_ID=Q6J9V9; Match level="QueryCoverage=22%, HitCoverage=22%, E-value=4e-10, Identity=58%"; Hit description =Putative uncharacterized protein
  Subcellular localization annotation: CTP_CleavageSite=58; ConfidenceScore=5.64e-01
MQEACNRTTVVHPFGFIASGGASDTFGRRSGRRFTSAMMIASKKPPQSTRASSSLLIRGSKAGPSEGFDSRPRARRARDDSGYVCYMVEARATLPRSHEGTTRPAKASRKALRPQSSQTTPLRPRGLHPAETDGHDLGQGFVYPRDAISPRPSPASGGNCSPGRSYVSPEDLLRQWAHPRHDRGPTRAGFVEKQPWPNRLSNRPYRRRIQCEDRLTPYPDTRASVGKVKGSASTLASEGIASSLDPGLCLRRSLRLARPWARTDRATGDTSLPYP

SEQ ID NO: 53351 - protein, 34 aa, Zea mays
  Coding DNA Sequence Number=SeqID_9976
MAAAEVYSPTEAVAAQQQREKAASQNRLLSYGDE

SEQ ID NO: 53352 - protein, 182 aa, Zea mays
  Coding DNA Sequence Number=SeqID_9977
  Subcellular localization annotation: CTP_CleavageSite=36; ConfidenceScore=5.68e-01
MSSSLSSSSSSSSSGVSGDGSLGSPSLSCLRRDPSRGSVHRVLQDRWQGRLVTPQLLETDGNLDCENQGQSDTRKKKERTLTRDMHPRSGRIKGWVRAPVSSLPTVPATRLWRSSAERGTKDICEPSKSTPGIISESSNRRSSKGSTLRRWMAATTPATGPGKGILRKGSFSAKEAGLEPSY

SEQ ID NO: 53353 - protein, 500 aa, Zea mays
  Coding DNA Sequence Number=SeqID_9978
MDGEHTLQDNPILQARILTLEGSSSTLGIDNTFGEGLLRGSSPIRRLGRSPRGLGQLSSKDVSPTRGLGWSIPASIPLTDDPARPRPTRFSFRANFASVHADTATPGLGSSESGRGVPLTKLEKPRTTRPTEPRDSYASGIRIPHSNNNDPPLRVAELQQRRPQDGCCCNLALAHADARGARTSTKSRRPEARMVAVIPSATGTSRAASTSAPTTGAVSPPADPHSDPPGRVGHLPPRGGAIPVQRQDPPQNTNAALAARDILGGPPMHTARQPSSGRRGHRGAKPASSTRWGLTTPAVGQPRVVEVRPARRASERPLPRTPQERVTHEPAREVELRLSLASTPARMMNILEAEGGTKIAARLASPHPGAGGHRLGPTGERGGQPCRRHATAPSGRASPTPNTPSMEAQAHASCDRHAECFVHATAPPLAPPPRLLDCGTNTATRGDPAHNPAAPTWRDGQCDQKWAGSNDGGRRTGAAVTLSAKLTSHPGAAREPSLTA

SEQ ID NO: 53354 - protein, 317 aa, Zea mays
  Coding DNA Sequence Number=SeqID_9979
  Gene Ontology: Mol. function=carboxyl- or carbamoyltransferase activity; Cellular component=ornithine carbamoyltransferase complex; Biological process=amino acid metabolic process
  Homolog annotation: Hit_ID=Q8SA97; Match level="QueryCoverage=25%, HitCoverage=15%, E-value=5e-11, Identity=49%"; Hit description =Ornithine carbamoyltransferase
MAPSVDVAGLRPRLGDVEAPPKPRSSLSSVAEVESEPLGRAERSSSSSGAEPKSEPWGRAERSSSSSGAEPKSEPWVGRSGVRRLLGLSPSPSPGVGRSGVRRLLGLSPSPSPGVGRSGVRRLLGLSPSPSPGSRGAEFVVFRDLARVRSMGRAERSFLWCLWLGLTACQCHSIKWHRSQSGAGGAVLLSGRSVERRSDSGHFGSAGWGARVRIKVSGHLCIKCPCDLVGRCGNLVRVASWRRQGLGPGVRSGPKFSGWYVDAVNGSTGARRVIRVDVRAPFVRGRLGAQRHAQKYLRVICRTRSPGDGVRGLDASL

SEQ ID NO: 53355 - protein, 218 aa, Zea mays
  Coding DNA Sequence Number=SeqID_9980
MPPIQQGSGFGGCGEVDEDFIAVGNWKGGGRRSLGRWRVGCTETGRGAGRRRRRGGPRRRSPPGLLRRSSTVKTLLQACCGAGEESRPERLPLRGSVGEQGCSLQERPSRRFGEEDGAGRFGSGEWRFGSGEDESGRFGSGDAPSNIDVGRRRAEPRADDGGEEASLAGASGARRWGRRWWGGGRQAKCRRRWGDEGRRERVGGKGGAPSPVPPAVGR

SEQ ID NO: 53356 - protein, 37 aa, Zea mays
  Coding DNA Sequence Number=SeqID_9981
MACGMYSAFGGGKSTEFAFFEPKTPKDLSQELAKSPI

SEQ ID NO: 53357 - protein, 307 aa, Zea mays
  Coding DNA Sequence Number=SeqID_9982
  Gene Ontology: Mol. function=binding; Cellular component=cellular _component; Biological process=biological_process
  Homolog annotation: Hit_ID=Q655H8; Match level="QueryCoverage=27%, HitCoverage=5%, E-value=1e-30, Identity=76%"; Hit description=LvsC -like
  Pfam annotation: Domain name=Beach; Domain location=15-186; Score= -78.0; E_value=2.9e-13; Accession=PF02138.9; Description=BeigeBEACH domain
MEPKDHHTIHPEFPTKAFKAHKVYYLNESPNSAQEGGTGGGDACGVGDGTTRSIYHHFPPHRRSYLVAAMHMASETISEGGKFDHADRLFQSIESAYINRLSNTSDVKELIPEFFYMPEFLENSNSYHLGVKQDGELIGDVALPPWAKDNNSSDEFDKDSIESGDRSLEELSWETLELLVVPHIFSHFALSLTDLTGKQRRSPCSDCCATHQGEADNSQVQPQAQQEAPPRPTIGLSLGRRSPPRLTPGLGLTLGLGRNRVLARPGPRPQEESQPRPTLGSDDRATGDTSLPTLASSGYGEQDRRPI

SEQ ID NO: 53358 - protein, 88 aa, Zea mays
  Coding DNA Sequence Number=SeqID_9983
MAVDAAALEKEQRGVEEGRRRIGEEEDCGRGRGRRIGEEGAACGSRSKPEIWGSGSWDTFGSCSLLEAVSVEDVWGRLPARGAEAESW

SEQ ID NO: 53359 - protein, 152 aa, Zea mays
  Coding DNA Sequence Number=SeqID_9984
  Subcellular localization annotation: CTP_CleavageSite=64; ConfidenceScore=5.83e-01
MAHAPPVPAPPGKPPFPLSSFSLRRRSFSLWCSNGNAHGRDSATATTSGRATRRRWWSDPGGSREDYGPSSPGRQRSSIQSWIGRKAGVMKKFEWFRQCACSISSVLAGAADNSVCLHKSLKRWRLEEKCVIEPFLPVLVIKCTPHHIGLTT

SEQ ID NO: 53360 - protein, 198 aa, Zea mays
  Coding DNA Sequence Number=SeqID_9985
MAERYQLPRSCVPPTARRKDCEHPPSGGLEGGKARCIREREDMVAFQGGHPPFKGDSPYLRPQSSWAESSPTRSKVLPYGTGAGSHTSCKPAQSRRSQTAVRGTGKGDTPKRVLPREGTRLRASLLIRGSKAGPSEGFDSRLRSRGLYTHYWSEVRRLAPRKGSTTASGYSGSAPSTDQGFEGWPPKGSQPPQTQSEG

SEQ ID NO: 53361 - protein, 33 aa, Zea mays
  Coding DNA Sequence Number=SeqID_9986
MATVRRQQGVGTREGRWQCGGAGKRHPTARWNP

SEQ ID NO: 53362 - protein, 79 aa, Zea mays
  Coding DNA Sequence Number=SeqID_9987
  Subcellular localization annotation: CTP_CleavageSite=58; ConfidenceScore=5.44e-01
MAVHRHRARGQPESPADHMRRKSSVPPAAMRSSSPQRLSLTAQITQQYSRAAPAIMPTATPVSRVVLDRALSVLLASRP

SEQ ID NO: 53363 - protein, 25 aa, Zea mays
  Coding DNA Sequence Number=SeqID_9988
MGSEAALLVAATTELFLGGSRCQYF

SEQ ID NO: 53364 - protein, 481 aa, Zea mays
  Coding DNA Sequence Number=SeqID_9989
MNKNTGIQSAITNGTPVPPPQVRTTSLDGGGPAEQQKTDERRAVARSSSSDDDDFCSRGPNSGSTDLRADVAAKRPPPMPKLVRQGRAEDRRVGGRSVSGPGYLVGGRTSSSCRGRRRRRERLRSHSRPRARHGAAASATDDDRPSLRSLSEGAGHHPRRGRPQLGTLPSPALVMKILEAEGGAEAAARLAFPHHQAGGHHHGDEEKRWWVSPIRGLGRWKDTMHKGARRHGRFPKGVTLLLKATLPTCAPNRRGLSLLQHTPRSSPAARGLGPTCHANRLRAEEAKPSRAVRTTAQRLQVTLNFCPDQRAKGAGSHAGGMQPRQVDALLRLLTRPAWRPRPTRHATGALNASCMQLHRHLRHHRASSIAEPIPRLEATQSTTQQRQPGMAVSAAKNGPAVMTVSGGREQRSCRQPSSRPIRGQQENPLSRREDNATVIRSSNGSRTRNSRPANHSPRRINSAAGQAAPLAGEAGDASPSP

SEQ ID NO: 53365 - protein, 295 aa, Zea mays
  Coding DNA Sequence Number=SeqID_9990
  Gene Ontology: Mol. function=[citrate (pro-3S)-lyase] ligase activity; Biological process=biosynthetic process
  Homolog annotation: Hit_ID=P77390; Match level="QueryCoverage=97%, HitCoverage=82%, E-value=1e-163, Identity=98%"; Hit description =[Citrate [pro-3S]-lyase] ligase
  Pfam annotation: Domain name=Acetyltransf_1; Domain location=23-94; Score=26.7; E_value=8.3e-05; Accession=PF00583.15; Description =Acetyltransferase (GNAT) family
  Pfam annotation: Domain name=Citrate_ly_lig; Domain location=130-295; Score=346.9; E_value=3.5e-101; Accession=PF08218.2; Description =Citrate lyase ligase C-terminal domain
  Pfam module annotation: Pfam domain module=Acetyltransf_1::Citrate_ly_ lig; Domain location=23-94::130-295
MAEIAQFLHENDLSVDTTVEVFITVTRDEKLIACGGIAGNIIKCVAISESVRGEGLALTLATELINLAYERHSTHLFIYTKTEYEALFRQCGFSTLTSVPGVMVLMENSATRLKRYAESLKKFRHPGNKIGCIVMNANPFTNGHRYLIQQAAAQCDWLHLFLVKEDSSRFPYEDRLDLVLKGTADIPRLTVHRGSEYIISRATFPCYFIKEQSVINHCYTEIDLKIFRQYLAPALGVTHRFVGTEPFCRVTAQYNQDMRYWLETPTISAPPIELVNLFLLRYQEMPISAPERIQA

SEQ ID NO: 53366 - protein, 193 aa, Zea mays
  Coding DNA Sequence Number=SeqID_9991
  Gene Ontology: Mol. function=transferase activity, transferring phosphorus-containing groups; Cellular component=integral to membrane; Biological process=two-component signal transduction system (phosphorelay)
  Homolog annotation: Hit_ID=P77510; Match level="QueryCoverage=100%, HitCoverage=34%, E-value=1e-105, Identity=100%"; Hit description =Sensor kinase dpiB
MAMNQAKIIASNDSVISAVKTRDYKRLATIANKLQRDTDFDYVVIGDRHSIRLYHPNPEKIGYPMQFTKQGALEKGESYFITGKGSMGMAMRAKTPIFDDDGKVIGVVSIGYLVSKIDSWRAEFLLPMAGVFVVLLGILMLLSWFLAAHIRRQMMGMEPKQIARVVRQQEALFSSVYEGLIAVDPHGYITAIN

SEQ ID NO: 53367 - protein, 201 aa, Zea mays
  Coding DNA Sequence Number=SeqID_9992
MAPLDFAHSDESKLASRYMSNPLELQDPRLAIALLALTNISSDETHGTHHARLTDSLARGFSARNQGPERKKQDCGFYFQETEGSFNKLWVLGDLGHPITHQRLRLDLSPSADRRARGSVTGKGRRVDQSDLAPAGVGDRQMGPRGRARSRKAVSRDLDRWIRDRRFRSSTRRLTAQWPTPLLSAAGVGSSETGQTRPPGA

SEQ ID NO: 53368 - protein, 251 aa, Zea mays
  Coding DNA Sequence Number=SeqID_9993
MEPAFTASAASFTDLCNTWALIKESQRTGDARGMLEATPSSGALSVVVPPPCDDQPTSEALGPEDAMLPALLLPRYARGWRPPRDALMAPPTQRGRGPVPPLASGCGAGLGVSMGHEDVYQSCPGETLLFQRLDRRQETVHLTLEDHVTPGVALLHRSQLLTSKLRGALDDIPGIKPLAFISNGGGKVHLEVLLFQPIQSCILAEPTYYLSPQPGDTRTLKRYCHSPQCGLIPMNASHSVIKHTMWRMVLG

SEQ ID NO: 53369 - protein, 85 aa, Zea mays
  Coding DNA Sequence Number=SeqID_9994
MAPGAVLTSSFKVEILRSCCRLRPGQIPPKDLLVGSRIVYPSESYLSRKVMSEDPTIEVVEKRERCSGRKTFSEENFDEEGVPPF

SEQ ID NO: 53370 - protein, 301 aa, Zea mays
  Coding DNA Sequence Number=SeqID_9995
MERDETQHIPRRRGRGGSARRDHPLRLRVTGEETKQAIDNKGLQVVHCDGGEGPRVAQRNDGYRVGHHQAKGVAAEQTRDRKRGYSERDPSLRRKRAPSPPTDQRFEGWPLGRVSTAASEYSGSTPTTGQRFEGWPLERENSAACAAPTVVPPATVRLTAAKSGLRRHRKLRLARPQGSDSTSTSDDGLRLARPQGSDSTSTSDDGLRLARPQGSHSTSITEDDLRLARPQGSDSTSTSDDGLRLAQPQGSDSTSTSDDGLRLAQPQGSDSASTSEEPPPRPTLGSDRLRRRGVHHYPTPS

SEQ ID NO: 53371 - protein, 148 aa, Zea mays
  Coding DNA Sequence Number=SeqID_9996
MATSPSDSSSSLSPIHLALNQPQSDGWDFEVASESDGDLTDGDDLQFLVDGELDFDTSTDWSWTYDGESSDVESFDNDDDLMSGHWMGIVSSDDEDDENDDGSSDYDSSDEDNNDSGNDDNDDDGGASQCDEMPPSKRRRLLHGSLFW

SEQ ID NO: 53372 - protein, 328 aa, Zea mays
  Coding DNA Sequence Number=SeqID_9997
MRRKDGGHPPSGGLEGGKMRRMREEEDMTGSEQKKPNCRAWCTQPPSGYKPTRRATGAPDAACKQLHRLRHHRASSIAEPIPRLEATQRATQRRQPDTAANAAKGGPAVMTVADAREQRARRQPSSRPIRGQRESPLSRCEDNAPVIRSSNGSRTPNGCPANYSPRRINSAAGQVALLAGATGDASPSPKQPHQKRGSKAGPRRVHSRLRRRARDDQGYVRYITEARAALPSSPETPCSVPIEGNMALSPLLLAERRRRGVCKKAESVPDRPLALCRGSGAALANPAPAEPLTASTYQPENLGPDRTPGLRPARMREQPDQPKHYARH

SEQ ID NO: 53373 - protein, 359 aa, Zea mays
  Coding DNA Sequence Number=SeqID_9998
  Gene Ontology: Mol. function=ARF GTPase activator activity; Cellular component=cytoplasm; Biological process=regulation of ARF GTPase activity
  Homolog annotation: Hit_ID=Q6ZD39; Match level="QueryCoverage=44%, HitCoverage=22%, E-value=1e-69, Identity=76%"; Hit description =Putative ARF GTPase-activating domain-containing protein
  Pfam annotation: Domain name=ArfGap; Domain location=218-355; Score =153.6; E_value=5.3e-43; Accession=PF01412.9; Description=Putative GTPase activating protein for Arf
MLADPFPLSAYTRGTVGLLKLKEEDNAEERDFAVCDVQIGGTSSVQMALERSVGYSGRVEAARATLDQVRVEDIDTNVVFLKNFLFSTREEHSPMKIIDFGLSDFIRPVFLAADQCPIGYSLKMVELELLRFLCERIVKKEKVKKFLFSTREEHSPMKIIDFGLSDFIRPVVGRGDLCMSPVEFQPSVSEDLVLEKKSGNGQHDVRGTHHHRTNMKPEKPIDLLRKVDGNNMCADCGASEPDWASLNLGALLCIECSGVHRNLGVHISKVRSLTLDVRVWEPSVINLFQSLGNMFVNSIWEETLPDDNSSADGSDTSQYLSVSKPKHKDVFSAKEKFIHAKDSGSHQVTPPPHADFADK

SEQ ID NO: 53374 - protein, 276 aa, Zea mays
  Coding DNA Sequence Number=SeqID_9999
MSEVPHLWEKEYHSYLEEDDPYFRNATSNPDAPCIVDPFPMVSNLRSWEIGLISEWRQQAPVKISEFFYTRAKSFAQFKEGEKQGSGVDSERKTLDKLIDEPRNLIPLDIVEVPDLSEKKTLDKLNDQPRNLIPLDIVEVPDLSVSGDNFDLAKDDPYDPTTTSKPEAPMQLLNQLPVEKKTLDKLIDKPGNLIPLDIVDVPDLSEKKTLDKLIDQPGNLIPLDIVEVPDLSVSGDNSDLAEDDPCDPTTTSKAEAPMQSQNQLPVVRNLADARSA

SEQ ID NO: 53375 - protein, 154 aa, Zea mays
  Coding DNA Sequence Number=SeqID_10000
MKIIERKCEAQKGAGIRSNLNFDVVLWTVGEKTLDKLTDQPRNLIPLDIVEVPDLSIIERNCEAQKGAGIRSNLNFDVVLWTVGEKTLDKLIDQPGNLIPLDIVEVPDLSVSGDNSDLAEDDPCDPTTTSKPEAPMLSLNQLPVVSNLADARLA

SEQ ID NO: 53376 - protein, 127 aa, Zea mays
  Coding DNA Sequence Number=SeqID_10001
MQIIERKCEAQKGAVIRSNLNFDVVLWTVGEKTLDKLIDQPRNLIPLDIVEVLDLSEKKTLDKLIDQPGNLIPLDIVEVPDLSVSGDNSDLAEDDPCDPTTTSKPEAPIQSLNQLPVVSNLADARSP

SEQ ID NO: 53377 - protein, 102 aa, Zea mays
  Coding DNA Sequence Number=SeqID_10002
MEKKTLNKLIDQPGNLILIDIVEVPDLSEKKTLDKLIDQPGNLIPLDIVEVPNLSEKKTLDKLIDQPGNLIPLDIVEVPDLSIIERKCEAQKGAGIKCNPEF

SEQ ID NO: 53378 - protein, 320 aa, Zea mays
  Coding DNA Sequence Number=SeqID_10003
MGHLNYIKWYQIYRLIVHKTTSKFSPQNHIKIQELVDTILRSGRSRISKVANHGELVQRLHWRLGLARRSPIARVIFRQIGIICTHRKIGHLNYIKWYQISRLIDEFIDCFISYRPQNHIKIQELVDTILRSGRSRISKVANHRELVQRLHWRLGLARRSQIARVMFRQIRIISTHRKIGHLNYIKCPQNHIKIQELVDTILRSGRSRISKVANNRELVQRLHWRLGLARRSRIARVIFCQIGIISTHRKIGHLNYIKCPQNHIKIQELVDTILRSGRSRISKVANNRELVQRLHWRHGLARRSWIARVIFRKIGIISTH

SEQ ID NO: 53379 - protein, 203 aa, Zea mays
  Coding DNA Sequence Number=SeqID_10004
MQIIERKCEAQKGAGIRRKKTLDKHTDQPGNLIPLHIVEVPDLLVSGDNFDLAEDDPCDPTTTSKPEAPMQSLNQLPVEKKTLDKLIDQPGNLIPLDIVQVPDLSITERKCDAQKGAGIRSNLNFDVVLWTVGEKTLDKLTDQPGNLIPLDIVEVPDLSVSGDNSDLAEDDPCDPTTTSKPEAPMLSLNQLPVVSDLTDARSA

SEQ ID NO: 53380 - protein, 179 aa, Zea mays
  Coding DNA Sequence Number=SeqID_10005
MEAKTRPYVIIEGELYKQGACFVSKETSLYTKMLRFKGNFVVYERCFDVNEKKGMCFCLRLKKLQALVSPTTKQMIYKRKELVDTILRSGRSRIIKVANRRELVQRLHWRLGLARRSRIARVIFREIGIISTHRKIGHLNYIKSYQISRLIDEFIECFFSPKIHKTTSKFRLDLIPAPF

SEQ ID NO: 53381 - protein, 158 aa, Zea mays
  Coding DNA Sequence Number=SeqID_10006
VVPFTHKSCYPSAKGSRLPIHLYRGGEAGTAIAAKSSRGSPYTDHSPTALAPFGYQDDLQVTRVLTAKRSNTDKHDFAARRESVRRRVHRRPQRMQEVENAQKQGGEPGIPTIASAEDHGRSSTNSDLPLDRSSRLKHILAKVPHMSLSLADVIAEVV

SEQ ID NO: 53382 - protein, 104 aa, Zea mays
  Coding DNA Sequence Number=SeqID_10007
  Homolog annotation: Hit_ID=Q2QTF5; Match level="QueryCoverage=87%, HitCoverage=98%, E-value=9e-09, Identity=39%"; Hit description =Retrotransposon, putative, centromere-specific
METRALLFCLGIREKTEREKDLNMLDSDCRRTPTCDGHHGQMRARIGMFKHNMESLSSLLSYGSGIIDECPSGQGVTLHKIVTAIGGGVSVAKAQRLWKAVVGP

SEQ ID NO: 53383 - protein, 106 aa, Zea mays
  Coding DNA Sequence Number=SeqID_10008
MQIIERKCEAQKGAGIRSNLNFDVVLWTVGEKTLDKLIDQPGNLIPLDIVEVPDLSVSGDNSDLAEDDPCDPTTTSKPEVPMQSQNQLPVVSNLADARIAEPSPCG

SEQ ID NO: 53384 - protein, 48 aa, Zea mays
  Coding DNA Sequence Number=SeqID_10009
MGTNGHLDLDTEGISFDVLHTQLISIPLIMSLSYAMTNVFSSEFHTKS

SEQ ID NO: 53385 - protein, 660 aa, Zea mays
  Coding DNA Sequence Number=SeqID_10010
MDQDRQGAAQKRQAVVRLHEARPKRQRGAAKAAAPGGGKPPLAAKSAVPASSKAPEAAAGASGSKSTKAVPASSRVPEVAKAARGLPSPGKHIADFATDISVDDYLGGSDEVQLVIAAPAAATTAAAVVPKAKGGALSARGEMSALAAVRDEAGAVSRRLKEMKEALSQAADFADRAASGALTAVVSAEVERLRTQHADAVREKSAAESKCRKLADKVAALEGEKTDLRRQLAGERREANEALAKAQAALAEAKLARAEGNLARERAEQLEERLGALQSHVERVEAATHTEAERTRKQLMDSYHELGARTADFEVPDQEPGLRCLKWVQEELQALPTIVEGFMSYASLVTCEGAMNALSREGCRHYEVFDQADEDFERDIYKVEDSVVKESAGALYDRMWGPHVREVVRERAETARGQAARGERVDDFGALNSTLPDPESNPAEAALEPLPETAEGAPEAPAAAAAGEGPPPETAEGIPDAPAAAAAGEGPPPTAAPRVEDPATVQDFGPAHATATTNFLAASTVDDGNKSDGSTSKFSDFGDSGSSIEWTEESSNEDLDYFAALDVAAAEASPRATDAEDVPGPSTGRRRRRAVAKRRVSGADGGRLRVSRASRQELLSLPATVSTGEGELRSLFAGEELRIMLFNYREMGIILKAEPM

SEQ ID NO: 53386 - protein, 90 aa, Zea mays
  Coding DNA Sequence Number=SeqID_10011
  Subcellular localization annotation: CTP_CleavageSite=27; ConfidenceScore=5.08e-01
MSASRTPSGLLPCLRFGLFDFFLLSVGSARVVGPSVRVDSMGFGPYCWYRAQERLHFLYESRLAVGKSSEGFQALQQSTPGPASRLLLHR

SEQ ID NO: 53387 - protein, 86 aa, Zea mays
  Coding DNA Sequence Number=SeqID_10012
MQQVQQQPPAPQPQIPWTPKIGCVPWKRELHTAQCNNREKVLYGPCQLRGVAQSWWESYLATHADPEAITYRNSGITSVVTMYSRD

SEQ ID NO: 53388 - protein, 91 aa, Zea mays
  Coding DNA Sequence Number=SeqID_10013
MGSTLVSISAKTESLNIEKPYLDSHITSIPLRVFFLVGWFQKKKIKTDVREDSVLHLGSFAFVFSGGVCASLMSEDMCRGARRAQQEQQDP

SEQ ID NO: 53389 - protein, 34 aa, Zea mays
  Coding DNA Sequence Number=SeqID_10014
MGLGVCGSLCQGKEREEGVKVDLQVFQDVDEFED

SEQ ID NO: 53390 - protein, 151 aa, Zea mays
  Coding DNA Sequence Number=SeqID_10015
MGKNNKHKREPTPPSEEFGDSEYSEEEFSTESEGSPAPIPLRESSDNSDDSQGLAAEVWTYIRAVERSGLEGSDESEYSSDEEDSDGGGEDEDDDDDNDDGGDGDGDGSGRGGGGDSKDDDDGGSRGSDRGGSSRGSTRGGSGGGSNRASG

SEQ ID NO: 53391 - protein, 243 aa, Zea mays
  Coding DNA Sequence Number=SeqID_10016
  Homolog annotation: Hit_ID=Q6QP51; Match level="QueryCoverage=54%, HitCoverage=78%, E-value=8e-19, Identity=41%"; Hit description =Putative growth-regulating factor 1
MMTASKKGTGKGDISKGILLHEGSGPRALLLIRAASEHSGSAPTTDQGFEGWPLEGFDSRPKARRARDDSGYVRYMAEAQATLSRRIQCKDRLAPYPDTRASVGKVEQLSPASGVAGSSASPDLGPRPQEEVFASPDRRARPQPRLRKVVSASLDPRARPQPRPRKVVSASPDPRARPQPRPREESRPRPTPASASGGVFASPDLGLGPTTPQGGPPGVEAPTVVYKTEMEIRIKVWYRVSSV

SEQ ID NO: 53392 - protein, 178 aa, Zea mays
  Coding DNA Sequence Number=SeqID_10017
MKAKSHHQSNQGGTYKNYATSKAEYTNTQLDLPAQDRARQRLLLRPRPGSGEDAIPLEVEVEAGPWGRARRRPPSEVEVEAEPWGRARRRPPSEVEVEGEPCGQARRTLPPEAEAQGRARRSFLLRLRLDSAAVSLTLAGGTAVGEGRAALFSCQVSQWEGEVTAVTSTLPTEARVSG

SEQ ID NO: 53393 - protein, 243 aa, Zea mays
  Coding DNA Sequence Number=SeqID_10018
  Homolog annotation: Hit_ID=A2YGC2; Match level="QueryCoverage=61%, HitCoverage=67%, E-value=4e-08, Identity=28%"; Hit description =Putative uncharacterized protein
MESHDLWAERESRLEGGNESDGFGIDYGNAGDTVCEELLPCAFAGGAPCTITERPNRWSSRWSSSSHSTDLSTDQEPEGWVARPITRDAARGCHFHDALDTLLRQALDRRTWSIEYRCVVFQHSRGVYPDRWEATCLVRRLENSLWGAEICSEHYSISERDSAEAAMQDVARRVLSHYCSVLGGVADGLNLKYYPRCPSGSTGGVIVSPVGEDNPRLSSTVNLAAMLNTELDHALDELSRARA

SEQ ID NO: 53394 - protein, 29 aa, Zea mays
  Coding DNA Sequence Number=SeqID_10019
MAARLTGGEGGPTKGRVGSKRSLRSQRGY

SEQ ID NO: 53395 - protein, 56 aa, Zea mays
  Coding DNA Sequence Number=SeqID_10020
MVHGGCVVYETEIGIRIKVWYRSLEDMVAGVTWSSILPPGWTVEWDPTSAEEEPEE

SEQ ID NO: 53396 - protein, 165 aa, Zea mays
  Coding DNA Sequence Number=SeqID_10021
MRKKHGIAPKIPRCSGPDSHNEQTPVLKVPLQTELRFHSRGYEQPPHRRACGTTTSRWLAAAHSCSSDNDLRSGRPNSSSDDLRADAAATRPSPTSPLEGRGQAIRAKEPEAQSADGADDLVGDEAFSSCHLPTRRSPLKSSRTGEHRPPRGGVVPERGQDNPRT

SEQ ID NO: 53397 - protein, 205 aa, Zea mays
  Coding DNA Sequence Number=SeqID_10022
MAPEAGLGCCQPHPGRWHSSRSRAGGAVLLSVGWRGDLAKVASLRSLPELGLGRVEGGNENDGFGIDYGNGKWYSFRLERMTHLRHTARKSVIPFLPSRLTERPLRRPVTGAPCTTTERLAPGVAAGGDPDNGGGDSSSSFSTDLSTNQELEGWVARPITRDATRGCHFHDALDTLLRRALDQRTWSIEYRCVVFQHSRGSTRTR

SEQ ID NO: 53398 - protein, 130 aa, Zea mays
  Coding DNA Sequence Number=SeqID_10023
MENHPEKQCCHKGEDSAAYAAPTAVPLDRVRLTAAKSGLGRHRKLRLARPQGSDSASAPKDDELRLARPQGSDSASAPEDDELRLARPQGSGSTSTTKDRLDLDLGGASASPDPGLGPTTSQEGPSLPYP

SEQ ID NO: 53399 - protein, 149 aa, Zea mays
  Coding DNA Sequence Number=SeqID_10024
MGKRMVRTIQTARNNTNYIPLPRQVPVYLVVVKEIPVDLPRIRVENGVIQEDRSKEFLPTPTPLAESLAFAAVSSSSAPPAPAVQSPAPRGDDPDDSGDDDEEDEDGEEEEENINEEANGEQQDHFVWVWPVTEHYMWRNHPNFSNLSA

SEQ ID NO: 53400 - protein, 150 aa, Zea mays
  Coding DNA Sequence Number=SeqID_10025
  Homolog annotation: Hit_ID=A2XFR6; Match level="QueryCoverage=95%, HitCoverage=41%, E-value=3e-22, Identity=42%"; Hit description =Putative uncharacterized protein
MDAGDRGFWTMSAHESLTLLSTYVASISDATRRTLWSLSHTCRQQLHNTKYMHLPLRLRGESQTNIVPGGAEEDRLNTLAGVVAGLNTDLDSATLDLSRVHLKLEDAHARIAALEVQLEGRDPPEAQVPAMALSPPRKRIQEPGSITRLL

SEQ ID NO: 53401 - protein, 193 aa, Zea mays
  Coding DNA Sequence Number=SeqID_10026
MDVLRIRNLGEDQQELGKGLGVEEEQQGRPQQEGDQVRVSCDSHLGFQDQSALKWTPKMHPDSDCDGLDMVGKITRLSNQPNWDKPSWRGHSCVTGDNQWSRGVVIARNRSLRALDHQCRDLHSIKLSYLMEDRAASTITRDTRFIPRFGHTTKVPYFLVEAPTKSWVSFNPNPPFADHKGQAHTIIFAQMSG

SEQ ID NO: 53402 - protein, 190 aa, Zea mays
  Coding DNA Sequence Number=SeqID_10027
MHTGASARPRLTGGDGVSANQGGLTSRVQRQGRGHGKSDHLECELRDAWRTVGVRWSLGSTAAGLRLRKKRSDERGPGKPKRGRANQRVSRVADGKVELTEATDRVWARRRSQNGRQSTAGGGGVLWSCAQSEGEGERVRLRVQVSGGRVFNSNSNQVSNSNQIKYVQQFKEKLELNMMHHFMTHLFCQK

SEQ ID NO: 53403 - protein, 356 aa, Zea mays
  Coding DNA Sequence Number=SeqID_10028
MGIGRYLLVDGRWRSRVRGGLHHCLRYKGNAQQVLRERAGIVRLLGVGVLRGNGARLRLRRKVEARRVPRWGASVVDLLDIRRGAASCLAMPAPHPPPSAGKVTRQTRMLLFRHVGKTSSIPPPAGGLTAAIVVVTRQRKEYHVVAAIEGHELKTPETEHRPGLEWLLETTHLELYGKLCVNTQQAPTWRANCRRFDLGGSLDRRVGRGGGSSEVEVESDPWGRARRSPSSEVEVESDPWGRARWSPSSKVEVESEPWGQVRRRPSSEAEAVSEPWGRARRSLSSSVEVEPEPWGRARRSFLWRPRLVLAAVSLTLLNGAAVGATQVALFSCQVGQWSGEVTAVTSALSTEERASG

SEQ ID NO: 53404 - protein, 297 aa, Zea mays
  Coding DNA Sequence Number=SeqID_10029
MVTTSLMVGRSKPGYDLCPAPQLSRMFIILAGAEAGLSRSSTSRAGFVGHLLPHHSGERALTGLAGGSDFDNAGLVGDERRQLQRVGLAGSAGPGSAPGAPSCRESGFRAARTGGPPKTSRAARASFVFLGCPAFAPVRRLCAEASGSLALIACPRPLSGDVGEGLVAAASALRPSLLLFGHLERRSLSLLPERAAVSHLESRRPAGPPMNPRPLCGESEPEAAVSAWTEAKLAQKEDFVGRSLAGPSTSGTNAGVGRTAHPNASYFSQKAMSENLGDDERPFPGRRELVPPSGVLS

SEQ ID NO: 53405 - protein, 36 aa, Zea mays
  Coding DNA Sequence Number=SeqID_10030
MGSRHSACSAEAECRGKEEGVEADLQEFQDFDEFED

SEQ ID NO: 53406 - protein, 347 aa, Zea mays
  Coding DNA Sequence Number=SeqID_10031
  Subcellular localization annotation: CTP_CleavageSite=68; ConfidenceScore=5.48e-01
MSSRSLMHRVFPPSKPPDGGYPPSSRLIVGGTQLRGSWYLSAIVRLQGFSSCSPAAPLRRRSPKMVTSSLMVGESEPGCGLCPSLSLKDFHHQGWGGDCTVPGSRTRVASEPLAAPASATVAGRGSSADEIARAAHGPTSNSTAFCPSLPHKFGHGRGPPGSSTRPEVSAAAVRPPGVEVVVVAAAGAGDGTPFVGLLLLRRPSPMEWGYSPVGCLNRFTKRESPRVKVTSEPGRPLAGPTPELTSRGLGLGWRPWKMVGRGPRGDRPSRLLGPDSRRRPWRRWPGRGDDVVLRSGDLRTASPSEARSNLAEGVVDAEGAAAPFQRQDPSLQDQIVLQRVPSAAAEA

SEQ ID NO: 53407 - protein, 489 aa, Zea mays
  Coding DNA Sequence Number=SeqID_10032
  Gene Ontology: Mol. function=kinase activity; Cellular component =plasma membrane; Biological process=embryonic development ending in seed dormancy
  Homolog annotation: Hit_ID=Q7XCE9; Match level="QueryCoverage=93%, HitCoverage=95%, E-value=0.0, Identity=73%"; Hit description=Pollen -specific kinase partner protein, putative, expressed
  Pfam annotation: Domain name=PRONE; Domain location=2-484; Score =690.9; E_value=9.5e-205; Accession=PF03759.4; Description=PRONE (Plant-specific Rop nucleotide e
  Subcellular localization annotation: CTP_CleavageSite=57; ConfidenceScore=5.23e-01
MDRDSSSSVSASDGSSEAGERGGCCSSPPSTRSLVDTAGNNLISRTASDASTSLSDRCSSVDVDHSGPFQPAAAVAKLIGRSSPPSAAASLRRLSIKPRADVLDRRSTEDEMELVKERFSKLLLGEDMSGGGKGVCTAVAISNAITNLYATVFGSCHKLEPLPAGKKAMWTREMDCLLSVCDYIVQFYPSTQTLPDGTKVEVMATRPRSDIYINLPALEKLDAMLIDILDSFQKAEFWYADAGTRSFGSVTSSSSSRMSCSSSFRRSAHRNDDKWWLPVPCVPDAGLTDKARKDLQQRRDCANQIHKAAVSINSGVLGDMEVPESFMAVLPKSGRASVGDSVYRVMLGADKFSPEFLLDTLDISSEHDALAMADRVEAAMYVWRRKASGSHGKLPWSKVKELAADDDDKNVTLANRAESLLLCIKHRFPGLSQTTLDTSKIQFNKDVGQAILESYSRVLESLAFNIVSWIDDVLFVDRSIRKLSDNLKS

SEQ ID NO: 53408 - protein, 240 aa, Zea mays
  Coding DNA Sequence Number=SeqID_10033
  Homolog annotation: Hit_ID=Q8S474; Match level="QueryCoverage=26%, HitCoverage=8%, E-value=6e-08, Identity=47%"; Hit description =Putative pol protein
MTKYWVLQKSKWSNEGTSGLRHSSTIHRTVRCTPDSVRCSKEERPQELASLGKSQQRLRYNSPDMSEVRHARACTPDIEQYMSGVHRTSMRAQKSEAPTVESQRPGDVAAAPDMSGTNDDTYQKLKEENERLKMGLTQLKGKGIPQPSQDNRDHMVKKLETGTIEACTKSLEENVKDLRITKRKKQKKKINASSKSLKHASIQGGPRSQKLQRSNPNGLVTWLPHRTCPVHHSTADFTNG

SEQ ID NO: 53409 - protein, 407 aa, Zea mays
  Coding DNA Sequence Number=SeqID_10034
  Gene Ontology: Mol. function=branched-chain-amino-acid transaminase activity; Cellular component=chloroplast; Biological process =branched chain family amino acid biosynthetic process
  Homolog annotation: Hit_ID=A2Y7C6; Match level="QueryCoverage=80%, HitCoverage=80%, E-value=1e-159, Identity=83%"; Hit description =Putative uncharacterized protein
  Pfam annotation: Domain name=Aminotran_4; Domain location=96-361; Score=292.4; E_value=8.6e-85; Accession=PF01063.10; Description =Aminotransferase class IV
MEYGAVLAAAPLVARPNWLLLSPPPLAPSIQIQNRLYSISSFPLKAGPVRACRALASNYTQTSETVDLDWENLGFGIVQTDYMYIAKCGTDGNFSEGEMVPFGPIALSPSSGVLNYGQGLFEGLKAYKKTDGSILLFRPEENAERMRTGAERMCMPAPSVEQFIDAVKQTVLANKRWIPPTGKGSLYIRPLLMGSGAVLGLAPAPEYTFIIFVSPVGNYFKEGLAPINLIVEDKFHRATPGGTGGVKTIGNYASVLMAQKIAKEKGYSDVLYLDAVHKKYLEEVSSCNVFVVKDNVISTPAIKGTILPGITRKSIIDVALSKGFQVEERLVSVDELLDADETYLAMISLHVREFTLQSGIRPPRCWRCVPAAVHFTDESSDGSNRGLDGLDCATELVGRGSWIIPNR

SEQ ID NO: 53410 - protein, 102 aa, Zea mays
  Coding DNA Sequence Number=SeqID_10035
MGLGVCGSLCQGGGEDDGFDYGNGAPELLDKFGIFPYLTRNVSPVLQTLQNIGDEAMRKLLHKLTFIENKSYPTKEKTLKGMLVIWESRIPRGVIKIKEASK

SEQ ID NO: 53411 - protein, 145 aa, Zea mays
  Coding DNA Sequence Number=SeqID_10036
MSPAGECSGNHHFKGLEQGCARGLDREESSGDGSAPGQGMRHPAGAGSGREEMGGASQWRQRRQWLLGARRCEDLQGPFDKGRAGQGASWLLKSGARQGAGRRGWLGHRREAGQGCPTRLRAGQGVARPTGLERGTWGGRTHLRT

SEQ ID NO: 53412 - protein, 208 aa, Zea mays
  Coding DNA Sequence Number=SeqID_10037
MTLPKNLIRPLPVQDLEDEGFRRPALLIADAPLRSGRRELKGGSAMKRGERILVRSYMLLASGPLVHNSDSITCIYIVPIVKWPSTHVLSLDYGLGSDSGSAPEDDELRLARPRARTRAQPQKTTNSALPDPGLGLGLSSGRRRTPPRPTQGSDSTSASTDDLRLARPKGSDSTSEDRLDLDLGGASASPYPRLGPTTSQEGPSLPYP

SEQ ID NO: 53413 - protein, 308 aa, Zea mays
  Coding DNA Sequence Number=SeqID_10038
MQAACNRTKWAHPFDSNASSMEAQAHTSWTGKGDTPKGILLREGNGPRAPLLIRGSKAGPSEGFNSRLRALGLHAHYWLEVRRPAPRKGSTAASGHSGSAPTTDQGFVGWPSKAKSGLRRHRKLHLTRPRARTRAQPRKTTNSASPDPGLRLGLSPGRRRTSPRPTQGSDSGSAPEDDELRLARPRARTRAQPRKTVNSASPDPGLGLDLGLSRRSPSRPTQGLGLDLDLGRQTRPRPRRSLRLALPRARTDYVTGGAIITLPLASSGYGEQDWRPIWLAPRSSDGHDITRTGCQNLSGCHDGMYLGH

SEQ ID NO: 53414 - protein, 146 aa, Zea mays
  Coding DNA Sequence Number=SeqID_10039
MKEKEVDNNKKKELEKPQEKNEKSTDLSHKKKDVKKKMMKKSLRRSTDRSDKRTAPPCAAPTAEPLDRVRLTAAKSGPRRHGKLRFARPQGSDSVSAPEDDELCFARPQGSDSGSAPEDDELRSARPQGSDLGSTLEDGELRSARP

SEQ ID NO: 53415 - protein, 228 aa, Zea mays
  Coding DNA Sequence Number=SeqID_10040
MGHLLPQHSRERALTGPAGGSDFDNAGLVGGERRQLQRVGLAGSAGSGSGPGAPSRRKSGYRAARTGGPPKTSCAAWAAFMFWGCPAFAPVRRLCAEVGAPLVREDPSGDLPVGRWLLSSVLRWRRLKKSSSPTGSPPPSALRASGPLALIACPRPSSGDVGEGIVAAASALRPSLLQFGHPKRRSLSLPPERAAVGDLEPCRPTGPPMWGVVRTRGGGTGVPFVMAL

SEQ ID NO: 53416 - protein, 258 aa, Zea mays
  Coding DNA Sequence Number=SeqID_10041
MDSYRELGARTADFEVPDRESGLRCLEWLQEELLALPTIVEDFEREIYKVEDRVVKESAGALFDRMWGPHGREVVRERSDRARGQAARAETVEDFGSLNNARFEAEENPVTAEAEVVLAPPPETGEGSLAAPAATTSGGGSSPTAVPRAEDPPKTATEPAAEDPTAAGPSQVQDFGPAHATATANFVAASTVDAGNESDESDSKFSDFGDSGSSVEWTEESSDEDLDYFAALDVAVAEASPCAADAEVVPGPSAGRRR

SEQ ID NO: 53417 - protein, 95 aa, Zea mays
  Coding DNA Sequence Number=SeqID_10042
FLRGGDPPTVLPFEAGSDSAEGGVDAEGAAAPPLMSDPAGIVYLVVGIAYPSMSYLSQKVMSEDPTFEVVEKHERRSGRKTFSEENFDAEGVRPF

SEQ ID NO: 53418 - protein, 117 aa, Zea mays
  Coding DNA Sequence Number=SeqID_10043
  Homolog annotation: Hit_ID=Q6QP51; Match level="QueryCoverage=100%, HitCoverage=44%, E-value=6e-13, Identity=42%"; Hit description =Putative growth-regulating factor 1
  Subcellular localization annotation: CTP_CleavageSite=56; ConfidenceScore=5.66e-01
MGAIKVKAQSTQGTRSRLARAQPRAKAADPGGFTSRPRTPSSDRHNFGSSEAQSLRRSNLGQIATPTDRIAGAFNASRQSRSDRNHFAAPLTDLTGKQRRLRRSDCCATRQSEADSS

SEQ ID NO: 53419 - protein, 474 aa, Zea mays
  Coding DNA Sequence Number=SeqID_10044
  Gene Ontology: Mol. function=binding
  Homolog annotation: Hit_ID=Q337H4; Match level="QueryCoverage=71%, HitCoverage=37%, E-value=1e-109, Identity=63%"; Hit description =Expressed protein
  Pfam annotation: Domain name=WAPL; Domain location=91-474; Score= -182.4; E_value=0.0062; Accession=PF07814.4; Description=Wings apart -like protein
MILRTYGRRSRSFSDGGGGVSSSQDAFDCDDAADLLVSSASQPLPLPPSQESSSMWDFDEDPPPSPPRPRPEGRRRGARRGGWELAEAPAVAPTATLMEAEEYGEMMESVDEVTFALDGLRPAAQKRTRRASLLALLGICASAERRRVLRSQGLVQQIIDAILVLDIDDPPCAIAAGALLFVLASDVQDNNSLDSETCVHFLLKLLNPPVNVVDAKAPSIGSKLLGISKFQMLNSSNKDADSSSEDILLKVEEILLSCKEIKPLDSDDKKTTRPELCSKWLALLTMEKACLSAVALEDTSEMVLKLGGNFKETLRQSGGLDNIFNVMVNCHSELEKLVKDASTTDVEGKERAPLQSAALLLKCLKILENATFLSDNNKPSLFFRNLPLFQEKQTQKILKFAMGLALDLCTIWCYVKDLWSEGNWTATTEIVVAFRGRRRGYSPTPSPFAVWVMPPRRRVERVGEGEIRLVIYSA

SEQ ID NO: 53420 - protein, 299 aa, Zea mays
  Coding DNA Sequence Number=SeqID_10045
  Gene Ontology: Mol. function=acyltransferase activity; Cellular component=integral to membrane; Biological process=metabolic process
  Homolog annotation: Hit_ID=Q337H3; Match level="QueryCoverage=32%, HitCoverage=28%, E-value=8e-44, Identity=91%"; Hit description=1 -acyl-sn-glycerol-3-phosphate acyltransferase 1, chloroplast, putative, expressed
  Subcellular localization annotation: CTP_CleavageSite=57; ConfidenceScore=5.24e-01
MGTLIRPGPAASPLPIASPSSSSAHGIADSPLCRPVSPGGSHATALILSYDLFWLVRSGCRWRWREELAASGVGVGGGVPVPEYAGSGDEMAPPERRVEESIDAGQQLASRVRGVCFYLVTAVAAIFLFVAMVVVHPLVLLFDRYRRRAQHYIAKIWATVTISMFYNLEVEGMENLPPNSCPGVYVANHQSFLDIYTLLTLGRVGNVSLGCDSSAAYGQQEPVDTIFQFAFHVLHNIGFGNAGLSQTCRRKDRSSCDSYYSYRNWEIDAFWNGRNSQFSGLFRAQDLRVETKLVADVIL

SEQ ID NO: 53421 - protein, 708 aa, Zea mays
  Coding DNA Sequence Number=SeqID_10046
  Gene Ontology: Mol. function=binding; Cellular component=membrane
  Homolog annotation: Hit_ID=A2YB74; Match level="QueryCoverage=30%, HitCoverage=41%, E-value=5e-54, Identity=53%"; Hit description =Putative uncharacterized protein
  Pfam annotation: Domain name=PPR; Domain location=383-417; Score =19.0; E_value=0.018; Accession=PF01535.11; Description=PPR repeat
MEATAAVQRLADLEVQRRRIAEVRATDLHESNLVCSEQLVVDTAVFACTTNDAVQITDISLELAVPLHLTKELVQRGPASVTAAPTSSSVSVREMNHFHLDTNGTKLQQHVQYYAEPIFPKLDSDGEARVQDQVMHDTRGNPWEFCHIYRVQHDQHKLLPIGWSRNYMAGALDEQIDASVRQHCLWNLQASWRFVFNSSRVLEERYLKQPLGDLGFKRSWPVDPVAPEADVVVSCGGQAAVELADLRTWLNMFLEGSIVYTRATIVFMRRPNGDLIVGLRHDEEEAVPNTLPNRCSMICFIRGLDVGSHLWGNNSTAADHNTTGLRLLWWLKNQTSFQMSGSWDHFIALGHIFIVLEPLIHSQRTTKHILAIIASISNAQALIFTTSMIWVLCKAEKLNDAEELFDQTETARVVPCAYAYNTILMAFATGGYAAMERITQWNLAFTGVGLVGTVIITSLDLIGSGIAAGAGFVTSEICGVLAFLTLLGTMQVKTVRESMNRMIEAWREIPDLDEEVCSFEVPPSSQSTSSLTDTADSLGSTSTPSITRRNSWPTNRQPPPDTSHNVTNRKGSTPSIVGKKILPLSRCSTDQAKKFEGRVDVTVASDATPAKMVTEEKLLNEGSVRERLEARRVLFQKTGDKGYKKLAGPKSGSKVFPYSGDGDFEETAETEDAPDELQSAHRDEALLKIRMQLVQIENQHASLLNLLQ

SEQ ID NO: 53422 - protein, 80 aa, Zea mays
  Coding DNA Sequence Number=SeqID_10047
MAPRTLYDDSGSQPLTEARGRQQGHDSPDSYPSARLWRSSDGHDITRTGCQNLSGCHDGMKDQGPLTRVGRAGKDGTALA

SEQ ID NO: 53423 - protein, 194 aa, Zea mays
  Coding DNA Sequence Number=SeqID_10048
MAAGFDNMRRDYADRVDASDTEGIRGCCGLAVLGEGRVGEGCWSWGQRAGRERRHEQHELADEQESGEAMMAPCRGSSASSAMARLVRPLATAGRGVGGGAGGKGRHGQELGQRLKLLLGHGRRGVRALDSRGKEGCRWPLLAVEQGAESTQGGGGAMGERQCHGSLELGSLLAAVWEKEAGCCCAREEEESGG

SEQ ID NO: 53424 - protein, 125 aa, Zea mays
  Coding DNA Sequence Number=SeqID_10049
GRFAAAACGCGYCSSGPRREVQGAGRSGSQAAGVEEGKLRGLSAMEASGHGGFASRRPWREKQRGLEQGAPNGGAIPGLGERLALEGEGGRALSAGLEIVAEPSELFQLKCPSRTLKGSNTLKQE

SEQ ID NO: 53425 - protein, 118 aa, Zea mays
  Coding DNA Sequence Number=SeqID_10050
MEAKSHHQPNQGGTCKNYATSKAEYTNTQLDLPGYNGSNSLISCEKQTIQILFYPCKVNLNTRHGRALRPHTSTVPIDPPFAARLTALAYKAPLTPAARRAVAALVPTISRMGDPVSG

SEQ ID NO: 53426 - protein, 110 aa, Zea mays
  Coding DNA Sequence Number=SeqID_10051
MYNGGVAMCYVASGEVPKPCVHGNLAIGEALEPCRSTVVGVAHILLTFPCFRRGLRTTDVTDARKEPSLPVTGSYPGGWHNSRSGVSGGVFLSDRSVKGRSDCGHFDLAD

SEQ ID NO: 53427 - protein, 475 aa, Zea mays
  Coding DNA Sequence Number=SeqID_10052
  Homolog annotation: Hit_ID=Q6QP51; Match level="QueryCoverage=38%, HitCoverage=66%, E-value=7e-43, Identity=53%"; Hit description =Putative growth-regulating factor 1
MQKRLEHLLFLACGPPAPVNAGGGHHSLRKRRKPPVIVLEIKPPALPPLVRRHKDGRDVLLRAPRPQLEGAATGPHRHTDLLCLRRRGKELHREEMGPHIPVGVNPQKTLANRREDGRLRNGVGVEVVQLHSVVVQERPHETARWHSKPPLMEGDETNHIPWRRSRVGLARGGHPLRLRPTGEGTEQTIGNKGLQILHSDGGERPRVARAERRSPCQPSLNEGGGGEGDKVRGFLFSGYSLRLRKPKQKASTNGRVKNHRQPLFRGKRHLWQAKRASFHLRHDDHVKKAAPEHSGSEPITDQGFEGWPLGRVRQPPQSTRAPSPLLIRGSKAGPSEGFDSRPRALRAGPSEGFDSRPRARRVRDDPGYVRYMAEARAMPPSHFALSLTDQTGKHRRSPHSDCCANHRGKTDNNRSSASGVTGSSASPDPGLGLSLGLGGVTSSPDPGLGLGKSLRLARPWARTDRAAGDTSLPYS

SEQ ID NO: 53428 - protein, 65 aa, Zea mays
  Coding DNA Sequence Number=SeqID_10053
MKGSTVAATIQSETWKPKWNSFGRSYITKIGCGQKTKANARARVTELSAAFDNLQVYSHTSDMKK

SEQ ID NO: 53429 - protein, 835 aa, Zea mays
  Coding DNA Sequence Number=SeqID_10054
  Gene Ontology: Mol. function=ribonucleoside-diphosphate reductase activity; Cellular component=ribonucleoside-diphosphate reductase complex; Biological process=DNA replication
  Homolog annotation: Hit_ID=Q5VRF5; Match level="QueryCoverage=100%, HitCoverage=100%, E-value=0.0, Identity=88%"; Hit description =Ribonucleoside-diphosphate reductase
  Pfam annotation: Domain name=ATP-cone; Domain location=1-91; Score =83.2; E_value=8.2e-22; Accession=PF03477.7; Description=ATP cone domain
  Pfam annotation: Domain name=Ribonuc_red_lgC; Domain location=235 -782; Score=1084.3; E_value=0; Accession=PF02867.6; Description =Ribonucleotide reductase, barrel doma
  Pfam annotation: Domain name=Ribonuc_red_lgN; Domain location=161 -233; Score=135.1; E_value=2e-37; Accession=PF00317.12; Description =Ribonucleotide reductase, all-alpha d
  Pfam module annotation: Pfam domain module=ATP-cone::Ribonuc_red _lgC::Ribonuc_red_lgN; Domain location=1-91::235-782::161-233
MYVVKRDGRQETVHFDKITARLKKLSYGLSQDHCDPVLVAQKVCAGVYKGVTTSQLDELAAETAAAMTASHPDYASLAARIAVSNLHKNTKKSFSETVKAGLVGLGCELECGRCGCRIKDMYRHFNERSGLMAPLVAEDVYEIIMNNAARLDSEIIYDRDFDYDYFGFKTLERSYLLKLGGKVVERPQHMLMRVSVGIHKEDIESAIRTYHLMSQRWFTHASPTLFNAGTPRPQLSSCFLICMKDDSIEGIYETLKECAVISKSAGGIGVSVHNIRATGSYIRGTNGTSNGIVPMLRVFNDTARYVDQGGGKRKGAFAVYLEPWHADIFEFLDLRKNHGKEENRARDLFYALWVPDLFMQRVQSNGEWSLFCPNEAPGLADCWGEEFDNLYKKYESQGKAKKVVPAQTLWFDILKAQIETGTPYMLYKDTCNRKSNQQNLGTIKSSNLCTEIIEFTSPTETAVCNLASIALPRFVREKGVPLESHPSKLVGSSDSKNRYFDFEKLAEVTSTVTYNLNKIIDINYYPVETAKRSNMRHRPIGIGVQGLADTFILLGMPFDSLEAHQLNKDIFETIYYHALKSSAELAVKEGPYETYEGSPVSKGILQPDMWNVVPSTRWNWPSLRETISKAGIRNSLLVAPMPTASTSQILGNNECFEPYTSNIYSRRVLSGEFVVVNKHLLHDLTEMGIWTPTLKNQIIYDDGSVQKIAEIPDDLKAIYKTVWEIKQKTLVDMAVDRGCYIDQSQSLNVHMEQANFGKLTSLHFHAWSKGLKTGMYYLRTRAAADAIKFTVDTTLLKENGNGMNDGKPTEEDVEAKMAQMVCSFNNREECLACGS

SEQ ID NO: 53430 - protein, 67 aa, Zea mays
  Coding DNA Sequence Number=SeqID_10055
MEPGGGTAVGAVESLLMSSCFHKGAESRRRHRVGRCGSSSEAEVESVFRGLGRVRAPGSGEAEFVVF

SEQ ID NO: 53431 - protein, 67 aa, Zea mays
  Coding DNA Sequence Number=SeqID_10056
MAPPEFGGSIGGDGTNLRDPHAEGMNQRGRLNGPSGHNGEVGRKRNSAEAQVKLYGRVDLSHQFRLK

SEQ ID NO: 53432 - protein, 82 aa, Zea mays
  Coding DNA Sequence Number=SeqID_10057
  Subcellular localization annotation: CTP_CleavageSite=57; ConfidenceScore=5.21e-01
MSQRCGSGVRRNTNTGKDPHVVFAMSWTSFCNGSFIVWGVGASVYCASAVCRHGTTRATALRGCWEKKTRGRGSIDGWPILV

SEQ ID NO: 53433 - protein, 94 aa, Zea mays
  Coding DNA Sequence Number=SeqID_10058
MSVPALIAHEAVNATRETGSQHTERAAVFTGNVDRQAGAGSRRAVNGEWWRGRNDEDNMAWCGWFVEIGEKGKEKKRGKKKKREMGHVGMGLGG

SEQ ID NO: 53434 - protein, 74 aa, Zea mays
  Coding DNA Sequence Number=SeqID_10059
  Subcellular localization annotation: CTP_CleavageSite=67; ConfidenceScore=5.66e-01
MQWFVGLARGPARPVARLTPAQPSLGVPLAPSRTMRPHPLSFSFSFPVQQLPSPSLPPPLAPDYLVCCVARFIV

SEQ ID NO: 53435 - protein, 455 aa, Zea mays
  Coding DNA Sequence Number=SeqID_10060
  Subcellular localization annotation: CTP_CleavageSite=64; ConfidenceScore=5.43e-01
MGGSLPPVPTRSKALPCDSGAGSRMSCKPAQGRRSQTAARGAHDRPAVTGDPPFFAQTNGQKGRAAMQAACNRARDRERGIPRKGSFSAKEPGSEPPITDQGFEGWPFEGFNSRLRSRGPDTHYWLAPEGFTVASDTERGMTRVPLDRVSLTGSQALPKAPRRTPLRPTPGLGLGLRPGRRRTPLRPTPGLGTRAKTRKTANFASPNPRARTRANTREDDETPLHPTPGLGLRPGLRPNDFRLARTPWARAPGHGNKRQTQPRLRKEPPRRRQQGLDRSNSCPSTRLRRTSDSHDITPAGCPDLSGCHIGMAFSEEVGRAGPRTGQALSWGRSLPSPAWTLVTPLLQAHLTWARDEHEGRGTSTSLTLDSDRLASPPYALAHALDPSGLGHAAHSLVGLGTPLSRNADKTKVFYNQRLNKWGFGLLCAGGAPPWDRACRCLARLLGEEDTGPWIH

SEQ ID NO: 53436 - protein, 68 aa, Zea mays
  Coding DNA Sequence Number=SeqID_10061
MAGAHLGTQDYDHMWKNLRSKNCNLADGEYILVPEQGAAQEVAPDPAPEPAPEDLPATALEGKPRFYA

SEQ ID NO: 53437 - protein, 166 aa, Zea mays
  Coding DNA Sequence Number=SeqID_10062
MTLGTSDTWPRLGLRSRGTLGHFRDQQERFCNGIPLEGGIEPLDPIKRDRVRQITCRSKLRLLKGHDLASPEPSLGQEQQTQVDSRLARGFPQENSAACTAPIAVPSARVRLTVAKSSLRRHRKLRLAQPQGSDSTSTSEDGLRLARPQGSDSTSTSDDGLRLARP

SEQ ID NO: 53438 - protein, 122 aa, Zea mays
  Coding DNA Sequence Number=SeqID_10063
MKALLKVLVDCAEDATKSLGGLVDHALDHMHDEEIVARTLFAMKEKLELLQQDALEAKVQAFPEIAKYDGDAISVEPTSLSTPPTVTEPSVDEEEFYCPDVSDEWYFSDSDRSTRNSYWNIY

SEQ ID NO: 53439 - protein, 163 aa, Zea mays
  Coding DNA Sequence Number=SeqID_10064
MSIEKTKKKLKCQRFIYNYTKSTVRNTVDYSGQEKLFGKTGQARTVRALAADRPRHKDDPRTEPMQKFESALWTVRRISADHLRPRSDRPASGADRPGRTVRAQQNGVTTRKWLVAINTTPTTSIHYTQAFQPSTFNTRASNPFQDTFKASISPSFTIEKRDH

SEQ ID NO: 53440 - protein, 123 aa, Zea mays
  Coding DNA Sequence Number=SeqID_10065
  Gene Ontology: Mol. function=translation release factor activity, codon specific; Cellular component=cytoplasm; Biological process =translational termination
  Homolog annotation: Hit_ID=Q10MK3; Match level="QueryCoverage=77%, HitCoverage=20%, E-value=5e-34, Identity=72%"; Hit description =Peptide chain release factor 2 family protein, expressed
MSEAGRPHLPLTVAILAKGSKLILRGATVGGLRLPKVLKNWGWILERTKQLAVVLKKPDLWEDPVFAGRVSREQGELMGKIKSVNQFEQELIEHIEMLRLAREENDNELEMESMKALADMRSA

SEQ ID NO: 53441 - protein, 102 aa, Zea mays
  Coding DNA Sequence Number=SeqID_10066
  Subcellular localization annotation: CTP_CleavageSite=51; ConfidenceScore=5.67e-01
MGAIQVKAPSTQGTRSRLARAQPWAKTADPGGFTSRPRVSSSNGRTFDSPEAQLGQASRRSNFGQIATPTDRIENSAACAAPTAVPPIRVRLTAAKTRIKLN

SEQ ID NO: 53442 - protein, 46 aa, Zea mays
  Coding DNA Sequence Number=SeqID_10067
MAPTRGPLPSAALHLSLRLFGGPQRPEIHNFLTVTPNLVILVPTTS

SEQ ID NO: 53443 - protein, 162 aa, Zea mays
  Coding DNA Sequence Number=SeqID_10068
  Subcellular localization annotation: CTP_CleavageSite=42; ConfidenceScore=5.16e-01
MVAPSPPTARRVAGQTRMLLFRHGGKTPSSSPPPGELTTVVVAVALRGKEYHVVAVVEGHELETPEAEQRPRLKRLLKTTHLELNREEKCLSPVYMPTWLSEKCLSPVYAITWPSEKCLSPVEAQLAGAENHRRHGRMRGTIITGQQGEPDGTPVLFPRSLS

SEQ ID NO: 53444 - protein, 106 aa, Zea mays
  Coding DNA Sequence Number=SeqID_10069
MVREGRTRISTMNKDTRDTRFIPRFGHTTKVPYFLVEAPTKSRVSFNPNPPFADHKGQTAKTGPDTGSTAWGSDWQSVCQSGGQTGQVTLTPVEPPLGPVQPGFDQ

SEQ ID NO: 53445 - protein, 192 aa, Zea mays
  Coding DNA Sequence Number=SeqID_10070
MTDRRGQGVSEPGRADQPGLGAETRGRGEVAHLEGKRWRHGATAEAQGCDGATVAELRLRKNHSGERRPDRPKRGKAHRRVSRVADGKVKLTVALNGARAQRRPRNRRWTSADGGGGSRFAWADQESWAQGANGRGEVGEQGAGFKRGAGARSWPENARSWARPRRGDHGREVRDAQTGGVGGAERGSGCAR

SEQ ID NO: 53446 - protein, 39 aa, Zea mays
  Coding DNA Sequence Number=SeqID_10071
MDRPLELLHMDLFGSIAYISIGGRKITNPRDIKRKTNSS

SEQ ID NO: 53447 - protein, 203 aa, Zea mays
  Coding DNA Sequence Number=SeqID_10072
MAGGTTARGNGGKGSKGKGAKRKCPLTPLSKSFDDSEYPEEYSGFNSESALPRSPTSSMIDSDDSLGLTPVEWSFIRVVEHSGLSCMDESDESEEEDFEVEEGEQEDEDCDADGSIDVSDEGTKGGKGKGSKGEGGGNDEDDNGAGGSNGIGFSGSDSGRGDNSMGGCAGGEAPPAYIVYTRGQAVSLAARSRRFESSFNLAR

SEQ ID NO: 53448 - protein, 136 aa, Zea mays
  Coding DNA Sequence Number=SeqID_10073
  Homolog annotation: Hit_ID=A2WLM0; Match level="QueryCoverage=38%, HitCoverage=14%, E-value=5e-20, Identity=82%"; Hit description =Putative uncharacterized protein
MYGDEDKPALITYPDVALNYMSCFQGFFFYPEVASLPLQNFCVYHINPQGHEETLRTEKAPAALGPNSEAIKANNLVFVSRVLGLNPETRKFIYDVSTLLHSNDLLAYKDVTTKVVYDMIRIFENIINHAACFIIH

SEQ ID NO: 53449 - protein, 26 aa, Zea mays
  Coding DNA Sequence Number=SeqID_10074
MWHGGSWLGAKDVHQREIEWLGWKVK

SEQ ID NO: 53450 - protein, 938 aa, Zea mays
  Coding DNA Sequence Number=SeqID_10075
  Homolog annotation: Hit_ID=Q10NJ8; Match level="QueryCoverage=91%, HitCoverage=99%, E-value=0.0, Identity=57%"; Hit description =Expressed protein
MAHIAWAEVLNYGRLRGPLAVAYSFLYFGSDSSFWEVRFPQCLFESQHTELNQVIIVFWSYTKIYLKLLLHMFTHHKYSNKGQMNSERNVKIISGRDGQKKGNSQYGQIVHMPKDMVTTVNGNVDAKFEDEVRVVKNDRFQRQRESWGGECKKGSKPWPGRKAATVDELVKHMSNVPSYLQRKETSDHLQDKALNVGVLEWGLLANWSQQEKHKLTRSYGPSPPNTSRSVLFPSPSHSSPSPSSRSLESNQSTPMSGHHHSSIRAQQNRLTDKHHERARCPPSPNSAVLSLLSGHGTHPCPENGHNYVGLGLSNVSLASDSLGSSSRSCGRHEMVGDEETRRKTEDVVHHCSRRLFADSDNIGKHFFASNTNDSMCNDPEQSIGLNGENFESLTSDAVMDTARNDSKSSDYLLEDIEPSLEFPRIPYSCPLPIIDSAAKEIGITSTEAGDAKVSKNSNRNQSAMNVTENPPQYSAKFSDKMPYCHLGSGMNRGSCSSSLKESPHIRQPNIVPPVDKTGDRSSPNSKGRRSPLRRMLDPILKPRHSSPVRPSFVPKCQLPVNTTKQSLDLGKSVPHNVQRSARYIQKGNDSATTRQALLQLAWKNGLPLFILSYGDSDILAATVRRKGIPEKDGLESTYAVFTVEEPKKKSGAWIKTGGKNKKHHLLSSIVGEIKVARRKSRCHHTTDVHVHREFVLVGSKFLPSSEESGDSNVSGELAAFISTLPQQEAETSKQSSSQNTRQRNSMPIGCGCPPLGNFHPSTRSANSASANVVAVLPDGFHGTITSGQPLPLIERWRSGGACDCGGWDEGCMLSVLTDASEENDAIQANQAKDGSQRFELLDQGRSREERHAFSMTSFKEGLYTVEFRSSIALLQAFAMCIVMLHGRYPRRTQVGSQAEQEHDLLAGHELKAMAASQGRRPPTSYVPHRPPLSPVGRA

SEQ ID NO: 53451 - protein, 172 aa, Zea mays
  Coding DNA Sequence Number=SeqID_10076
MGRGKRGKGWPHRANGKRKRPPSPPSEDFGDSECSKKASSEYDRSPAPAPPMASFEDSDDSMGLSTVARVYWRSIERTGLSGSDDLEDTSSEEVEDSSDSEEWSSGEGDGGEDDGSSGDDDNKGDGDDDDRGVSKGDSDGGGKGDGKGDDGDNKGDGVGKGDGEVGGIMLLV

SEQ ID NO: 53452 - protein, 346 aa, Zea mays
  Coding DNA Sequence Number=SeqID_10077
  Subcellular localization annotation: CTP_CleavageSite=29; ConfidenceScore=5.62e-01
MSSSSLMRRVFPSSKPPDGAIVRLQGFSSCSPVASPRWWSPKTVTASSWVGRSKPGCDLGPTLSFKDVHHPRWGGGQDEPALYLPRRFAGHPFPQCSRERALTGPAGGADLANVGLIDGGRRHLQRVGVVGLAPGGPPCRRAAAAPCAREDHPRCRALLGWHSCSGVALLLHQDGALAQRPVPHSSGRIRVGICRGAGGPRHQRRGGGGSRSLRCRRDHRHHPRPGPPALRTCPRPSSVGVGEGKIAAAPTLRPALLRLGHPERESSSSYAKSRLLIIRNASPSMSCPVSRGNRRSRLLGPDSRRSPRTASPSEAGSDLAEGVVDAEGATAPFQREDPSLQDQMVL

SEQ ID NO: 53453 - protein, 46 aa, Zea mays
  Coding DNA Sequence Number=SeqID_10078
MAMMGSTSEKMYLCEVKKRQTFAAFVQRWYQKKRIKTKAAGGKALR

SEQ ID NO: 53454 - protein, 472 aa, Zea mays
  Coding DNA Sequence Number=SeqID_10079
  Gene Ontology: Mol. function=metal ion binding
  Homolog annotation: Hit_ID=A3AR83; Match level="QueryCoverage=92%, HitCoverage=37%, E-value=2e-98, Identity=47%"; Hit description =Putative uncharacterized protein
MNVCEITLAVLTSPQVTMYKQQPEEDHIVCSRPDITSSGPIKVQDIQGLPKQPNQASNLQVVAGVPDLLIGQPKPQTIKTEPSSQENKAAHCVDLVSDDHESNKQGLGDAAVLSIVQKDSSNLKYGSVSHEHLKSEAQNPRHTVAENPNSTLGSAKVCTSFSGSVSTPPELSHSLASKEPSSGNSDCSKKEELLSPTVSKHDPVKFSEDSSQEVTRYSEKVQLKDSQPSAPKSSQASRIHLSTVKHRLPVSKEQSQKIALTGGTSARSFHGEVPSLQSRNKAAACSSSQKKDKIYQRIINVTQDSSNNSAPTELRASDSAAPLSDEQVIKKRNREDSLKDSEDTKRTEKRHRVSSTEHAPVKNSCRSAENIASEQKIRGICPTGANAGLSKDDLMDTIVSHNLPGLIDEIVSKDRNITYVELCDAIHQHFRDSRKSNGGDSLYRSYADAIKGCLRKRREWAHLFDQASKGEE

SEQ ID NO: 53455 - protein, 106 aa, Zea mays
  Coding DNA Sequence Number=SeqID_10080
MEREEEIEVTEEKTPPPLESQAETWLYFDICGSEPDSPTNKGNPRRADRGPFNWSHASSWHTLESLFLSRVRKRQIFVAFAPRWYQMKKNKTEVREDLVLHIGSFA

SEQ ID NO: 53456 - protein, 136 aa, Zea mays
  Coding DNA Sequence Number=SeqID_10081
  Gene Ontology: Mol. function=protein binding; Cellular component =chromosome; Biological process=nucleosome assembly
  Homolog annotation: Hit_ID=A5AKG7; Match level="QueryCoverage=72%, HitCoverage=72%, E-value=7e-41, Identity=85%"; Hit description =Histone H2A
  Pfam annotation: Domain name=Histone; Domain location=33-105; Score =53.6; E_value=6.7e-13; Accession=PF00125.15; Description=Core histone H2AH2BH3H4
MPSIGLGVCGSLCQDGYEDDDFGYDYGTGKWYSFHLERFPVGRIHSQLKQRTQANGHVGATIAVYSAAILLYLTAKVLELAGNASKDLKVKRITPRHLQLAIRGDKELDTLMKGTIAGGGVIPHIHKSLINKSSKE

SEQ ID NO: 53457 - protein, 188 aa, Zea mays
  Coding DNA Sequence Number=SeqID_10082
MQNRPHKTACRHSEPPFVKGDKAHNIPRWWGRGSSARRGHPLRLRVTGERAKQTLSNKGLQDRRHLWQAKQATLHLRHNDRVKKGVGKGDTPKGILLREGSGPQAPLLIRGSKAGPSEGFNSHLIALRLHAHNWSEVRRPAPRKGSTAASGHSGSAPTTDQGFEGWPPKGSTAASDAERGMTLGTFDT

SEQ ID NO: 53458 - protein, 127 aa, Zea mays
  Coding DNA Sequence Number=SeqID_10083
  Homolog annotation: Hit_ID=A5C0D0; Match level="QueryCoverage=97%, HitCoverage=49%, E-value=1e-09, Identity=27%"; Hit description =Putative uncharacterized protein
MDTHRPPHFDGTNFPYYSARMACYLEVVDLGVWRVTRDGMKPPKNPEKPTTNDELVRDMYSRLNLIINELNSIGINKLGDADIVRKIISLLPQQRYGSIITILHNVEDLSTMTSTIVIGKIAAFEMS

SEQ ID NO: 53459 - protein, 246 aa, Zea mays
  Coding DNA Sequence Number=SeqID_10084
  Gene Ontology: Mol. function=binding
  Homolog annotation: Hit_ID=A3C4M6; Match level="QueryCoverage=82%, HitCoverage=35%, E-value=4e-79, Identity=70%"; Hit description =Putative uncharacterized protein
  Pfam annotation: Domain name=Nodulin-like; Domain location=40-242; Score=286.9; E_value=4.1e-83; Accession=PF06813.4; Description =Nodulin-like
  Subcellular localization annotation: CTP_CleavageSite=46; ConfidenceScore=5.18e-01
MPPPPLPYLLLLWTHGQAPSDQTRAALNSKQASNSTRCGWWLGLVTAAWVQCVSGNNYTFSNYSHALKTLMGLTQLQLNDLSVAKDIGKAFGLLAGLASDRVPIWLLLAVGSLEGLLGYGAQWMVVSGAVAPLPYWQICVFLCLGGNSTTWMNTAVLVTCIRNFRWSRGPISGLLKGYVGLSTAIFTDTCSVLFANDPASFLVMLAVVPAAVCALAMVFLREGTAAADEEDDGRCFAHTAPSRRDR

SEQ ID NO: 53460 - protein, 69 aa, Zea mays
  Coding DNA Sequence Number=SeqID_10085
METPRALHEVPARRRLAMHRTDDPVRPYPRSMRSLSGGDEDDDFGYDYGTGEDEVVEEDFQEFQDYDEF

SEQ ID NO: 53461 - protein, 556 aa, Zea mays
  Coding DNA Sequence Number=SeqID_10086
  Gene Ontology: Mol. function=helicase activity; Cellular component =nucleus; Biological process=viral genome replication
  Homolog annotation: Hit_ID=Q1EPC6; Match level="QueryCoverage=100%, HitCoverage=44%, E-value=1e-137, Identity=62%"; Hit description=DNA helicase homolog, putative
  Pfam annotation: Domain name=DUF889; Domain location=353-458; Score= -57.1; E_value=1.3e-07; Accession=PF05970.5; Description=Eukaryotic protein of unknown function (DUF889)
MHMVSFHERAKVNHVVQRPGADRSMLTAYFEANSLHEETRGILYCDFPEWYTLQQGKVWQRRKQNTDLRTIYGNTLPSFHEATERRGLLEADGIIDECLNEAGLYQMPSVVRRLFATILVYCEPNNVAELWQRHLDAMSEDYHRNTQSKTHVQQMVLIDIRNIMQSMGKDKRTFPLPAIIDRYDDSHGTDREIYGEESFEPTGEDVAMKETLNEEQRSTYDKILSVVDTNNGGVFFVDGPGGTRKTYMYKALLAALHSQDKIAVAIATSGVVASILPGGRTAHSRFKIPLTIDDGAVCSFMKQSGTTKLLQKASLIIGDEASMTKRQAIEALENNMRDIMGQTRLPFGGKTVVFGGDFRQVLPIVRKGSRAQIVAASLWSSYLWESMCHLKLVHNREHRVTHGLQNICYTSVVQLRKRTTLVIFVFQVSIDAEIILGQHAGMRIFLPRIPLCPSDDDMFPFQFKRKQFLARLSFAMTVNKAQGQTIPNVGVYLLEPVFSHGQLYVVLSRATSRSKVKILVIPVTNDKKKKKGVENNSTINDATYTKNIVYKEVLTP

SEQ ID NO: 53462 - protein, 217 aa, Zea mays
  Coding DNA Sequence Number=SeqID_10087
  Gene Ontology: Mol. function=helicase activity
  Homolog annotation: Hit_ID=Q1EPC6; Match level="QueryCoverage=83%, HitCoverage=11%, E-value=2e-58, Identity=59%"; Hit description=DNA helicase homolog, putative
MDREMESDGDNEIDHLTTFEIDNNDGESGEDIEIDETQDAFTINPDVPNLYNKVYSNIPEETHLLSTVADCDYCKAKKFQYEPPRFCCCNGQINLAAFETLPQLKRLWESADADARHFRDNIRFFNSHFSFTSLYCFFDIMTTNMDCGIYTFRAHGMMYHNVTSFGREAGAEHKHLELYFYDDDPSLEHRYHKCRQQQLEKDKTIIKQLVEILKGNP

SEQ ID NO: 53463 - protein, 67 aa, Zea mays
  Coding DNA Sequence Number=SeqID_10088
MDPRQNNDVRSALKELSNNTVKDAQAPTGSLFSSEHMAILELTPTPFVPTPSVTEDVETNKLTKSPR

SEQ ID NO: 53464 - protein, 199 aa, Zea mays
  Coding DNA Sequence Number=SeqID_10089
  Homolog annotation: Hit_ID=A2XP94; Match level="QueryCoverage=29%, HitCoverage=7%, E-value=1e-07, Identity=44%"; Hit description =Putative uncharacterized protein
MKCLWKTMYNPVVQPEPSIRGTNKDKGTILKTLTVLDTQLPVKQAFKIMHDEGLALVPLWDDRQGTITGMLTVSDFVLILRKGILCIGVLKRSRQQKAISREQAAKDLQELEKWREELEALLLAEWSELRGEELLAYWWREDHWLKAMFLHMRSVIKVEEELVGVPVKGGLYEIRDISALVRLRPTWEDLRSYLRPQTF

SEQ ID NO: 53465 - protein, 1110 aa, Zea mays
  Coding DNA Sequence Number=SeqID_10090
  Homolog annotation: Hit_ID=Q5TKG2; Match level="QueryCoverage=85%, HitCoverage=82%, E-value=0.0, Identity=53%"; Hit description =Putative uncharacterized protein OSJNBa0030I14.4
MYVHAVGRRGSVALRWDGGGELCGAQGRQPQLHGVREHDVSFELVVQPQPHPHLRHLRLGYTVPPTASVSAGPAFTSASSTVSALVSFSEPCPGRGGFVCNATYCNLIVYGSGSVDPSTLQVLSPGLRYSVAVAISPDAEYGRLVLVMGRGFCTDAAGHPFTRTPNSTFTLRFDRRSDSMNITATVAEKMVQIQGVTRLVQASNEEEGLRIYLAFAQPVLNSSEQILRALTATDAVAVHLTPTNRSTLGNRRFGYVKMSDAAAIVSVACDTSSIISRQGTPVVPAEPFTFLYDTQRPWVKLGTSTRRTSSRDILVLIKFAKPVFNFSSSAVQVAENAAMDVAGNPNLASDRLQVRHYSVPASSSWIAAITTVVFLTTAAVAALLTVSTSSLVAAGAVSRPSSYMISEPSRNVLRMACHIQIFALSRWLSANLPIEYYEFAKGVEWSIPYMRLPWEGPAADPYLGYSTMPAIAYSESELLDRSAVGGAANISSYRPRAQQGQPVTPAQIIPSDPVFPTEIPEDGKPTPPVQTPGGDATPPVMPVQTPLPLDGMPLTAMEYRSFFENPDMKPEAQIIMKLQDLDGWKYFGRNMFWLGVIGGGLILLHLLTLLYFKLRYRDRERRRHGYAALLLPRLEIMVVVLAMPCVAQAAAALIRGGTTCGLVVGIVLTAVLTSVLVALLLFLSLGITMGKLLQYREVHHEEGQEEYHWYQDLARRTLGAGKRGQWTWKDPRRAACLPRLGPLFEDLRGPPKYTRGGGGGKRRAEGGGPERRVIASEDENEGSRAPLVQQLLGVLRIYLTLLESVKRVAVGIVAGAHASSGRSSRAHAVAVLSVASFQLLFMLLGKPFVKKRVQLVETLSVASEVAVFAACLALIDRTASSGGWLPDGEARGVGLAMLGAFVLGFAAQVCNEWNALYRQARLLSADRSSFLDGAKTAGLGLLVLVLPSSALGDHRDPPPPDGGGGAGESVSASTAADGGRGGSSNNERWWLGQLWEMAKASFSKESNASSRASALRRRLDAALSSAPPPCCERVSFALPLHSCAERLQISNRASATTPTSAGVATDTPTPSSSAAAAGTPTPIDGGTDNVVVAGEDGNVTVGSKRKLKSD

SEQ ID NO: 53466 - protein, 43 aa, Zea mays
  Coding DNA Sequence Number=SeqID_10091
MGVGLVRFNGSASITEMEGGVTRRIDNSDQFVILATVRVAEST

SEQ ID NO: 53467 - protein, 532 aa, Zea mays
  Coding DNA Sequence Number=SeqID_10092
  Gene Ontology: Mol. function=hydrolase activity, hydrolyzing O -glycosyl compounds; Cellular component=cellulose and pectin -containing cell wall; Biological process=carbohydrate metabolic process
  Homolog annotation: Hit_ID=Q9FXT4; Match level="QueryCoverage=51%, HitCoverage=64%, E-value=1e-146, Identity=88%"; Hit description =Alpha-galactosidase precursor
  Pfam annotation: Domain name=Melibiase; Domain location=34-364; Score= -31.0; E_value=4.7e-14; Accession=PF02065.9; Description=Melibiase
  Subcellular localization annotation: CTP_CleavageSite=25; ConfidenceScore=5.28e-01
MARAPSSWTPSLAMVLLVVAAAAVVASSEAARVPAAVGNWTGEELRGAAARRGGRRSRRRAFENGLGRTPQMGWNSWNHFGCGINENLIKQTADALVNTGLAKLGYEYVNIGAHHDCWAESDRDYQGSFVANRQTFPSGIKALADYVHAKGLKLGIYSDAGTRTCSQKMPGSLDHEEQDVKTFSSWGIDYLKYDNCNDAGRSVMERYTKMSNAMKTYGKGIFFSLCEWGRQNPATWAGGMGNSWRTTDDIADNWGSMTSRADQNDRWASYAGPGGWNDPDMLEVGNGGMSEAEYRSHFSIWALAKAPLLIGCDVRAMSQQTMGILSNSEVIAVNQGKRQASPFRVPITTTSFTAFRCSSLLRPEPDFRSKAESGVVVRSSVGLGWAAQQQQEGRGSLEPAGIPGNHHRTVVEHRARFFHCCHCSRSMGALVVLGSRPAISFGATSRLQDVCLDAELAQKTRADCSMARGMQPFGQDSGKKSMQCRQGFQEKEIRYHLVIQDMSANGGIIYTNTMEVYLRRRQNAGACVTGCL

SEQ ID NO: 53468 - protein, 184 aa, Zea mays
  Coding DNA Sequence Number=SeqID_10093
MSIVPAHKNSCPHGATALYRVQAAALRELVVHSGARDHVGLLLEVELTVAKLLLVIDERRQRECLLLMVFVQGFNPATSSSAPSCSMTPETRSSRSLRPCDISSGALYGTGGEELAVCQTYAMSLDAFMILIANSSERLAAGDEDIEKKKVKILVVAIGVGGCSGALPLTQLYLSNTSWLAPFG

SEQ ID NO: 53469 - protein, 74 aa, Zea mays
  Coding DNA Sequence Number=SeqID_10094
MGVGLVRFNGSASITEMEGCSNEIAEDPGLTCGGLPTAPRTVAGEFRGDARRSEVTKVIGFATTCLPPWRAHRP

SEQ ID NO: 53470 - protein, 172 aa, Zea mays
  Coding DNA Sequence Number=SeqID_10095
MPPRTRLTARKSTGPIGVPRHQLAPRHESSSSGSNDPIGDLEARVSRLQAALQQRTDAWVADGDRINELRRDIRHLQDQLADRDLALDWAVQSSFANVYCNTLHEEVHVLYSQLHPSEPAPPAEAEAGPSHIAGRALGGELDLFEPPPSLRLVDVWTPTPDDEAAKTDGKQE

SEQ ID NO: 53471 - protein, 193 aa, Zea mays
  Coding DNA Sequence Number=SeqID_10096
  Homolog annotation: Hit_ID=Q53RL8; Match level="QueryCoverage=38%, HitCoverage=7%, E-value=2e-08, Identity=40%"; Hit description =Reverse transcriptase (RNA-dependent DNA polymerase), putative
MDVKNAFLNGPIKEEVYVEQPPGFEDNVYDGGVEVLLRILSDATPRGHLPKPNEVYSRYSKQVWDEGCQTHQDTHGNQRASRPRHERCQRFIYNYTKSTVRNTVDYSGQEKLFGKIGQARTVRALAADRPQHQDDPRTEPMQKSKSTLRTVRRKSKDCPRPRADRPASGADRPVRTVRTRRADRPRSAEWSNG

SEQ ID NO: 53472 - protein, 263 aa, Zea mays
  Coding DNA Sequence Number=SeqID_10097
  Gene Ontology: Mol. function=carboxyl- or carbamoyltransferase activity; Cellular component=ornithine carbamoyltransferase complex; Biological process=amino acid metabolic process
  Homolog annotation: Hit_ID=Q8SA97; Match level="QueryCoverage=47%, HitCoverage=21%, E-value=2e-12, Identity=39%"; Hit description =Ornithine carbamoyltransferase
MAPPVDVAGLRPRLGDVEAPPRPRSSLSSMVEVESEPLVQARRRPSAEARAESEPWGRAERSSSSSGAEPKSEPWVGRSGPESEPWVGRSGVRRLLGLSPSPSPGSGGAEFTVFRDLVRVRALGRAERSFLWCLRPGLTACQPHSVKWHRSRSGAGGTVLLSGRSVERRSDGGHFGSAGWGARVRIKVSGHLCIKCSCDLVGRCGDLVRVASWRRQGLGRAGNIFAAGGGPRARRKSSRLYADGGYQLRIRSLEGTPNYGPRQ

SEQ ID NO: 53473 - protein, 220 aa, Zea mays
  Coding DNA Sequence Number=SeqID_10098
MTASKKQGPGKGDTPKRILPHEGTRLRAFLLIRGSKAGPSEGFDSRLRSRGPYTHYWSEVRRPAPRKGSTAASGYSGSAPTTNQGFEGWPPKGSQPPQTQKSHQREASSPRTPSPGDRVRQITRSSPETPCSAPIEGNMALSPLLAERRRRGVCKKVESVPDRPLALCRGSGAALANLAPAEPLTASTYQPENLGPDRTPGLRPARMRERSDQPKHYARH

SEQ ID NO: 53474 - protein, 212 aa, Zea mays
  Coding DNA Sequence Number=SeqID_10099
MAPPVDVAGLRPRLGDVEAPPRPRSSLSSVVEVESEPLPESEPWVGQSGVRRLLGLSPSPSPGSGGAEFVVFPGLSPESEPWVGRSGVRRLLGLSPSPSPGSGGAEFVVFRDLARVRALGQAERSSSSSGAEPKSEPWVGRSGVRRLLGLSPSPSPGSGGAELPMVPSAGPDCLSASLCQVAPQSERRRRHCPSVRPLYADGGYQLRIRSLE

SEQ ID NO: 53475 - protein, 97 aa, Zea mays
  Coding DNA Sequence Number=SeqID_10100
MPKLTNQAKSDRARKFKLEKIAQAFEMAHQMLALRVPIYTPTALQLGGPYMSLTFAILAKGRKDNLDPKMWLKKLRLSTMMMVKGETDLKEKRLLSP

SEQ ID NO: 53476 - protein, 499 aa, Zea mays
  Coding DNA Sequence Number=SeqID_10101
  Subcellular localization annotation: CTP_CleavageSite=32; ConfidenceScore=5.39e-01
MPTSSSSAAATPPADASPPANASSKETLSSLMAEELRAGDSVDFGVSRMSSVRVQYMQWLGYFGGGVARVPGMEEVPEPEGELVVFEAFFAAGLRLPAHQFVGEVHELGARTGDFEVPDREPGLRCLEWVQEELQALPTVVEGFMSYASLVTCEGAMNALSREGCRHFEVFDQADEDFERDIYKVEDPIVKDSAGAIYDRMWGPHGREVVRERAETARAQAARGERVDDFGALNSALPDPEPIPAEAVSGAALEPPPETTEGAPDVPAAAAAVGDLLPETAEGAPDAPAAAAPSAEDPATVVAEATAEATAEAPATAGSSQVQDFGPAHATATTKFLAASTVDGGNKCDGSASEFSDFADSGSSVEWTEESSEEDLDYFAALDVAAAEASPHAADAEDVPGPSTGRRQRRAVAKRRVSEAEGGRWGSFLRLSRCRVWCPRLYMWKGLYDEVVYPRTLGYACEGVMYLVCPAAPLGGFCTDSLRGRLRFFALVVLVRLHP

SEQ ID NO: 53477 - protein, 162 aa, Zea mays
  Coding DNA Sequence Number=SeqID_10102
MEDEEEAGFSTAALQRKPKVVVEDEEEAGLEDEEEATVTLSMERDALECDICCLPFQSEVFMASQITMHVYIQYILIGRLQHDALLCVKSVQERAFWMCKVLHPHRRSYDLIGTWSDHPRKQCDHEGGTELSGTIIRGTLKAPNSQLVTPISIKLQRPDGCD

SEQ ID NO: 53478 - protein, 325 aa, Zea mays
  Coding DNA Sequence Number=SeqID_10103
  Gene Ontology: Mol. function=phospholipase A1 activity; Biological process=lipid metabolic process
  Homolog annotation: Hit_ID=UPI00015558E9; Match level="QueryCoverage =67%, HitCoverage=7%, E-value=4e-07, Identity=29%"; Hit description =PREDICTED: similar to splicing coactivator subunit SRm300, partial
RSTSRADSAKEAMAGSTALGRETSAAQDSVSRDTTRWMSAAQGSELRRGRVRGQERERGETEALRGAVDFIVPREGGSAPRRGTERLATIDTTSVTVGRGCVAAVEDGQRFTEVVAHSADGRTEGCEGSAGVRQRRHASVQAHAAAKTRPKSGLGRHRKLRLARSQGSDSALAPEDDKLRLARPQGSDSASAPEDDELRLARPQGSDSASAPEDDELRLARPQGSDLASAPEDDEHRLAQPQGSDSASAPEDDELRLARPQGSDSASAPEDDELSLARPQGSDSASAPETTNTASPEPRARTRPRSRKTDSTSTSTSEEPPPRPT

SEQ ID NO: 53479 - protein, 100 aa, Zea mays
  Coding DNA Sequence Number=SeqID_10104
  Subcellular localization annotation: CTP_CleavageSite=65; ConfidenceScore=5.10e-01
MNCVTLNLTFSSTVATIALLVTTTPAIHVDAAGPDVLLVVAPVVRLVATAPAVRLVATAPVVRLVATAPVVCLGSSATTIRIGATAPAVFLDGLFLTALS

SEQ ID NO: 53480 - protein, 254 aa, Zea mays
  Coding DNA Sequence Number=SeqID_10105
  Gene Ontology: Mol. function=protein serine/threonine kinase activity; Cellular component=cytoplasm; Biological process=protein amino acid phosphorylation
  Homolog annotation: Hit_ID=Q9XGL2; Match level="QueryCoverage=43%, HitCoverage=30%, E-value=5e-22, Identity=43%"; Hit description=CsPK3
  Pfam annotation: Domain name=potato_inhibit; Domain location=8-70; Score=86.5; E_value=8.4e-23; Accession=PF00280.9; Description=Potato inhibitor I family
MSHSHSTKTSWPEVEGMPAEVAKRKIQEDRPDIQVILVPVDSAVTDDFNTKRVRVFFDKAGNVAQKSWCADSPSRRRLPTSACLTPPRISTPAATALHARRESRRANRPPARPPASRSARPQRPPPSRRRRIALLPSCFSGPSNGGGEEEQEIDGKERFEFMVEPMAASSKDCVGTYEYLASELVSGSGYDNGVDRWAFDVFLYELVYGRTPFKSHTKVATLKNILSNATEIKRHPFFAGVDWTLIHYNTCDLL

SEQ ID NO: 53481 - protein, 196 aa, Zea mays
  Coding DNA Sequence Number=SeqID_10106
  Subcellular localization annotation: CTP_CleavageSite=25; ConfidenceScore=5.20e-01
MPSSSSLSFAASASPAKPSSEKTISDSAAVDLHPSHMVEFGTSMIYSGRMLEMQRLGYFGKGVRRAPGAKDVPEPEGELVVFEAFFDAGLLLLAHRFVVEVPRWFEVQDEQALRYAARLSNGREGTRLIDYHISRFQTTPTLNAQYKLLELTNSWSAKLKQTENGKQFNASKRKERFTRLADITEHRRYRNAEAIT

SEQ ID NO: 53482 - protein, 370 aa, Zea mays
  Coding DNA Sequence Number=SeqID_10107
MKAQAHTSCNRRAGYYVRKTAPPLAPVPRLLDCGTGAATRGNPAHGPTVPNRAHRSRGRRHLWQAKRATLHLRHDDRVKKGTGKGDTPKGILLREGSGPRALLLIRGSKAGPSEGFDSRLRAVGLRAHYWSEVRRLALGRVRQPPQATRAPRPLLIRGSKAGPPKGSTAASEHAERGMTLAEFVIRPYLARWCNLFALRLIGHLTDVPWLVFTSLLLVRFCTSPAIFGFPLILLISHFCLEPTPPSEDFGDSEYSEEEFSSESEGSPAPVSPPASSDDSDDSQGIAAEVWTYIRAVERSGLEGLDESEYSSDEEDSPEEDGDGDDDDDGGDGGDDGGGRGGNGDGKGGNGGSSRGSNGGGNSKGSNKASG

SEQ ID NO: 53483 - protein, 207 aa, Zea mays
  Coding DNA Sequence Number=SeqID_10108
  Subcellular localization annotation: CTP_CleavageSite=85; ConfidenceScore=5.69e-01
MTSGQTLLRQSPRPRPHSRGEDKLSNPKSRRPGAQMAPTISSMTRPSPATATSAPTTAATCSPADPHSGPPGRASTDLRAEASCRGEGRTAQEHKCRPSSARRLGRSPGARGSQQPPVRRADSHTPSSGGRWHRKLCQSQLSQRTRHAGANDACGQSAPRCRSPPPPLGRRVPSPLNAEGGGGLPARTGGRAPAQLALRPSKDDEDP

SEQ ID NO: 53484 - protein, 419 aa, Zea mays
  Coding DNA Sequence Number=SeqID_10109
  Gene Ontology: Mol. function=4 iron, 4 sulfur cluster binding; Biological process=electron transport
  Homolog annotation: Hit_ID=Q75M00; Match level="QueryCoverage=89%, HitCoverage=93%, E-value=1e-171, Identity=78%"; Hit description =Putative uncharacterized protein P0676G05.13
  Pfam annotation: Domain name=Fer4; Domain location=118-143; Score =6.1; E_value=0.041; Accession=PF00037.18; Description=4Fe-4S binding domain
  Pfam annotation: Domain name=Fer4; Domain location=165-188; Score =19.2; E_value=0.00036; Accession=PF00037.18; Description=4Fe-4S binding domain
  Pfam module annotation: Pfam domain module=Fer4::Fer4; Domain location=118-143::165-188
MVVPVPPPPLLASHVAVRAAASAISHGRRVLLNGDHPPQVAALGRGDWVKLICGASFEDAADVRNLSLVYTLAGADASVVGAVNEGIEVAASIVPTVQRPWLMISVNDDCRDLHFRKAEFDPDDCPLDCSKPCEKVCPADAISLKHSMVDGERTLSDPLRGKYEGGVITERCYGCGRCLPVCPYDRIRAVSYVRDPTMTAELLKRDDVDAIEIHTTGKGTDMFNTLWDNLSGSINNVKLVAVSLPDIGESTVDLMNTIYTIMEPHFKGYNLWQLDGRPMSGDIGRGATRETVSFAAHVASMSERPPGFYQLAGGTNSYTVDYLKKAGLFQSSNWNSGTATSEMASSHQALIGGIAYGGYARKIVGRVLRKIPEQFGRVHIEDHPDHLLEALQEAMSLVGPVKGYIPSHSKPFMKQVDRQ

SEQ ID NO: 53485 - protein, 121 aa, Zea mays
  Coding DNA Sequence Number=SeqID_10110
  Subcellular localization annotation: CTP_CleavageSite=46; ConfidenceScore=5.37e-01
MALGQTLLLKGPHSCPLTGDENQPLKPKSRRSGAQVALTVSSVKATASARGSLTYGDHPLSTDYSGHLPTNTAPTSGARPKAHRQVLTLVLAEAVPEHEYRPRGVRRVVRPPGAADGARRT

SEQ ID NO: 53486 - protein, 146 aa, Zea mays
  Coding DNA Sequence Number=SeqID_10111
MESSAKTRLPLNSIGAKGSTQTNKKNKLELKRKEQKETEVLPGLAHRTMSGALGRIAFELVTFGFLRRSSAIIHRTVRCDTGLSGAPAEQRLSVSNGRLCKGEQLNSDVRAEVRGAPDCPVWHRTVLCRMRTKPPTVDQLQALTEG

SEQ ID NO: 53487 - protein, 332 aa, Zea mays
  Coding DNA Sequence Number=SeqID_10112
MMVERYQLPRSCVPPTTRREDCGCPPSGGSESGKTRCIREREDMVAFQGGHPLFKGDSPYLRPQPSWAECSPTRSKVLSLRRGGWVPHVMQTGPEQKKPNHRVRCMQPPSGYEHSSTFAQTSGRKGGQPCRRHATAPSGRAPPASNAPSMGAHAHASCNWRTGRYVQATAPPLAPLPRLLDCGTSTATRGNPAYDPAVPARGDGQCGQKWAGSNGSGKRAGAAVMSSAKLTSHPGGGPGKGDTPKRILLHEGSRLRASLLIRGSKAGPSEGFNSRLRARGLHTHYWSEVRRPAPRKGSTAASGHSGFAPTTDQGFVGWPSKGSQPPQTQSEG

SEQ ID NO: 53488 - protein, 47 aa, Zea mays
  Coding DNA Sequence Number=SeqID_10113
MFGLQVIMRLMVLGFDSGNGCPHCNHCSGEDEAVEGDFQEFQDYDEF

SEQ ID NO: 53489 - protein, 205 aa, Zea mays
  Coding DNA Sequence Number=SeqID_10114
MVTQDGDHQFDGGEKQAGLRPLPRPQLQGPSSSLLGLRAAAVVGAKVVAAGEVLIADEIAAAIRAPCLGSLALIACPRPSSGDVGEGLIAAASALRSSLLLFGRPERRSLSLLPKVTSEVSISRRRRSPSARSALPPEASLAQFKETLGRSAMSWSRRQRCQHGQRRSWLEKKLRRLEPGWAIHWRDQRRSRVAEAMSRADVLGG

SEQ ID NO: 53490 - protein, 54 aa, Zea mays
  Coding DNA Sequence Number=SeqID_10115
MATVGALQRGSGAVVVCMELVPGFKGKLPGIFLGKGSSQSEEKLHYPMHAEDWA

SEQ ID NO: 53491 - protein, 72 aa, Zea mays
  Coding DNA Sequence Number=SeqID_10116
MKDAKSIKTPMETNGHLDLDTGASSKRLILWYLFLTCGVCETARVSSHTFIAQQVVGNNVHELAKGGSSREV

SEQ ID NO: 53492 - protein, 58 aa, Zea mays
  Coding DNA Sequence Number=SeqID_10117
MTKVPNCKMVDKVQIKDKGKIQLRMPWLEQPKYAQSGSTGLSGGAPDSVRCARLAWAK

SEQ ID NO: 53493 - protein, 432 aa, Zea mays
  Coding DNA Sequence Number=SeqID_10118
MRVEWDAEELRCSLLRQRAVNGAWSSGNLCKGYIVKPYLFTLVVFKGLIGLRQEGITACGDVWITSGDEDDGHDYAYGNEATPPPARGAGASVTGVGAAGLFFLASAGGRVCEELLSCAPAGGVPCTTLGVPTTGVAVGGDPDDGGDNSSSSHNTDLSEEQELEGWVARPITRDAARGRVVYPDRWEATCLVRRPKNSLRGVDVCSEHYSISERDSAEAAMQDVAWRALSHYSVLGGVADGLNLRYYPHRPSGSTGGVVVSPVGEDNPRLSSIVNLAVVLNTELDHALDELSRARAEIAHLRAKRAERRHLEDGSPAPVGTQHPYRSPQHGPCLCIVEEFYTLFLCCKFARSVLICDCILQMSDNRRRGGRRAQQEQAAPQDEAPRQQLPPPPPMMIEQMFLMQTQAVQAIGQTLAAMQQQHHQPPPQPQMP

SEQ ID NO: 53494 - protein, 299 aa, Zea mays
  Coding DNA Sequence Number=SeqID_10119
MRLMVLVMTMVLMARLRHTARKSVIPFLPSRLAEHPLHRPVAGQSSHLERLHHRLHEEQERRRQEQQGSSFSLQQEIESEPEGWVARPVTRDATHGCHFHDALDTLLRRALNRRTWSIEYHCVVYQHSRGVYPDRWEATCLVRRPENSLQGAETCSEYYSISERDSAEAAMQDAARRALSHYCLVLGRVADGLNLKYYPRRPSGSTGGVIVSPIGEDNPRLSSTVNLAAVLNTELDHALDELSRARAEIALLRAERAERRHLDDGSPAPVETQHPYRSPRRGRQSYGNPDCKTKINLEP

SEQ ID NO: 53495 - protein, 55 aa, Zea mays
  Coding DNA Sequence Number=SeqID_10120
VLSNGRFAFEFEFHSGFGRSVERVLPGPLYTQKRDRRWFFTLLLASCFGFRNLRG

SEQ ID NO: 53496 - protein, 97 aa, Zea mays
  Coding DNA Sequence Number=SeqID_10121
  Homolog annotation: Hit_ID=Q6QP51; Match level="QueryCoverage=56%, HitCoverage=20%, E-value=1e-07, Identity=54%"; Hit description =Putative growth-regulating factor 1
  Subcellular localization annotation: CTP_CleavageSite=31; ConfidenceScore=5.31e-01
MDPSPRRKRAPSPPTDQGFEGWPLGRVRQPPQSTRASGSVLIRGQGFVYSRDAISPRPSPASGENSSPRQIHASPEGLLSNGRTLDSPEAQLGQASL

SEQ ID NO: 53497 - protein, 741 aa, Zea mays
  Coding DNA Sequence Number=SeqID_10122
  Gene Ontology: Mol. function=potassium ion transmembrane transporter activity; Cellular component=membrane; Biological process=potassium ion transport
  Homolog annotation: Hit_ID=A2YWX2; Match level="QueryCoverage=100%, HitCoverage=100%, E-value=0.0, Identity=70%"; Hit description =Putative uncharacterized protein
  Pfam annotation: Domain name=K_trans; Domain location=76-741; Score =939.1; E_value=1.9e-279; Accession=PF02705.7; Description=K+ potassium transporter
MEYRAAPPDDVIVQVNAAAVATVDERISTCQITEEEGGIVGHEQVPVGWLAHRSFSQSYRTRHRNPMEFTGWQLALLAYQSLGVVYGDIGTSPLYTFSSFALPNPGAADILGILSLILWTLTLVSLVKYVFVVLHADDHGEGGTFALYSLLRQHVNFSGKSVPVPVTRLASDVNLRFHSRKSSQQPRMLAFLEGSSIAQAVITYLVLVGTCMVMGDGALTPSISVLSAVQGIQSRSSSIKQGHVVLLCVVILVILFLFQQYGTSKVGFTFSPIMLVWFALIASTGLYNIIKHYPPILKAISPHYIYLFFARNKRVGWEQFGTVVLCITGVEAMFADLGHFNKKSIQMAYSCLVYPSLILAYAGQAAFLIKNPSKLSTTFYSSVPEPLFWPMFVVATLAAIVASQALISASFSIVRQSVALGCFPRVTMKHTSKKYEGRVYSPEINYFLMIACVLITVGFKGGPEIGQAYGVAVIWVMLITTHLITVVMVIIWQVHYAIAGTFYAIFAAIEGLMTISLLYKIAQGGWVPFAITAFFLIITLSWTYGRSKKHEYEVSNLMDRQDFIKIVNMSNRVPGICIFCTDLMNGIPPIVRHYVQHMGCLRELMVFVTVRHLPVTSVLPEERFLFDRLEPFGVYRCIVQYGYMDTQNMEDHEYVVSIIASLKEIAQSGDEILMMDSALANGTTFVLGRVILNMSPERGNCFKRFVINNLYRFLQKNFRSNISNLKIAPSKTLQVGMQYEI

SEQ ID NO: 53498 - protein, 121 aa, Zea mays
  Coding DNA Sequence Number=SeqID_10123
MPSFLSESGPLIRVVSVRTRIEPDRARIGPGPNNGFCVGLAGLMLVGHLYWHLKLPLALCLAALHRGPCVNTTVHYLDVYGKVDGPRWAVGLSSNNFKLEQNNCTIPALTVVLRVFGSCKL

SEQ ID NO: 53499 - protein, 147 aa, Zea mays
  Coding DNA Sequence Number=SeqID_10124
AQQSSEAQLKKPRRAQYCSVRSGRLLACSTIEQTTEENISALEGGLCRLQLSHDARAQLLLKEWATRAQQTTGEEGAIESCLEGGEWSLRPLQGPPQLGVSCFDYKCLENKKKEEEKRSKRKSSKNTSKTLSLVTNCFEWNWDLERL

SEQ ID NO: 53500 - protein, 300 aa, Zea mays
  Coding DNA Sequence Number=SeqID_10125
MQIIERKCEAQKGAGIRRKKTLDKLNDQPGNLIPLDIVEVPYLSVSGDNFDLVEDDPCDPTTTSKTEAPMQSLNQLPVVIDLADARSEKKDQPGNLIPLDIVEVPDLSEKKTLDKLTDQPANLIPHDIVEVPDLSVSGDNYDLAEDDPCDPTTTSKPEVPMQSLNQLPMVTDLADKETLDKLTDQPGNLIPLDIVEVPDLSIIERKCEAQKGAGIRYNLNFYVVLWNVGEKKTLDKLTDQPGNLIPLDIVEVPDLSVSGDNSDLVEDDPCDPTTTSKPEAPMQSLNQLPVVTDLADARLV

SEQ ID NO: 53501 - protein, 459 aa, Zea mays
  Coding DNA Sequence Number=SeqID_10126
  Subcellular localization annotation: CTP_CleavageSite=57; ConfidenceScore=5.63e-01
MAVRPFTRWSGRKWRNARNRWAVARTARSAIVRLQGFSSASLAASPRRWSPKTVTTSSMVGRSEPGCDLGPALSFKDLHHPGWGGGRAEPELYLPRGFVGHLLPQHSRERALTGLAGGSDFDNAGLVGGERRPLQRVGLAGSAGSGSAPGAPSRRKSGCRAARTGGPPKTSRAARAAFVFWGCPAFAPVRRLCAELGAPLVREDPSGDLPVGRWLPSSALRWWRLKNGVRPEAIAAAVWPPGAEVVVAATGAGGGNPRPLFDEPKPEAAVLAWIEAELARKEDFVGQSLSGPSTGGIDAGVELPRPRAGLVSSGDSWLRLRGGRPNRLLGPDSRRRPWRRWPGRSADVVLRSGDPSTVLPSEARSDFAEGGVDAEGAAAPLPSTSEPAGLVHLIDSAIDIVENARKIVSAEEFSSVKTCSVRGITYPSVSYLSQKVMSEDPTFEVVEKHERRSGRKDVF

SEQ ID NO: 53502 - protein, 94 aa, Zea mays
  Coding DNA Sequence Number=SeqID_10127
MAKNEEEIVVEEEVVSQAENPLAENNFYFDICGVDPEPPAHKASDEDITYNMSTTTPAAPPHQATLPSLARPITRARARDLNFIMLLKNEGPEE

SEQ ID NO: 53503 - protein, 50 aa, Zea mays
  Coding DNA Sequence Number=SeqID_10128
MTMVKDGTDLKEKRLLNPRHLALWLIENARDMNDEFPSGRVSRSTRSWQP

SEQ ID NO: 53504 - protein, 191 aa, Zea mays
  Coding DNA Sequence Number=SeqID_10129
MARTKTTQRKSTGPLCVPRHELASRHEGSSSGSNDPIGDLEARVEQLRSELRHWNRTRERDSHRIVELSAEVSRLQYEISEHDTAIDWVVNSCSFAWDCEAKALARVAELSASLENLQAYCNNLHEEVHVMYERLHPDVPPDVAAMGAGPSGTASEGPDGELDLFRPPPSVNLADERSSASGNGATKDEED

SEQ ID NO: 53505 - protein, 199 aa, Zea mays
  Coding DNA Sequence Number=SeqID_10130
MAGHASDRGGRAQGAVLTTGLVVWASKPPSATDEWFAEFGPQNSAVVVPAGTGGGTRRDRGGCVKAKQLHVKDVAVGSKTYELVNFTPDGVDGLYEVKVSAIIESPNYETLTVDELFSKLKSIEIDHQTRAKIENPSAPTMALAISDIAEVPDLSVSGDNSDLAEDDPCDPTMTSKPEAPMQSLNQLPVVTDFADARSA

SEQ ID NO: 53506 - protein, 191 aa, Zea mays
  Coding DNA Sequence Number=SeqID_10131
MAPLCRGQFEPWVGRGGGSSEVEVESVIRGRGRVRAPGRARRRPSAEAEAESEPWGRARRSSSSSRAEAESEPWGRARRSFLWRPRPDLAAVSLTLSSGTAVGAAQAALSSRQAGQWSGEAILTLNASAVWSVGVAIWPRLLLGEDWASGEPKICADGGYQLRLGVLGVPLIMVPDNMCSNIYMWGVRNIK

SEQ ID NO: 53507 - protein, 139 aa, Zea mays
  Coding DNA Sequence Number=SeqID_10132
MTRKHTSSTMLIIERKCEAQKGAGIRSNLNFYVVLWTVGEKTLDKLTDQPGNLIPLDIVEVPDLSEKKTHDKLMDQPGNLIPLDIVEVPDLLVSGDNFDLVEDDPCDPTTTSKHEAPMQSRNQLPMVTDCGGTARIIPT

SEQ ID NO: 53508 - protein, 177 aa, Zea mays
  Coding DNA Sequence Number=SeqID_10133
MPDLLKESAMLKKGAGIRRKKKTLDKLTDQPGNLIPLDIVEVPDLSVSGDNSDLVEDDPLRSNYDEQARGANAIAEPNSLWVTDLADARIGSDLRMEKKTLDKLTDQLRNLIPLDIVEVPDLSVSGDNSDLAEDDLCDPTTTSKPEAPMQSLNQLPMVTDLADARLVWSQNGVNKLL

SEQ ID NO: 53509 - protein, 141 aa, Zea mays
  Coding DNA Sequence Number=SeqID_10134
MGKSKRGGSSSHHSGDKRKREPTPPLEDFGDSEYSEEEFSSESEGSPAPASPPASSVDSDDSQGIAAEVWTYIRAVERARLEGSDELEYSSDEENSSDSSEEGSGGDDDGGDGSGKGGDDSGKGGSGDRGGGSKGSNKASG

SEQ ID NO: 53510 - protein, 197 aa, Zea mays
  Coding DNA Sequence Number=SeqID_10135
MARAYKAHLGVDCTLPHTLKPHRSSVHRRLPVHGVSAAIRATAVIAVIWPGTIAADENPPQDQVDRMIQAIPTTEPSLAVTAQSLPEPTLPFTGTHLAADCNLADGEYVLVPEQGAAQEVAPDPAPESTPEDLPATALEGKPRNSASAFGNQTPQPNSCMSRGSLEDMVAGVTWPSILPPGWTIEWDPTSAEEKHEE

SEQ ID NO: 53511 - protein, 361 aa, Zea mays
  Coding DNA Sequence Number=SeqID_10136
MAGHMRRMHGNRCYARPATIHHGDHGGAVPTRGGDTPEQSSARATTHRAVAYSSLALDPVDPVFYSMGELEVSSKHDAHATAEKLPSSSGISEGDGADSMVPRITETGNPDCTPPPVVTQDGDLQFDGGGKQAGLRPLPLPQPQGFSSSVLGRGLPRARLSDPCLTSLGTGGGLLAAASALRSSLLLFGPPEQKSSSSPLLERESLGSVGVVVRGFSCLVKGTPRPLFDEPRPGVAVSARTEAELARKEDLVGRSLAGSSISGTDAGVDLPRPRAGLMSSGDSWPRPRGDQPSRLLEPDSWRRPRRRWPGRDGEVVLQSGDPRTVSPSEARSDLAEGVVDAEGAAVPFNCRDPSLQDRIIL

SEQ ID NO: 53512 - protein, 149 aa, Zea mays
  Coding DNA Sequence Number=SeqID_10137
MGKSKKGGSSSHHSGDKRKREPTPPSKDFGDSEYSEEEFSSESEGSSVHASPPTSSDDSDDSQGIAAEVWTYIWAVERTGLEGSDESEVSSDEGDSSDSSEEGSDGDDGGDGGDDDGGGDSNKGDDSKGDVKGDGGNDKGGSGSGKASG

SEQ ID NO: 53513 - protein, 263 aa, Zea mays
  Coding DNA Sequence Number=SeqID_10138
  Gene Ontology: Mol. function=carboxyl- or carbamoyltransferase activity; Cellular component=ornithine carbamoyltransferase complex; Biological process=amino acid metabolic process
  Homolog annotation: Hit_ID=Q8SA97; Match level="QueryCoverage=36%, HitCoverage=21%, E-value=7e-11, Identity=45%"; Hit description =Ornithine carbamoyltransferase
MALPVDVAGLCPRSGDVGAPPKLGSNLSSVAEAEPEPLGRARRKSFGRGQGGVRALGSGEAEFVVFRGRARVRALGSGGAEFAVFRVLARVRALGSGGAEVVRQRPGRSPSPGVGRGGVHRLPGPSPSPSPGVERSGVRRLPGLSPSPSPGVGRSGVRRLPGLSPSPSPRVGRSGVRRLPGLSPSPSPGVGRSGVRRLPGLSPSPSPGVGRSGVRRLPGLSPSPSPGVGRSGVSYGASGELYADGGYQLRIRRLEGTPNYGPR

SEQ ID NO: 53514 - protein, 148 aa, Zea mays
  Coding DNA Sequence Number=SeqID_10139
  Subcellular localization annotation: CTP_CleavageSite=42; ConfidenceScore=5.04e-01
MNKTTGIRSAITNGTPVPPPQVRTTPLRGGRPVEQQKTDERLAAARSNHDDNHPRPGQRSGLGSSFGAGVTTGGLSPAEDENQPFRPGDGDPGLLAPYLSRHGWRKSPWDSRMPFSPRRGGKKKAADPCRGSPPTRLIFHLGLDDENP

SEQ ID NO: 53515 - protein, 271 aa, Zea mays
  Coding DNA Sequence Number=SeqID_10140
MAPSRFGGCATVRQGCGRDEQATVDSEVQQVEIAEQELIEGKFLTLHELPPLVSSCHIIPHDLLSYERCHFHDALDTLLRWAFDRHTWSIEYRCVVYQHRCGLYPDQWEAICLVHRPDDDLRGAEAFSEHYSITERDTAEAAMQDAARRALSQYCSLFSGVADGFDLKYYPHRSTGSAVGVIVSPVGEGNPRLNSMVNLVVVLNTELDHALDELGKVRAEVAELRAECVAHHYLDGGSPAPIGIQHPYRSPPCGRFDYGTPDCRTRIDLDP

SEQ ID NO: 53516 - protein, 171 aa, Zea mays
  Coding DNA Sequence Number=SeqID_10141
MAQLAQVGPACARALSSPLPLAARIECVARCQISPVTWRGCIVATQGAGAPTTGAGAAGLFPSPQQEVESERSPSPAPQPEMPPAPPQGIPTAGGDLDGDGDDDDAGGSSSHDTERSEEPEPEGWIARPITRDVARGCVTLKLCTKSNKESSSFCVSYLRHKKSTYVIESD

SEQ ID NO: 53517 - protein, 67 aa, Zea mays
  Coding DNA Sequence Number=SeqID_10142
MARVTCAHLASGWMVGCCALGSREPVLVLGETRWRVDIYPQLGINRFGSPNFSDMKTGSSTPIVDNK

SEQ ID NO: 53518 - protein, 85 aa, Zea mays
  Coding DNA Sequence Number=SeqID_10143
  Gene Ontology: Mol. function=sequence-specific DNA binding; Cellular component=nucleus; Biological process=regulation of transcription, DNA-dependent
  Homolog annotation: Hit_ID=P24345; Match level="QueryCoverage=80%, HitCoverage=18%, E-value=2e-14, Identity=61%"; Hit description =Homeotic protein knotted-1
  Pfam annotation: Domain name=KNOX2; Domain location=10-61; Score =74.6; E_value=3.3e-19; Accession=PF03791.4; Description=KNOX2 domain
MEARQLTTLGGLATETEPELDQFMEAYHEVLVKLREELTRPLQKAMKFTRKMAPQLNSLSISGRSLHNPFARALAEEAPPPRTSP

SEQ ID NO: 53519 - protein, 363 aa, Zea mays
  Coding DNA Sequence Number=SeqID_10144
  Homolog annotation: Hit_ID=Q6J9V9; Match level="QueryCoverage=36%, HitCoverage=46%, E-value=3e-63, Identity=87%"; Hit description =Putative uncharacterized protein
  Subcellular localization annotation: CTP_CleavageSite=17; ConfidenceScore=5.14e-01
MRETCNRTTVVHPFGFVASGGPAWRPGPTCHVTGATVTACKETAPPLAPMLRLLDCRTSASTQGSPARDPTVPVECNDHGSISRGDRRDDRYGQKWTGSNCSNRRAEAAVQSPTGSHPLPKRPSDTSGRRSGCRFASVIMTTSKKGPGKGVFRKRTLPSEGNGPRALLLIRGLKVAPSGVRQPPQSTRAPSPLLIRGSKAGPSEGFDSRPRARRVRDDPGYIRYMAEARATLPRYPRTFPRPAGTICNGIPPEGGIEPSDPIEWVQVRQITCRELRLARPQASASASALEEDLCLARPQAPASALASEEDLRLAQPQALASASDSVGVTTSPEPSLDLRRSLRLARPGPRTDYATADTSLPYS

SEQ ID NO: 53520 - protein, 774 aa, Zea mays
  Coding DNA Sequence Number=SeqID_10145
  Gene Ontology: Mol. function=nucleotide binding; Cellular component =membrane; Biological process=defense response
  Homolog annotation: Hit_ID=Q6IYE1; Match level="QueryCoverage=69%, HitCoverage=98%, E-value=3e-93, Identity=49%"; Hit description=LZ -NBS-LRR class
  Pfam annotation: Domain name=NB-ARC; Domain location=151-429; Score= -91.2; E_value=0.00019; Accession=PF00931.13; Description=NB-ARC domain
MAEIVTGAMGTLLPKLANLIKEEYNLQKKVRGEIMFLETELKSMEAALIKVSEAPIDHPPDVQVKLWTREVRELSYDLEDSIDRFMVRVGDGKPHSFKGFIDRSLHLLTRGRIQHSIGIDIKEIRSRIKDVSERRDRYKVDLVPSKPVGRSIDNLRLSALYRKATELVGAEEKSSDLVKRLMEGDKEASKQPVVLSIVGFGGLGKTTLANLVYEKIKGQFVCGAFVYVSHNPDVVKVFKNMLYQLDGDKYRDINQGTWSEEQLIWELRKFLLHKRSGWSIKQLDGFGKLTSLQEVKGTITIESPSMLHDLGCLTNLRTLGINFRDWDESYEEPFIQCLSNLVSLKSMKIKGTMMSSLCSECDKLYPGPQQLCSIDMKSLARTVIMTRVPRWMSSLCSLSSIKITLLALGVQDIHVLGSIPSLRCLSVHVKETRDERLVIDKCYPFRCLTEMQIDYESMAVVFAPGSMQNLKELHLLFGVKEVMHKYGDCNFGLEHLMSLEHVSVKTMYTIMPEEVEAVKDEFQKSLDMNPGKPTLIVDYLYPKEGGGYLSRSNYKAQTAQSASPAAVTPPQQPRRCVSAFPVRQMAASATDADAGAGLRSEFLQVLLSRRRDLLGQANPMESCPSKEVENLREKLVEENFYLITELGEQGRVPVLLLKLDDPVPRRKPAIVFLHSSYKCKEWLRPLLEAYASKGYVCVAIDSRYHGERASNETTYIDVWDLVKLGDYLGEREDVDPCRVGITGESLGGMHAWFAAFVDTRYSVVVPIIGVQVGH

SEQ ID NO: 53521 - protein, 145 aa, Zea mays
  Coding DNA Sequence Number=SeqID_10146
SQMEVRCQTSFCQNEDGFPKLLRACTARLGIKSQPEYDGREFVEHGTEKCVVTVYIGSKDAEKRNRKLHVDLTTAQARATALESREVIAVEALKQAKDEHIQKLMEAYMAMDKQEHLESSQDPPPELFEPLTMKKIPAPSLEVKE

SEQ ID NO: 53522 - protein, 112 aa, Zea mays
  Coding DNA Sequence Number=SeqID_10147
MDESCTQLLSSDPMINLNTTVFFFLYSFPIARNLHNLEPLALTMRCSQRSTDPTVDDLEPLAHRTLSGAHRTVQCPLQTVGPATRHARIARSTIGSVDRWLPDSPVHHWTVR

SEQ ID NO: 53523 - protein, 90 aa, Zea mays
  Coding DNA Sequence Number=SeqID_10148
MDKVQIKDKEKIELEKRWLEQPKFAKSGSTGLSGGASDNVRCAKLARAKWPLSGIHRRRTTIIHRTVRCAPDCPCKGERLQVVEIPRKRD

SEQ ID NO: 53524 - protein, 343 aa, Zea mays
  Coding DNA Sequence Number=SeqID_10149
  Homolog annotation: Hit_ID=Q6QP51; Match level="QueryCoverage=22%, HitCoverage=35%, E-value=4e-17, Identity=64%"; Hit description =Putative growth-regulating factor 1
  Subcellular localization annotation: CTP_CleavageSite=50; ConfidenceScore=5.08e-01
MVNAAKNGPAVMAVAGGQEQRSRRQPSLCPIRGQRENPLSQREDDAPVFRSSNGSRTRDDRPANHSPHRINSAAGRRRLRQEKRATFRLRHNDRVKKAASEHLGSTPTTGQRFEGRPLGRVQRPPQATRAPHPLLIRGSKAGPRRVHSRLRHKARDDHGYIRYITKARAALPSSTETPCSAPTEGNMALSPLLLAERRRRGRLGGCSRKPGSGHTVDSVNIPAQELGTRPYTRATASSHEGTTRPAEALREALRPRRSQTTPPRPRGLHPTGALARTHRNKTQPRKAGPLAKKCDESLQASANTPIEAQGLLSETIIRGTLKAPNSQLVTPISIKLQRPDGCD

SEQ ID NO: 53525 - protein, 463 aa, Zea mays
  Coding DNA Sequence Number=SeqID_10150
  Subcellular localization annotation: CTP_CleavageSite=64; ConfidenceScore=5.09e-01
MHRVSPPSEPPDGDRPRFFCLAIVGGTQLRGSWYLSAIARLQGFSSGSPTASPRRQSPKTVTTSSMVGRSKPSCGLCPTLSFKDLHHPCWGGERGELELYLPLGSAGHLFFQLLGVETILQLCGGGVLQPCRGRRTVAAQPGCNIPSSVLAFVARTGVRTCRCALGRPALAGAVLVDTAVGADVVAAGESFSADKPVSATHGLTSGSLALMSGSRPLSGDANESLPAAASVLGPSLLLQRSSASHQEFVVPSRRLSDVEVVHTRGGGTRSSVCNGTLSAGVCSLWLSGPEHESLGSVGLAARGFSCLVKETLDRSTNSRSRRQRCQHGQRQRWLKKKLRRPEPGRAIHWRDRRRSRVAEATSRADVLGGQLAEATERPVEPSARAGFPEETPATMVQAWCRQDSAIDIVEKARKIVSAEKFPSIKTCSVSGIAYPSVSYLSQKVMSEKDLFEENFDAEGVRPF

SEQ ID NO: 53526 - protein, 529 aa, Zea mays
  Coding DNA Sequence Number=SeqID_10151
  Homolog annotation: Hit_ID=Q6QP51; Match level="QueryCoverage=47%, HitCoverage=91%, E-value=3e-18, Identity=33%"; Hit description =Putative growth-regulating factor 1
MLQDPPPTRQGLGPMRHASWPRAEEAKPPCAVRVTAQRLQALIHFRPDQRVKGQTATRAACNRTKGAHPFDSDASSMGAQAHTSCNRRTGYYVREATPPLAPVPRLLDCGTSVTTRGNPAHDPTVPTERIDHGSVSRGRRRDGQYGQKWAGSDGGGRRAEAAVKSTGGTFGRRSRRRFTFAIMTASKKGPRKGILRKGSFSAKEAGPEPPTEQRFEGWPLGRVRQPPQSTQAPRLLPIRGSKAGPSEGFDSLLRALGLRAHYWSEVRRLAPRRGSTAASSHSGSAPTTDQGFVGWPPKGSTAASEHAERGMTLGTFDTQPRLGLRSRGTLGHFRDQRERFCNGIPSEGGIEPSDPIKRDRVRQITCSHFAAPLTDLTGKQRRLLRSDCCATRQTSASEDELRLARPKARTQPRPRKTDSASPNPRARTQPQPRKTVAASPDPGLGLSLDPGRWTPPRPTPGLGLSLGLGRRSPPRPTPGLGLSLDIGRRTPPRQTLGLRLDLDLGGAFASPDLGLGPATSQGRPPLPYP

SEQ ID NO: 53527 - protein, 85 aa, Zea mays
  Coding DNA Sequence Number=SeqID_10152
MAALGPLTEARGRQQGLDSPDSCPSARLQRSSDGHDITQTGRQNLSGRHDGSGRFEMRNTLRPGEYALCNGLQGSSRRELRWMAE

SEQ ID NO: 53528 - protein, 135 aa, Zea mays
  Coding DNA Sequence Number=SeqID_10153
  Gene Ontology: Mol. function=carboxyl- or carbamoyltransferase activity; Cellular component=ornithine carbamoyltransferase complex; Biological process=amino acid metabolic process
  Homolog annotation: Hit_ID=Q8SA97; Match level="QueryCoverage=91%, HitCoverage=21%, E-value=1e-14, Identity=43%"; Hit description =Ornithine carbamoyltransferase
MAPPVDVAGPRPRLGDVEAPPRSRSSPSSVVEVESEPLGRVRRRPLAEARAEFEFWGRAKRSSSSSGAEPKSEPWVGWSGPESEPWVGRSGVRRLLGLSPSPSPGSGGAEFTVFRGLARVRALGQAERSSPSSGA

SEQ ID NO: 53529 - protein, 272 aa, Zea mays
  Coding DNA Sequence Number=SeqID_10154
MICCPSEQLPIALGVRSPGEAIGYPSQYPTDLTRCVHGSGEVGVQVPSEERVLLALSCFLLSLLLSLPTITSPRIPSFPEDPFFWSFSHLRDFVSRHGLRRVPLSGFVMSPNISASVPSSARFLLKRRESLFGALEVALFPASLWLFRNEMVPKQNVDPGQRTILCWKSLCHSTDRPDKEDSAACVAPTAVPLDRVRLTVAKSGLGRHRKLRLARPQGSAPVPASDDELRLARPQSSDSASAPEEDELRLARPQGSDSASAPEDDELHLARP

SEQ ID NO: 53530 - protein, 156 aa, Zea mays
  Coding DNA Sequence Number=SeqID_10155
  Subcellular localization annotation: CTP_CleavageSite=9; ConfidenceScore=5.01e-01
MPAPPPPPSAGKVTGQTRMLLFRHVGKTSSIPPSAGGLTAAIVIVAWRRKEYHVVAAVEGHELKTPEMEHRPGLEGLLETTHLELDGKLFVNTQQTPTRRANCRRFDPGGSLDRRVNCRCVSQPRWVGARRNTKGGEIVRGNCGLRVVLRPGRMRL

SEQ ID NO: 53531 - protein, 72 aa, Zea mays
  Coding DNA Sequence Number=SeqID_10156
MARGVVSRGGLHGVRKEKNTTWLEKRIGKGRQWRYVLPRRGLRLEILVQHRLSWLMARGVGDQVLISQASMV

SEQ ID NO: 53532 - protein, 90 aa, Zea mays
  Coding DNA Sequence Number=SeqID_10157
  Subcellular localization annotation: CTP_CleavageSite=39; ConfidenceScore=5.70e-01
MNKHQHSRVSFTNGTPVFAPAATTTPAPKRPNSSSDDLRADAAATSSSPTPPLEGREQAGGRRVGGQSAGGTGYPIGRETSSGCLGGRWH

SEQ ID NO: 53533 - protein, 150 aa, Zea mays
  Coding DNA Sequence Number=SeqID_10158
MEERARTFEDEEDRGRGSFAAGLRRRGCANPRNDGNETPLRETDGWDGGVRGWRSTVPAKTTAVARWVRGGGALGALRRRVLGEYPNPTRSGQTSIRSQVKAASSGACAGGFLPKRVGQNPRQKLSVWFQLLLLAARSRLEAEPNRGHIK

SEQ ID NO: 53534 - protein, 39 aa, Zea mays
  Coding DNA Sequence Number=SeqID_10159
  Homolog annotation: Hit_ID=Q6QP51; Match level="QueryCoverage=100%, HitCoverage=17%, E-value=1e-10, Identity=84%"; Hit description =Putative growth-regulating factor 1
MAGKQCRSPRSDCYASHLGKADNSKFSLGRNRKLRLARP

SEQ ID NO: 53535 - protein, 381 aa, Zea mays
  Coding DNA Sequence Number=SeqID_10160
MEAGEHGPRRRTSETVADAVSAGLRAVETAGTCWHSETGPKPVEGLPGATFCSLSYGRKEKEDEGTSGRHRHRFDRMGWHMTEYDDTQGGGGDHVLCKVQQMQDPAGAIFTGATAYPTMDDPRMVGGELGKSNVDYLLNINNVDGEQQQQQQPCAEPSSDVQVQVDPAATLMPSYVHGHQQGGDPLMAGGKEEQSRRVESPEAELDYFDDWLNNVDWKGFLEILGDNEEQGLPLQQQPCIEPAEQSSDVQVQVDPAATLMPCYVHGHEQGGDPLMAGGEEEQSRRIESAVAELDYFDDWLNNVYRKGFLEILRDYEEQGLPLQQQPCVEPAEQSSDVQVQVVPAATLMLGDHEEQGLPQQQQPCAEPAAEQSQSSRTVPSV

SEQ ID NO: 53536 - protein, 196 aa, Zea mays
  Coding DNA Sequence Number=SeqID_10161
  Homolog annotation: Hit_ID=A2X6T6; Match level="QueryCoverage=32%, HitCoverage=5%, E-value=5e-09, Identity=48%"; Hit description =Putative uncharacterized protein
MEKEPLDMVESSVRVIETHVDIIRSLVTDGVVDTSEPESVYTLKTTLFQIGDVCDMLEKCALSIKKYADSKRAKIIQDEALQYAEDDEAADDLEELPSPDLLTQADILEKYFGIEYDSDQSRVRQRRHGCDVIMLKDPKKRLSPVVYHLPLFVGFTDGWKHLVIANDLRVEDVCELVKGPNDGEPVYYVRMCGHKI

SEQ ID NO: 53537 - protein, 97 aa, Zea mays
  Coding DNA Sequence Number=SeqID_10162
MAGGEEEQSRRNESAMAELDYFDDWLNNVYRKGFLEILREYEEPGVAAAAASHALNRSSRAATCREIHSMHGCFTLFDVIHIDNSRLPYVDADRKLR

SEQ ID NO: 53538 - protein, 65 aa, Zea mays
  Coding DNA Sequence Number=SeqID_10163
  Gene Ontology: Mol. function=nucleic acid binding
MAGDGVVIRQDTEAVVDGNLMVTPPHVLMGPRINEISNGEEGEHRIRPPMSNISSREMDTPQLFE

SEQ ID NO: 53539 - protein, 681 aa, Zea mays
  Coding DNA Sequence Number=SeqID_10164
MDKDRQGAAQKRQAAIRIVEARPKRQKRGSAKAEAPGGGKPPLAAKSGVPASSNAPEAAAGAGGSKPSRVAEATKAARALPSAGKRVADFATDICVEDYLGGSDEGQLATVAPAAAIATAAIVPKARGEALGTGGEVSALAVVRDEADAATRRLKEVTEALSQVADFARHTASGALTAAVSAEVERLRTQHADAVREKSASDSKCRKLTDKVAALEREKADLRRQLAAERREANEAISKEQAAQAEAKLARAEGNLAKELAGDLQERLTAVESRAKGAEAAMRAEAERTRTQLMDTYRELGARTGDFEVPDREPGLRCLQWVQEELLELPAVVGGLMSYASLVTCEGAMNALSHEGCRHFEVFDQADEDFDRDIYKVDDLVVKDSAGALYDRMWGLHGREVVRERAETALAQALRGEWVDDYGALNSALPGPEPTPAESGVALEPTPETAEDAPDAPTSAAAGEDLPQRWPKAHRMPPRRLRRVLKIPRRWRRKRQRKQRRSQRRRLPRRQGLCRWRSGCNRVQDFGPAHATATTKFLAVSTAEGGNECGGSGSEFSEFFYVADSGSSVEWTEESSEEDLDYFAALDAAAAETSPHTTDAQDVPGPSTGRRRRRAVAKRRVSTEERSRLRVSRAGRQELLSLPAAASTGEGELRSLFAGEELRIMLFNYREMGIIPKVEPM

SEQ ID NO: 53540 - protein, 458 aa, Zea mays
  Coding DNA Sequence Number=SeqID_10165
  Gene Ontology: Mol. function=protein binding
  Homolog annotation: Hit_ID=Q9XEN1; Match level="QueryCoverage=38%, HitCoverage=21%, E-value=3e-66, Identity=78%"; Hit description =Putative uncharacterized protein
MAAATEKTAEDIRRELQELQRQHREVHLLLCPAHLEASSLRAVCPDPLVVPSQITERLRDPCGLRRGTPGPGPGPGPPRPLRGFVRPVDGSENNEDDTKDADGEGQEAGSGATEGSDRRTFNIGGFRRDGSLWMQRRVDYNSLPEPAPRELPMNEDPSLAEQKVREESERLRQQEREQIAEKRKCDMMLHARVAAKAEEKSMELLYIHWTEHHKRLSNFLSCLSEYAVYISYMNAGCMVISGDSYTVYAHSKIICHQFAMFCPTEVDYTISKKNMTFQIYCCPRTTAELEAHVADTSLVSADAPRVLADTVLDISGGERAFIEADEAKELLSPLTKPGNSYKRICFSNRSFGIGAANVAGPILDSVKNQLTEVDISDFVAGRPEDEALDVMRIFSKALEGSVLRYLNISDNALGEKGVRAFSELLKSQESLEELYVMNDGISEEAAKALSELIPATEA

SEQ ID NO: 53541 - protein, 142 aa, Zea mays
  Coding DNA Sequence Number=SeqID_10166
MDEIPTCLCSSDGRRGALLWPMAATVRRAEKHLCSSFLPPMSTDAMEPNPRSPSLIQRAGHFSGSELEQRLKRTPAAPEIQAAMEGSRTLSPWPPIVLLLSPGVLDACPQGASLLEDESEAHHRRLSLSCSTCSTLPVSFTG

SEQ ID NO: 53542 - protein, 94 aa, Zea mays
  Coding DNA Sequence Number=SeqID_10167
  Homolog annotation: Hit_ID=Q8W1D1; Match level="QueryCoverage=63%, HitCoverage=4%, E-value=5e-07, Identity=47%"; Hit description=Gag-pol
  Pfam annotation: Domain name=zf-CCHC; Domain location=11-28; Score =17.7; E_value=0.0032; Accession=PF00098.14; Description=Zinc knuckle
MARPVGQGTVTTCFKCGEVGDYANACPKRIPNTPARSNVQGKQPTLGSGKGFNIARVNQVSADATADGADIVSVFSVRPHTQGTLVVLLGRTMW

SEQ ID NO: 53543 - protein, 1065 aa, Zea mays
  Coding DNA Sequence Number=SeqID_10168
  Gene Ontology: Mol. function=sucrose-phosphate synthase activity; Biological process=sucrose metabolic process
  Homolog annotation: Hit_ID=A9QVI4; Match level="QueryCoverage=80%, HitCoverage=81%, E-value=0.0, Identity=89%"; Hit description=Sucrose phosphate synthase II
  Pfam annotation: Domain name=Glycos_transf_1; Domain location=494 -659; Score=30.6; E_value=3e-06; Accession=PF00534.11; Description =Glycosyl transferases group 1
  Pfam annotation: Domain name=S6PP; Domain location=768-1053; Score= -100.1; E_value=0.00078; Accession=PF05116.4; Description=Sucrose-6F -phosphate phosphohydrolase
  Pfam module annotation: Pfam domain module=Glycos_transf_1::S6PP; Domain location=494-659::768-1053
MAHLLDHVGDVGPGEGEVLESLGETSVGRHVVDLGATVVGDLRLSVNRREHDVVDVEKEVDVPGEGGGEDGLNGGELDDGAEGLVVVHSGALSETPKDPMGLVLIQGVVGLELSVENPLAGDHVGARGTRHQVPGVAGQKGCVLLHSATPIRIGENGAGGGGDKFATELVNGPSTKMCTLDLHSASLNKIRIPECILWVHGPIIHGLIRGENMELGRDSDTGGQVKYVVELARALGSTPGVYRVDLLTRQISAPDVDWSYGEPTEMLSPISSENFGLELGESSGAYIVRIPFGPRDKYIPKEHLWPHIQEFVDGALVHIMQMSKVLGEQIGSGQPVWPVVIHGHYADAGDSAALLSGALNVPMVFTGHSLGRDKLDQILKQGRQTRDEINATYKIMRRIEAEELCLDTSEIIITSTRQEIEQQWGLYDGFDLTMARKLRARIRRGVSCFGRYMPRMIAIPPGMEFSHIAPHDVDLDSEEGNGDGSGSPDPPIWADIMRFFSNPRKPMILALARPDPKKNITTLVKAFGEHRELRNLANLTLIMGNRDVIDEMSSTNAAVLTSALKLIDKYDLYGQVAYPKHHKQSEVPDIYRLAARTKAAAYGLPMVATRNGGPVDIHRVLDNGILVDPHNQNEIAEALYKLVSDKHLWSQCRQNGLKNIHKFSWPEHCQNYLARVVTLKPRHPRWQKNDVAAEISEADSPEDSLRDIHDISLNLKLSLDSEKSGSKEGNSNALRRHFEDAAQKLSGVNDIKKDVPGENGKWSSLRRRKHIIVIAVDSVQDADFVQVIKNIFEASRNERSSGAVGFVLSTARAISELHTLLISGGIEASDFDAFICNSGSDLCYPSSSSEDMLNPAELPFMIDLDYHSQIEYRWGGEGLRKTLIRWAAEKNKESGQKIFIEDEECSSTYCISFKVSNTAAAPPVKEIRRTMRIQALRCHVLYSHDGSKLNVIPVLASRSQALSIKQCFARLFARYLYIRWGVELSNITVIVGECGDTDYEGLLGGVHKTIILKGSFNTAPNQVHANRSYSSQDVVSFDKQGIASIEGYGPDNLKSALRQFGILKD

SEQ ID NO: 53544 - protein, 139 aa, Zea mays
  Coding DNA Sequence Number=SeqID_10169
  Homolog annotation: Hit_ID=A2Y3P0; Match level="QueryCoverage=36%, HitCoverage=14%, E-value=4e-12, Identity=70%"; Hit description =Putative uncharacterized protein
MALHKLYDDGGPQLSYGSRTTTLLHPHCTPGSSPYDYKREDQGLLREGWSRGTEDGTGALLGPLASLTRVDAFLRDPCAAVYGKLRRSRRLDTVQSGCTALSIVKHGDLMVVANADDSRVVLGIATDDVAITPSSSSST

SEQ ID NO: 53545 - protein, 161 aa, Zea mays
  Coding DNA Sequence Number=SeqID_10170
MLVDYTTVLDGPSVLVEGPTQQGVESVMEVTPASGITSDGSNDPSLQLRLLRELRVVARTATHVVVVSISVRGASLAEVQGKAASQTPPPDEARGKSPAAPAPTPGVDAPAPRAGDDAVSPGDWTTLAPCDAVDSPSGEKAKRGSRLTCSAPKMSHLQNTS

SEQ ID NO: 53546 - protein, 139 aa, Zea mays
  Coding DNA Sequence Number=SeqID_10171
MSENRRRGAWRAQPEQQAPQEEAALQQHLPPPLPMTIEQMFLMQTQAVQAIGQTLAAMQQQPPPPKPQVQVQIPQVPRDKRAEFMRGHPPVFAHSADPIVGGLRLPKVPSGLGYNHNMKKHKEYEGWRRAEAMRRGASA

SEQ ID NO: 53547 - protein, 129 aa, Zea mays
  Coding DNA Sequence Number=SeqID_10172
MAVIGRLCASTHDAVMKECVAPPLSGSVSHDYSVAESSCLLQTETHSALLGHWGLTAAGLPSSDIASPNGLALHSGNMLCFQPELEDEVPADSAFGTDLLLTDCSSDSDTGAGDTAFGTVAAEVDAGSA

SEQ ID NO: 53548 - protein, 94 aa, Zea mays
  Coding DNA Sequence Number=SeqID_10173
  Subcellular localization annotation: CTP_CleavageSite=37; ConfidenceScore=5.24e-01
MVQGAPPGEARGSSSSQTLSPAGARKKSPTAPVVDVPAPHAGGGAASPSDWTDQPRDDEANAPRDGKVSGSTVSTALIPPMSHPVLEGKPNANH

SEQ ID NO: 53549 - protein, 223 aa, Zea mays
  Coding DNA Sequence Number=SeqID_10174
  Subcellular localization annotation: CTP_CleavageSite=44; ConfidenceScore=5.51e-01
LPWPSPSQGVGRGGSRPVEARAESQPWVRARRSFVVFRVLARVRALGSGGAEFAVFRVLARVRALGSGGAEFAVFRVLARVRALGSGGAEFAIFRVLARVRALGSGGAEFAVFRVLARVRALGSGGAEFAVFRVLARVRALGSGGAEFAVFRVLARVRALGSGGAEFAVAALSFCQTGQWSGGVTAVTSALPGARVRMKLYADGGYQLRIRRLEGTPNYGPRQ

SEQ ID NO: 53550 - protein, 253 aa, Zea mays
  Coding DNA Sequence Number=SeqID_10175
MTLGKEGNLGTGKDIFAECCCQGTRHRYWQRGPLEGSLPSASPPDTRQRSLLCRVPTRALGTGTGGGAHWTSLCRGPLKQTLGKIGLFAECHRRHSAKDPSPSLGAVTLTFLCRVPNGTRQSLCRVPEKKYSAKRLLPMYSSPSVLCRGLQSRPDLFSYLTLIRAYIEAKLHTEVEEPIWTMLRSDTTGSHLILAVLKVYMLEAKARSRSRRSGARFGGGPGHIELVPHGVPEGRAWRGERCAASGPGYIWSW

SEQ ID NO: 53551 - protein, 263 aa, Zea mays
  Coding DNA Sequence Number=SeqID_10176
  Subcellular localization annotation: CTP_CleavageSite=69; ConfidenceScore=5.16e-01
IRPTPGLGLGLRPGRRRNSASPDPRARTPPWPRPDDFRLARPPGSGSATATEGKTQPRLRRKPHVALPRAQTATSTGNVIIILPRIDSGQRQQGLDRSNSCPSIRLRRTSDSHDITPAGCPDLSGCHIGMAFSEKVGRAGPRTGQALSWGRSLPSPAWTLVTPLLQAHLTWARDEHEGRGTSTSLTLGSGRLASPPSALAHALDPSGLGHAAHSLVGLGTPLSRNADSIPAAHVDVMWVQDMTKTRRMMQISAADVECTALII

SEQ ID NO: 53552 - protein, 190 aa, Zea mays
  Coding DNA Sequence Number=SeqID_10177
  Subcellular localization annotation: CTP_CleavageSite=42; ConfidenceScore=5.10e-01
MNELTGIRSAITNGTPVPPPQVQTTPLRGGRPAERRKADEWCAVARSSSSDDNAFCSEGPSSGSASLGLDAAARKPPPMPKLVRQGRAEGHRVGGTGEGGYPERDPSPRRNRAPRPPLLIRGSKAGPPRVQQPPQIAWARHPLLVRGSKASPPKGSMAVSGYSGSAPITDQGFEGWPPKGSQSPQTPSEG

SEQ ID NO: 53553 - protein, 515 aa, Zea mays
  Coding DNA Sequence Number=SeqID_10178
  Gene Ontology: Mol. function=pyridoxal phosphate binding; Cellular component=cellular_component; Biological process=amino acid and derivative metabolic process
  Homolog annotation: Hit_ID=Q75PZ8; Match level="QueryCoverage=99%, HitCoverage=99%, E-value=0.0, Identity=78%"; Hit description =Tryptophan decarboxylase
  Pfam annotation: Domain name=Pyridoxal_deC; Domain location=59-442; Score=572.2; E_value=5.3e-169; Accession=PF00282.10; Description =Pyridoxal-dependent decarboxylase con
MGSLDTNPNAFSAFGVDATTGFQPLHPDDVRAYLHKAVDFISDYYKSVESLPVLPDVKPGYLRQQLRSAPPTSSAPFDVTMKELTDSVVPGMTHWASPNFFAFFPSTNSAAAIAGDLIASAMNTVGFTWQAAPAATEMEVLALDWLAQLLRLPPSFMNRTGAAGRGTGGGVILGTTSEAMLVTLVAARDAALRRTGSQGVSGLPRLAVYAADQTHSTFFKACRLAGFDPANIRSIPTGPETDYALDPARLFEVMQADVDAGLVPTYVCATVGTTSSNAVDPVGAIADVAAVFNAWVHIDAAYAGSACICPEFRHHLDGVERVDSISMSPHKWLLTCLDCTCLWVRDTHRLTDSLETNPEYLKNDASDSGNVTDLKDMQVGVGRRFRGLKLWMVMRTYGAAKLQEHIRSDVAMAKMFEDAVRSDNRFEVVVPRNFALVCFRIKPHGGGIMTEEDADEANRELMERLNRTGKAYLAHTVVGDRFVLRFAVGSSLQEERHVRSAWELINKTTTEIMQK

SEQ ID NO: 53554 - protein, 113 aa, Zea mays
  Coding DNA Sequence Number=SeqID_10179
MSESTTALHVTRALKASTHEEHIYTCDIYSVGAFSFRRSSKTRLTICFQYKLSQKTSYSRYKLLPYDEGTQDEDRSEEDKGKTSKLSPDGQLRLAMKMMSNDDDRKRKRLFSP

SEQ ID NO: 53555 - protein, 153 aa, Zea mays
  Coding DNA Sequence Number=SeqID_10180
MGKNNKRKREPTPPSEDFGDSEYSEEEFSSESEGSPAPVSPPASSDDSDDSQGIAAEVWTYIRAVERSGLEGSDESAFSSDEEDSDGGEDEDDDDDDGDDDDDGDDDGSNGGGGSGGRGGTRGGSSTGSTRGGSSKGSTRGGGGKGSSSKASG

SEQ ID NO: 53556 - protein, 118 aa, Zea mays
  Coding DNA Sequence Number=SeqID_10181
MWTLVNPRSKKDTVRCRLNRVSDVIGFFYPDYPIMIQDSKKKKKKITTRRSKVLKVQAESTPRASKEILAAPEARVAAKIEGLPPMGVEDAKIGEDFALIAQRVTPLESLPESGIRGR

SEQ ID NO: 53557 - protein, 95 aa, Zea mays
  Coding DNA Sequence Number=SeqID_10182
  Homolog annotation: Hit_ID=Q41865; Match level="QueryCoverage=100%, HitCoverage=14%, E-value=8e-29, Identity=57%"; Hit description =Putative uncharacterized protein
MYDRFNSVTHGHSDAWVRVADEFVALAFAGDARSARCPCIKCRNLVWLKKWSSRIMFSNMALCRTIWNEYPELQNNQAFPEDVREFYKRLEASKA

SEQ ID NO: 53558 - protein, 81 aa, Zea mays
  Coding DNA Sequence Number=SeqID_10183
MQNLTGGDEEAPSREAADLCLNHRFCSRLDPHAGALPAISPGITPSRCGVAPFGIRGSSRTPGCSSTCHCFDIKATLKMLS

SEQ ID NO: 53559 - protein, 460 aa, Zea mays
  Coding DNA Sequence Number=SeqID_10184
MSSRFLMHRVFPPSEPPDGEHQQSFRLVVGGTQLRGSWYLSAIVRLQGFSSGSPAAPPHRRSPKTVTSSSMAGKSKPGCGLCPALSFKDVHHPCWGGGRAEPELYLPRGFVGQPLLQHSRERALTGPARGADFDNARLVDGGRRQLQRVGLAGLAPGAPSRRKGGCRAARAGGPPKTSRAARAAFVFWGCPAFAPVRRLRAEVGAPLVREDPSGDLPASDSLYLSSPLERRRGRGQGCSGVRPEAFAAAVRPPGVGVIVAAAGAGDDEPCVGLLLLRRPPYRVGLFVPVEESLGSIGLAVRGFSCLAKGNPRPLFDEPKPEVAVLALTEAELARKEGLVGRSLAGSSAGGTDAGVELPRPHAGLRWPGRGADVVLRSGDPLTTSPSEARSDLAEGVVDAEEELSSTSYLSQKVMSEPKHQVAHLEVSRPNPSGVVASQGLLALVLGEPYSKFVGKTASAP

SEQ ID NO: 53560 - protein, 286 aa, Zea mays
  Coding DNA Sequence Number=SeqID_10185
  Homolog annotation: Hit_ID=Q6J9V9; Match level="QueryCoverage=46%, HitCoverage=37%, E-value=2e-16, Identity=46%"; Hit description =Putative uncharacterized protein
MGPQIPVGVNPQKSFANRRKDGCLRDRVGVEIVQLHPIEMQNRPHETACRHSEPPLVERDETQHIPRRRGRGGSARRDHPLRLRVTGEGTKQAIGNKGFQVVRRDGGEGPRVARRNDGYPVDHHQAKGVAAEQTRAGDTFGRRSGRRFTSAIRTASKKGTGKGDTPKGILLCEGSGPRALLLIKGSKAGPSEGFDSRLRALGLRAHYWSEVRRLAPRKGSTSASGHSGSAPTTDEGFVGWPPEGFDSRLRTSRARDDSGYVRYMAEARAMLPRYPRTFLRPAGAIL

SEQ ID NO: 53561 - protein, 85 aa, Zea mays
  Coding DNA Sequence Number=SeqID_10186
MSRASVPFATLGTSVPFVFDMSLARLFLYGIGYCISIFNLVWFIPYEASPFALSTFGPSSSLARQVFDESPKLGLVVVSTTSESI

SEQ ID NO: 53562 - protein, 382 aa, Zea mays
  Coding DNA Sequence Number=SeqID_10187
MAQSTVADLGAVGAPDMSGAHRTVPPRLTEPRDSYASGIRIPHSSPSAISNSRSDKVIPRTEQVFTFGSPSAEAILRAFSTESVTGPHGQVKVRVSGKADRAEGLPRLRDTDTSLITFREKQLSPAQTSLLPTKSPDTRNKRKRDATLQRSEGVFSGLSGRRRHTLQDNLILQARPDLASDGDAVRGSPLRRTTSSPRPGNRCQGLLRESGLSRRLGRLPLRPRLINSANSASVRADIATPGLGSSKSSQGVRTTPLHGGRPAEQQKTDERLAAARSDYDDKRPPTFAQTNGRKGRAAMQAACNHTRWTRFSDSQHASMEAQGPRVTQPARQMLHASNCTATCATTAPLRLRNQYRNSRRPSARPSSASLARRSIRPKVGRR

SEQ ID NO: 53563 - protein, 19 aa, Zea mays
  Coding DNA Sequence Number=SeqID_10188
MAAAITQRLPHSAAAQHTY

SEQ ID NO: 53564 - protein, 73 aa, Zea mays
  Coding DNA Sequence Number=SeqID_10189
MGSRHSACSAETGCRGSFVLLLLATLLRGERYLIRDGWFTDDDDDDGYDYGNGKEEGVEANLQEFQDFDEFED

SEQ ID NO: 53565 - protein, 192 aa, Zea mays
  Coding DNA Sequence Number=SeqID_10190
MGRHQISLAELARWDTVMGLLRSQDESQELAEAEPEPLGRARRRSFGRGRGEVRALGRAERSSPSFPGPSPSPSPGSGGAEFAVFWGLAPSPSPGSGGAEFPMRLWQGLTACQSHSVKWHCSRSGAGGAVLLSDRSVERRSDGGLLLSEGKASGEPEMCPPLKGGLGRDRNPSGPLQLYADGGYQLRIRRLE

SEQ ID NO: 53566 - protein, 95 aa, Zea mays
  Coding DNA Sequence Number=SeqID_10191
MGRACGQARRGEERWPETGVREVEIPRPSCSSRAEVGRKERIQVYNGGVAECYVSSGVKGKCALGPFLSILVIECKHKGLNVNLCTWMNKVKIMK

SEQ ID NO: 53567 - protein, 249 aa, Zea mays
  Coding DNA Sequence Number=SeqID_10192
MTSHGSSDEGNAQSHTDGLAREGFPCILWEVLQGAGYTTPPQAEDTIEAIALHGLTTFYGFHPLELSTHPIGLFPAEKEDDPMWKDRVEHAKDIWAIYPGQTAHLTVRCMNALYRLQVMRGEAMSHLMALLEATKITLDNREELVVDLSTEMVEKDLQVEQLSNEIQELEELVGTRENTIEVLEDQLINTQQQLAEANQHLDMHHQEIQDMEANEDVDIEGGEEPASSLDTSGSGRPPSLESSIASFAH

SEQ ID NO: 53568 - protein, 74 aa, Zea mays
  Coding DNA Sequence Number=SeqID_10193
MYGLQLVMRMMVLIMLMVLLVHYSQTGHSAEYVDVYSPLLYTPTPPGFPRSNHCSGEDEVMEEDFQEFQEYNEF

SEQ ID NO: 53569 - protein, 128 aa, Zea mays
  Coding DNA Sequence Number=SeqID_10194
MEYGLTSIGSVGHTYSRNPSLTAPDPPSSTPIYNLCSSVSHMLDLKVFDEMEKDFKAIMKLSGQSPKRMRDLSSLWVSLPSHLILSVSTRLASYALNSVSAQISKPEDWECKPTPKKFFVWFYGTDEM

SEQ ID NO: 53570 - protein, 293 aa, Zea mays
  Coding DNA Sequence Number=SeqID_10195
  Gene Ontology: Mol. function=RNA methyltransferase activity; Biological process=RNA processing
  Homolog annotation: Hit_ID=Q10F15; Match level="QueryCoverage=48%, HitCoverage=42%, E-value=1e-49, Identity=70%"; Hit description=RNA methyltransferase, TrmH family protein, expressed
MEGVWILPNIDEVVEHGFYVHPSDLSRVQAVECNLFGADKMGAKPTSRSYQTQHSPVATPMLLVRAPPSPAPLSAAANFPADLERPLRLRGLSSSRAGVTTATATAKPAASSLGGQKRKQVTSVANPLVKHCVKLRLSAAYRRSCRRLLLVGLAPILEVCSFELEAIDYLLLLDGVEAPEALREFSGDILYVSAAVMKKVSGMQSVDSTEAVAVMHMPNHFRDLGSHQDGDALDGLFSYPKRILVLDGIQEGGSGGAPRAPYCPTAFKHINFYEVHLPLKAGHATTGGEEGHH

SEQ ID NO: 53571 - protein, 38 aa, Zea mays
  Coding DNA Sequence Number=SeqID_10196
MEPGRGLPAADRKWRPPGLAGWEQAGGGGGWEQAGGGG

SEQ ID NO: 53572 - protein, 494 aa, Zea mays
  Coding DNA Sequence Number=SeqID_10197
MQVPCNCTTGTPLFNFDASSTEAQAHTSCNRHTGYYVRKTAPPLAPILRLLDCGTGAATRGNPAHGPTVPTKHIGHGSVSHGRRRDGRYGQKWAGSNGDSRRAEAVVKSSTGSRPLLEQQGSPPPRREDDAPVFRPSNGSRTHNGCPANHLPRRINFAKGILLREGSGPRALLLISGSKAGPLEGFDAALEHSGFMLITDKRFEGWPLGRFRQPPQTTRAPRPLLIRGSKAGPSKGSTAAPEHAERGMTLGTSDTWPRLGLRSRGTLGHFRDQQERFCNGIPSEGGIEPSDPIERDRKPDGRNSGQGSIHSRDTISPRPSPASGRNSRPRQIHASPEGLLKQRAHPRLSRGPARAGFAVKQPWPDCLANRPYRRSIQCKDRLTPYPDARSSVGRAEQPSPASGAIGSSASLDPRARPPPRPRKVVSASPDPKAQPQPRKVVSASPDPSLGLRRSLRLARPWARTDHATGGIIITLPLASSRLWGTRSASHLARP

SEQ ID NO: 53573 - protein, 84 aa, Zea mays
  Coding DNA Sequence Number=SeqID_10198
  Subcellular localization annotation: CTP_CleavageSite=58; ConfidenceScore=5.34e-01
MARGPLVIPHLVVVFLFTSCALVASMAAPTSEQACASLLRFSCCACLRRSMQPPTPCVALNATQPVDVPMLDSFPQCAQPALIR

SEQ ID NO: 53574 - protein, 157 aa, Zea mays
  Coding DNA Sequence Number=SeqID_10199
MTGDKQRQKLKQKPSSKISNTYIKKVDKKTATPYLIKKKKNGKVIAIKANKQVNKGKEAKRIWVPKEIISTMKSTKKVWIPKGNGSSLLPSGLVKILDPNFPPMTKICVSIYLLSSLPFLPSITFVMYFCSKSCILVHRMRRELDQGNEDATPQKKT

SEQ ID NO: 53575 - protein, 1427 aa, Zea mays
  Coding DNA Sequence Number=SeqID_10200
  Homolog annotation: Hit_ID=Q8GRM2; Match level="QueryCoverage=94%, HitCoverage=99%, E-value=0.0, Identity=61%"; Hit description=COP1 -interacting protein 7 (CIP7)-like
MEADAPLDLALFQLSPRRQRCELVVCGNGRTEKIASGSVKPFVAHLRAAEEQASAQPPPLAIRLQLERPAPWFSKGTLERFVRFVSTPEVLELANTYDLEMSQLEGARKIYAQGGTGDATSGGAAENVTASAAAAADITKKELLRAIDVRLSSLKQDLAAACSRASSAGFNPISVSELILFANHFGASRLSEACTKFMSLCQRRPDISPQTAQPAVSSHWKVFDDGNVRGSSSSDMSIDEPLVDLSESKNKSTVSGSGSQVHRLSNIQGLESAAAQQPKPTIQQAVDKQEAETDASPAPSKGELSRRLSVKDRINMFESQKKEQTPSSGNSNSAGTGRVVPGKGEHRRVPSGASMEKLVRRWSSVSDMSIDLSNNESSSLNDKKDNGTPAGTPTSTDLEADSKVRANEDSNGQKDSITSHSWPCQKDNVPMDLATTDLCPPSILSNTLAPHKESIYGDGAENDMVMNSSIESEASFGKEPGVIQGHTRMSNHATSNVSTQDRLKSSAKSVEEALLKNKVIVTSASSEEHVCMIDKEITAVAHEVPVASEQIPQNDIRGLHTKDIHTEAEVTGRKDQPSRSFGRVSGGVNPKPKASSNSRANAKGSSVRDAIASTETEFRDVSLQRNRLPRKSEDVGKKVTAGSDSDCSGRQGKNLSRQSSITDQELNLQARVTRPGKGNQDRHGELQMKANELEKLFAEHKLTSSRRGKPTDVQVESTPMVSEVKPTMVLHETIHTKQVVKESITVNDFDAGELLKMVNNQEFNISTPQKLGILSLEESRGKFYEHYMQKRDAKLKEGWKLQREEKEAMLKAMHDSLERSKAELLTKFSRSADVPDSTYVSHCSQKIPPSRSARKNKDQGVGSFLVEEEMNSDYLSGDGSSRSADSRKHFSNKVASTQNASAGPIHKRSSRTASSGYANRRNPPENPLAQSVPSFSDLRKENTKPSPGVSRVSARVQQKSFARSKSIIEESKSILKEDQSRRSQSMRKNQIPDELKDISSGNDDIYNWAPSRISKNQSEGPFAYSTRRSGPPKPFLRKGNGTHPVIGIAGFQAAAAMMANALQHGDSGDFEDQQEDSPDDAKEEEEYESMEENLRESDFPADSDSENPRVSHEFGNSDDPGSENGDADFPSKTPAIGSTKFTAFTGNVHNPAGDVPAPWSSRLPQLFPYTNDNSDGDAFADSPSGSPSPWNSHSLDEITDADVSRMRKKWGSAQMPFAGVNAPQQPRKDVSKGLKKLWKFGRKTRGGDGLVNDWVSASTASECDDDMEDGRDLVVGSSDDFRKSRMGYLASYDGFVENEVFSEQEQSLRSSIPNPPANFRLREDQLTGSSLKDLGSYSRVFTTSYYLLFSKPQSSLKRVILKMQRRVLSSPCQHSEAREVMPGSGDPQKTPEVCGYTATGYCHPLGPRIHVGRCPRLSPSPVEWSGG

SEQ ID NO: 53576 - protein, 210 aa, Zea mays
  Coding DNA Sequence Number=SeqID_10201
  Gene Ontology: Mol. function=protein dimerization activity
  Homolog annotation: Hit_ID=A2YNN6; Match level="QueryCoverage=55%, HitCoverage=13%, E-value=1e-43, Identity=67%"; Hit description =Putative uncharacterized protein
MIFLQENKDKVEGTQKVKQKLKGHKGRDEQQIYGLKLGFGNKDATRENLITGFGDMNPAEKSVMLQKGSGCCSRVADCLCCMCCIKACNRMNDQCAVLMAQICAALACLGCYECCAEDPLNLEDVDLEGVEDVLVLNSTGPASLSRFLPNGRTRRMIEKPVYGLVQMNEIFGYTNDLCIALQRREQDIVNAMDLLEFTMVELSVLRENHG

SEQ ID NO: 53577 - protein, 116 aa, Zea mays
  Coding DNA Sequence Number=SeqID_10202
MSGVMPDPEDKSTEQKLDFLMDAMNRMLGQLTTMNSRLVSKIQQKPIERTRQGSKQRSKKKPKCSLVWHTGLSGVAPDSVRCTTGQCPVHHRTVSGAPGRIAFKLFTFGFLRRSPL

SEQ ID NO: 53578 - protein, 62 aa, Zea mays
  Coding DNA Sequence Number=SeqID_10203
MPKLPCAQLRLYANLRILYTSSHCGSDPSPKVFPLAGSAKWCSGEDEDNMEDFQEFQDFNEF

SEQ ID NO: 53579 - protein, 163 aa, Zea mays
  Coding DNA Sequence Number=SeqID_10204
MSGAPEDSNSNSSPLGKSKGDSAIIHRTVRCTPDCPVYTGLCPMLQGTASQELASFGKLQRLLRYNSPDMSGVTAGKRLFRRQRLPAAHLLHASAQKSGVPILAQRTLYSTCPVRHRTSRRAQKTELQRSEPNGFGDVAGAPDMSGVHRTVRCTMRQSAPPNG

SEQ ID NO: 53580 - protein, 65 aa, Zea mays
  Coding DNA Sequence Number=SeqID_10205
MARARSYKAPRNLDRTPPHALNLTGAQTHRRSLEDMVAGVTWPSILPPGWTVEWDPASAEEEHEE

SEQ ID NO: 53581 - protein, 181 aa, Zea mays
  Coding DNA Sequence Number=SeqID_10206
MVRADRTRDNGQGLQVRAALKCVTPYVLLSTTGKNNKRKREPTPPSEEFGDTEYSEEEFSSEPEGSPAPVSPPASSDDSDDSQGIAAEVWTYIRAVERAGLEGSDESEYSSDEEDSDGGEEGEDDDDDDDDDDGDGGSSGRGGGDGRGSTKGGNGGSGDSTRGSSRGSTKGGGGSRGRASG

SEQ ID NO: 53582 - protein, 69 aa, Zea mays
  Coding DNA Sequence Number=SeqID_10207
MAEASFHVFDASWHPGARSEHAHCNLADGEYILVPEQGAAQEVAPDPAPEPAPEDLPATALEGKPRFYA

SEQ ID NO: 53583 - protein, 72 aa, Zea mays
  Coding DNA Sequence Number=SeqID_10208
  Subcellular localization annotation: CTP_CleavageSite=55; ConfidenceScore=5.05e-01
MGRRETEHEGGKSVTPQVLPRVSTPGSRQRPPLPVLVARVAPTTSDTDPHTDVTVATSRTSLTTPPELYCRR

SEQ ID NO: 53584 - protein, 213 aa, Zea mays
  Coding DNA Sequence Number=SeqID_10209
MACWKVRTEEAEEPRWLAADTVEEVEASPSAADRGRRGRRHGRWRGAQKRMEAGGSKAEGAVSSGVCREAAVGERRGGGGAIIKVGSACQVEVEEDKGGGDGQAVAAAEAGKKKMLYPRVELTLRLSLPRLELALGPGSSHSSLCPHLELTLGFLSQSSLLRSDSAFSSHPPALSLSHLLSPSSSPSPVSSPRSEHWLGPSRSAHAGAAASCL

SEQ ID NO: 53585 - protein, 134 aa, Zea mays
  Coding DNA Sequence Number=SeqID_10210
MGSRRWGRNRIGLEEGVKIGGWGGASKGKHIFVKDDMTRDDDAVGGEVQTPSTDRATKLSGYPGEEVCEGGECVRLQTKREGPEKMGKIIQNHQIVFIARKTEYRGGPKITVNQVKSLLSPRRRSSKWETSMSA

SEQ ID NO: 53586 - protein, 390 aa, Zea mays
  Coding DNA Sequence Number=SeqID_10211
  Gene Ontology: Mol. function=catalytic activity; Biological process =metabolic process
  Homolog annotation: Hit_ID=A2Y582; Match level="QueryCoverage=94%, HitCoverage=15%, E-value=1e-135, Identity=67%"; Hit description =Putative uncharacterized protein
MWTNIFKIGELQTVSWFQFLPIEPDASAASEKSSKVEQKDALNSIVLSAYLHLQSEGFLSTWTNSFVGPWDPSQGEHNPDEKIKLWLFLPGCHSSVSEIAQPAVNKLRVASNGLWVAPGNSEEVAAALSQALRNSLERSLKGLSYARFGDVFTKYNPPTRNQNSFRRAQPTVEFVFAATEEAIFVHVVISARYVRNLCSDDIEKVLAHSPPSIGEGLPVVVAPSGMLGRLVGCCPSDLVRQVYSSKSLTPNLPGFSQPTVCQLRGQSYYVEVALGFPAASAKKVSEFEHIHIKKELDPVKDAMVGSDGQRKVESPDGLPILERTFIYPPEAVLVPMVHQAFVRFSSKRMCLQGSLGSSSWEAWPFWNFAPSSYFQNRRTVFHYIKKEKKV

SEQ ID NO: 53587 - protein, 90 aa, Zea mays
  Coding DNA Sequence Number=SeqID_10212
MGVEEVRFVLPDGDGKSGAVGAERERGYMVEGVAVFAVEKAVEPARRLRASSAPATSSISAALGGIFLATRGQSESSAKASVSGRVPLGS

SEQ ID NO: 53588 - protein, 36 aa, Zea mays
  Coding DNA Sequence Number=SeqID_10213
MGSRHSACSAEAGCRGKEEGVEADLQEFQDFDEFKD

SEQ ID NO: 53589 - protein, 216 aa, Zea mays
  Coding DNA Sequence Number=SeqID_10214
  Gene Ontology: Mol. function=carboxyl- or carbamoyltransferase activity; Cellular component=ornithine carbamoyltransferase complex; Biological process=amino acid metabolic process
  Homolog annotation: Hit_ID=Q8SA97; Match level="QueryCoverage=56%, HitCoverage=20%, E-value=4e-29, Identity=59%"; Hit description =Ornithine carbamoyltransferase
MAPPVDVAGLRPRLGDVEAPPKPRSSLSSVAEVESEPLGRARRRPSVEARAESEPWGRAKRSSSSSGAEPESEHWVGRSGVRRLLGLSPSPSPGSGGADPSPSPGSGGAEFAIFRDLARVRALGRAERSSPSSGAEPESEPWVGRSGASYGRSVERRGDGGHFGSAGWGARVRIKGLGRAGNMSAVGGGLGRDGNPPRPLQLYADGGYQLRIRSLE

SEQ ID NO: 53590 - protein, 210 aa, Zea mays
  Coding DNA Sequence Number=SeqID_10215
MAHFYWTKTRLYRESPRMQPQKIWMMGFPVLFFNQHAGTSLHRENEIALDGPPCRGSSPVRGQGLDLATPPRAQGRGQRNDHDSRAPRRGRARPQARPHASGRGPTPAAVHPGAGELSHRRGRTAKRRHSVGAASPQRLSAEALATERPGTRREKGEGGGDDWRGFERSAVWEIVAARRAAWGTAGAGGGARTRAAGAAAERDAGPRRAP

SEQ ID NO: 53591 - protein, 64 aa, Zea mays
  Coding DNA Sequence Number=SeqID_10216
MALLPRLDVACAMPPARLVMPARRGPGPAQPWRPRVLPSPSRSGHGGSAPGGDENDGFGIDYGN

SEQ ID NO: 53592 - protein, 230 aa, Zea mays
  Coding DNA Sequence Number=SeqID_10217
  Gene Ontology: Mol. function=unfolded protein binding; Cellular component=endoplasmic reticulum lumen; Biological process=protein folding
  Homolog annotation: Hit_ID=Q5Z9N8; Match level="QueryCoverage=60%, HitCoverage=27%, E-value=1e-48, Identity=53%"; Hit description=Heat shock protein 90
  Pfam annotation: Domain name=HSP90; Domain location=11-225; Score= -230.0; E_value=2.1e-06; Accession=PF00183.9; Description=Hsp90 protein
MEISTKVRPPKLREVIQVPKKVGRDPRFEPVYGSVDKEGLYGLSRVAHVAPSAATRHDVDYLSLLKQIVEFKALLFIPPKAPHDLYERYYNSNKSNLKLYVRSVFISDEFDDLLPNYLSFLKGIVDSDTLYLSNKDKTNEEKSEMEEKKGQYAKFWNKFCKSIKLRQKDIFYITGSSKEQLGKSPFLERLTKKNYEDEPMMLLLCDRDLIYRTTVVSKADMTKFNYRGIF

SEQ ID NO: 53593 - protein, 93 aa, Zea mays
  Coding DNA Sequence Number=SeqID_10218
MWSNYFSGNSVPHGCVWVYGHGNTEKCNVLVTTHLRSGRVSLYIVTLVQSLGVVRDFLLVMSGNGVMTKIGGTALKPRASCGCTHMVVLPGTH

SEQ ID NO: 53594 - protein, 177 aa, Zea mays
  Coding DNA Sequence Number=SeqID_10219
  Subcellular localization annotation: CTP_CleavageSite=49; ConfidenceScore=5.22e-01
MMENFGSKTVQIAMNAVVTSHLPACLYSTAGKKAKRRNCYTRRAVTCTRCAVDRKDQTVTLQGGTDTRSEVGSFLRNELREGVFWTFGFPKLKRLFSRVKLVTKNDLAPRKGLLLGSCFGGPVICFRITLVPLPSAGSKHLRNQVPQQQPVPIDPSPNVNPIPRYLGSTSTPPIPAL

SEQ ID NO: 53595 - protein, 24 aa, Zea mays
  Coding DNA Sequence Number=SeqID_10220
MRLGFIKDQKRWPPLGQTSATAGT

SEQ ID NO: 53596 - protein, 59 aa, Zea mays
  Coding DNA Sequence Number=SeqID_10221
  Gene Ontology: Mol. function=phosphotransferase activity, alcohol group as acceptor; Biological process=nucleoside metabolic process
  Homolog annotation: Hit_ID=Q53LT4; Match level="QueryCoverage=57%, HitCoverage=6%, E-value=4e-09, Identity=91%"; Hit description =Uridine kinase, putative
MLALNAACPNVVLGTGVAGGASSGKSTVCKMIIDQLRDQRVVAVTQVEFILTQELYLLS

SEQ ID NO: 53597 - protein, 348 aa, Zea mays
  Coding DNA Sequence Number=SeqID_10222
  Gene Ontology: Mol. function=isomerase activity; Cellular component =endoplasmic reticulum; Biological process=cell redox homeostasis
  Homolog annotation: Hit_ID=Q5EUD8; Match level="QueryCoverage=85%, HitCoverage=48%, E-value=1e-146, Identity=90%"; Hit description =Protein disulfide isomerase
  Pfam annotation: Domain name=Thioredoxin; Domain location=278-348; Score=22.2; E_value=3.3e-06; Accession=PF00085.11; Description =Thioredoxin
MPPAPIGDGGVGSARDLSSGNGGDCLLHGEGEVQRGGHTTRGEDESAHGAHSDELAAASRLEDSINFYQTSIPDVAKLFHIDPAAKRPSIVLLKKEEEKLTFYDGKFKASAIADFVSANKLPLVTTLTQETSPSIFGNAIKKQARDVAYSRISFLHSKGVFECTRANSSQILLFAVASESSKFLSIFKEAAKPFKGKLLFVFVERDNDEVGEPVANYFGLTGQETTVLAYTGNEDARKFFLDGEVSLEAIKDFAEGFLEDKLTPFYKSEPVPESNDGDVKIVVGKSLDVIVLDESKDVLLEIYAPWCGHCQSLEPTYNKLAKHLSGVDSLVIAKMDGTTNEHPRAKDL

SEQ ID NO: 53598 - protein, 64 aa, Zea mays
  Coding DNA Sequence Number=SeqID_10223
ETLPTHLGSVQGSVQPEAKRESRLMGMFGLQVTMRLMVLGFDSSNGEVEAVEGDFQEFQDYDEF

SEQ ID NO: 53599 - protein, 169 aa, Zea mays
  Coding DNA Sequence Number=SeqID_10224
MRLSQNTLNTKQPAKVSKDDGGDPLGEVPKVHNKPIKRPKKDSKIESKSQPKCALAWRTGLSGAPPDSVRCTRDSNSELLTFGNSGGRSAIIHRTVFGGAPGCPVAHRTVRCASGATTTSRQRSSAEGIKCATVCAIVRAEPDGAPDSEQCLSGGPEDRSSNGRNPTVW

SEQ ID NO: 53600 - protein, 122 aa, Zea mays
  Coding DNA Sequence Number=SeqID_10225
MNNMGILEVSLLMIYFQFTEYIVIPIAFEIQLGPFFFEYVNILQPSSLGFCYAFEDQPWRPKLEKSKNSELVKLDPRSVMILFGIPNLNIMSCMNSTALAEVKEAMGLNSIHLVNLSIATSI

SEQ ID NO: 53601 - protein, 136 aa, Zea mays
  Coding DNA Sequence Number=SeqID_10226
MDTRRRRSGSETTDIWLPAKGNWLLGSMGGITAADELEAFRLGAFSTPTMNRAGVELQKDREDPEAGKQELGHGKQRRLKAQYIWDIPGSDTVSKKRPVITRRLLLKTLTCHVITRRLLLRHRYARSSLGYYPQSS

SEQ ID NO: 53602 - protein, 84 aa, Zea mays
  Coding DNA Sequence Number=SeqID_10227
MMVLRFLLLRKCLCLNLPMLTPMGVLHLSLIPTGVLHLSLIPMEDLLSEPADGDAMDVCADVFDAGLGSSPDSVPRLIDLGARS

SEQ ID NO: 53603 - protein, 72 aa, Zea mays
  Coding DNA Sequence Number=SeqID_10228
MEAKSHHQPNQEGTCKNYATSKAEYTNTQLDLPDVYLAIHTWYQTFLSINLFCQSTHFHLLLNVAAWIKQSH

SEQ ID NO: 53604 - protein, 195 aa, Zea mays
  Coding DNA Sequence Number=SeqID_10229
MPDLEIRGRARRRPLAEARAEFEAWGRAKRSSSSSGAEPKSEPWVGRNGVLRLPGLSPSPSPGSGGAEFAVFRGLARVRALGWAEQRALVRIKVSGHLCIKCSCDLVGRCGDLVRVASRRRQGLGRAGNTFAAGGGSRARRRSSGLYADGGYQLRIRSLEGSLEDMVAGVTWPSILPPGWTVEWDPASVEEEHEE

SEQ ID NO: 53605 - protein, 418 aa, Zea mays
  Coding DNA Sequence Number=SeqID_10230
  Subcellular localization annotation: CTP_CleavageSite=50; ConfidenceScore=5.13e-01
MANVAKSGPAVMVVAGGQEQRSRCQPSLRPIRGQRENPLSRREDDAPVFRSSNGSRTRNGCPANHSPRRINSAAGQAAPPGPGKGDTPKGILPREGTRLRGSLLIRGSKAGPSKGFNSRLRARGLHTHYWSGVRRPAPRKGSAAASGYLGSAPTTDQGGNDLVTESHQREASSPRTPSPGDWVQQITRISPETPCSAPTEGNMALSPLLLAERRRRGVCKKVESVPDRPLALCKGSGAALANPAPAKPLTASTYQPENLGPDRTPGLRPARMRERPDQPKHCARARTRAKPRKTANSAQPDPGLGLGLSPGRRRTPLRPTLGSDLGSAPEDDELRFARPQDSNSALASANGLRLARPRGSGSTSAMEDGLDLDLGGAFASPNLGRGPTTSMGGAIITLLQADSGYGEQDQHPIWLAPP

SEQ ID NO: 53606 - protein, 27 aa, Zea mays
  Coding DNA Sequence Number=SeqID_10231
MGDHVSGRVRRAIYCQVQSGFNIHYAK

SEQ ID NO: 53607 - protein, 46 aa, Zea mays
  Coding DNA Sequence Number=SeqID_10232
  Homolog annotation: Hit_ID=Q8W0X4; Match level="QueryCoverage=95%, HitCoverage=2%, E-value=2e-07, Identity=65%"; Hit description =Putative pol protein
MDPKGEGNRDQRQGRKESFVHEPKDDKSNDSGSGLRRKNGKEEEYK

SEQ ID NO: 53608 - protein, 74 aa, Zea mays
  Coding DNA Sequence Number=SeqID_10233
MGDSVSGLVRGKVCGQVQSGTRLTGYHISRYVFSTFKRLTQTIIIPLSKWIQPIPDLALVLEKSLDFYRNPDLA

SEQ ID NO: 53609 - protein, 69 aa, Zea mays
  Coding DNA Sequence Number=SeqID_10234
  Homolog annotation: Hit_ID=A3A3H6; Match level="QueryCoverage=49%, HitCoverage=9%, E-value=1e-09, Identity=88%"; Hit description =Putative uncharacterized protein
  Subcellular localization annotation: CTP_CleavageSite=37; ConfidenceScore=5.11e-01
MDRSYSAGVRATPVVLNVPVCSRPVFGFFKEKKEAANAASARARLALARRTAAGTAPPAGGASARDLGS

SEQ ID NO: 53610 - protein, 146 aa, Zea mays
  Coding DNA Sequence Number=SeqID_10235
MVDKVQIKDKGKIQLEMSWLEQPRLCSVWEHRTVRWCTGQCPVRQAGSSELAALRNSSATYGYNSSDCPMCTGLSGALKGDRIPYPGGFGHASIKASTKVKSLGGSRLNPKGTRWESVGTSWSTGGDEVAPGADCTVVSASPLKIA

SEQ ID NO: 53611 - protein, 32 aa, Zea mays
  Coding DNA Sequence Number=SeqID_10236
MAGGIELAGAKGKWLAGEEGSPFKFYFTVTSF

SEQ ID NO: 53612 - protein, 28 aa, Zea mays
  Coding DNA Sequence Number=SeqID_10237
MAGGIELAGAKGKWLAGEGCVQGNLAQL

SEQ ID NO: 53613 - protein, 343 aa, Zea mays
  Coding DNA Sequence Number=SeqID_10238
  Subcellular localization annotation: CTP_CleavageSite=18; ConfidenceScore=5.31e-01
MKLWKETSRSSKITTSSRCGLAATPSRLPVKAALSTFLFRTLIYCKNYMDVSDMARLRHTARKSVIPFLPSRLAERPLRRPVAGQSSHLERLHHRLREEQERRRQEQQGSSFSLHQEIESVRSCSPVLPLEPPPAPPLGAPASGVAAGGDPDDGDGDDSSSHDTDFSTNPEPRGVYPDRWEATCLVRCPEDSLQGAEACSEHYSISERDSAEAAMQDAARRALSHYCSVFGGAADGLDLKYYPRRPSGSTGGVIVSPVGEGNPRLSSTVNLAAVLNTELDHALDELSRARAEIALLRAERAERRHLDGGSPAPVGTQHPYRSPQRGHQSYGNPACKTKITLEP

SEQ ID NO: 53614 - protein, 297 aa, Zea mays
  Coding DNA Sequence Number=SeqID_10239
MVTRSANTKQKRWQWKGLGARFPFSGYSLGLQKPKWEASNRDRRHLWQAKQATLHLRHNDRVKKGIEKGDTPKGILLREGSGPRAPLLIRGSKAGPSEGFNSRLIALGLRAHYWSEVQRPAPRKGSTAASGHSGSAPTTDQGFVGWPPKGSTAASDAERGMTLAKSGLGRHRKLRLARPQGSAPISALDDELRLARPQGSDSASASDDGYGEQDRRPIWLAPGSRTRRLAARENGTARISLSLPPTRTLVTPYCKRTRPGRKTTRRPWGPPGVETPTDAKPIKTPMGTNGHLDLDTE

SEQ ID NO: 53615 - protein, 68 aa, Zea mays
  Coding DNA Sequence Number=SeqID_10240
MGATGLPATGGLSAISSVDGTATDGGSVSNAQGSEGAANVQGFHGSGGSGHLPGGGGGSGQNSHSPQE

SEQ ID NO: 53616 - protein, 186 aa, Zea mays
  Coding DNA Sequence Number=SeqID_10241
  Subcellular localization annotation: CTP_CleavageSite=49; ConfidenceScore=5.30e-01
MDGLCAGGHGKMTTRPWQRARLGSWRRRFSLPLVFSLSSLLISCWRLCPCRTPGGRGYYQRRQRHGKDATAADSFFPRWLTFAGIGGTRPVAGARGEDHAGSTDSVEQPDPNLTDPSSRGEEGTTDARVPHGDVRREGVNGLVKAILDQSQKEDGQGQDGLNCIRPRNMFLLFYFPFSVLFQVSSS

SEQ ID NO: 53617 - protein, 87 aa, Zea mays
  Coding DNA Sequence Number=SeqID_10242
  Subcellular localization annotation: CTP_CleavageSite=39; ConfidenceScore=5.25e-01
METCDATLNGCSAPRTATAAAKRSKTDGATPNSVRSGVMVSKGRADADKKGPFARTDDTPELQHLSNTRDKPQVDSIILIALFYVRR

SEQ ID NO: 53618 - protein, 37 aa, Zea mays
  Coding DNA Sequence Number=SeqID_10243
MEGHRYHSVIIRGTLKTPKSQLVTPISTKLQRPDGCD

SEQ ID NO: 53619 - protein, 21 aa, Zea mays
  Coding DNA Sequence Number=SeqID_10244
MAASHALRSAGFFTSRTFQRP

SEQ ID NO: 53620 - protein, 136 aa, Zea mays
  Coding DNA Sequence Number=SeqID_10245
  Subcellular localization annotation: CTP_CleavageSite=31; ConfidenceScore=5.06e-01
SPTPGVVASAHPLVEVGPTVAVMVLVVGTCSQSQGGQQGDTFTDQACNSRRPRRACYNGPERTWASELDEAALWDDFVAGLRLVPIKRRVSLPALSLSDQRLSAKTSSEGWRLCLRPNICPQRDQFDKVIWCRRRR

SEQ ID NO: 53621 - protein, 660 aa, Zea mays
  Coding DNA Sequence Number=SeqID_10246
  Gene Ontology: Mol. function=protein binding; Cellular component =intrinsic to membrane; Biological process=innate immune response
  Homolog annotation: Hit_ID=A2XDE5; Match level="QueryCoverage=77%, HitCoverage=77%, E-value=1e-129, Identity=55%"; Hit description =Putative uncharacterized protein
  Pfam annotation: Domain name=LRR_1; Domain location=420-439; Score =4.2; E_value=52; Accession=PF00560.24; Description=Leucine Rich Repeat
  Pfam annotation: Domain name=LRR_1; Domain location=442-462; Score =11.4; E_value=2.4; Accession=PF00560.24; Description=Leucine Rich Repeat
  Pfam annotation: Domain name=LRR_1; Domain location=464-485; Score =16.1; E_value=0.14; Accession=PF00560.24; Description=Leucine Rich Repeat
  Pfam annotation: Domain name=LRR_1; Domain location=487-507; Score =9.7; E_value=4.8; Accession=PF00560.24; Description=Leucine Rich Repeat
  Pfam annotation: Domain name=LRR_1; Domain location=509-529; Score =7.9; E_value=11; Accession=PF00560.24; Description=Leucine Rich Repeat
  Pfam module annotation: Pfam domain module=LRR_1::LRR_1::LRR_1::LRR _1::LRR_1; Domain location=420-439::442-462::464-485::487-507::509-529
MGKMSCFSGLLSCKKKALEGKNKGAYAKKASGNDCPKVKPVEFMDMVVADAVVDDVSRCRDSVPASACSSRLVAHAAAELARHATGENGDKAAAKRDSSSAAGSSSSGYSSDGTGDDAKSAEPDDGEPCSLGRMSPTAASPKLMRSCSNIETTRSVLTGSDLPAKSRSYDDLKTLPSHGSSSARSGGAVRASPTPASSRTSCSADRVMLKKRSSRQVLPSRSRKLWWQLFLWSHRNVHRRRGASAPTPTTLLWPSPGREGGGAAHRRDGYASDTLGTATADDAKEKGVAVEEEGPRVPTQWVAFSAEASPLDRVSAWVNSLGNGSFHAVDEDGGATGHGGDGASRLRPRPRRSEIVELPTSAAGGRRHPQPQARRRAAAAAAEAGQASGIIVQTLNTFSSVAHIAGMGLQAVPAIAAFSTLRAVNLSGNVIVRITAGSLPKGLHSLDLSRNKIAIIEGLRDLTRLRVLNLSYNRISRIGHGLSSCTAIRELYLAGNKIGDVEGLHRLLKLAVLDVSFNKIGTAKSLGQLVANYGSLRAINLLGNPVQANAGDDTLRRAVSGLLPRIEYLNKQAVKPQRAREVAKDSVAQAALGNAAGANSRRRPARRLGQSPAGSSAAKGRRGSRGSCRLQPSGVVGLQSAAMGNNNNTEVTRSTASREV

SEQ ID NO: 53622 - protein, 74 aa, Zea mays
  Coding DNA Sequence Number=SeqID_10247
MTHSLPFAFASALGQCARLGRSTGRARLEHDQKGAGSDAVGWRLLGGDIVPIDERRISKHTRSGEARADHPERL

SEQ ID NO: 53623 - protein, 82 aa, Zea mays
  Coding DNA Sequence Number=SeqID_10248
MTNTEMRKTGEQLTESRRESASRVAWCSRPPSQVMKKPARRGAVAAVRSRDARTGDGAPDRDIHFTDKRSDATFFRQTVRHA

SEQ ID NO: 53624 - protein, 69 aa, Zea mays
  Coding DNA Sequence Number=SeqID_10249
  Subcellular localization annotation: CTP_CleavageSite=51; ConfidenceScore=5.77e-01
MKTSDWKGRQQMSHSSASFSTDSVTVASSSSSNPASSSSSTTTLAFFGVPPSEEAVVFFPVMVYHLERE

SEQ ID NO: 53625 - protein, 121 aa, Zea mays
  Coding DNA Sequence Number=SeqID_10250
  Subcellular localization annotation: CTP_CleavageSite=50; ConfidenceScore=5.18e-01
MAARPTRLRDCRSPMGKIRAPPGILTLQSPPPTGSATTQRCSLADHRCPRTSTATALERDCGDGFAAELNAAAQDLWSCGNGGTSARLDGMRTTASWRKFYLQRARLNRSDARGFRDGRCA

SEQ ID NO: 53626 - protein, 200 aa, Zea mays
  Coding DNA Sequence Number=SeqID_10251
  Pfam annotation: Domain name=Fn_bind; Domain location=22-55; Score =10.0; E_value=0.077; Accession=PF02986.5; Description=Fibronectin binding repeat
MIFDKEGKKLRDTLKWPGASEEDSTPGMSGQSIMPAQVTIEETKPKGSSIAPNHQGRNKVPSGHQLQEAEGPEALEEDIWRSAYETVLFVLRRRQMPHHKNVPSHDSKAERDCRSQSTAESAKAGSTYRFMLFSLHPRVRRQSTAYGLCRFDKPFSSFLGPAATTTTASTYSSSEPAARRASTRSAAARFLGGVRSSHSQ

SEQ ID NO: 53627 - protein, 49 aa, Zea mays
  Coding DNA Sequence Number=SeqID_10252
MERLTGGPSPPAEAVASEGEGKATDEWGHYSSGSDRERGRGGGADKWGQ

SEQ ID NO: 53628 - protein, 80 aa, Zea mays
  Coding DNA Sequence Number=SeqID_10253
MGLGVCGSLCQGGNEIDGSDYDYGIASPLQPNRILAEYVDVYSPLLYTPNPPGCQHCNHCSGEDEAVEGDFQEFQDYDEF

SEQ ID NO: 53629 - protein, 202 aa, Zea mays
  Coding DNA Sequence Number=SeqID_10254
MPLPSPNIQDAHEDWCSIPTVVCGIVVGHVPLSVINKGMKLCFNEYRSAIAEEPQPPKVAVGRLSVRWRTGQSGAHRTVRCPLPRHHCRWILTVGASDLWARLGVRCTPDRVGEEGDYYNSGMRHGSPTLGVVEALDATRATAVTAEEARTTAKEMEKKATTTAKLAAIAMDKVGFVVVAVASVVAEEANARWIQWHIAIWL

SEQ ID NO: 53630 - protein, 417 aa, Zea mays
  Coding DNA Sequence Number=SeqID_10255
  Gene Ontology: Mol. function=aspartic-type endopeptidase activity; Biological process=proteolysis
  Homolog annotation: Hit_ID=Q651C2; Match level="QueryCoverage=17%, HitCoverage=14%, E-value=2e-17, Identity=63%"; Hit description =Aspartic proteinase nepenthesin II-like
MSMAEEGSEAEEGSEAEALEKDGSKASSPSGPASRLVSSNAAGVGSLEVGAATDTSNASRQGLDLGKKGPGAMSMAEEGSEAEEGSEAEALEKDGSKASSPSGPASRLVSSNAAGVGSLEVGAAADTSNASRQGLDLGKKGPGAMSMAEEGSEAEEGSEAEALEKDGSKASSPSGPSGLEDEELQVQDAVASGSKRSKDSAAAATRSANVSSPSVVHSLPAILPAPAQQIQRLSKQDFPLEKAVLVCIPYGFHRLKSLEYSKLVSQCLNTEWTATIGQSEETEELSKITLENKDIQLDINIREESRSSSQQGNFDTEGTSSSEAFLLGTVASEKMLEKLKHKSGRCEPALEKAIVELEHDNFMSGLKVVFDRERKVLGWKNFDCYSVGNSRSNLPVNPNPSGVPPAPGLGPNSYTHS

SEQ ID NO: 53631 - protein, 481 aa, Zea mays
  Coding DNA Sequence Number=SeqID_10256
  Gene Ontology: Mol. function=protein serine/threonine kinase activity; Cellular component=plasmodesma; Biological process=protein amino acid phosphorylation
  Homolog annotation: Hit_ID=A7NXD5; Match level="QueryCoverage=99%, HitCoverage=100%, E-value=1e-162, Identity=61%"; Hit description =Chromosome chr5 scaffold_2, whole genome shotgun sequence
  Pfam annotation: Domain name=Pkinase; Domain location=9-278; Score =110.5; E_value=5.1e-30; Accession=PF00069.16; Description=Protein kinase domain
  Pfam annotation: Domain name=Pkinase_Tyr; Domain location=9-273; Score=-141.1; E_value=0.0009; Accession=PF07714.8; Description =Protein tyrosine kinase
  Pfam module annotation: Pfam domain module=Pkinase::Pkinase_Tyr; Domain location=9-278::9-273
MEHVVGGKFKLGKKIGSGSFGELYLGVNMQSDEEVAVKLESVKSRHPQLHYESKLYMLLQGGTGIPHLKWFGVEREYNVMVIDLLGPSMEDLFNYCSRKFSLKTVLMLADQMISRVEYMHTRGFLHRDIKPDNFLMGLGRKANQVFVIDYGLAKKYRDLQTHKHIPYRENKNLTGTARYASVNTHLGVEQSRRDDLESLGYVLMYFLRGSLPWQGLKAGTKKQKYDIISEKKMLTPVEVLCKSHPSEFTAYFHYCRSLRFEDKPDYSYLKRLFRDLFLRKGLLMDWVEMCLLLKWVYFGWVGIGYQLDYVFDWTIMKYPQFRDKNKFQSSGKTSGLAGPSAERTNRTAAEALFRRTRSGSGHNREHTKHRSLLESLMPSKVTVDSDKIRPSSSSRNGSTSRRAVLSSSKPSSSGDPSDPNRVGGLAPSSSIRPLSAQRAHHSGGTEIKSLSWSKMGRSSHDDAIRNFELLSLCADKRKIRN

SEQ ID NO: 53632 - protein, 54 aa, Zea mays
  Coding DNA Sequence Number=SeqID_10257
MQLVLLSMNNYHLKGIKKMAILPEVHGFASASYCKYSSYEKPTVVAFVPAVTDE

SEQ ID NO: 53633 - protein, 298 aa, Zea mays
  Coding DNA Sequence Number=SeqID_10258
  Gene Ontology: Mol. function=transferase activity, transferring hexosyl groups; Cellular component=integral to membrane; Biological process=polysaccharide biosynthetic process
  Homolog annotation: Hit_ID=Q10MQ0; Match level="QueryCoverage=54%, HitCoverage=35%, E-value=6e-63, Identity=72%"; Hit description =Glycosyltransferase 5, putative, expressed
  Pfam annotation: Domain name=Glyco_transf_34; Domain location=163 -295; Score=-30.5; E_value=1.7e-05; Accession=PF05637.3; Description =galactosyl transferase GMA12MNN10 family
  Subcellular localization annotation: CTP_CleavageSite=40; ConfidenceScore=5.35e-01
MLCPSSRPPPRHPRLPTLSPSAPLPVRPLPLPCSPCPLTLASAAHPHRKSHPALPIPARRERGGERRHHSWDVFADMCSLAAIRGMSHPHRALAEHHDARSRASTTTTSSLSSSARRDDDPDPPPRSLRDPPYTLGPKIFDWDEQRAAWHRRHPETPPFLNDIKPRVLLVTGSSPKPCENPVGDHYLLKSIKNKMDYCCVHGIEVFYNMALLDAEMAGFWAKLPLMRALLLAHPEVEFLWWMDSVPCSPTWHSSSRGSAALRAVQPHHARLGRDGLRRQELDRAQHRQLLAAQLPVVA

SEQ ID NO: 53634 - protein, 106 aa, Zea mays
  Coding DNA Sequence Number=SeqID_10259
MVEHAKVEEEMAHRQEASAIATAALNANKEGSREPPLPRLFSHTSLRRRLIFLSLSCLPRCLQRRMVAESSGSGSRRLLMREGRCPLRWCGRIRVSETEAGKEMES

SEQ ID NO: 53635 - protein, 277 aa, Zea mays
  Coding DNA Sequence Number=SeqID_10260
MESGQRSLRGHLDKTEASTHVRVDRTHAFLVDAYRQLGARTAPFDTSGEGVGLRFLGWLQEELELLLSIMKGLMSFASLITCEGATNALSREGCRHFKVFDRATEDFERGIFQVEDKVLKRSAGALYDRMWGPHGRDTVWERSDQALEQVPTFGPAQATPTEVDINFLAAASAVPVNDNSPGSETESWSSDVGDFEIPFSWIEESSDEDLDYFAMLDVVTAESLPQPEARKVSAPPAGAMAEEHCRRKVVSKHNVGEMSRSGRHRRMGTERSRLRLD

SEQ ID NO: 53636 - protein, 206 aa, Zea mays
  Coding DNA Sequence Number=SeqID_10261
MSTMSNVTCSLRALGATPNDSGSSILPIGKIPACYPAVDHHGVCVWNAAQVNVPGIEEAVVVEPAPLNGAGKRGWVDAGFVRCGRVVGDVFAVKQATEPSQLLCSSSASSSYAVATALGGIPDDGWALWQGADWLWCAPTDYCDCLYRSLAAPVWSRFCWTAEDPWASSEIQPCIDGAPQTWHTYQIAGIVLRDNSARASVSGRYP

SEQ ID NO: 53637 - protein, 155 aa, Zea mays
  Coding DNA Sequence Number=SeqID_10262
MGKGTKRKCEPTPPSEDFGDSEYSEEEFSSKFEGSPAPVSPPASSDVSDDSQGIAAEVWTYIRAVERSGLEGSDESEFSSDEEDSDGGEDEDDDDDDGDDDDGGDGDSDGSNGGGGSGGKGSTRGGSSTGSTRGGSSKGSTRGGGGKGSSSKASG

SEQ ID NO: 53638 - protein, 72 aa, Zea mays
  Coding DNA Sequence Number=SeqID_10263
  Subcellular localization annotation: CTP_CleavageSite=48; ConfidenceScore=5.18e-01
MAPKRATSKATPSIDDAAKAALLVEKKGKALVDTTPKRPSKMTLSTARDSARTTLSMFWVRPHTRGYPSRCF

SEQ ID NO: 53639 - protein, 38 aa, Zea mays
  Coding DNA Sequence Number=SeqID_10264
MAPSHRPAHHPPEAQPPTCDTCSSMMRPCKSWHISKSA

SEQ ID NO: 53640 - protein, 103 aa, Zea mays
  Coding DNA Sequence Number=SeqID_10265
MWFAYLCLALGAPEHRGAALRRSTATGAVSLATTRDGNGYPLPETRWVFALLEYGFGSISLPMGLLMGSNENPTVGMGNLLGTRNPHGYGFGQNFILVMGMGF

SEQ ID NO: 53641 - protein, 230 aa, Zea mays
  Coding DNA Sequence Number=SeqID_10266
  Pfam annotation: Domain name=zf-CCHC; Domain location=74-91; Score =27.0; E_value=6.9e-05; Accession=PF00098.14; Description=Zinc knuckle
MGQEEPTSSRPYAFACDAKKKGKKKAPTPSSSSEEEEEESDDDEDNQPPTSSSEDEETVKDLLFNIDKKKQRKRGCFTCGEKGHFRDNCPNMAEPKKRRSKGKTLTGVKTWDDSSSEDDPPWTRSHCSSSRSSRSSHKCLMARGDSNQGQQASQQRKGGQTYLGAKGDYLNHENHQEGLDPKRKVRSPKDFGEFGDLAKLGCISWDASYWIKSIAKWVSEYFGPKFPTVD

SEQ ID NO: 53642 - protein, 299 aa, Zea mays
  Coding DNA Sequence Number=SeqID_10267
  Homolog annotation: Hit_ID=Q5GAU8; Match level="QueryCoverage=10%, HitCoverage=23%, E-value=2e-07, Identity=81%"; Hit description =Putative uncharacterized protein
MMDAEKEVATERRMDSPPRCDCRDRAVIDEDHEKQFVCPNIDYETRKCSWESYDDKGEVMRTIESKRLMGQKMRCGSQLVDSYINDRICDMRRDAKCAFYDNPKRAKYRRLKAADEKRAQDAREWEAARAEKQMLDNLADRLKGKIGCGVNYLADEAHARYVQDKMATVELMEEEEDTSRLSELIALAEAGLHGEEEDDTSRLSELIALAEAGLRAQEEEDEFMSQAAEEVEAAYYKKKSDEAEDELLSQVADEAEANYYKRTVDKCDAGQCSKWNEVVVEDCVTDDSEDELLIDCDCD

SEQ ID NO: 53643 - protein, 64 aa, Zea mays
  Coding DNA Sequence Number=SeqID_10268
MSAAGLVVVAKGATAKGDIGTSTDLWSRFCAVAGGGGELASTITAAGVAASAMQHLKFVTAFAE

SEQ ID NO: 53644 - protein, 142 aa, Zea mays
  Coding DNA Sequence Number=SeqID_10269
  Subcellular localization annotation: CTP_CleavageSite=40; ConfidenceScore=5.07e-01
MFLISWSNSSSWGVGLVAFLFWLRASQREKVSWFESSGCRAAAPVAEAFFGGMTKLISILLSWKNRNDIKLQMYLRLERRSPTYNFGSAPTFVFFVLLHIVVLIRVRRYLFMYYTPETLLNHVFEDLRKTKAPNRSSTTIVD

SEQ ID NO: 53645 - protein, 71 aa, Zea mays
  Coding DNA Sequence Number=SeqID_10270
  Homolog annotation: Hit_ID=A3AMG6; Match level="QueryCoverage=80%, HitCoverage=19%, E-value=6e-24, Identity=91%"; Hit description =Putative uncharacterized protein
KYPSFDYISVTPPYLEVNYSTLLAQLARSPLVGKDCFILVEYPLKTDMAESCGNLVQSSLTYYQMLQIADR

SEQ ID NO: 53646 - protein, 292 aa, Zea mays
  Coding DNA Sequence Number=SeqID_10271
  Subcellular localization annotation: CTP_CleavageSite=34; ConfidenceScore=5.41e-01
MGGGLRNNRRPADGSPSPAPAAATTTPSTGGQTVAATASGRTLLQPCPRPCRRSRGEDKYKESEARSADGGGDPIGDGDFSSRLRLGTNDRGRQPAGRSPLGSSRTSRAPTSSRRLRTGGGAGGQADEPDALGLTTPAVDRPRVVEVRPARRASERPLPRTPQERVTHEPAWEVELRLSPASTPARMMNILEAEGGTKIAARLASPHPGAGGHRLGDRERGIPQKGSFPEKEPGSEPPLLIRGSKAGPSEGFDSRLRSRGPYTHYWLEVRRPAPRKGSTAASGYSGSAPTTD

SEQ ID NO: 53647 - protein, 226 aa, Zea mays
  Coding DNA Sequence Number=SeqID_10272
  Homolog annotation: Hit_ID=Q10D93; Match level="QueryCoverage=72%, HitCoverage=57%, E-value=1e-47, Identity=56%"; Hit description =Expressed protein
  Pfam annotation: Domain name=Cons_hypoth95; Domain location=135-226; Score=-54.5; E_value=0.0039; Accession=PF03602.6; Description =Conserved hypothetical protein 95
  Subcellular localization annotation: CTP_CleavageSite=41; ConfidenceScore=5.58e-01
MASSTLPAYPFRMSLPGLRAPDPAKVKHVSVRAPARRLPVAASAAPSGAAAAAARERRRFLESYGLNPNDFEEDAEENPRVYSNYSELIRNDCRCELEERKDRRRRRQSGRGEQTAEAAVTPAKVEEPRETHKMLQVLGGKVRRRKLLSPKDRNVRPMMEVVRGAAFDILQAHFVEMDPWVISEVLKPNLECTGFIDVSQIHMLRVEKFLANAEKSHGTNLLRKHI

SEQ ID NO: 53648 - protein, 220 aa, Zea mays
  Coding DNA Sequence Number=SeqID_10273
MPMTHNSSVVDCGSIPFKLGVSFAKMHREGVSTDLGHPIRLLRSRLDLHIYTTSAHDGHRIRDQRPRFNASCDPTSTVYRKINDSAALAQIRSPINDPTVQHPSDGASVSSSLGYRQRPGAVSGTADDGHAMAIPMDAAEGTGSAAAATRVQSPDDSSRGRQTTAHSSNFGLWVEGHRMRSFYSAQVRGPSWSPISQPYRDEIAANQEMGQIEGPRPRSG

SEQ ID NO: 53649 - protein, 97 aa, Zea mays
  Coding DNA Sequence Number=SeqID_10274
GAGYATPPQYAVQLFEKHRVPRCRDTIEVIALHGLTTFCGFHPLELSTHPIGLFPAKKENDPMWKDRVEHAKDIWALYPGQTAHLTVRCMDALYRLQ

SEQ ID NO: 53650 - protein, 215 aa, Zea mays
  Coding DNA Sequence Number=SeqID_10275
  Subcellular localization annotation: CTP_CleavageSite=51; ConfidenceScore=5.56e-01
MLTLSVRNRPPTASAANCRRRWPPWRRRRLTSGASWRGRGGRPTKPSPKSRLARAEGNIAKELAGELQRRLTALESRAEGAEAAMRAEAERTRTQLMTAYRELGVRTGDFEVPEREAGLRCLEWVQEELQELPTVLAGLMAFTSLVTCEAAMNALSREGCRHFEALDQADEDFGRDIFEVEDPVVKESAGALYDRMWSSYGCEVVRARAEAAWAQ

SEQ ID NO: 53651 - protein, 134 aa, Zea mays
  Coding DNA Sequence Number=SeqID_10276
EDRLPGCSDAGIDFLLAGCSDGTAAAAEETASGTAAIGSDADAGAGSGGEGVVHQLIVEGINQSSQEAGEKLLLPHYHQSLGHMVATKVIPELLPSDSFRVGMGGEVLVDNDDEETKEDEATKEVESKEEVSEE

SEQ ID NO: 53652 - protein, 34 aa, Zea mays
  Coding DNA Sequence Number=SeqID_10277
MGAQLLDPTLTPTTMVHLNPKGKIHFSIPSNSVL

SEQ ID NO: 53653 - protein, 206 aa, Zea mays
  Coding DNA Sequence Number=SeqID_10278
MTNSTLPDPGLGLGLGPGRRRTPPRPTQGSDSASAQEDDELRLARPRAQTRARPRKTTNSASPDPGLGLGLGPGRRRTPPRPTQGSDSTSASADGLRLARPKGSDSTPTSEDRLDLDLGGASTSPDPRLRPTTSQEAPSLPYPKLTQATGNKDRHPIWLAPINKLQRSSDGNDTTRTGCQNLSGCHDGMALLQRVGRAGKDGTALA

SEQ ID NO: 53654 - protein, 235 aa, Zea mays
  Coding DNA Sequence Number=SeqID_10279
  Subcellular localization annotation: CTP_CleavageSite=28; ConfidenceScore=5.27e-01
MQAACNRTKSAHPFDSNAPSMGAQAHTSCNRRAVYYVQGTAPPLAPLPCLLDCGTSTTTRGNPVYDPTAPARHIGHGSVSHGRRRDGRYGQKWAGSNGGGRRAEAAGPEKGDTPKGILLREGNGPRAPLLIRGSKASPSEGFNSRLRALGLRAHYWSEVRRSAPRKGSTAASGHSGSAPTTDQGGSGAALANLAPANPLTASTYQPENLGPDRAPRLRPARMREQPDRPKHRETL

SEQ ID NO: 53655 - protein, 51 aa, Zea mays
  Coding DNA Sequence Number=SeqID_10280
  Homolog annotation: Hit_ID=Q6QP51; Match level="QueryCoverage=78%, HitCoverage=18%, E-value=1e-07, Identity=70%"; Hit description =Putative growth-regulating factor 1
MALPPILLAKSRQGRSDRSHFAAPLTDLTGIQRRLPCSDCRATRQSEVDNG

SEQ ID NO: 53656 - protein, 84 aa, Zea mays
  Coding DNA Sequence Number=SeqID_10281
MDSASPDPRARTQPRPRRNRHLAQTRVQTGHVARGAIITLPLASSGYGEQDRRPIWLAPGSGTPPTATTSHEQGINTSPIATTA

SEQ ID NO: 53657 - protein, 142 aa, Zea mays
  Coding DNA Sequence Number=SeqID_10282
MYGSTVGMAGIARSTCAGGCPRRRRESENGSVDYPVHALPAGFCDSDDRGLAYPAKQASIPRLGSFTEVCSLVSEGWTGLGKARLAGPRRQGLGWPRTRRARANGAHPSRKRANLGKNPARVFSWHLGLSLIRELPWQIWPK

SEQ ID NO: 53658 - protein, 697 aa, Zea mays
  Coding DNA Sequence Number=SeqID_10283
  Gene Ontology: Mol. function=nucleic acid binding; Cellular component= intracellular; Biological process=regulation of transcription, DNA -dependent
  Homolog annotation: Hit_ID=A2XCJ6; Match level="QueryCoverage=72%, HitCoverage=91%, E-value=1e-120, Identity=43%"; Hit description =Putative uncharacterized protein
  Pfam annotation: Domain name=zf-C2H2; Domain location=485-510; Score =21.5; E_value=0.0032; Accession=PF00096.17; Description=Zinc finger, C2H2 type
  Pfam annotation: Domain name=zf-C2H2; Domain location=513-532; Score =1.6; E_value=7.6; Accession=PF00096.17; Description=Zinc finger, C2H2 type
  Pfam annotation: Domain name=zf-C2H2; Domain location=538-562; Score =20.1; E_value=0.0083; Accession=PF00096.17; Description=Zinc finger, C2H2 type
  Pfam annotation: Domain name=zf-C2H2; Domain location=568-592; Score =22.7; E_value=0.0014; Accession=PF00096.17; Description=Zinc finger, C2H2 type
  Pfam module annotation: Pfam domain module=zf-C2H2::zf-C2H2::zf -C2H2::zf-C2H2; Domain location=485-510::513-532::538-562::568-592
MTSGVGRQEWGGVRRRHVENGVSSRTGSSDVEKNEAGQIDGGHVQLCSVGLSLEQLPTPYPTGTTDHRVRRLPFASPNPAADQRHAHPPEGLDAIKHKGYIADRVLESVVRADERVGLPERPPVPEVKKCKIDHVPPVNKACVGLQVVKLAAKPEGAAPASEDAADPATKAGVFVVNDAAIEQGVKCIASLSGGASKMEVTVENSLANGPTTELEVSNSLANGPTTELGVSKGTSLANESADLPGVTCIMPEVTDKPVTDLGVISTVVEVSDTGPVVHETTELESAGEDYIASEATAEPEDAGRASCNVDDTAALDEPQPPNCDLYLGNVQDGNAIDTVTSTLQPSRCDAAEGGGSVNFTTNIPVRARGPTFKGGVLKDKSVAPSVLLVLDVLTRSIGKSGRTDVICYARRTGKRKAELLKVKKENIDLEDGVICEKEETLVSTDRCECVLSTAGSIDVKLADIKKDLMDNSAVGKVKKMKRNRFECNIDYCHMVFKTEAELAVHKKNMCTVSSCSRHFRSHRYLRRHQSAHNDDMPYKCPWDGCNMAFKWSWDRAEHFKVHAGAKPYKCTTPGCSKIFKFVSDFTRHRRRCKPQRCLFYAFQEESTKYYVTLSIWKLLCCSSLPRKKDVSKLRGRRNVKNTNILNDNTLTDEVKIDLNMLHVLVLNRVDREVDNADIVVVDKCAPGERVVNPGGVD

SEQ ID NO: 53659 - protein, 358 aa, Zea mays
  Coding DNA Sequence Number=SeqID_10284
  Gene Ontology: Mol. function=nucleic acid binding
  Homolog annotation: Hit_ID=Q60EK4; Match level="QueryCoverage=74%, HitCoverage=54%, E-value=2e-18, Identity=26%"; Hit description =Putative uncharacterized protein OSJNBa0032D15.11
MARRRSQKNKKTPPTNATQKEVTLEILFDDCSNYDSWSTSVINAFRTIHPQLEQIIDKSIFPSSFNGKINSEEDQRCYRLNYLAFDILNNSLSKEDYRAFISNYDESIPDAHDIWTRIKIKFDESKHNSSFNASTSFSFCDTNPCKEEGENERWRPNDESTSPKANENDSGSTNEDEEEERSFVHLYARLSQEDKAVMLKLLERAREQSKARQRLEDILSIKMQHFDELTKEHEELKCSHVDLVQSKSSFELEFAGTNDDSYQKLKEENERLKKSLTQLKGKCIAQPSQDNRDHMVKKLETGTTVACTTSLEENVKDLRIAMRRKQKMKFNTSSKSLNHASTKGNIQGNPKLQLVLER

SEQ ID NO: 53660 - protein, 147 aa, Zea mays
  Coding DNA Sequence Number=SeqID_10285
MGGVVEDGGCRVYKGLKLSRQARRLKENVPIADNDKRKDEMGEQDGKKNAATRAGVEEHNGCVGARLSPFVFSSRTRLWTLWKDENGTDQGTAEQSEGPRPVVGLVVAAPREVMGAAPTISAHDWLGRGGKEGEGAPAATGRPVATG

SEQ ID NO: 53661 - protein, 255 aa, Zea mays
  Coding DNA Sequence Number=SeqID_10286
  Subcellular localization annotation: CTP_CleavageSite=85; ConfidenceScore=5.23e-01
MQPGCTPPLAVTQDGDLQFDGGGKRAGPRPLPLPQPQGFSSSGLGRGVCRVGRPPPRGSVTLFFPRRLGEKGIYQLCGGFPQACRARRTAAAQPGCSIPSSVRPCPGLPRADSRISGSPSTSRAARAALMFWAAPARARTCRRASRRLAPAGAVLRWWQPEKASLSMRLPTPAAPLGLCLQPEWLVLVLGEREPPCRSARPEAAAEAASPPGAEVTIAVAGTGDGEPPVGLLLLRRPPNRVGLLVPAEVEPEFRL

SEQ ID NO: 53662 - protein, 144 aa, Zea mays
  Coding DNA Sequence Number=SeqID_10287
MAQPAPASQAAETMKKTLEDLRAEQRIGVQHITAWADEASSALVPLGVSPIPVSKQPVSISDALPVLDFTADRLRRLDQILGARLEAEGSRLCRAVIEYILTCFRSHDPAISLGPVIAGPVADTEDAARGSVQDAVDVVAQRFQ

SEQ ID NO: 53663 - protein, 432 aa, Zea mays
  Coding DNA Sequence Number=SeqID_10288
MPTPDLAQQLSVPRARARELRAVLPPLVVPGDRRGRGDTDCVVPTDLSLGTRPLIRTSLRNARKQLAGSGRLAPRPRARRGALALLQYHHQSRRHHHHHLACHRHRGSSIDNGNSSKASGRLASKVIGRSRAPSGAIGPPGSYRYCRGSVVGPPGSHQEFSSSAAGPPGSGWDCRGSAVGPLGARQKSRSSAVRPPGFSWYCRGSTASPPGTSRAPSSCSTANGYGRPNDGGNVEYAFGNGGTHREPKVILGRRLQAGAGPETTPPPLPWVLSRAHQALWETEAVILREWEALETERHRLGDWCTQLEQRTKAMSCQFASERSELERGREDLREDLEKVIEREREAAREERRLLKKKEHLDQREVVVTEYHEKLKAYNAMLEEQWDKQTATEATLQKLQQELDNKAGKISLAEENLRAKGVFLEERASDLIR

SEQ ID NO: 53664 - protein, 147 aa, Zea mays
  Coding DNA Sequence Number=SeqID_10289
MCGSPSGMVGVGRSTCAGGDARRRRGVRPAHGVIVQLNGSESFTRDQGRGGRPKSGEVDLGLPVKSCRVRGLGKLHGPLAGLAEALARLGDGWSGLATVAEALATMAGGKELAGAKEGWLAGDEIWSPEIRYVSLLKPEANPGFCRV

SEQ ID NO: 53665 - protein, 398 aa, Zea mays
  Coding DNA Sequence Number=SeqID_10290
MTASVKGPIKGDTPKRILPREGTRLRASLLIRGSKAGPPEGFDSRLRSRGPYTHYWSEVRRPAPRKGSTTASGYSGSVPTTDQGFEGWPPKGDRVRQITRRYFWACLWAPSRPLTNGARTSTRITRSQLTGDTMFGAHRGQHGDFPPSLRKGDARAYVKKPSLSLIASRPVQRLGGCSRKPGSGRTVDSVNIPARELGTRPYTRATASSHEGTTRPAEALRKALRPRRSETTPPRPRGLHPAGALARTHRNKMQPRKAGPLAKKCDESLQASANTPFKARGLLSGTIIRGTLKTPNSQLGSDSALASADDLRLARPRGSDSASATEDKLDLGFGGASTSPNLGHRPATSTGGAIITLPRADSGRRKQDRLHRSSDGHDITPAGCQNLSGCHNGMYLGR

SEQ ID NO: 53666 - protein, 306 aa, Zea mays
  Coding DNA Sequence Number=SeqID_10291
MARWPRLSGTSGMNYPHTNKGRGIAGSERLATSGGDHISTGGGGHPCTDDSPSSGDHLSTCAAAKRSSPPSSYGGGGGDNEAIKAKEPEVRQQVTLTVSPAEATTSAVGSLTSVNNSGHLRTSAVPANGGRPSAREEVFAPVLTAGVRTRPSKNADAAPAAYDILYDPQCDRRRGRSRGCARPTHGATVTHAVDGQPRPVQAAGGSAGGGTKAAQAEEPDTWQLTAPQTAGPTYPEFASFARLANALLPRMLEEEAGRQPMRRAGPQLGSPSSPARMMNILEAEDRGEATARLASLHHKAGSHPCG

SEQ ID NO: 53667 - protein, 79 aa, Zea mays
  Coding DNA Sequence Number=SeqID_10292
MAGGRLRRRVGGRLPPPKAGRRGGPPTRAGGTGKGGYPEKDPSPGRNQAPSLPTDQRFEGWPLEGFDSRLRSRGPYTHY

SEQ ID NO: 53668 - protein, 31 aa, Zea mays
  Coding DNA Sequence Number=SeqID_10293
MSGFRVSLYMSPFGYKREEMRMPYYMLRLMN

SEQ ID NO: 53669 - protein, 149 aa, Zea mays
  Coding DNA Sequence Number=SeqID_10294
  Gene Ontology: Mol. function=protein serine/threonine kinase activity; Cellular component=plasma membrane; Biological process =protein amino acid phosphorylation
  Homolog annotation: Hit_ID=Q330Q4; Match level="QueryCoverage=87%, HitCoverage=22%, E-value=7e-59, Identity=86%"; Hit description=IPK
  Pfam annotation: Domain name=efhand; Domain location=3-31; Score =14.9; E_value=0.31; Accession=PF00036.23; Description=EF hand
  Pfam annotation: Domain name=efhand; Domain location=39-67; Score =28.7; E_value=2.2e-05; Accession=PF00036.23; Description=EF hand
  Pfam annotation: Domain name=efhand; Domain location=72-100; Score =31.0; E_value=4.4e-06; Accession=PF00036.23; Description=EF hand
  Pfam module annotation: Pfam domain module=efhand::efhand::efhand; Domain location=3-31::39-67::72-100
MNKFKKKALLADIDGNGTLDCKEFVTVSIHLKKIRSEDHLPKVFSYFDKNGSGYIEIEELKEALSPRGDQKAIEDIILDVDIDRDGKISYEEFELMMKAGVDWRNTSRQYSRAVYNTLSRKMFKDASLKLGSNNGPLAAAAVKEQQDVD

SEQ ID NO: 53670 - protein, 237 aa, Zea mays
  Coding DNA Sequence Number=SeqID_10295
  Homolog annotation: Hit_ID=Q2QVG6; Match level="QueryCoverage=59%, HitCoverage=73%, E-value=5e-49, Identity=64%"; Hit description =Expressed protein
  Pfam annotation: Domain name=DUF1685; Domain location=104-200; Score =90.3; E_value=6e-24; Accession=PF07939.2; Description=Protein of unknown function (DUF1685)
  Subcellular localization annotation: CTP_CleavageSite=56; ConfidenceScore=5.59e-01
MHQGGSHIPPPPPSASLRTAHSPASIRSGVSKRRHHAAEMWISDSAFVEPSSSSPSASASPPPSPPPARLLRQRNRRRRRSSRKQGSASAVDGVADPEAEDVWRGAQWEAAWPARRDSKPVVLAGGDDAVGRSRSLTDDDLEELKGCADLGFGFNYDEIPELRSTLPALELCYSMSQRLQLDDEKPQQHEAAAPDAATPSPPVTNWKISSPGDSPDEVKARLKYWAQAVACTVRLCS

SEQ ID NO: 53671 - protein, 244 aa, Zea mays
  Coding DNA Sequence Number=SeqID_10296
  Gene Ontology: Mol. function=peptidase activity; Cellular component =nucleus; Biological process=cell division
  Homolog annotation: Hit_ID=Q6ZHH8; Match level="QueryCoverage=81%, HitCoverage=20%, E-value=1e-86, Identity=75%"; Hit description=Cell division-associated protein BIMB-like
  Pfam annotation: Domain name=Peptidase_C50; Domain location=1-128; Score=-127.3; E_value=0.046; Accession=PF03568.8; Description =Peptidase family C50
  Subcellular localization annotation: CTP_CleavageSite=32; ConfidenceScore=5.04e-01
MSRPLHSLPTSLPRAFFHHFHGVPDPFSFSFACKKGVAGNSPKADELVLALTNHDLFLYFGHGSGTQYISSKEVEKIDNCAAALLMGCSSGTLHCKGSYAPRGAPLSYLFAGSPAIIANLWDVSDKDIDRFSKALLNSWLHDKSLDGNNCSKCCQLTMELESMSIASKENGKARRQGTRGKKQQHINDSTKCCSCKQRRIASYISEARRACRLPLLIGASPVCYGVPTIIRKKVMTDSTTREMT

SEQ ID NO: 53672 - protein, 97 aa, Zea mays
  Coding DNA Sequence Number=SeqID_10297
  Subcellular localization annotation: CTP_CleavageSite=65; ConfidenceScore=5.45e-01
MKPQPQCDTRPQRWSGRRRVVASRTKRRSWQPGTRRSQSWTGACRGSSPIGVGVDHQLRSRRGPKKAKVEGVVKVAKNPLESNEVGLPRGVHVKAHL

SEQ ID NO: 53673 - protein, 31 aa, Zea mays
  Coding DNA Sequence Number=SeqID_10298
MSGKELHGLEILDKKCLVYRGDKDDGFDMVM

SEQ ID NO: 53674 - protein, 83 aa, Zea mays
  Coding DNA Sequence Number=SeqID_10299
MVAHGPSRIKGDQGHINRKVLNNHWDMKVSGPTVSTALIPLMSHPVLKEKTNWKCLGSSSQDFAQSGAPDCPVVHRTVSGAPG

SEQ ID NO: 53675 - protein, 149 aa, Zea mays
  Coding DNA Sequence Number=SeqID_10300
MSPGRWVPTVGVLTSGPAWMSGGAPDMNCRVSGEEFSVKFLGAPDTVRRHTGQSECDLFPSSRNRRSSFDDHVIKFFEFYEIEDPEHLFGEGKNWGVVRFAVVPLMGLGVCGSLCQGGDEDDGFDYGNGKEEGIEADLQEFQDFDEFED

SEQ ID NO: 53676 - protein, 160 aa, Zea mays
  Coding DNA Sequence Number=SeqID_10301
MGAVHRTDGDLTAVFLTDHGCTARHRLPWCSSHDVDPTRNDEEKKRRNVRHLTSVASFQFLLSVANLSSLTPSDALRHQPPSSRRPPGSGAPVYARLGLGTGPASDSGASGMPAMLATKSAARFGTGSCWTRSLGLFLWDPGRVGGGRNRLAFDEIRVLP

SEQ ID NO: 53677 - protein, 211 aa, Zea mays
  Coding DNA Sequence Number=SeqID_10302
  Subcellular localization annotation: CTP_CleavageSite=51; ConfidenceScore=5.28e-01
MASSSLMRRVFPSPKPPDGGYPPPFRLLVGGTQLHGSWYLSAIVRLQGFSSAGPAAPLRRRSPRMVTTSFWVGKSKPGCDLGPTLSFKDVHHPRWGGGHAEPALYLPRGSAGPPFPRRSGVEALAGLAGGADLDNVGLIDGGRRHLQRVGVVGRAPGGPSCRRAAAAPCAREDHPRCRTLLGRRSCSGVALLLHWDGALAQRPVPHSSGRI

SEQ ID NO: 53678 - protein, 240 aa, Zea mays
  Coding DNA Sequence Number=SeqID_10303
MGGVAECYVSSGERASALGRRGGSSEAEVESVFRCRGRARAPGSGEAETVLAEARVESEPWGQARRCFVVSRVLARVRALGSGGAEFAVFRVLARVRALGSGGAEFAVFRVLARVRALGSSGAEFAVFRVLARVRALGSGGAEFAVFRVLTRVRALGSGGAEFAVFRVLARVRALGSGGAEFAMAPLARPDCLSDSLCRVALQSEWRRRCCPSIRLLYADGGYQLRIRRLEGTPNYGPRQ

SEQ ID NO: 53679 - protein, 173 aa, Zea mays
  Coding DNA Sequence Number=SeqID_10304
  Homolog annotation: Hit_ID=A2WK87; Match level="QueryCoverage=33%, HitCoverage=11%, E-value=9e-15, Identity=68%"; Hit description =Putative uncharacterized protein
  Subcellular localization annotation: CTP_CleavageSite=60; ConfidenceScore=5.17e-01
MRTLASPSARVAAMAMDDLAGTSSSSTTMAATASSDPSYGWQTMFAALRQEGEVKKQKVMVAEVAVLIDTENLAAHLFEISALYENQQDIQFMRFADYFGRAFAVPRATTLGPQQRLTPPHGRVRSRNVSKESDRPQGLNSESGPPWESVEPLDIQSGPPRLVQDLHVCKPDP

SEQ ID NO: 53680 - protein, 191 aa, Zea mays
  Coding DNA Sequence Number=SeqID_10305
  Subcellular localization annotation: CTP_CleavageSite=62; ConfidenceScore=5.17e-01
MNLPPSGNGRSLCYNSPDCPVKHRTVSGVTPDCPVCQRSNGYFAPTVDCNRIQCATVRARVRARAVGAPDSLQDLSGAPPDNLETPPVRAPMDLRPLCDELKPEAAVSVRTEAVSARIEASSAREQVASQAEEVQQRRLEFDQVIRKRDQPRSHAAEAVSQAEVLGGQLAEATSGQPRRSLGPGPLRRAWP

SEQ ID NO: 53681 - protein, 28 aa, Zea mays
  Coding DNA Sequence Number=SeqID_10306
MEIAVVVHVVWPGSNTQLNSFQPCTFYA

SEQ ID NO: 53682 - protein, 256 aa, Zea mays
  Coding DNA Sequence Number=SeqID_10307
  Homolog annotation: Hit_ID=Q6J9V9; Match level="QueryCoverage=25%, HitCoverage=33%, E-value=1e-06, Identity=43%"; Hit description =Putative uncharacterized protein
MAERYELPRSCVPPTTRRKDCGRPPSGGSEGGKTQRIREREDMVAFQGGHPPFKGDSPYLRPQPSWAESSPTRSKVLPLRHGGWAPRVMQAGPGRKEPNRRAQGMQLPNGYKRSSTFAQTSGRSRRRFAFAIMTASKEGPGKGDTPKRILLREGNRPRASLLIRGSKAGPSEGFNGRLRSLGFRAHYWSEVRWPAPRKGSTAASGHSGSAPTTDQGGNDLVTESHQREASSPRTLSKGDQVQQITRRYFWSVPPGL

SEQ ID NO: 53683 - protein, 173 aa, Zea mays
  Coding DNA Sequence Number=SeqID_10308
MNKTPAFKVPMQTELRFRPHSSSYGPRTDAATGRLSFASPLKGREPDIKAKEPRAGPWAALTASTGGKLPPAATTSAQTAASASPPTPTVGKAHRRVLTPVLATKARRRMECCILAGQQQFAFPGMARGRLLHRAGGWFPPPEAGRGGDRPARTGGRALAQPGLRPSKDDEHP

SEQ ID NO: 53684 - protein, 351 aa, Zea mays
  Coding DNA Sequence Number=SeqID_10309
MAAGSRLVRERRSGFAVEGGSAGHGRRQQSTRSSRERGFALSLLAVQHERTAYERRRDKQVEENIKKMQDLGLNKYTSVLNNSVSPSASTKGKNAVNKINNSLDSDSYVSFYLLDDDDQGDTDDDTEYYEQPKPLAMKYPRRGRNTTLASKKKIDPNMAPCIRFSKRVRAGAQPEEQSSKRLHSTETDGHNVHEPTDGNDHIPNSPTTPGLADHFSRAAEEAMASTAHDSTGDAKGNSRTTPGLADHFSRAEEEDMASAAHDSTGDAQGNSHMEALRAEPVAEGEMPASSVHLVSKVLSQSSSHQFLKSVGIKTSATSKASSSNHSELREQLAAEATAAVQGELVSHPVLK

SEQ ID NO: 53685 - protein, 36 aa, Zea mays
  Coding DNA Sequence Number=SeqID_10310
MGSYDPQAKRESRLMGKEEGVEADLQEFWDFDEFED

SEQ ID NO: 53686 - protein, 96 aa, Zea mays
  Coding DNA Sequence Number=SeqID_10311
MVAVSMERERTANVWGKQRYGSRGRRGCGWERALGHGNRAVAGEATRARAPCAPGHDRAGWLGQGRAQSAGKELGRDVPSTKGGLRTCWLLGRGAD

SEQ ID NO: 53687 - protein, 141 aa, Zea mays
  Coding DNA Sequence Number=SeqID_10312
  Subcellular localization annotation: CTP_CleavageSite=51; ConfidenceScore=5.32e-01
MPRAIDAYSPKQPTIFYLSLTRRPICDTPSTLAETRGAPSTLRVNDGMRTRSSAGKSTTGIMASQLGVKPPEPNQRQPRLAELPGDGRGTTTTTPLPRTDIIPDNRRTHAECPPLLHALGPFNGPLTSRYPMSISMNLSRT

SEQ ID NO: 53688 - protein, 377 aa, Zea mays
  Coding DNA Sequence Number=SeqID_10313
  Homolog annotation: Hit_ID=Q94I52; Match level="QueryCoverage=82%, HitCoverage=29%, E-value=8e-95, Identity=59%"; Hit description =Putative uncharacterized protein OSJNBa0084C09.20
  Pfam annotation: Domain name=DUF1723; Domain location=108-157; Score =66.4; E_value=9.5e-17; Accession=PF08330.1; Description=Protein of unknown function (DUF1723)
MAAGEHALVEESTVPVVSDVADAAAKPYVRPALFLRPRAGDGAPAPAPPGDPGPVLPRGIEAEFMGWAGVPRLWPEWVAKLRRRHEPLWREVGILGGILASTCRVRHHHHERVLLQLAAFWYGATSTFVFPWGEVTLTLEDVATLAGLPLLGDPVRAPVSDSLEKDVAAIEAVRAVMNRSKKKKSSYGAWVKRFVERTPEEEMPPPATGDGGRDGEAHQLVEHGAFLSMWLSLFVLPGPPFDVVRREIIPLAARLARGESVALAPAALATIYHDLSALKRHITSGDKNGPFVISAPIHILQLWVWEHFTQLRPETVGSSTPDDHDMPRAARWREAGKRLSSKDLHAVLMSPKGFEWRPYKNSRFFGLHPGCSEYCKE

SEQ ID NO: 53689 - protein, 206 aa, Zea mays
  Coding DNA Sequence Number=SeqID_10314
  Gene Ontology: Mol. function=protein serine/threonine kinase activity; Cellular component=extracellular region; Biological process=response to abscisic acid stimulus
  Homolog annotation: Hit_ID=A5C4D0; Match level="QueryCoverage=67%, HitCoverage=60%, E-value=8e-20, Identity=36%"; Hit description =Putative uncharacterized protein
  Pfam annotation: Domain name=DUF26; Domain location=150-204; Score =60.5; E_value=5.9e-15; Accession=PF01657.8; Description=Domain of unknown function DUF26
  Pfam annotation: Domain name=DUF26; Domain location=38-92; Score =75.2; E_value=2.1e-19; Accession=PF01657.8; Description=Domain of unknown function DUF26
  Pfam module annotation: Pfam domain module=DUF26::DUF26; Domain location=150-204::38-92
SAFAGNLRRLMSVLEARAAAGGGFDIATVGAGAGGARVHGLALCRGDVARAACARCVRSARAHARRLCASRTDAVVWLDACTLRYSARAFFGEVDRDHRAVAALRDARPAELGREVVAGLLTRLTRTAYLSPLLFAAGEEDAAVGQQQRLRAMVQCTKDLSGGDCKACLEAAIAQLLARGRAPEGARVLGGSCSLRYELSPFISDS

SEQ ID NO: 53690 - protein, 303 aa, Zea mays
  Coding DNA Sequence Number=SeqID_10315
MEEEEKRSKRKSSKEHASGRNSGPRRIHASPEGLLKRQMPPRLSRGLARAGFVEKQPWPYRLTNRPLRRHIKCGGCLTPYPDTRALVSQAEVTAVTSPLLFTVRYDRETAPPAPLRLPCQPPRQRLTTGHGQPPRSSLGRHRKLRLARPHAPASGGDLRLARPPDLASTPVSGGIASSPDPGLGHKRSLRLDQPWARIDCADRGCIISLLLAYSGYKEQDRRPIWLTPATGLRCSSGGHAITCTAPKLSPDGHVGFQGAASVWGTGLSGGAPDSVRWCTGQCPVRQAASTEEATLGFFSGDFG

SEQ ID NO: 53691 - protein, 439 aa, Zea mays
  Coding DNA Sequence Number=SeqID_10316
  Gene Ontology: Mol. function=protein kinase activity; Biological process=protein amino acid phosphorylation
  Homolog annotation: Hit_ID=Q0WM08; Match level="QueryCoverage=21%, HitCoverage=10%, E-value=5e-30, Identity=68%"; Hit description =Putative uncharacterized protein At1g71410
MADGREEETGEDISASLHRAESGPYPFLLTAFTFPSPAQDDQNFPPTLSSRLLTSASAPTTTRPPPKPPQTLAVASKEWPPSCGSPQLNIKTLTQALAKASAVIEKTVSTTMQEVTGPRPLQDYELLDQAGSGGPGLAWRIYTARPRDGAPSAPYPVVSVWVLDKRALVEARARAGMSKAAEDASLDLVRADAARLVRLRHPAAQPSGRFPIALVIAEAVEEQYSGMLLSAYKEMRLLLLEFLSIALKEGVELETSLNWGDELYDGESNELQSIGLQSGDAYSPPENWCAERLGSQRPGNLPLHEAEREKAARKQEELQAQLQAQQATLEENQRKHHYSPHFDYCANHQGKTNNSKSRPLPSSASGATGNSASPDPGPRPQPWPREKVSASPNSRPQSRPREKVSASPDLSLGLRRSRRLARPRPRTDYAIGDTSLPYP

SEQ ID NO: 53692 - protein, 164 aa, Zea mays
  Coding DNA Sequence Number=SeqID_10317
  Gene Ontology: Mol. function=cysteine-type peptidase activity; Biological process=proteolysis
  Homolog annotation: Hit_ID=Q5NKP7; Match level="QueryCoverage=68%, HitCoverage=13%, E-value=9e-24, Identity=55%"; Hit description =Putative uncharacterized protein 9C20.3c
MGDPTNVDAADAKKIPMPNVDDDDDFKPPKKKCNISMDAPNKTQKLYPRDMTLRIGPDKELKITKQTVHQILGLPNLGGGKPLNIDEANAAATLRASLNISKDEFVISKLQDRLRLGQDDDLSIICFFILFNRLLFPTASWSISYNEVLLTEEMERFLKLIGAI

SEQ ID NO: 53693 - protein, 254 aa, Zea mays
  Coding DNA Sequence Number=SeqID_10318
  Gene Ontology: Mol. function=nucleoside-triphosphatase activity; Cellular component=protein complex; Biological process=protein catabolic process
  Homolog annotation: Hit_ID=Q9SEI4; Match level="QueryCoverage=22%, HitCoverage=13%, E-value=3e-17, Identity=78%"; Hit description=26S protease regulatory subunit 6B homolog
MATDMDGFDQTVNVKVVMATNRADTLDPTLLRLGRLDRKVEFPLPDWWHKRLVFQMMKFPWIASDVFLPLSLSFGKRIANTMLLTFPTVPVIYNSKVVLILKMPPSAAFTESMLIFPSIGIRREARVAARRDDEPDDLFSHRFQTLAQIRLQKQSKQLAEWNTVAFSSKLAATKHKEDNVECPITRLVGTPRWKFFTSKIMKIICDLDKTPGPGRQVKYDNLEFRNAAETTYADGRLLGTPNEQVWPGVGKLLN

SEQ ID NO: 53694 - protein, 129 aa, Zea mays
  Coding DNA Sequence Number=SeqID_10319
  Subcellular localization annotation: CTP_CleavageSite=27; ConfidenceScore=5.02e-01
MMENFGSKTVQIAMNAVVTSQLLVSLYSAAVDRKDQTVTLQGGTDTRSEVGSFLRNELREGVFWTFGFPKLKRLFSRVKLVTKNDLAPRKGLLLGSCFGAPKVSHEEAASAEVVSKRWPKVPFHGASAF

SEQ ID NO: 53695 - protein, 114 aa, Zea mays
  Coding DNA Sequence Number=SeqID_10320
  Gene Ontology: Mol. function=signal transducer activity; Cellular component=integral to membrane; Biological process=positive regulation of I-kappaB kinase/NF-kappaB cascade
  Homolog annotation: Hit_ID=Q3E9V6; Match level="QueryCoverage=78%, HitCoverage=26%, E-value=2e-33, Identity=76%"; Hit description =Uncharacterized protein At4g27630.1
MQIAAAYSRTWRGHLQNLLGYALSVYCVYKMLKSVVFKESGSVDPVTMSITIFLRHFDIGIDVALLSQYISLMFIGMLVVISVRGFLANVMKDLEGEGFRRPALLIADAPLRSG

SEQ ID NO: 53696 - protein, 293 aa, Zea mays
  Coding DNA Sequence Number=SeqID_10321
  Gene Ontology: Mol. function=protein binding
  Homolog annotation: Hit_ID=A5HEG5; Match level="QueryCoverage=94%, HitCoverage=73%, E-value=1e-100, Identity=71%"; Hit description =Putative growth-regulating factor 6
  Pfam annotation: Domain name=WRC; Domain location=28-73; Score=99.8; E_value=8.3e-27; Accession=PF08879.1; Description=WRC
MPFQPFPFHCCCCFIAIGYGPYFGKKVDPEPGRCRRTDGKKWRCSKEAAPDSKYCERHMHRGRNRSRKPVEAQLAPPPHAQPQQQQQAPAPAAGFQNHSLYPSILTGNGGGGVGAGAGGGTFGLGPTSQLHMDSAAAYATAAGGGSKYLRYSAYGVKSLSDEHSTLLSGGMDPSMMDNSWRLLPSQTNTFQATSYPVFGTLSGLDESTIASLPKTQREPLSFFGSDFVTAAKQENQTLRPFFDEWPKSRDSWPELGEDSSLGFSATQLSISIPMATSDFSNTSSRSPGGIPSR

SEQ ID NO: 53697 - protein, 236 aa, Zea mays
  Coding DNA Sequence Number=SeqID_10322
  Gene Ontology: Mol. function=binding; Cellular component=integral to membrane; Biological process=positive regulation of I-kappaB kinase/NF-kappaB cascade
  Homolog annotation: Hit_ID=A7PB62; Match level="QueryCoverage=98%, HitCoverage=49%, E-value=8e-82, Identity=66%"; Hit description =Chromosome chr16 scaffold_10, whole genome shotgun sequence
MGWGTVVYEGAVVGSSLVGLGWAGLWFLNRRLYKEYEERRVLVQILFGLVFAFSCNLFELVLFEILPVLSKHARFLNWHLDLFCLILLLVFVLPYYHCYLLLRNSGMRRDRAWLVAALFLLVFLYGFWRMGIHFPMPSPEKGFFTMPQLVSRIGVIGVSVMAVLSGFGAVNLPYSYLSLFIREIDETDIKTLERQLMQSIETCTAKKKKIILSQMEMERIQGSEEALTLLALLYVS

SEQ ID NO: 53698 - protein, 595 aa, Zea mays
  Coding DNA Sequence Number=SeqID_10323
  Homolog annotation: Hit_ID=A2XX64; Match level="QueryCoverage=51%, HitCoverage=42%, E-value=2e-10, Identity=53%"; Hit description =Putative uncharacterized protein
MEQILTDLQALTRLYGLLHSPADENLDEASRALLMKILEDATQEAVRRQAKMLMPSGSLMSPVLERELSTQSHCRTRHADPILRPLASPRPSLLASERSRRLDPQHSTVSRRSGLYADGQRHAAEEPPPLARLASNRSSRTALTARHRPSQEQRCPSLSLHRFPVAGTSRHGTVIGSTRLARRRDSIRHSSGRGDQWSLERSNSNSSSSRRSVSRRELSSLRPSSRLRGRATPRHVGTENSSSVSPFERLDSGLSLSLTSRHGVEHAGRGVATPERSSSSKTVATIQSRIRPSSTPLRERSLHRPAVEAKTLRGRQQDSHVLSEEDTYSSMFSGSGSSSDAASLSASTSPTASPAPAPAPRASATPYYYYPSVATRGIAPPPLYAPEVSRSMRRRRLQERRQEILERRVARLRMLKNKIATVFHDFHHRHDHHHHLLLGGGQEAGPSSRTVVRGAGHHHHLGGGQEAGPSSRAVVRGAGHHLNSPWQYLTRMFHRAKGKIDKNTRSRTAVGVPEKRHGAGGGGGGNMHALFDALRRHLKSKRRAPAGIKLGRKGNWVRGKKMHWWQRLRRRRGMPGLTAGSGPRRRLRHGKAAWL

SEQ ID NO: 53699 - protein, 278 aa, Zea mays
  Coding DNA Sequence Number=SeqID_10324
MEQPSLISVRGRPGFLRLSLGLFTFVVRKGSKRERGWGGARHAAVVITFELLMRPGHATSSAIAPNRRTFCFAIRMQRRAQAGALHPLAPGPARPGIHDPFHATGVHAQHLVDTVAWPGQARPGSKTTVQWAPQIDQESNAELLIGKKKKNRKWLRLPVANIHRNSKRSAMQTGKIVGADHGQWQGFLNETKGSCSHPATCGAASALRPVGIGHSPAPPHVPNDVVLLEDCANVGVLTIDRLDFSCTSLLFTVRYQSTDWHAASYKPEPYRAAEHTGQ

SEQ ID NO: 53700 - protein, 145 aa, Zea mays
  Coding DNA Sequence Number=SeqID_10325
MPSSSSSAATTPPTATSSEETLSSLMVEELRAGDSIDFGVSRMTSARVEDMQRLGYFGGGVARAPGTEEVPEPEGPDEGQLAIVAPGAAIATAAIVPKARGEALGAGGEVSALALVRDEAGVATRRLKGVTEALSQATEALSQVR

SEQ ID NO: 53701 - protein, 177 aa, Zea mays
  Coding DNA Sequence Number=SeqID_10326
MEWGEFEKISEFEFLGCYIERLRTQHADAVSEKSASDSKCRKLTDRVAALEREKADLRRQLAAERREANEAIAKEQAAQAEAKLARAEGNLAKELAEHLQERLAALESRAKGAETAMRVEAERTRAQLKDTYRELGARTGDFEVPDREPGLRCLQWVQEELQELPAVVGGFMSYASL

SEQ ID NO: 53702 - protein, 102 aa, Zea mays
  Coding DNA Sequence Number=SeqID_10327
  Subcellular localization annotation: CTP_CleavageSite=45; ConfidenceScore=5.64e-01
MAGAVQLAGAAKLHRPPFPRAPIKGPPRAPPSPHRPRPSLSSLVRAQFMGESPPSSSSPLRHTATDAVHHFPTPISRPKLTDGNPAAKLRRLPANNPLPDLL

SEQ ID NO: 53703 - protein, 100 aa, Zea mays
  Coding DNA Sequence Number=SeqID_10328
MDLPSSKLSWHKKIYFRKFGLRPFYRGYGFWINGQGTAQAREETTPLPRAHTPVRAEGERTASAVDGGTNRPFAGEGPAASGLGGDSPPVAWFLDNVQVP

SEQ ID NO: 53704 - protein, 111 aa, Zea mays
  Coding DNA Sequence Number=SeqID_10329
  Subcellular localization annotation: CTP_CleavageSite=11; ConfidenceScore=5.10e-01
MASPQAFVWCRMERRVSPPVLSLSDQRLQRRPRAKGGVFAFAPTLYTPNPPHPQVVSIATTAQEKMKLWKETSRSSKTTTSSRRGLAATPSRLPVKAAVIYVSFSHFDLLV

SEQ ID NO: 53705 - protein, 189 aa, Zea mays
  Coding DNA Sequence Number=SeqID_10330
  Subcellular localization annotation: CTP_CleavageSite=37; ConfidenceScore=5.28e-01
MSGAPEDSSANSSPSGKSRGNSTTIHRTVRCTPDSVRCSKEERPQELAIFGKLQRLLRYNSPDMSGVHQTVRCNCGATTTSRQRSPATAINARQSAQKSGTRVVAHQTLYSTCLVRHRTSRRAQKTVLQRSNPNGFGDVAGAPDMSGVHRTVRCTIRQIAPTKRWGYKYPQPPTIHCIQVFHFSTTYKS

SEQ ID NO: 53706 - protein, 35 aa, Zea mays
  Coding DNA Sequence Number=SeqID_10331
MTRDDDAAGTIKDTKVLIGGGGAEEGEERSGMGLC

SEQ ID NO: 53707 - protein, 170 aa, Zea mays
  Coding DNA Sequence Number=SeqID_10332
  Gene Ontology: Cellular component=mitochondrion
  Homolog annotation: Hit_ID=A3A4X9; Match level="QueryCoverage=58%, HitCoverage=31%, E-value=4e-44, Identity=88%"; Hit description =Putative uncharacterized protein
  Pfam annotation: Domain name=Scramblase; Domain location=18-168; Score=-9.6; E_value=2.2e-10; Accession=PF03803.6; Description =Scramblase
MEAIAKEHKLSKNRFEWNGKSVQVFAKLAPLLARANLVIARDIEWANIMFAFEQESRYIIMDPLFPQSPVGFIREKSNIIFRQLLRTRRPFVAEITDAMGNEIFKVRRPFWWINSSIYVEVNDKEIDVETGSKLSANGRQKPLGEMSTNCEVVGTRRMRTSSTVTRLQMK

SEQ ID NO: 53708 - protein, 485 aa, Zea mays
  Coding DNA Sequence Number=SeqID_10333
  Homolog annotation: Hit_ID=Q6ZIK7; Match level="QueryCoverage=92%, HitCoverage=98%, E-value=4e-75, Identity=42%"; Hit description =Putative major intrinsic protein
  Pfam annotation: Domain name=DZC; Domain location=203-282; Score =63.1; E_value=9.5e-16; Accession=PF08381.2; Description=Disease resistancezinc fingerchromo
  Pfam annotation: Domain name=DZC; Domain location=449-484; Score =75.6; E_value=1.6e-19; Accession=PF08381.2; Description=Disease resistancezinc fingerchromo
  Pfam module annotation: Pfam domain module=DZC::DZC; Domain location =203-282::449-484
MAAGLPPARLHFDDHGHGRAQVGFSSSFVRVDGSPACCWPEGGEDGSRAAATTPHGKEAVKSLTSQGVSVLLSVAVFSVMDLKDMVLKFSGSSKQCRGTPGAQSFRSSGGGRYLRPYPSFIDVTGFAPANKVLGNALAGAGAAGGAARTASSDTLDLTRSNRKTPQSSGWIPSTEAAAAGDDVREWTAQVEPGVQITFGTIPSGGNDLKRIRFRCVVVTRPLLLPLLNDSLRRPLILATELTPKCMVVSRICYVRRRSREMFNKWEAQRWWGENYDRIVELYNVVTFSGRQQGCSTPASSVDDSALRDSSYSRVGSASRGSPITVPPPPVASKERLARSASFRATAAGSSSAPYAAAHSARAAYFPSAAVPDPSDHVWAHHFNMLNSAAAGTSAMGGGGPSPYDPSSVATASSRDEASVSLSNASDLEATEWVEEDEPGVCLTIRELGDGTRELRRIRFSRERFGEERAKVWWEQNRERIQAEYL

SEQ ID NO: 53709 - protein, 131 aa, Zea mays
  Coding DNA Sequence Number=SeqID_10334
MEPSVPDGPFESRGLSCCVQLAASPVVSASTGVGPLPPPVRDDRQNGNLGDHAPRTSSQWLSDALETLPNEDFVEDHASVIKESKDHGWIIQGALTARVIWEFMELYEVLENVVLKPKTPDVHSWRLSSNG

SEQ ID NO: 53710 - protein, 72 aa, Zea mays
  Coding DNA Sequence Number=SeqID_10335
MGKPVPSLLMLLLSRVTALVPTITGMGDHISGRVRRAICGQVHSGIRTLILIPFPHLVDNQSPWIVVHRLVS

SEQ ID NO: 53711 - protein, 23 aa, Zea mays
  Coding DNA Sequence Number=SeqID_10336
MAPRKPCDDGGSQLSYGSRETNN

SEQ ID NO: 53712 - protein, 108 aa, Zea mays
  Coding DNA Sequence Number=SeqID_10337
MAPEAGLGCCQPHSVEWHSSQSDAGDTVFLSGRARVRIRCQAILALNAPAIRSVSVAIWPRLLLGEDWASGEPKVYPLLEGALGRDVNPPGLAALARGWARARQDCVP

SEQ ID NO: 53713 - protein, 131 aa, Zea mays
  Coding DNA Sequence Number=SeqID_10338
MKAKGRKRLGENAKRKSHPTGTRDQGRAVYDTRARKTSLVYDMGAWVHKSYGLCTGLRQQQGTPCVVWQNHQAWGPMGQSAARTDMAVGVTEGGLTVGVSADALKQRANHQSGRVEAKYKLWPHLQVRILP

SEQ ID NO: 53714 - protein, 264 aa, Zea mays
  Coding DNA Sequence Number=SeqID_10339
MTSDPSARRSLCCLSSSDPQSYLGQRRLLQPLCPCRRGWGHGGVGAGSRTGGCGTSSWCIGDSDPAVGVPAAGLANHHATLVEGRQCGQDHRPQPWVVAECRDVLGEDQGLRDEGFPSSPSHQDCQLVLGQVGAQPTLDPTDVVRAGEPTTQARSPLQRRDPALQEVADHVHRRQAARSQALDPIQYGQELWRKGQLSPPLLAVERWPIARQDETVVGLGAGNHPVAAPVLPPRAAKGGDVMSVGKSTGRVAERTRPNPKMRRA

SEQ ID NO: 53715 - protein, 62 aa, Zea mays
  Coding DNA Sequence Number=SeqID_10340
MALGDRTKNNTAGACVPYPYVHQHNLKSQGQGLRRICEVPHSHGTRSPQILAEVADNDDQDP

SEQ ID NO: 53716 - protein, 68 aa, Zea mays
  Coding DNA Sequence Number=SeqID_10341
KVVVEKTPDGGETLKIIIMASNAEGQTQAGNREQCPVLCTVDSLAHRHRRSRISLDGSNTSSGRSGNT

SEQ ID NO: 53717 - protein, 278 aa, Zea mays
  Coding DNA Sequence Number=SeqID_10342
MELDPAAEEEYRLEAHNEEQDARAFIGIGNDDAPGAGTGIGSTSPTTADGSSIDTGTSGSMGANASRKRSEVWNDFEELTNLVNGKRVPCSGPSIALHRSAGELLDGALLDGAPRRAPRRAPRRRAPRRRAPQPQEPFARAARQADLGLRGRSGGRFSASAVCSGGRLLRGTTPTARDNAHCQADLGFNTPTGRDNARSSGVLRLTASTRFSASAALQQHHNHLTTLGRGHPRRRPARCILGGALLAASSAAPCSLLEDGFKYIFCVECEKKNKQKVG

SEQ ID NO: 53718 - protein, 755 aa, Zea mays
  Coding DNA Sequence Number=SeqID_10343
  Homolog annotation: Hit_ID=Q6JAD6; Match level="QueryCoverage=76%, HitCoverage=81%, E-value=1e-167, Identity=69%"; Hit description =Putative uncharacterized protein
MEKCKPIKTPMPTNGHLDLYEGVTLIARVPSPVLPGSSPLVHQFRMPRTKNVSAPGGGDDEDPRRPFRQVKGKTVYLEQQEGRKKRHSDRAARAAAAAAAAAVQAELGDQPQTPSDQIAYRVRRLASRPRSSTHTTASTPPPTLPAPVTPIAPSTTTAIPATSTTLASTAPPPAPASAPPVPPPRFRERDETEVRPLAADPRLFDLQRATAARVRRFRYVPVESWLPAQRDPAAVDLFSTRIQESFFRAQMSAQIALQVHRLLDLPAFLLAAGADSEAHLTYLPGLLTLLTTSGRYVEEWVRVFYASVWIDPDHHWMRFRFEREDVTITATQIRQLFGFPESTTRLHSLCYGTSDPPRRPHGGVAPGIAHVAALFRPPFSDGSRRSSADFTTTTKFLFELMRWTLLPRMGYREATTHIQLWLLGALVSHSEFDVVDFLICEIEDTVLDGIRARRQVPYAHYLCHIFARLIQPPRFQGTLEASRLVFGSYRPAPEAPVPAFAPVFYSQAEDAALHQFDTQDTAADDDDDFGVPPPPHMPPRSHDHEAGSSSAAPAAPPAMDPALASILQSITQQQAHLAAEQARLSERMLSMFQNIQDRQDSLQQQLLQDRAESRAFMALMLQQSGVSVPPVQSAPPPPLHTPVVPSILSGPPVPSGGPSPLRPVTLAFASPVLSSVCPQPPVPPASAVTTTVVAVSVTSSVPAAPAARPQSESVPAPASTADPGSETDSDPLPAFALLPRPRPDAPPPPPPASDV

SEQ ID NO: 53719 - protein, 68 aa, Zea mays
  Coding DNA Sequence Number=SeqID_10344
MDVLMIRNLGEDQQGLGKGLVVEEEQQGRPQQEGDQARNKLRGEVNRATHGLITEGKGCLRMAGVYPG

SEQ ID NO: 53720 - protein, 246 aa, Zea mays
  Coding DNA Sequence Number=SeqID_10345
MAADRAERGVGQRWRKGFGIQAVGAQGEGAGRRAEGGGQVGWLEGIHGKARMAGLEKGRGPARATAAHLLELGAGPAMASDRESRERKNKKMEQRPGGSRTPGGEGKPVVGGSSATREEKKLLLTGLGKKEQGRHAKGLKTGSAGVEGGGVQRRGGWGRTPCWLGAGRHGKEPSSSVRGACGWKMAEEEEKRCWRLGVGMEIFQFARERAPIYRRWLGLGFPYWAKRAGLGWPKHVIGPRLIYFPE

SEQ ID NO: 53721 - protein, 220 aa, Zea mays
  Coding DNA Sequence Number=SeqID_10346
MAERYQLPRSCVPPTTRRKDGGYPPSGGLEGGKTRCIREREDMVAFQGGHPPFKGGSPYLCPQSSRAESSPTHPKDLPCGVGAGSHTSCKPAQSRRSQTAVRGGAPGKRSERRFAFAIMTTSEKGPGKGDTPKRILPHEGTWLRASLLIRGSKASPSEGFNSRLRARGLHTHYWSEVRRPAPRKGSTAASGYSGSAPTTDQGFEGWPPKGSQPPQTQSEG

SEQ ID NO: 53722 - protein, 118 aa, Zea mays
  Coding DNA Sequence Number=SeqID_10347
MEYSAKTSLPLNSIGIIHSLPVSWCQRFIYNYTKSTVRNTVDYSGQEKLFGKSGQARTVRVFAADRPRHRVDFDQELQIRDSPTKPRTVQLQRADRPAIIRGQSACEDLVQPEGNESS

SEQ ID NO: 53723 - protein, 36 aa, Zea mays
  Coding DNA Sequence Number=SeqID_10348
MAVACGHMHGAFRSRGAVMVTACKSHYKNMVCIYRY

SEQ ID NO: 53724 - protein, 94 aa, Zea mays
  Coding DNA Sequence Number=SeqID_10349
MPSYHLSTGRGRHLEGCLSGPLLGGTGRDPLCPAYRRQRQIEDNPQRPHAACAVWLPTVCAQWDCGGRRRRLQPWPILYVHGGVSDDARVFQTD

SEQ ID NO: 53725 - protein, 468 aa, Zea mays
  Coding DNA Sequence Number=SeqID_10350
  Gene Ontology: Mol. function=protein binding; Cellular component =cytoplasm; Biological process=regulation of transcription
  Homolog annotation: Hit_ID=A2X8Q7; Match level="QueryCoverage=100%, HitCoverage=100%, E-value=1e-171, Identity=69%"; Hit description =Putative uncharacterized protein
  Pfam annotation: Domain name=F-box; Domain location=74-129; Score =27.6; E_value=4.6e-05; Accession=PF00646.24; Description=F-box domain
  Pfam annotation: Domain name=Tub; Domain location=140-462; Score =395.3; E_value=9.5e-116; Accession=PF01167.9; Description=Tub family
  Pfam module annotation: Pfam domain module=F-box::Tub; Domain location=74-129::140-462
MSLKSIVRELKEMRDGIGSMSRRGGSGSDGRAAGHARSGSRHSWPSLWAEQQQPQRQGQGQGLGQEGPRHQHQGRWADLPPELLLDVIQRVESSEATWPARRQVVACAAVCRSWREVTKDVVKTLEECGRITFPISLKQPGPRELPVQCFVRRERATSTYLLYLGLSPCFSMANNKMVLLFYMSKGFLAHGGENARFKSAMNVENDKLLLAARKVRRATRTSFVISLVSDDFSRSSSTYVGKLKPNFLGTKFTIFDSQPPPDAVALPNNRPSKRQSKQVSPRLPLGNYNVATVTYELTVLRNRGPRRMQCTMHSIPAECIQEGGKAPTPTGTVQSLDEPVPTLPSTTKGKEVAVQFSSTSLSADLSGPVSGNEAPLVLKNKAPRWHEQLQCWCLNFRGRVTVASVKNFQLVASVDPSLNVPAAEQEKVILQFGKIGKDIFTMDYRYPLSAFQAFAICLTSFDTKPACE

SEQ ID NO: 53726 - protein, 316 aa, Zea mays
  Coding DNA Sequence Number=SeqID_10351
  Gene Ontology: Mol. function=metal ion binding; Cellular component =Golgi apparatus
  Homolog annotation: Hit_ID=Q653G1; Match level="QueryCoverage=55%, HitCoverage=29%, E-value=7e-80, Identity=80%"; Hit description =Dehydration-responsive protein-like
  Pfam annotation: Domain name=DUF248; Domain location=1-305; Score= -55.6; E_value=2.1e-22; Accession=PF03141.7; Description=Putative methyltransferase
MQQLQPKQMHWVRADSSDFGGDRPAPRSHQRHDASCEEDDLYGYGGIVNEWGTIGLLLLEAAAERIVGDGALETWGVADKATRVKLCMLGENLFVCPCGGPARGRSHASRRAARNVFEERQLHSHLHRVVVAALSIQEIWHSRVIQYWKHLKFEIQKDSFRYVMDMSASLGGFAASLKKKNVWVMNVVPFTESGKLKIIYDRGLMGTTHDWCESFSTYPGTYDLLHAWLLFSEIEKQGCSLEDLLIEMDRILRTYGYAIIRDKVDVVTYIKKLLPALRWDDWTFEMRPKKDALTTGDERVLIMRKKLWNHSVQDLS

SEQ ID NO: 53727 - protein, 775 aa, Zea mays
  Coding DNA Sequence Number=SeqID_10352
  Homolog annotation: Hit_ID=Q6QP51; Match level="QueryCoverage=15%, HitCoverage=90%, E-value=2e-24, Identity=42%"; Hit description =Putative growth-regulating factor 1
MESFDQMRAHVSGKADRAEGLLRLRDTDTSLITFREKQTVPAGSGIGRGSSSTLGVVSTLGGTWPSLGRRPGQKDPHLREDASTAPADVLAKLWRLLPRLPRPRNPLSPGPTKSLSEPTPRLSALTPLPPASAHRRAAEDVGITLGGSPDLRQMSKYLKWLHFAPAKTRYISLQTRLQFRSRGYELPPHQRACGTTNSRWLAGDHYTNSDNDPCFGRLNSSSDDLRADAAMTRPSPASPLEGRGQAIKAKEPGVQPQLAQMVLSAEKPSPAATTSAPTTAATCAPAPRRRTTAAPKRTGRSSLPSSPRPPQNTSTALAAYDVLGDPPARLTVRGGPGRGRPVRGTTAARTKDGKLHPVQGAAVRLPPHGWRMPPQGWRVPFSPKHWGKKRPGCTTKILEAERWLKGADLHEAALLQRQQEQGGAGAPHPGAQKAEGQTSSLAPLSVTGEIPTDILQGFSPYDTGAGTHTSYELIRSTKKKPVVERVDCHATGIQLHHNCAPFGSVHIRRTSAKEAGLHVMDRERGRCGKDPSRRRKWDPSPPIDQGFEGWPLERVSTAAPEHLGFKPITDQGFEGWPLGRAGPSEGFDSRPRACRVRDDSGYVRYITEARATLPSLGRNRKLRLARPHAPASGGGFRLARPQAPASGGGLHLARPLDSASTSVSGGIVSSPDLGLGLKRSLRLNRPWARTDRANRGCIISLSLACSVYKEQDRRPIWLTPVTGLRRSSDGHAITCTGPKLSPNGHVGMYTGLKHSTAGHEAHGGGLMGHFGAKKT

SEQ ID NO: 53728 - protein, 97 aa, Zea mays
  Coding DNA Sequence Number=SeqID_10353
MEHRPGLERLLETAHLELDGKLFVNTQQAPTWRANCRRFDPGGPWTDEIRCQVILALNAPAIRSVGVAIWPRLLLGEDWASGEPKVLISENQIKTII

SEQ ID NO: 53729 - protein, 296 aa, Zea mays
  Coding DNA Sequence Number=SeqID_10354
  Gene Ontology: Mol. function=structural constituent of ribosome; Cellular component=ribonucleoprotein complex; Biological process =translation
  Homolog annotation: Hit_ID=Q2QYW3; Match level="QueryCoverage=45%, HitCoverage=29%, E-value=6e-60, Identity=80%"; Hit description =Expressed protein
  Pfam annotation: Domain name=Ribosomal_S4e; Domain location=13-73; Score=52.0; E_value=2.1e-12; Accession=PF00900.11; Description =Ribosomal family S4e
MEDCHTRACRQPSRGRGRGSWLVFKLCKVRSVQFGQKGIPYLNTYDDRTICYPDPLIKANDTIKIDLETNKIMDFIKFASTGEPAPIHSFSSSLGGSGFEYPFHSHIQIHGIVDWTHRGTVLTLPSPGSLPVTSRSDSSSANEVGHNLLDPSAFLSSFVSKGRKKIVKQGSFNTFYAKEYRATLEFYWAPFLVESNSNNPNFHNIKERIISPERIEAHAKHWKDVDYLIFNTYIWWMNNADIKVGRPNLRYWSNNDEVPRIEAYDCVFKTWSDWLNDNIDPTRTSVFMTISPRNLR

SEQ ID NO: 53730 - protein, 428 aa, Zea mays
  Coding DNA Sequence Number=SeqID_10355
  Subcellular localization annotation: CTP_CleavageSite=39; ConfidenceScore=5.64e-01
MPETGLSVSARAKRRTTAGSGALFTRRFAFSAHRNRRARCMTCGPGPPCQRLDRWLQRRRGGTLPQGGSTLLVRRFAFMTIGPGEDKGAHYRGAVACSLCGGSPSSHSKTSTPAARAGESAFKEGFIPRVAAMPCFSPTHGVLSPPSALRPFAFKVSALHCHSLSWPCKFIPSVPRLSECSTWYTACLDGMRRRSAEGFAPTPSIPVNLPLESSCLSSSPTGWCYRSCLSSAGGARPCGSGALPPVLGFKDVHQPRGGGERAEPWLRFPHGLVTRLFLQHSEEKDDHQPCEGGELREGGGEGLFAMARTLRWSPPLGRLPGAEVVAAACKPLGAEVATTANEPSVQRLDLSRLQTSIPKKELAMAPRRPTIQDQAEWHTAPDHPRRQAFGYGTRLSGHTDSGPPHGTGSRSLEPAPRLSGPPAFAERS

SEQ ID NO: 53731 - protein, 635 aa, Zea mays
  Coding DNA Sequence Number=SeqID_10356
  Homolog annotation: Hit_ID=A2WQE8; Match level="QueryCoverage=42%, HitCoverage=71%, E-value=2e-67, Identity=49%"; Hit description =Putative uncharacterized protein
MTTQGGLQPTSNEANMCTNDNGSQLGTRIVDEIMAGKNVFFDLPDKLTGEIWTLKFHCIGAQPGKEIVTVNIDKAYVAFYNVVYIKSKLGYSGRDFLFYKKRCGIDRSRLLALDYIHQEEAMLSDNMDERKISFVLTKDPPSDLEVSITPIKRPRQRTNVDEETIEVSIDAYKEWLAILQHDNPETVLYERQSNDDLILSDEEIHGSSKPTTNWPSHARRHRKRDPDVIGIYVDNDGVFKKEGRGTLKGIAAATKRIKNGDHKLKIEFSSKLGGPVGPNARTFVDEIVLFTKKKAPLIGVKKWKDIELNVRSSIASDVLRRWEFLTNEDAHEKIWSIAKERYKGWRSTLSSTYKAYNSYAERMKNKPEDVDIVEWHYMVLYFGSEKFQKISSRNSENRQKQRTKHIMGSRTFSQISFQQRDPETEKFYLTREEENAIFQTTFKETTGCKANRLHGHGYLSRYPTRSQVMESKFLEQARATVATNQKNIELESQVQLLNEKLACEVAERERILQEKMQALQEEEEKKRQVLREEMRQEMVAALAVVAQQSNRESTTPIDPSSVVPTKPPEFIPADSPAPAPSSANNVRTPDTNNKKDNMPANYISSYTLRNAVTRRVQARGNKRSECVWNANVLVL

SEQ ID NO: 53732 - protein, 339 aa, Zea mays
  Coding DNA Sequence Number=SeqID_10357
  Gene Ontology: Mol. function=calcium ion binding; Cellular component =intracellular; Biological process=RNA processing
  Homolog annotation: Hit_ID=A3AGB6; Match level="QueryCoverage=61%, HitCoverage=50%, E-value=3e-78, Identity=88%"; Hit description =Putative uncharacterized protein
  Pfam annotation: Domain name=TPR_1; Domain location=118-151; Score =25.7; E_value=0.00017; Accession=PF00515.19; Description =Tetratricopeptide repeat
  Pfam annotation: Domain name=TPR_1; Domain location=152-185; Score =26.5; E_value=9.6e-05; Accession=PF00515.19; Description =Tetratricopeptide repeat
  Pfam annotation: Domain name=TPR_1; Domain location=186-219; Score =27.7; E_value=4.2e-05; Accession=PF00515.19; Description =Tetratricopeptide repeat
  Pfam annotation: Domain name=TPR_1; Domain location=220-253; Score =12.1; E_value=0.19; Accession=PF00515.19; Description=Tetratricopepti de repeat
  Pfam annotation: Domain name=TPR_2; Domain location=118-151; Score =20.7; E_value=0.0053; Accession=PF07719.8; Description =Tetratricopeptide repeat
  Pfam annotation: Domain name=TPR_2; Domain location=152-185; Score =25.8; E_value=0.00016; Accession=PF07719.8; Description =Tetratricopeptide repeat
  Pfam annotation: Domain name=TPR_2; Domain location=186-219; Score =23.6; E_value=0.00075; Accession=PF07719.8; Description =Tetratricopeptide repeat
  Pfam annotation: Domain name=TPR_2; Domain location=220-253; Score =17.2; E_value=0.062; Accession=PF07719.8; Description=Tetratricopepti de repeat
  Pfam annotation: Domain name=TPR_4; Domain location=118-143; Score =7.8; E_value=4.6; Accession=PF07721.5; Description=Tetratricopeptide repeat
  Pfam annotation: Domain name=TPR_4; Domain location=152-177; Score =4.1; E_value=13; Accession=PF07721.5; Description=Tetratricopeptide repeat
  Pfam annotation: Domain name=TPR_4; Domain location=220-245; Score =15.2; E_value=0.24; Accession=PF07721.5; Description=Tetratricopeptid e repeat
  Pfam module annotation: Pfam domain module=TPR_1::TPR_1::TPR_1::TPR _1::TPR_2::TPR_2::TPR_2::TPR_2::TPR_4::TPR_4::TPR_4; Domain location =118-151::152-185::186-219::220-253::118-151::152-185::186-219::220 -253::118-143::152-177::220-245
MSDQVRSSPDREEKFAITVWAGSPNHGIAFDSSWGLLDDLEILVKRLHSKQVRKGSIDGSGGAGNSNFDSFSEAGWSREISGAADSASTSAPWDETSRDYLTFVKEYREAAILCPSHARALKLLGSTLFGVGEYRAAEKALEEAIFLKEDYANAHCDLGSALHAVGEDDRAIQEFQTAIDLKPGHVDALYNLGGLNMDAGRFVWAAEMYTRVLSIRPNHWRAQLNKAVALLGQGESEEAKKALKEAFKMTQRVKVYDAISHLKTLQKKKPKPSLMLLVLVVLIWMFNDPDWGFGILSTLVKLEESDHIRHGSHTSQSPELVVVAATVTGSAAGAEDAWR

SEQ ID NO: 53733 - protein, 52 aa, Zea mays
  Coding DNA Sequence Number=SeqID_10358
MARVACTLRGKRLDGGVYVLSVKKLQTFVASVPRWYQKKRIKTKVAGGKILR

SEQ ID NO: 53734 - protein, 126 aa, Zea mays
  Coding DNA Sequence Number=SeqID_10359
MAIIFKSKITFSPGAIFCFGTILCIADIEGTLHRIAAPPKKKPSSRIPREAGVKPGRNLPSVMLSDGETGTRTCDNITKLENETQHNPSLETKPQKWEKLLMKEHIEKGVTPATAIAVRLKNESGN

SEQ ID NO: 53735 - protein, 111 aa, Zea mays
  Coding DNA Sequence Number=SeqID_10360
MGSGHSTCSTEAGCSGSLIGMATGTPGGHMAQAAGRRCDARVPQGRTIARSRATAVGAGVPEPECSGSLGEDRGEIEHGVGGGDRSGRVGEDRGENERWRPSEGFAGSLED

SEQ ID NO: 53736 - protein, 142 aa, Zea mays
  Coding DNA Sequence Number=SeqID_10361
MVAELRLRENHSGEHGPTEPGREGAHRRVSRAADSEAELTVALDGARTRRWPQNRRRSAAGGGGALCTHGQSEREGERVWQRAQIGKGRWASRARGSKGARGLRRGRRTRERGCVHGGEIVGERPKGYESVRAVRLKYEDPD

SEQ ID NO: 53737 - protein, 101 aa, Zea mays
  Coding DNA Sequence Number=SeqID_10362
MDSSIYCTYLYPQTLTKNEEESEVTQEKTPPPLESQAGTWLYFDICESEPDSPTNEGKPRSGVILRKDGFYLQEYFHLEQWWDLTAKFPVMLFHPKEQKQS

SEQ ID NO: 53738 - protein, 206 aa, Zea mays
  Coding DNA Sequence Number=SeqID_10363
MTAVGVSEALYAKAGAGYATPPQYVVELFKEHRDTIKSTTVHVLTTFCGFHPLELSTHPIGLFPTEKEDDPMSKDRVEHAKDALRGEAMSQLMGIVESTKITLDNKEDLVVEQMATQIQELEDQVEARENTIEVLEDQLQTTHQQLEEANQHLDLHHQEIQDMEAEGADEDVDIEGGEEPEPASSLDTAGSGRPPSPESSVASFAH

SEQ ID NO: 53739 - protein, 66 aa, Zea mays
  Coding DNA Sequence Number=SeqID_10364
MRMEWDALSRIIRGTRGVVGFAVWLSMGSGHNTCSAESVRNWYISRAHGYEQPWDPLRLEEQWLLI

SEQ ID NO: 53740 - protein, 319 aa, Zea mays
  Coding DNA Sequence Number=SeqID_10365
  Gene Ontology: Mol. function=endonuclease activity; Biological process=ubiquitin cycle
  Homolog annotation: Hit_ID=Q2HUP4; Match level="QueryCoverage=22%, HitCoverage=24%, E-value=6e-18, Identity=56%"; Hit description =Endonuclease/exonuclease/phosphatase
MAMVLFISKLLSLPSSHATSTWPCCLLPENSRTISRSDDCNEENYCFRDNSTSTGKLRELVDAVRMRRVSILCVQETKWKGKKAKEVENTGFKLWYSGTVANKNGVGILIDKTLKDGVVDVKRNQSWKIETTEPVTAIYNTRYGETEERQSMKNSISEKFINSFLKHESEYRTLILPLSLSKNILYYLQEVEFVFIHCVSGGVMSLIDGSYEYYHYLHDGIDDNLMRGGGGSVIITGTTEHAKVVVRGGCAVQGEAGSRVAHRLRGKAVEEVYGGVQGLCLVAGGERCLEAKAVGHISGGANHAFGPAVLGRGVGKRET

SEQ ID NO: 53741 - protein, 64 aa, Zea mays
  Coding DNA Sequence Number=SeqID_10366
MECTICQLDASYTAELSRDTIVGVFFSAEGSQGKNTFDRKIQKLVEVIFSLGSTPRDEAQRLWR

SEQ ID NO: 53742 - protein, 183 aa, Zea mays
  Coding DNA Sequence Number=SeqID_10367
MPGKFSALFRKLIARPHIDNLTTHLKDAVSAQQTWNHVPLQMLTEPKLQEHRGAEAFGKDIGKLGGGRDTEDVDSDTLEDKVKVEVHMLGALMLHKIGGEVDRANDVTVDKGATSEIAMKLLEQLMELGCLNHVAGHNAVLSLSARAEDDRLPLRGLEDEGVHMKAHLMDNVGNVESDKGGDW

SEQ ID NO: 53743 - protein, 318 aa, Zea mays
  Coding DNA Sequence Number=SeqID_10368
  Homolog annotation: Hit_ID=Q6J9V9; Match level="QueryCoverage=29%, HitCoverage=32%, E-value=9e-35, Identity=78%"; Hit description =Putative uncharacterized protein
MKIFEAKRRVESTNPHGVALLQQQQEEGNTGRLNLPWQAWQPVCQSDWQTDLQTDCWSEVRGVRDQLNCPSGPVQLVLTREFRRENPSSTAQRQVQLVYGQREPAQRLKAALRVTQQCPLSATITGHSAAEIGTTVDMIRGGPTVIAATGVRKQRSNHLQVRILPRNGRGALSHSIKDDAPVFRSSNDSRARNRCLRIARPVTLTPWQGKRHLWQAKRAPFHLRHDDRIKKRGSKAGPSEGFDSRPRARRVRDDPGYVCYMAEARATLPRYPRTFSRPAGTICNGIPPEGGTEPSDPIEWVRVQQITHRYFWSAPLGH

SEQ ID NO: 53744 - protein, 324 aa, Zea mays
  Coding DNA Sequence Number=SeqID_10369
  Gene Ontology: Mol. function=helicase activity; Cellular component =nucleus; Biological process=RNA-dependent DNA replication
  Homolog annotation: Hit_ID=Q5NA16; Match level="QueryCoverage=98%, HitCoverage=64%, E-value=7e-36, Identity=27%"; Hit description =Helicase-like protein
MVLSVAELHPQSTNAVIRVRVIRKWEFRGATNDGPLQHINLVLADEQGTPIHAEIVAALAVDKGSLIEIEKVYELKRFRVTPSRNYFKPVDNNFMIQFTLYTQAKVVKDPPQVFPRYIYKLTCFENIEDNIDNRTYLIGYKDIHIVYKGIIYFSNNIDVLGMLTQINPPHLIGYNNSTIIRDIFIKNTSNMSMKITLWGNQASSFSISDVYNQSNNQPIVILLVGFLAKRFKGQPYLSSTTASSWYFNPGIPEAQTYYNKLQNNDLQLIQPTTAEEEILLSQPPNLEKKTVEELLNIDLDMFPPEGYRCTVTISRIVQNSKWWY

SEQ ID NO: 53745 - protein, 197 aa, Zea mays
  Coding DNA Sequence Number=SeqID_10370
  Homolog annotation: Hit_ID=Q6J9V9; Match level="QueryCoverage=48%, HitCoverage=36%, E-value=3e-36, Identity=75%"; Hit description =Putative uncharacterized protein
  Subcellular localization annotation: CTP_CleavageSite=50; ConfidenceScore=5.04e-01
TGKGGILKKDPSQRRKRAPSPRTDQGFEGCALRGSATAQSTRALSPLLIRGSKVGPSKGFDNRPRACRVRDDPGYVCYMAKARATLPRYPRTFPRPAGTICNGIPPEEGIEPSDPIEWVRVWQITCRELRLARPQASASALEEDLRLARPQASDSASASGGVTTSPEPSLGLRRSLRLARPRPQTYYATGDASLPYY

SEQ ID NO: 53746 - protein, 113 aa, Zea mays
  Coding DNA Sequence Number=SeqID_10371
  Gene Ontology: Mol. function=hydrolase activity, acting on ester bonds
  Homolog annotation: Hit_ID=A2XP62; Match level="QueryCoverage=65%, HitCoverage=14%, E-value=7e-25, Identity=70%"; Hit description =Putative uncharacterized protein
MADKMKTVVVLVQENRSFDHMLGWMKSLNPEIDSVTGAEVNYTVAGDASSTPVHFGNASQYVDPDPGHSFMAIYEQILHRERANKVFGKRLHATARDLLTSSTQLILARANNQ

SEQ ID NO: 53747 - protein, 500 aa, Zea mays
  Coding DNA Sequence Number=SeqID_10372
MPSSSSSADTTPPAAASSEETLSSLMVEELRAGDSVDFGVSRMTSARVEDMQRLGYFGGGVARAPGTEEVPEPEGCGPGGGKPPLAAKAGAAAPSKAPEATAGAGGSKSTRVVPPASGVAEASKAAQALPLSGKRVADFGTDITVDDYLGGLDEGQLAIAAPGAAIATAVIVSKARGEALGAEGEVSALALVRDEAGVATRQLKGVTEALSQATEALSQVADFASRTASGALTAAVSAEVERLRTQHADAVREKSASDSKCRKLMDRVAALEREKADLRRQLAAERREANEAIAKEQAAQAEAKLARAEGNLAKELAEHLQERITALESHAKWAEAAMRAEAERTRAQLMDTYRELGARTGDFEVPDREPGLRCLQWVQEELQELPTVVGGVDVVVRERAETARAQAERGERVDDFGALNSALPDPEPTPETAAIATAASSSAAAGEDLPPKVAEGAPDAPAAAVPSAEDPAAVAAETMAEATAEPTAEAPAASGPSQVA

SEQ ID NO: 53748 - protein, 109 aa, Zea mays
  Coding DNA Sequence Number=SeqID_10373
MALSDLVSVMHIGETYLHKTSNLRLYPLQSREEVNHVMQGMAILPVGSDIRRISDPSGTGSGTKFDPWVLPVPDPILLWVGYGFDFLPAGTRWISENSDFRFSTYQYAS

SEQ ID NO: 53749 - protein, 314 aa, Zea mays
  Coding DNA Sequence Number=SeqID_10374
  Homolog annotation: Hit_ID=Q6QP51; Match level="QueryCoverage=52%, HitCoverage=75%, E-value=2e-17, Identity=36%"; Hit description =Putative growth-regulating factor 1
MHEESAKTWLPSKGVTLLLKMTLPTCVLSRCGLSLLQHAPRSSPYDTGAGSHASCKLAQDIRSQTAARGAHNSPAVTSIPPLSPGPVGERVDRHAGGMQPHQGGAPFQLRCVQHGGLGPRVMDRERGHSERDPSPRRKRAPSPPTDQRFEGWPLGRVQQPPQSTQASRLLLIRGSKAGPSDGFDSRLRALRLRTHYWPEVQRLAPRRGSTAASSHSGFAPTTDQGFVGWPPKGSTAASEHAERGMTLGTFDTQPRLGLRSRGTLGHFRDRRERFHNRIPPEGGIEPSDPVKRGPGPANHPQVLLERASGPLADP

SEQ ID NO: 53750 - protein, 148 aa, Zea mays
  Coding DNA Sequence Number=SeqID_10375
MGKSKKGSGSSPRSGDKRKRELTPPSEDFGDLEYSEEEFSSESEGSPAPVSPPASSEDSDDSQGIAVEVWTYIRAVERSELEGSDESEYSSDEEDSSDSSEESSGGDGGDDSDDGGDGGGGGDSGRGDDGGSKGGNGSDSKGSNKASG

SEQ ID NO: 53751 - protein, 35 aa, Zea mays
  Coding DNA Sequence Number=SeqID_10376
MVVMGSTSEKMYLCQGRFFGDKFGSWFPSFLLLCL

SEQ ID NO: 53752 - protein, 290 aa, Zea mays
  Coding DNA Sequence Number=SeqID_10377
  Homolog annotation: Hit_ID=Q6QP51; Match level="QueryCoverage=27%, HitCoverage=37%, E-value=6e-08, Identity=45%"; Hit description =Putative growth-regulating factor 1
  Subcellular localization annotation: CTP_CleavageSite=64; ConfidenceScore=5.65e-01
MQAACNHAKWTPFSDSQHAQPGGPGPRVTQPARRMLQASNCTATRATTAPPRLRNQYHGSRRPSAQPSSASLARRTGGASGRRSGRRFAFAIITTPKKAPSLPTDQRFEGWPPRKGSTAASDRVGPTPTIGQRFEGRPLGKVPRPPQATRAPRPLLIRGSKAGPRRVHNRLRRRARDDHGYVRYITKARAALPSSPETPCSAPIEGNMALSPLLLAKRRRRGVCKKAESVPDRPLALCRGSGAALANPAPAEPLTASTYQPENLGPDRTPGLRPARMREQPDQPKHYARH

SEQ ID NO: 53753 - protein, 55 aa, Zea mays
  Coding DNA Sequence Number=SeqID_10378
RIRGVVRFAVVPSMGLGRHYGTGGYEIDGFGYDYGAGEDEAVEGDFQEFQDYDEF

SEQ ID NO: 53754 - protein, 192 aa, Zea mays
  Coding DNA Sequence Number=SeqID_10379
MAHRTVRCTPDSAVPPATSSLSLDSTVEASDLWVRLGVRCTPDSKCSTQSPYVMLRPLAYVTDNKLCDSIRPSTEWGAEALWIEPGHALISDPCLGHDTSSPGTLLWVVRIGPNPTHSCIDGVGGLLLSRRSSRKNIFGKMIQRIAEASFSLGLAPQEEDSVKRRQCEMSKVNAFSLGQAKKEKGLDMPHWF

SEQ ID NO: 53755 - protein, 196 aa, Zea mays
  Coding DNA Sequence Number=SeqID_10380
MAASMRAPLRRGPRPRPPMGGDNEAIKAKELEARRQVALVVSPAEATNSATGSLTSGGNHLSTDDSGHLCTGGLPVTAAASPRAERSSPPSSYGGEDKTIQERGRHLRGMTTGGRLQPGCMMKILEAERWQKSANTHEVALLQQQQEEDKIGSITAQETKSASSPAVRPLRGGPDADPSSEHRRAPSRGPEGRRAR

SEQ ID NO: 53756 - protein, 168 aa, Zea mays
  Coding DNA Sequence Number=SeqID_10381
MARTRKTARKSTGPLGVPRHQLASRHEGSSSGSNDPIGDLEAKVEQLRSEQRHRNRAQRDTTIDWAVNSRSFAWDCEAKALARVAELSASLKSLQVYCNTLHEEVHVLYARLHPDVPPDVAAMGAGPSGIVNEEPHGELDLFRPPPSMNLVDERSPTTGNVATKDEDD

SEQ ID NO: 53757 - protein, 129 aa, Zea mays
  Coding DNA Sequence Number=SeqID_10382
MSHAQEAYARPRDSFMAIAASSTSIMRGYGDGEIESLGEGLTGAGAQAISFVIVSVWIGEVGLEFYSIAAESESVVEHVLRSSDRERPPWISAGCCNDRKDRWDLQRTGNKEPVYATPPINETRHEQVH

SEQ ID NO: 53758 - protein, 187 aa, Zea mays
  Coding DNA Sequence Number=SeqID_10383
  Subcellular localization annotation: CTP_CleavageSite=25; ConfidenceScore=5.08e-01
MALTKSVRVRFFLSATHWIVMAHLRHTARKSVIPFLPSCLAERPLRQPQEVESVSSCSPVPPLEAPRAPPLGVSATGVAAGGDPNDGGDDSSSSHSTDLSEEQEPEGWVARPITHDAAHRCHFHDALDTLLRQALDRRTWSIEYRCVVFQHSRGVYLDRWEATCLVRRSENSLRGAEVCLEHYSISK

SEQ ID NO: 53759 - protein, 542 aa, Zea mays
  Coding DNA Sequence Number=SeqID_10384
  Homolog annotation: Hit_ID=Q6JAD6; Match level="QueryCoverage=92%, HitCoverage=71%, E-value=0.0, Identity=67%"; Hit description =Putative uncharacterized protein
MARRWPGAAVADLRGCTGNGGVLHPAAGVLFSTRIQESFFRAQMSAQIALRVHRLLDLPAFLLAAGAESEAHLTYLPGLLTLLTISGRYVEEWVRVFYASVWIDPDHHWMRFRFEREDVTITASQIRQLFGFPESTTRLHSLCYGSSDPPRRPHGGVAPGTAHIAALFRPPFSDGSRRSPADFTTAAKYLYELIRRTLLPRMGYREATTHIQLWLLGALVSHSEFDVVDFLICEIEDTVLDGIRARRQLPYAHYLCHIFAQLIQPPRFQSTLEASRLVFGSYRPAPEIPVPASASVFDSQAEDAALRQFDTQGTAADDDDDDDDFGVPPPPPPPMPPRSHDHEAGSSRAAPAPPAMDPALAAILANLAAEQARLSETMLSMFQSMQDRQDALQQQLIQDRAENRAFMALMLQHSGISAPPVQSAPPPPLHAPVVPSILSGPPVGTSPLRPVTLAFTSPVLSSVCPQPPVPPASAVTTTAVAVSVTASAPVAPAARPPSESVPAPASTADPGSETDSDPPSAFALLPRPRPDAPPPPPPASGV

SEQ ID NO: 53760 - protein, 232 aa, Zea mays
  Coding DNA Sequence Number=SeqID_10385
  Gene Ontology: Mol. function=nutrient reservoir activity; Cellular component=extracellular region; Biological process=auxin mediated signaling pathway
  Homolog annotation: Hit_ID=A2YVX8; Match level="QueryCoverage=77%, HitCoverage=82%, E-value=2e-52, Identity=58%"; Hit description =Putative uncharacterized protein
  Pfam annotation: Domain name=Cupin_1; Domain location=63-210; Score =110.8; E_value=4.1e-30; Accession=PF00190.13; Description=Cupin
  Pfam annotation: Domain name=Cupin_2; Domain location=98-174; Score =37.5; E_value=4.7e-08; Accession=PF07883.2; Description=Cupin domain
  Pfam module annotation: Pfam domain module=Cupin_1::Cupin_2; Domain location=63-210::98-174
MAPSKAVVAHLVVLLVPLLSLLPFSSHALTQDLCVANRLLPDTPSGYPCKPKGLVSSDDFYSDALARPGPVIAPFNTSLASAAVKQLPGLNGLGISATRVDVRPGGGVPMHTHPEASEVMFVLEGTFSAGFISAETNKAYVKSLKKGDLYVFPQGLLHFQFNTGNTTATAIAAYSNQNPGLQIAVYALFGNTLTVETVNKTTFVTKEEVMTHEAQGPLRPVVSAILINARQD

SEQ ID NO: 53761 - protein, 279 aa, Zea mays
  Coding DNA Sequence Number=SeqID_10386
GGQAARPFRNKCRDRAAQRPYVRLRPLAYVMGNKPRGSIGPHPRGPACLHGSPGPFSEIRVVSIGVRHFLEEEPTPKEDDSWAQGPPVPETGLSVSTGAKRRTIAGGGALFTRRFAFSAHRNQRVRCMTCGPGPPCQRLDRWLRQRRGGALPWGGSTLLVRRFAFMTVGRSEDEGGALPWGGSTLLVRRFAFFALEDQRTSCMTCGIGPPCHRMDTPRVGVAGLVFPLLEVRSHVGAALFHRCLASRMFISLAVVEKVVASAGEPLGAEVVAAAGEPSV

SEQ ID NO: 53762 - protein, 47 aa, Zea mays
  Coding DNA Sequence Number=SeqID_10387
MESHTKKPVGDVFLKIGLLEGQTSCSYSLVHSVGAESSVPMVGPHLS

SEQ ID NO: 53763 - protein, 203 aa, Zea mays
  Coding DNA Sequence Number=SeqID_10388
  Gene Ontology: Mol. function=nutrient reservoir activity; Cellular component=extracellular region; Biological process=auxin mediated signaling pathway
  Homolog annotation: Hit_ID=A2YVX8; Match level="QueryCoverage=87%, HitCoverage=81%, E-value=1e-53, Identity=58%"; Hit description =Putative uncharacterized protein
  Pfam annotation: Domain name=Cupin_1; Domain location=43-190; Score =112.9; E_value=9.6e-31; Accession=PF00190.13; Description=Cupin
  Pfam annotation: Domain name=Cupin_2; Domain location=78-154; Score =46.6; E_value=8.9e-11; Accession=PF07883.2; Description=Cupin domain
  Pfam module annotation: Pfam domain module=Cupin_1::Cupin_2; Domain location=43-190::78-154
MAPSKAVVAHLVVLLVGMLLPDTPSGYPCKPKGLVSSDDFYSDALARPGPVIAPFNTSLASAAVKQLPGLNGLGISATRVDVQPGGVVPMHTHPEASELIFLLEGTLFAGFISAETNKAYVKILKKGDLYVFPQGLLHFQFNTGNTTATAIAAYSNQNPGLQIAVYALFGNTLTVETVNKTTFVTKEEVMRLKDLFGQSSVPS

SEQ ID NO: 53764 - protein, 127 aa, Zea mays
  Coding DNA Sequence Number=SeqID_10389
  Subcellular localization annotation: CTP_CleavageSite=21; ConfidenceScore=5.32e-01
MVQLNFAMAHPHINSRVSWCRGAATSRPSLHFRRLTMLCVRYGLRWSGLRSQTGIDIGSAISRTGTMMRYSMFTGVVDSTELRSRGGSSSQAGCGSSRSRRSSMEGPMREQQERFREELLQQQMSFL

SEQ ID NO: 53765 - protein, 162 aa, Zea mays
  Coding DNA Sequence Number=SeqID_10390
  Homolog annotation: Hit_ID=O48967; Match level="QueryCoverage=40%, HitCoverage=14%, E-value=4e-23, Identity=77%"; Hit description =Putative uncharacterized protein
MGESDEADRWGQAARERERREREGGGSLTGGARMSTSKKKKKKDHDHQKPQSTTLVVAAATGGWGDCNKHPRPQRGNSGSCPVHPNYLHSAVECREIIDLVKRVSKRREQSSKDGSPPRCRPSKERVNDGEVAAAERDLGYQSPEGDLKDVFTGDSYSGGDN

SEQ ID NO: 53766 - protein, 329 aa, Zea mays
  Coding DNA Sequence Number=SeqID_10391
  Gene Ontology: Mol. function=catalytic activity
  Homolog annotation: Hit_ID=Q2QZ87; Match level="QueryCoverage=25%, HitCoverage=31%, E-value=3e-22, Identity=54%"; Hit description=ATP -citrate synthase, putative, expressed
  Subcellular localization annotation: CTP_CleavageSite=60; ConfidenceScore=5.39e-01
MTLSAEQFRLPPDLPSLHTLPLPSRPCLLPRSRCRACALCVVHARPTPPAFLPRVVPKIQASLSSSPRFHRPWSDSASRPLRLNMTPAGSFGGRTAGIKGWGEDEEAGADAAPVVLPCPFPAPSSTNLTRAGPPLPLASAPHNCCALSGVPTQLPHVPRLPHSFVRHPPPPPRVRDHVTGDCGARPDMLFGKPEKSDLVALNLDFDQVKEFIKERLGIERGWATLSASQSVGGIEIEENWDKVKTIFLPTEKPTTSNSCAPLIATHPLEPQPPNMTVGGGRLFDGAPDSPVHTGQSGAPATSPVSLEIDRWSSDFWARLDVRWRTGHAL

SEQ ID NO: 53767 - protein, 379 aa, Zea mays
  Coding DNA Sequence Number=SeqID_10392
  Homolog annotation: Hit_ID=Q6J9V9; Match level="QueryCoverage=17%, HitCoverage=33%, E-value=3e-07, Identity=45%"; Hit description =Putative uncharacterized protein
MAERYQLPRSCVPPTTRRKDCGRPPSGGSEGGKTRCIREREDMAAFQGGHPPFKGDSPRLRPQPSWDESSPTRSKVLPYGAGARSHASCKLVQGRRSQTAARRACNCPAVTSIPPLSPRPAGERADRHAGDMQPRQVGAPLRLPTYPAWRPRPTRHATGAPVATCEQLHRHSHHYRASSTAEPVPRLEATLRMTQQCQPGATVNTAKNGPTVMAVAGGQEQRSRCQPSLRPIQGQRENPLSRREDGAPVFRSSNGSRMRNGRLANHSPHYTKIIHFLRASGRRSKRRFAFAIMTASKKGPGKGDTPKRILLREGNRPRASLLIRGSKAGPSEGFNGRLRALGFCTHYWSEVRWPAPRKGSTAASGHSGSAPTTDQGFVG

SEQ ID NO: 53768 - protein, 232 aa, Zea mays
  Coding DNA Sequence Number=SeqID_10393
  Gene Ontology: Mol. function=carboxyl- or carbamoyltransferase activity; Cellular component=ornithine carbamoyltransferase complex; Biological process=amino acid metabolic process
  Homolog annotation: Hit_ID=Q8SA97; Match level="QueryCoverage=49%, HitCoverage=13%, E-value=2e-14, Identity=45%"; Hit description =Ornithine carbamoyltransferase
MAPPVDVAGPRPRLGDVEASPRSRSSPSSVAEAESEPLGRARRRPLAEARAEFESRGRAKRSSSSSRAEPKSEPWVGRSGVCRLLGLCLSPSPGSGGAEFTVFRGLARVRALGRAERSSPSSGALPESEPWVGRSGVRRLPGLSPSPSPGSGGAEFAVFQGLARVQALGRAEQSFLWCAAGPDCLSASLCQVAPQSERHRRRCLSVRPLCADGGYQLRIRSLEGTPNYGSRQ

SEQ ID NO: 53769 - protein, 173 aa, Zea mays
  Coding DNA Sequence Number=SeqID_10394
MNKRPAHKVPMQTELRFRPHSSSYGPRTDAATGRLSFASPLKGREPDIKAKEPGAGPSAALTVSTGGKLPPAATTSAQTAASASPPTLTVGKAHRQVLTPVLATKARRKTECCILAGQQQFAFPGMAGGRLLRRAGGWFPPPEAGRGGDRPARTGGRAPAHPSPRPSQDDEHP

SEQ ID NO: 53770 - protein, 404 aa, Zea mays
  Coding DNA Sequence Number=SeqID_10395
  Homolog annotation: Hit_ID=A2Y3J5; Match level="QueryCoverage=27%, HitCoverage=93%, E-value=5e-07, Identity=34%"; Hit description =Putative uncharacterized protein
MWVGEGSANGGGHRGSVGWSAGRISCQDQPVNGAKNAGGTSSHHRVDVSGVAVDGDRVVYGRLGVDRRNVESGGCGRLAAVIDDGGVGEAGRARRRARVGGRGGSGVAAAVVTAQDEAPGVGGNRVGLEEGVKIGGWGGACKGKHIFVKDDVTRDDDAVGGEVQAPIPLVVRGVAEEDAASGARRKLVRGGSGNVRVAGTAEHAQVVVGRGCAVQGEVRCRVAHRLRGKTVEEMRGGMKGLCPVGGRERRLKEKAADHVGGGANHALGPTVLSRGVGTRETQLDAVSEEERSGGVVVELAAIVALQGTDRAPELGGYPGEKVSEGGKRVGLQPKGESPKEMGVVIQNDQVVFVAGEAKDRRCPEITVDKIKGLNSPGRGSRKRKTGVTTELTSMTEALRRAPSI

SEQ ID NO: 53771 - protein, 32 aa, Zea mays
  Coding DNA Sequence Number=SeqID_10396
MESLTLMNVSHRQEKMDHKPKIKGVLSHPPRL

SEQ ID NO: 53772 - protein, 208 aa, Zea mays
  Coding DNA Sequence Number=SeqID_10397
MAQASQAEAKLARAEGNIARERAEQLQERLIALESRVERAEAAMRAEAERTRTQLVNTYRELGARTGDFEVPDREPGLRCLEWVQEELQELPTVVGGFMSYASLVTCEGAMNALSCEGCRHFEVFDQADEDSDRDVYKVEDLVVKESTGALYDQMWGPHGREVVRERAETAMAQALRGERVDNFGSLNSALPDPEPTPAEAATGVPLE

SEQ ID NO: 53773 - protein, 89 aa, Zea mays
  Coding DNA Sequence Number=SeqID_10398
  Gene Ontology: Mol. function=translation initiation factor activity; Biological process=translation
  Homolog annotation: Hit_ID=Q6ZGV8; Match level="QueryCoverage=80%, HitCoverage=5%, E-value=3e-32, Identity=87%"; Hit description =Eukaryotic translation initiation factor 3 subunit (EIF-3)-like
MYMWICGAGVQGFCPRDWNEELQSCQEFPHGNPQERILRGRARYKVTCDFVDAAVKGAVGVINRCIPPINPTDPECFHIVNNVNRFYVA

SEQ ID NO: 53774 - protein, 158 aa, Zea mays
  Coding DNA Sequence Number=SeqID_10399
  Gene Ontology: Mol. function=aspartic-type endopeptidase activity; Cellular component=chromatin; Biological process=chromatin assembly or disassembly
  Homolog annotation: Hit_ID=A3AJ72; Match level="QueryCoverage=41%, HitCoverage=20%, E-value=1e-08, Identity=42%"; Hit description =Putative uncharacterized protein
MANLSPDSNESTFADWWAKVIKQVHKSKRRGFNSIIILGAWCLWLHRNKVVFDGVSPSIIGIKAIFFDEVEFWRLAGASHLEALVPGAGIFRERSLMWGRTYARQKREAAGGAGSSTRKEGTDAGSSARKEGMAKESAHKEGMTKESARKEGMAKESD

SEQ ID NO: 53775 - protein, 86 aa, Zea mays
  Coding DNA Sequence Number=SeqID_10400
MANEMEEFLHSVDDLTVVEPTLNVGLVNLILQKKHEVDLDMSEERSDWVTNLVILKLNHATLYVGGSQKSWVKSLERLSHSGILPV

SEQ ID NO: 53776 - protein, 357 aa, Zea mays
  Coding DNA Sequence Number=SeqID_10401
  Subcellular localization annotation: CTP_CleavageSite=44; ConfidenceScore=5.42e-01
MAPHMLHDDGGPQPPYGSKSTSARTRPLRQLSLRQAPSLLRRPRHHTSWVPKSLRLPHRHGPLREGWPRGDEDETGAHLGPLASLTRVDACNPLLQAHPTWARDEHEGRGIPTSLTPVSGRLLAFSPFALALALDPSGLGHAATLTRRPTGPPGLGTPTIRNVARLEQSRATARQAQVAELTEVDWASERDGVDDGGLVETGDGAKLSVRLFKPPASGKKMEPGEVSGITRDNGVSQRLATSLDIANRRTWARGSGAGAPLYHPQRRAYGLLRGNAASRGGDTPPSPSTYAALHGACVGHGLHRGPGTSSPSADVSQRTSGRVTSSASDPHLVGSSLSLLPKAETLSRSVPFRFMES

SEQ ID NO: 53777 - protein, 673 aa, Zea mays
  Coding DNA Sequence Number=SeqID_10402
  Gene Ontology: Mol. function=translation initiation factor activity; Cellular component=eukaryotic translation initiation factor 3 complex; Biological process=translation
  Homolog annotation: Hit_ID=Q6ZGV8; Match level="QueryCoverage=93%, HitCoverage=45%, E-value=0.0, Identity=71%"; Hit description =Eukaryotic translation initiation factor 3 subunit (EIF-3)-like
MEQPQCNAPLQAVGQEKPRERRKRRYRRCVAEQLRESFAVDADYEYISKDHKPDCQNGSSRSTKVSSPDVITKPDHDESAEVVDSKSEEAQITDSEQATYASANNDLKGTKAYQEADVSGLYNLAMAIIDYRGHRVVAQHLFVYYYAKLSQMSIIPGILQGDKSDSLLYGSVDNGKKISWNETFHSKVVEAAKRLHLKEHVVLDGSGNPVKLAATVECKGIVGSDDRHYILDLMRVTPRDSNYIGQGHRFCVLRPELIASFVEAESMKQSLKQKVPDAPVASTSDAKATSVEADDKSEESSVHTHKENDNSSSEILFNPNVFTEYKLDGSPEEIAADEELVKRAGTYLIDIVIPKIVQDLCSLDISPMDGQTLTDALHLHGINIRYLGKIAGMVKHLPHLQDLFSAEIIVRSAKHVIKDILRQSLDHDIGPAIAHFLNCFMGKVLGASTEGSLSDMQSKTLKGHENSQTQKSTKGHKLSNAAASRKSLSAYSHLTSDGIWFSIKEFAKSKYQFEVPDDARLSAKRVAVLRNLCQKVGITIAARKYDLDASTPFEASDILNLQPVVKHSVPTCTEAKNLMEAGKVRMAEGTLNEAYALFSEAFSLLQQITGPMHKDAANCCRYLAMVLYHAGDTAGAVVQQHRELIINERCLGLDHPDTAHRHPSYLMQNLQKI

SEQ ID NO: 53778 - protein, 189 aa, Zea mays
  Coding DNA Sequence Number=SeqID_10403
  Homolog annotation: Hit_ID=Q6QP51; Match level="QueryCoverage=45%, HitCoverage=42%, E-value=8e-24, Identity=63%"; Hit description =Putative growth-regulating factor 1
  Subcellular localization annotation: CTP_CleavageSite=84; ConfidenceScore=5.11e-01
MMTASKKPPQSTQAPCPLLIRGSKAGPSEGFDSRPRARRARDDSGYVRYMAEARATLPSHIALPLTDLTGKQRRSPRSDCCATRQSGAGNSQVQPQAQQEAPPRPTLGLGLNLGLGRRTPPRLTPRLGLSLDLGGLWQLPPPQGSASTRPREESRPRPTPASASGGVSASPDLGLGPTHAMGDTSLPYP

SEQ ID NO: 53779 - protein, 166 aa, Zea mays
  Coding DNA Sequence Number=SeqID_10404
MPAHSTREMQPNSVAEQAQLVNQGPGQAPKFTIDILPRVETTYEMPALFGNDHLLTLQNHATDPSLAAEPMITMHNRIVTKFYTRRPIHLRKRNVQSPQPPSSVPPRRLKLVTQIDKSTNFPPLPVLELQRVATNTCGLAPVEVATELLLSEEEPADAQNKEVING

SEQ ID NO: 53780 - protein, 192 aa, Zea mays
  Coding DNA Sequence Number=SeqID_10405
  Gene Ontology: Mol. function=RNA polymerase II transcription factor activity; Cellular component=transcription factor TFIID complex; Biological process=transcription initiation from RNA polymerase II promoter
  Homolog annotation: Hit_ID=P26356; Match level="QueryCoverage=94%, HitCoverage=77%, E-value=3e-50, Identity=56%"; Hit description=TATA -box-binding protein 1
  Pfam annotation: Domain name=TBP; Domain location=103-189; Score =137.5; E_value=3.8e-38; Accession=PF00352.12; Description =Transcription factor TFIID (or TATA-binding protein, TBP)
MNDAHESGVPSGIVPILQNIVSTVNLECKVDLQHVANSARNAEYNPRSQRDPDTYLTAFCCGYHEDKGAQDNDTDICFREDVRIYPPLQFARIVQKLGSPARFKDFKVQNIVGSCDLKFPIRLEGLALASGLSATYEPEIFPGLVYRMVDPKVVILVFVSGKIVLTGAKVREEICAAFEKIHPMLVQFRKRS

SEQ ID NO: 53781 - protein, 992 aa, Zea mays
  Coding DNA Sequence Number=SeqID_10406
  Gene Ontology: Mol. function=calcium ion binding; Cellular component =intracellular; Biological process=synaptic growth at neuromuscular junction
  Homolog annotation: Hit_ID=Q10S92; Match level="QueryCoverage=99%, HitCoverage=99%, E-value=0.0, Identity=68%"; Hit description=EF hand family protein, expressed
  Pfam annotation: Domain name=efhand; Domain location=41-69; Score =17.0; E_value=0.071; Accession=PF00036.23; Description=EF hand
  Pfam annotation: Domain name=efhand; Domain location=421-449; Score =15.3; E_value=0.23; Accession=PF00036.23; Description=EF hand
  Pfam annotation: Domain name=efhand; Domain location=455-483; Score =23.1; E_value=0.0011; Accession=PF00036.23; Description=EF hand
  Pfam annotation: Domain name=efhand; Domain location=7-35; Score =17.5; E_value=0.051; Accession=PF00036.23; Description=EF hand
  Pfam module annotation: Pfam domain module=efhand::efhand::efhand::efh and; Domain location=41-69::421-449::455-483::7-35
MAAGTEAFEAYFRRADLDQDGRISGQEAVAFFQGANLPQPVLAQVWMHADQNKTGFLGRPEFFNALRLVTVAQSGRQLTPDIVQSALYGPAAARIPAPKIAAGAARSQMGAAGAPRPQGSAAMTPGQVGAAQMNPAGTPRPQGSGMMPTSTQVSMLQVNPGAAPRPQGISSMMPAASQGGALQATQFAAPRAMQPQPPNLGITQQQPSSTGFMRPPQVGTPAASFQAQAPGINQGLVHGGSMEGSISWQGGNAASVGGIPRAIPGAAPSQTTRGFGPGLPSTMGMVPGQQVQAMSSSPLPPQSNSAVLPQNSKALVLSGNGPASSSGSSTDIFSALTQPKPSLSAPQTSSIPSSSSFMATPTGSQNLTNLTQFGSLQGSSQPQQTQPIVKSIPAPATPVVSAGISNSASQWPKITQPDIQKYMKVFGDVDRDRDGKITGAEARTLFLSWRLPREVLKQVWDLSDQDNDGMLSLREFCIALYLMERHRAGIPLPPALPDSLRHDETLLRATGLPSTAYNSPSWQHNQGNKDDKSALNQAAQEVVDAPKKVEVEKQVLDSREKLEYYRTKMQDLVLYKSRCENRLNEITERASSDKREVESLAKKYEEKYKQVAELASKLAVEEAAYRDVQERKVELHDALIKMVQGGSVDGLLQVRADRIQYQLEEMEKALSERCKHFELKFKPSASVELPSGWEPGPQEGLIEWDEDWDKFEDEGFSIVKDNGTIQENPVSAENGKVPSLWDDGDMSPVASSNGHIKEERRYSGGDQVAESEIAYDFGDESVRSPGSAGRSASGSPFKSSGFGMHDSSPSKRESYSDHGGSESVFGDKFADETSWNFDDQDTDSVWGSTVLNTEADQRGGTHNSFFGSEAGSPSGASVFGKKRNSFFDDSVPSSPAYTSGFSPKFGESRDDSSSYNFGRFDSFRSQDTGSFPQESRFSRFDSISSSKGENVSGFDTGNSSRNFGRFDSFDDADPFGSSGPFKASGSRSPPKF

SEQ ID NO: 53782 - protein, 259 aa, Zea mays
  Coding DNA Sequence Number=SeqID_10407
  Homolog annotation: Hit_ID=Q8H6I2; Match level="QueryCoverage=59%, HitCoverage=69%, E-value=3e-60, Identity=76%"; Hit description =Putative MURBZC
MPFSLCPLLLILALAVVLLARTLLALAVVFLEPLSLSPRTGPCPSPDPLVFHSPCLLSSLFSPWPSSSSSCSVRLRALGAFVPCPCPDLALPCLAGSCARGPLPTSDAGNDVVSTVDVLESAVAAENSALRSYKQASAAVDCAKETVAKYSEPLCWFPKMILNPQLTLAVLLVNQKLAQALRYAMSQMSDTTKKLQDTASLCYTDEEVVDGFKLTQVARSLDELAEMLEVTAIDCQVSMMDPTTMLEAGYASEDIAVWE

SEQ ID NO: 53783 - protein, 1040 aa, Zea mays
  Coding DNA Sequence Number=SeqID_10408
  Homolog annotation: Hit_ID=Q10S88; Match level="QueryCoverage=81%, HitCoverage=96%, E-value=0.0, Identity=52%"; Hit description =Expressed protein
MLQYLDFSHASTSRKWAHRRQGDGLEAPRNSMEFALEASHSYGVFQEDVPHYPCNMRQYPKSGLNHSFNPVKKLIQEDISFRTNEVQKRPGGVIARLMGMESPPLNAATESISRSEITPRPTMPRRDPPERETSAKHVSFVQHGNRDSTKQASKQEIRAYGEERDVFGQQNKRGNEWSKPQPREHPQEEELQKFKKEFEAWQASRAWEHSRSFELESSTLGDDDDDGRCTDIVPYRYQHHHHHHHKGKDASHGGKHIRSSNEDVHCWRRSSKESGTSISGSRTFSLTTSADAAACSTRLPLSRFYHEEERSLSPTRIVILKPCPELSADDVEESSLGSPELVKKENNMEAFLEEVKKRLKIELEGGVASDDKADRRWFAAAAAADRRAVRRAGTDGLHRPRRQEAALRQLKNVLRRDPPDAETPFSFSHRRRATSTSFDEEPTRPKPTRHEVAPPSSRKGKVRSKEEEKKCAVESDVRSFRYGPSNTPTTTQLDSEPVSPRNLMRSFSAPVSGTTFVKLLSEEPRVLTGARLQRKQEGHGSSRPASSEERKGRKDAFSIRGKVSNLRQNFGLRAKLFGKKFHASDEPFPDDLPPIGTLVTAPSVLIHPGVLQENSTEVPPSPASWCSSPPDEMSRGGYPSPVSPLEASFSEHRSPMRTEAKDMASAASEPGEQAHAEEGRAETSPVLDEQDDGDMDDTDHPMKSFVRAVLVVAGMYGRRHNPGNATMSECEVKPIPKWVLEEVVSPSSAPAGSGAAAVMDHRLLFDLVNEALPGAVRASTTLCAFDKCHAMAPRRASGGKALLEALWKSMQVWIEPPSDRRTASSASVDVLIGRDLSVSAWHGAFREDADALAGDVEAELLDELLEETVWDVLLNPDAFNWSKTFLLSDIPPKLQEQGMNSIPFVVPKDCPVDPSLEDATSGISKDSDGYGGPSPIIVESGLRRSKRLKEPRAGFRHGACPKRNCLMCQHNFDGPPPLSSKVLRNLGTRLCNLSEDDLSEQRLKQKKLTVGPIGPQRVDRKDLTDEKTDDSSDEDKQDNH

SEQ ID NO: 53784 - protein, 46 aa, Zea mays
  Coding DNA Sequence Number=SeqID_10409
DTLPDHLGSDQWGVMIPGQNGNHGSWVKDGWFTDDDEDGYDHAYGN

SEQ ID NO: 53785 - protein, 31 aa, Zea mays
  Coding DNA Sequence Number=SeqID_10410
MENHPGKQRYHKGGVDITFVLLLNWFGITYT

SEQ ID NO: 53786 - protein, 301 aa, Zea mays
  Coding DNA Sequence Number=SeqID_10411
  Pfam annotation: Domain name=Transposase_28; Domain location=138-296; Score=-58.1; E_value=0.026; Accession=PF04195.3; Description=Putative gypsy type transposon
MSYGLSLGPARPVARARVAVLCLFLNFSIDAPKEPAPKEDDSWARALVPKTGLSVSAEVKRRTTAGGGVLLTRRFAFSAHGGRRPKSEEARYRRRWRAPHAAVRLLRTRRLTPKEYDWWAWAPVPEAGSPWRASGEIFSAAMALLDPPKRLQPEVVLNLVHNLLGWGVPAFAGKIRVGGSPHGDLAAGEFVLFISNLPSGLALPILSFFVLLLEELGLQPQHFTPCFILQAAIIAYLRKMSVGHSKERMFTSLVKMECELSCGSIFRASISLALMASVPPPTVTAGPAAEDATQEVVQDVA

SEQ ID NO: 53787 - protein, 278 aa, Zea mays
  Coding DNA Sequence Number=SeqID_10412
MAVMGSTSEKMYLCQDLVDVGLLIEDLLTDMPPRTRKTTRKSIGLIGVPRHQLAPRHKESSSSCNDSIGDLEAQVEQLRMELRHRNSVWVEDGQRINELRTDIQHLQDELAERDLALDWAVNSRSIAWDREAKARARVEELSTVVDNLQMPSRTRAHDGAGTSRGQEDTPNPPPVPPMLDKAITALVTATADNTRFLCEMAGQQLQQQGGRAYLQGPRETSYLDFSETRPPLFIKAEDPLEVDEWVRVIEQNLSDIKSNGMNLNWRFVNTTFQKECSI

SEQ ID NO: 53788 - protein, 30 aa, Zea mays
  Coding DNA Sequence Number=SeqID_10413
MAVMGSTSEKMYLCQDPLLVSILANKSLDY

SEQ ID NO: 53789 - protein, 608 aa, Zea mays
  Coding DNA Sequence Number=SeqID_10414
MPSHGGKLVRSPAFALDLHSRDPAAFVREAEDGAVRIIGRYVPRTEGQRSWDIRGSNDRLNRVFELNRLPYGGYPGQDDVDRGGKKPAVESGDDPAPAAAPSSKKRKLGTAMGGLGVSDGFARELMRTCAAPGGRMSSPELRESSARMLRVTGGWWPKNVPIPHAAGEDFFTSRMVREWKVFPYGRNIAAVVSAVMDKDRQGAAQKRQAVVRLHEARPKRQRGAAKAAAPGGGKPPLAAKSAVPASGKAPEAAAAAGGSKSAKAAPASSRVPEAAKAARELLPPGKRVADFATDISVDDYLVGSDEGQLVVVPPAAATTAAAVVPRAKGGALSAGGEMPALTAVRDEAGAVSRRLKEMKEALSQAADFADRAASGALTAVVSAEVERLRTQHADAVREKSATDSKCRKLADKVAALEGEKTDLRRQLAEERKEANEALAKAQAAQAEANLARVEGILARERVEQLAERLSVLQSRVERAEAATRTEAERTRKQLMDSYHELGARTANFKVPDREPGLRCLEWVQEELQALPTIVEGFMSYASLVTCEGAMNTLSREGCRYYEVFDQADEDFERDIVAEPPELFQLKCLSPAFEAGPHLKGNNPSIPRI

SEQ ID NO: 53790 - protein, 73 aa, Zea mays
  Coding DNA Sequence Number=SeqID_10415
MGKPVPSLLMLLLSRVTALVPTITGIGDHVSGRVRGKVCGQVHSGIRTLILIPIFYLVDNQSPWIVVHRPASL

SEQ ID NO: 53791 - protein, 111 aa, Zea mays
  Coding DNA Sequence Number=SeqID_10416
MGNGNPIGAMIKRSSNFSPLYLPTPTISRLGTHSEKIGFGAEKRPYTEPPTTPPPVLVARVAPTTSDTDPHTDVTVATSRTSLTTPPELYCRRGLCAMSVTQANSEPRAVL

SEQ ID NO: 53792 - protein, 336 aa, Zea mays
  Coding DNA Sequence Number=SeqID_10417
  Subcellular localization annotation: CTP_CleavageSite=41; ConfidenceScore=5.28e-01
MSDRSPSPRGQQQQQQGRQHQQQQRAPRFQGHWKVHGPKVMLALRWCRRTPRIRLLPPRRRLWVPKFQLGSGGGNVANGCCRLGGSDTVGCTVGGRCGRRVRLCPTAKSGGSGGYPQVLSRAHQALRKTEVAIRREWEALGTEHQHLGDWCTQLEERTKTVSCQFASERAEFEQEREDFMEDIRKVSDREEEVTQKAKSLARKEVRLNQREEAITALHDKLKAYNTVLEKQRDKQAVAEVKLQNLQQELPDKAHDIARAEESLKILGARLEAEGSRLCRSAIEYVLTCFRSHDPAAFLGPVIAGLVADTEDAAWEGVQDIVDAVVGRFQRDPTDDE

SEQ ID NO: 53793 - protein, 289 aa, Zea mays
  Coding DNA Sequence Number=SeqID_10418
MWGPYGREVVRERAETARGQAARGERVDDFGALNSVLPDPEPNPTEAAPEAALQPPPETAEGAPDAPAATAADGGPSPTAAPRAEDPVKVAAESTVEEPATAGSSQVQDFGPAHATATTNFLAASTVDDGNKSDGSAYEFSDFGDSGSSVEWTKESSDEDLDYFAALDVAAAEASPRAADAEVVPGPSTGRRRRRAVAKRRMSGADSGRLRLCAFAHSAMLAKALRTWSDVFVMLDWCTCSRSLRGQFGVVVFAFVTLRPAAPLGNCCADRLRGGLRFFALVALARLHP

SEQ ID NO: 53794 - protein, 148 aa, Zea mays
  Coding DNA Sequence Number=SeqID_10419
MAVGFNQGARGAPLGDVEAMRARNREMVQWVTRSTCSGEVTNSGECDRTVPVGLVLGSSLGKLHGLSRKLSEGSDRAEVGGSGLAMGRWPCMRAGFIATRGHDTGVDTGAAEGTRGRALGAFPSAYPRRTRGGLVLPVFKGLFGHLSV

SEQ ID NO: 53795 - protein, 187 aa, Zea mays
  Coding DNA Sequence Number=SeqID_10420
MGEFCYFGYADLVATHEGCGVAGCSRPSPEDYDRVVDDVPNVPDAQSGPNLTPLSQPGDDCGTHDLQTDSPAGEVTVQLPAIMTYRSRAKPTAAEANWDAADRPGNCGRRVARSESGWCRSWTVRGRLHAPMRVDEATVERATLHQSLVVGKAETAALGSLTASLSSTMCFTITVPLSVPDWHEHDP

SEQ ID NO: 53796 - protein, 349 aa, Zea mays
  Coding DNA Sequence Number=SeqID_10421
MAGIARSTRAGGCSRQRRVYRPNHGELVQSKGTVSFTGLTRERAAQLEERLSALQSRVERTEAATRAEAERTRKQLMDSYHELGARTGDFEVPDREPGLRCLEWVQEELQALPTIVEGFMSYASLVTCEGAMNALSREGCRHFEVFDQADEDFERDIYKVEDPIVKESAEAIYDRMWGPHGREVVRERTETARAQAARGERVDDFGALNSALPDPESNPAEAPAAPRAEDPAMVAAEATAEATAEAPATARSSQVQDFGPAHAIATTNFLAASTVDGGNKYDGSASEFSDFADSGSSVEWTEESSEEDLDYFAALDVAAAEASPHAADTEDVPGPSTGRRRRRAVAKRR

SEQ ID NO: 53797 - protein, 176 aa, Zea mays
  Coding DNA Sequence Number=SeqID_10422
  Gene Ontology: Mol. function=unfolded protein binding; Cellular component=prefoldin complex; Biological process=protein folding
  Homolog annotation: Hit_ID=A7QJ60; Match level="QueryCoverage=75%, HitCoverage=68%, E-value=3e-57, Identity=84%"; Hit description =Chromosome chr2 scaffold_105, whole genome shotgun sequence
  Subcellular localization annotation: CTP_CleavageSite=23; ConfidenceScore=5.04e-01
MQNTVANPSTAAAAAAAGNGGVQASGAGGERPEDASKQNLAQVTSSIQKTLGLLHQLNLTVSSFNSASQLPLLQRLNALVAELDTMQKLAEGCNIQVPMEVVNLIDDGKNPDEFTRDVLNSCIVKNQITKGKTDAFKGLRKHLLEELEQAFPEDVEAYREIRATSAAVSGHTIDLV

SEQ ID NO: 53798 - protein, 275 aa, Zea mays
  Coding DNA Sequence Number=SeqID_10423
MTASKKAGPSEGFNSRLRALGLRAHYWSEVRRLAPQKGSTAASGHSGSAPTTDQGAACPAPTVVPLARVRSTAAKSSLKRHRKLRLARPQGSAPRLGLGRWTSPRPTPGLGLNHDLEDDELRLARPQGSDSASAPEDDELRLARPQGSDSASAPEDDGLRLARPQGSDSVSAPEDDELHLAQPQGSDSASALEDDELRLARPQGSDSASALEDDELRLARPQGSDSASAPEDDGLRLAQPQGSDSTSTSEESPPRPNSGPDRPRRQGGHHYPAPS

SEQ ID NO: 53799 - protein, 229 aa, Zea mays
  Coding DNA Sequence Number=SeqID_10424
MAPLATWPVEVESEPWGWARRSPSSSGAEAESEPWGRARRSSSSSRAEAESEPWGRARRSSSSSRAEAESEPWGWARWSSSSSGAETESEPWGRARRSPSSSGAEAESEPWGRARRSSSSSGAEAESEPWGRARRSSSSSKSWLSPSPGVGRGEVHLPRPRRGAEPWGRARRSFLCRLRLDLAAVDLTLASGTTVGAGQAALYSCRVGQWSGEVTAVTSALSTEERASG

SEQ ID NO: 53800 - protein, 327 aa, Zea mays
  Coding DNA Sequence Number=SeqID_10425
MPTSSSSATATPPADASSEETLSTLVAEELRAGDTVDFGVSRMSSVRVQDMQRLGYFGGGVARVPGTEEVPEPEGELVVFEAFFAAARPKRQRGAAKAAAPGGGKPPLAAKSAVPASSKAAEAAAGAGGSKFAKTVPPSSRAPEVAKAARGLPSPGKRVADFATDISVDDYLGGSDEGQLVIVAPAAATMAAAVVPKAKGGALSAGGEMPTLAAVRDEAGAVSRRAADFADRAASGALTAVVSAEVERLRTQHADAVREKSAADSKCRKLADKVAALEGEKTDLRRQLVEERREANEALAKAQAALAEANLARAEGSCGGTARIIPT

SEQ ID NO: 53801 - protein, 250 aa, Zea mays
  Coding DNA Sequence Number=SeqID_10426
  Subcellular localization annotation: CTP_CleavageSite=35; ConfidenceScore=5.53e-01
MARARAYKALPGFDCTLPRTLKPHRSLARRRLPVRSMSAAAQSLYRRRPANRAIPNPVQPSKKTVHTSVKLPERGIGVCFAGEASPRSPELSTPPEYVDRVIHSTILRFLVHTVTTLPREAHRALGLNQFAVVWPVHSPPTRTPACARGPSDSGHPRRQAVPRRDRQSLPEPTPPFAGPPSPPEVAPDPAPEPAPEDLPATALEGKPRNPVEMNTSSLEEMVAGVTWSSILPPGWTVEWDPASAEEEHEE

SEQ ID NO: 53802 - protein, 329 aa, Zea mays
  Coding DNA Sequence Number=SeqID_10427
  Subcellular localization annotation: CTP_CleavageSite=78; ConfidenceScore=5.05e-01
MSSCSLMHRVFLPSEPPDGGYPQSFCLVVGGKQLRGSWYLSAIVRLQGFSSVSPAAPLRRRSPETVTTSPWVGRSKPGCDLGPTLSFKDVHHPRWGGGRAEPELYLSRGFVGRPLLRRSKERALTGPAGGSDFDNAGLVDGGRRQPRRVGLVGLAPGAPSCRKAVAAPCAREDRQRYHALPGRHSCSGAVLPLHRYGASTRGSESLGSVGLAARGFSCLVKGTPRPLFDEPKPGVAVSARIEAELARKEDLVGRSLAGSSVSGADAGVDLPRPRAGLMSSGDSWPRPRDPWTASPSEARSDLGEGVVDAEGAAAPFNRPDPSLQDWIIL

SEQ ID NO: 53803 - protein, 397 aa, Zea mays
  Coding DNA Sequence Number=SeqID_10428
MARLRHTARKSVIPFLPSRLAERPLHHTVSGQSSHLERLHHRLREEQERRRQHGEQQGSSSSPQQEVETVRPRSSVAQLEAPLVPPRDVPAVGGATGGDPGDDDLAHSTESSEPQEAEGWVARPITRDAARGCHFHDALDTLLRQAFDRHTWSIEYRCVVYQHSRGRYPDRWEATCLVRRPEDDLRGAEAVSEHYSISERDTAEAAMQDAARRALSQYCSLFGGVTDGLNLRYYPRRPTGSTESVVVSPVGEANPRLSSTVNLVAVLNTELDHSLDELSRARTEIAELRAELAERHHQEGGSPAPVGTQHPYRSPPRGHHTYGSPMSDNRRRCNRRAQLEQHDQQEENQRQPPPPPPMSVEQMFLMQTQAVQAIGQTLAAMQQAQQQPQPQLQVQMP

SEQ ID NO: 53804 - protein, 986 aa, Zea mays
  Coding DNA Sequence Number=SeqID_10429
  Gene Ontology: Mol. function=binding; Cellular component=nucleus
  Homolog annotation: Hit_ID=Q5N857; Match level="QueryCoverage=100%, HitCoverage=100%, E-value=0.0, Identity=71%"; Hit description=Cyclin- like
MGVMSRRVLPACSSLCYFCPSLRARSRQPVKRYKKIIADIYQLQPDGEPNDRRIGKLCDYVSRNPTRIPKITEYLEQRFYKDLRHENFTLAKVVPCIYRKILCSCKELRPLLATSSLSTIRTLLDMKAHDDLQVLGCLMLVDFLNGQVDSTHMFNLEGLIPKLCKIGHELREDDEGLRLRSAALQALASMAPFQLAYHIIKVQYMGDHSHISMELDEVVSVIISCYEANQTLSIKEVVRFQDDDDLVINGNLAVLPVSGQNSAKVASDTMSASENPAYWARVCLRNMANIAKEATTVRRILDPLFRLFDSHDYWSPESGIALSVLQEMQKLMDKSGAAIFTHASTANMLKYSINIIRPLILPGQHGHLLLSFTIKHIDHKSIAKNSVKQINIVKVASHLARHAKLKASVTIASAISDLIKHLRKCMHFAIEASNANADCDKWYSALYVALEECLVQLTEKVGDVGPILDMVGAFPEALFHQLLLAMLHSDNKTRIGSHRVLSTIVAPSMACPWSDISFPIPMKGDDSHNLHLLVLSAFSSEAIINETRTKNKIQESLQENNKSEAIVDPENGYTQTEPDKRKYSGGPCLNEHYRTAFNDENLKFMKLNDHQIVLLLSSIWSQASLDDNLPANFEAMGLVYSIALLCSKPKSSSHVTRIRCFQLAFSLRRNSLSPESDLKPSRRRCLYTMASAMLIFSAKIADLHQIIPLVKAAAPEKMVDPHLRLMDDCQLVNTSAESSNSEMVYGSEEDESDALAFLSAINKPDTELIETVMCHFREKFENLPEKVNGIEEQLLQEFSLDDSFPLGAPLFMEMPHSCSMYAEKDEECFDEDTVPSELDDDDIIFEHSGSQSDRKTSGSMASSDVLTVNQLIESVHETARQVANVPVPANPVPYDQMKSQCEALVMEKQQKMSVLLSLKHSRTDSHGSAGVDGLETNESSLLSEPELQSTRKGRMRRCDSASSESDCSFRLPPASPYDKFLKAAGR

SEQ ID NO: 53805 - protein, 433 aa, Zea mays
  Coding DNA Sequence Number=SeqID_10430
  Gene Ontology: Mol. function=sugar:hydrogen symporter activity; Cellular component=integral to membrane; Biological process =carbohydrate transport
  Homolog annotation: Hit_ID=A3A0K0; Match level="QueryCoverage=93%, HitCoverage=91%, E-value=2e-73, Identity=78%"; Hit description =Putative uncharacterized protein
  Pfam annotation: Domain name=Nuc_sug_transp; Domain location=234-397; Score=-71.8; E_value=1.1e-08; Accession=PF04142.6; Description =Nucleotide-sugar transporter
  Subcellular localization annotation: CTP_CleavageSite=71; ConfidenceScore=5.07e-01
MNGEVECSVCHAKVPVPPPVSKAYDSHRSTVSSRQRALNVLLVSGDCVLAGLQARRLKVGDKPLFTVSIFMQAARNNVLLSVPAFLYAINNYLKFIMQLYFNPASVKMLSNLKEGLPRRRIGDPLPPIGDLTGDDRGWKDPPPPGDIGSPTSDDHDWKGPSSDMLSDGDPLPPIGDPRSRKSTPAPAQRAKIPVAVGSGGAGRRLGFRLAACRLTGEQGRRRGPAAGSSKVPYRRSSGRSPTTLLQIEADSLKAVGAATTPEGEGEKARRWSTRREVDGRAVYNEKALKSQFDTSIYLQNLFLYGYGAIFNFIGLVVTAIIQGPSSFNILEGHSKATMFLICNNAAQGILSSFFFKYADTILKKYSSTIATIFTGVASAVLFGHTLTINFVLGISIVIISMHQYLSNQIKDEVPSSKVEMAEAHDHRFVISYC

SEQ ID NO: 53806 - protein, 455 aa, Zea mays
  Coding DNA Sequence Number=SeqID_10431
  Gene Ontology: Mol. function=triacylglycerol lipase activity; Cellular component=chloroplast stroma; Biological process=lipid metabolic process
  Homolog annotation: Hit_ID=Q53P41; Match level="QueryCoverage=69%, HitCoverage=74%, E-value=7e-93, Identity=55%"; Hit description =Lipase, putative
  Pfam annotation: Domain name=Lipase_3; Domain location=225-356; Score= 60.7; E_value=4.9e-15; Accession=PF01764.16; Description=Lipase (class 3)
MQHSPPPLLLVVYGLRVPTANNTSAPRLLAHHGLGIHRKGGSGSGGDGDSSAMRGSDGRAYAAAASPVPRGGCQRRRGVRAGEGSGATARGAEHHGHGARGGGHVAAAAGVRRLAGAAGSGGGRRTRCCAPRWRATGELVHACYKAFDLDPASRRHLSCKYGRGRLLEEVGMAGAGYEITRYVYAASDVAVPTMEPSTSGRGRWIGYVAVSTDEMTRRLGRRDVLVSFRGTVTPAEWVANLMSSLEPARLDPCDPRPDVKVESGFLSLYTSVDTTCRFGGAGSCREQLLREVSRLVGSRAKDRPAAGEDVSVTLAGAQHGERAGAALRARCDELGVKALRVANVHDPITKLPGIFLNEATAGVQALRPWRASCYTHVGVELPLDFFRMGDLASVHDLGTYVALLKSGDKAGAAWRGDCGVLAKVVEFVGRQRAGALPWQDAALQMGGLVQTLGLI

SEQ ID NO: 53807 - protein, 310 aa, Zea mays
  Coding DNA Sequence Number=SeqID_10432
MSSGNNLIVDAHDLWNRIKEKYSMANCDAPTPYITCDTNHSKGEEQERWHPNDESTSSTGLFSTSDKCFIANNDGGDESHDEEEYEDDSEDESSSSQGTFSYIASTDINDRENETDDMEEEEIRRFYNHLNKADKALLVKLLRRNKEQGETLLRLEETLIKTNDSLEKMTKEHEELKYSHGNLVQRQLIKPRTEARRASRYQVHGRRSRRLRNPKPRVKKKACKVKAKAAQSGTPDCPVVHRTVSGGAPDSVRCARLNFSELAALGNSPATYDYNSPDCPVCTGLSGEPMVGRANGRPRDLRGTRGRANG

SEQ ID NO: 53808 - protein, 123 aa, Zea mays
  Coding DNA Sequence Number=SeqID_10433
MKHNEFTTRTELKSLTRMIKCAETECGRLRMLKVCLDYSSMRLGVPFIAPRQLGAIGGILGRQILPSVGWRTGESGAPPDNHCSCPVRDFLPFLAQPTVATSGWLAHQTLSGAHRTVRSQQQN

SEQ ID NO: 53809 - protein, 130 aa, Zea mays
  Coding DNA Sequence Number=SeqID_10434
  Subcellular localization annotation: CTP_CleavageSite=50; ConfidenceScore=5.26e-01
MGGLLTLSTDSGALDQRQGRRETSGRRRRGFGCTERTPMSTDRANRGVSRVAGDKAKLTEATNAASARWRSQNDRETTSSGGRTPWTRVRCEASAEGCECASEGRGGRAGVWQLDKGQDGDGHGLSVRRG

SEQ ID NO: 53810 - protein, 282 aa, Zea mays
  Coding DNA Sequence Number=SeqID_10435
  Homolog annotation: Hit_ID=Q8H6I5; Match level="QueryCoverage=17%, HitCoverage=4%, E-value=9e-09, Identity=66%"; Hit description =Putative RIRE2 orf3
MGVGTLQSPLGFKDFHHAARLQSLTNGHPWLLSPVLKWWPPLGRLPLAEAVASADETVSATCALDLRLFGFNGWFSSPPPEVEVVVALLVEWSPTSHPEFVIPQAFWSGQPPRALATSKSRYHRYPKLTYPSVSYLSRKVTSESKGTKVVLAENFSEENFDAEGASPFLDTRRPFGPGPLRRAWLWSSGLPEPWPHSSVPGPKICFGRSVTLFLSPFFSLHLKKVVLLSAGFETALNKSIKNCKALAEATEQKEADRVAMSETISAFCLAFSLNGVPSGSSP

SEQ ID NO: 53811 - protein, 236 aa, Zea mays
  Coding DNA Sequence Number=SeqID_10436
  Homolog annotation: Hit_ID=Q6J9V9; Match level="QueryCoverage=53%, HitCoverage=44%, E-value=1e-57, Identity=86%"; Hit description =Putative uncharacterized protein
  Subcellular localization annotation: CTP_CleavageSite=66; ConfidenceScore=5.51e-01
MGSRSSNSSKKKATQRPGKGIFRKRNLPSEGNGPRALLLIRGSKVVPSGVWQPPQSTRAPCPLLIRGSKVGPSEGFDSRPRARRVRDDPGYVRYMAEARAMLPRYPRTFPRPAGTICNGIPPEGGIEPSDPIEWVRARQITCRTKLSHDLPRVRPRAQQGAPPRSTSGLGLSLGLRRRSPPRPTSGLGLSLGLGRRSPPHPTPSLGLSFGLGRSHVLARPRPRTDYATGDTSLPHS

SEQ ID NO: 53812 - protein, 66 aa, Zea mays
  Coding DNA Sequence Number=SeqID_10437
MAPTLGWGGVVGIFIVYFIYMFVVMLIFAILCMYCVDASTRASYCGSEVQQVEVAEQELIEGKLCP

SEQ ID NO: 53813 - protein, 16 aa, Zea mays
  Coding DNA Sequence Number=SeqID_10438
MATNSPQDAKWIGLRL

SEQ ID NO: 53814 - protein, 200 aa, Zea mays
  Coding DNA Sequence Number=SeqID_10439
  Subcellular localization annotation: CTP_CleavageSite=77; ConfidenceScore=5.83e-01
MGGGLLAAASALRSSLPLFGPPKQKSSSSPLLERVTARRSSVFCCSAGPPPSSGVVRTCGGTPWPLFNEPRPGVAVSAWTEAELARKEDLVGRSLAGSSVSGTDAGVDLPRPQAGLMSSGDSWPRPRGDQPSRLLGPDSRRRPWRRWPGHGDDVVLQSGDPRTASPSEARSDLAEGVVDAEGAAAPFSRQDPSLQDRIVL

SEQ ID NO: 53815 - protein, 86 aa, Zea mays
  Coding DNA Sequence Number=SeqID_10440
MWGSDGGAPMEAITGVGARIAGAGPDVGATWNVVARSAGVWARSMTGEGARWRGLGLFLEYLSVRTCSLDDHPGKQYNHEGGMGRP

SEQ ID NO: 53816 - protein, 89 aa, Zea mays
  Coding DNA Sequence Number=SeqID_10441
  Homolog annotation: Hit_ID=Q6UUN3; Match level="QueryCoverage=64%, HitCoverage=5%, E-value=3e-07, Identity=47%"; Hit description =Putative gag-pol polyprotein
MEANEDNEEDPEEHQLQAQHFGGGQQQRPQAAATYREFLSTQPSLFTKAKDPLDADVWLKVVKSKFPLLTGACPDVAKTRFVAQQLRGP

SEQ ID NO: 53817 - protein, 54 aa, Zea mays
  Coding DNA Sequence Number=SeqID_10442
MGIGCLRDKNLNKDYGVVPFFWRTWVAGVTWPSILPPGWTVEWDPASAEEENEE

SEQ ID NO: 53818 - protein, 240 aa, Zea mays
  Coding DNA Sequence Number=SeqID_10443
MEQRITRSTLAGGRVESGDRGLASPVKQTPIPRSGSFTEVCTVFSEGWTGLGKGSVGRSTVAGGSGGRGHAVHGQTPVVLGSGEVERVRRGTVKVPGCFIGAGVGHGAGWALARRGARGARVGRALASQSASNTWSLLSALVLAPAEQPNVRILPYGLCKISSLRLGLPSSCEFQGKIGSGLEDMVAPSLVCLHCSTRDKTGANSCQTVLAWVQTLQGGSLDNLAPFCYLDPEVLVSLAR

SEQ ID NO: 53819 - protein, 472 aa, Zea mays
  Coding DNA Sequence Number=SeqID_10444
  Subcellular localization annotation: CTP_CleavageSite=38; ConfidenceScore=5.61e-01
MARARAYKAHSGVDCTLPRTLKPHRSSAHRRLPVRGVSAATRATAARRPASPAFPNPVQPSETSVHNSVKLPERGIEACFAGEASPRSPEFTTPPEYVDRVIRSTIFRFLVHTVTTLPREAHCALGLDQIVVVWPVHSPPTKTPACARGPSDSDHPRRRAAPRCDRQSLPEPTPPFAGPLTPPLTSHGSSDDGNALSHTDGLAREGFPRILWEVLQGAGYTTPPQYAVQQFEKHRVPRCRVRMTLEPHPLQPGWHSLDSESFGYRAEDTIEAIALHGLTTFCGFHPLELATHPIGLFPAEREDDPMWKDRVEHAKDIWAIYPGQTAHLTVRCMNALYRLQVMRGEAMSHLMALLEATKITLDNREELVVDLSTEMVQKDLQVEQLSTDIQELEELVGTRENTIEVLEDQLINTQQQLAEANEHLDMHHQEIQDMEANEDVDIKGGEEPASSVDTAGSGRPPSPESSVASFAD

SEQ ID NO: 53820 - protein, 276 aa, Zea mays
  Coding DNA Sequence Number=SeqID_10445
  Subcellular localization annotation: CTP_CleavageSite=27; ConfidenceScore=5.22e-01
MSQRSSVFTLIPNSNPNGPIDKNSAKPASLHTQTTKGPERKRSLNGIMAIISKIWGQSALELDLSLRCLVLDAVPDARARTGPSDLAELHRKAKITQTGLRSPASTRGLDAPNPRRRQAPPPAHADRPTPTIPDTLGHLTEAISPPEVLSSAGYPTPPLYSVQLYEEHLVPRCRVWLTLEAHPLQPGWRSLDSETIGLRTDDTIEAAAMKTLTTFYGYHPLEMVMHPLGLFPAEKKDHPMWCNRVSHVKDVWAMYPDLVGRVTVQCMSALYRLQAL

SEQ ID NO: 53821 - protein, 223 aa, Zea mays
  Coding DNA Sequence Number=SeqID_10446
  Homolog annotation: Hit_ID=Q2IMJ3; Match level="QueryCoverage=87%, HitCoverage=25%, E-value=4e-07, Identity=29%"; Hit description=LigA
MSTIRDVLLHGAKANDDNLRRQERKTWSRRGGELWKGTPRSKRRKLGGARDAGSRGQGNSRRLQPSRQAARRDKQEQGRGAAMGRGKRELRPGSRGQGERHGRRPSQGLGRGTRKPRGPNREQRARREKDRACGAGAERKKQSACIGRRWSAAESSGELEELREQSTTLELTQPWRAEDAGHRKSESGAVRAGAPRHGRARQGVARATSREASGALKERQGAR

SEQ ID NO: 53822 - protein, 171 aa, Zea mays
  Coding DNA Sequence Number=SeqID_10447
MALSPLLLAERGTPKTPKSQLVTPIITKLQRPDGRDPGQGSDHSRDTISSRLSPASGRNSRPRQIHASPEGLLKQRTHLRLARGPARAGFAEKQPWPDRYANRPYRRSIQCKDRLTPYPDARSSVDRADDRSHFAAPLTDLTGKQRRLCCSDCCATRQGEADSRQDRPQAP

SEQ ID NO: 53823 - protein, 104 aa, Zea mays
  Coding DNA Sequence Number=SeqID_10448
MTGKKTTASSDGGTPKKAKVVVEDEEEAGLEDEEEATVTLSVEKDALECDICCLPFQSEVFMASQITMHVYIQYILIGRLQHDVLLCVKSVQERAFAFCAKCSV

SEQ ID NO: 53824 - protein, 180 aa, Zea mays
  Coding DNA Sequence Number=SeqID_10449
MGGDQIGGFAWGRIATARTRVWLWAALRGEGVARQADAGRSRVLRERKKTDRLFTCACGARLRRRLDGLDARTEGARTAMAAAAVWLQLRRSGAGCLRPIDAILKDLLDLWVRTHTRFRCNTLILLVDVDRMVFIGVQDKHHGKDQGMTRVKVITDKHNQGCILDKTCEASKKGEQPMVK

SEQ ID NO: 53825 - protein, 119 aa, Zea mays
  Coding DNA Sequence Number=SeqID_10450
MVSPVSCKRVIRVDVRAPFVGGRLGAQRHAHKYLRQLACRSLDAWAWASKLACQKSEKRVHLARLHATCMAARPFRPLVWAKVGGRFLVAPFRRWSPKTVTSSSWMGRGKPGCDPALSI

SEQ ID NO: 53826 - protein, 288 aa, Zea mays
  Coding DNA Sequence Number=SeqID_10451
  Gene Ontology: Mol. function=metal ion binding
  Homolog annotation: Hit_ID=Q8RZV3; Match level="QueryCoverage=100%, HitCoverage=96%, E-value=2e-29, Identity=52%"; Hit description=Zinc finger (C3HC4-type RING finger)-like
  Pfam annotation: Domain name=zf-C3HC4; Domain location=240-277; Score= 26.7; E_value=8.2e-05; Accession=PF00097.16; Description=Zinc finger, C3HC4 type (RING finger)
MTLSEQLSTPDPLIRDFLKIPHDADAGEGDSPSAVDAQGGGRTTGWKQLRDRLRLRRAAGAWQRRKTGAAAAHAPANGGGLSNISSANNRSNKYNYNPGEAEAAFSRTFSRAPSLRATPTFSRVASTRVGPASCRSSSRRLSTYDFRDVEERRHEDEDEDGDGEEEEDGEDEGDEEKTAAPAAQMSLMALLGQTDNQWDDDEDEEEESGGGAFKKGGAGAVGDEDEDDCDSREDEMVHVCCVCMVRHKGAAFIPCGHTFCRLCSRELWVSRGNCPLCNGFIQEILDIF

SEQ ID NO: 53827 - protein, 37 aa, Zea mays
  Coding DNA Sequence Number=SeqID_10452
MAHRTVRCATGAPTVRHREQFTVRCTPDSPVRCPVCH

SEQ ID NO: 53828 - protein, 262 aa, Zea mays
  Coding DNA Sequence Number=SeqID_10453
  Gene Ontology: Mol. function=DNA binding; Cellular component=nucleus
  Homolog annotation: Hit_ID=A2ZPF8; Match level="QueryCoverage=58%, HitCoverage=39%, E-value=2e-13, Identity=35%"; Hit description =Putative uncharacterized protein
MTELVRAGSGGSRFIGAPSLSDTSIDWAGGGGGTDSASEAPAMGRRAGPTTDRAPVVTRYVHKHLPTTKTFLREPNATGESGTARPLQKINRELVPPPSAEDVPFAQVYRFVGDMFDADVPVPVEAHLQKLKEMDDITAKTVLLVLRNLENNLSVPQFERVMELTRLSDTSKVLVGKAIKLNEEKTEALQLEKACVVASLIQDDMLHFRKKLAATLLFSDINKRKGCPLYKYDKEVDAGSSSDVQILDSPTNPKKRKPLCVS

SEQ ID NO: 53829 - protein, 46 aa, Zea mays
  Coding DNA Sequence Number=SeqID_10454
MAPSWGAIGAASPVCLSWGDEQATVESEVQQVEVAEQELIEGKLCP

SEQ ID NO: 53830 - protein, 122 aa, Zea mays
  Coding DNA Sequence Number=SeqID_10455
MAAALGFLEEEDEGPLERRVGLEHARHDVGVPGWRGFRPWRRRHLGFARHGTHHITLGARDMTNRAQTLGSYSRSCGKFSTQARIMRMTKRDPRILLQQPDPNLTDLSSHGEEATGQHGTTR

SEQ ID NO: 53831 - protein, 130 aa, Zea mays
  Coding DNA Sequence Number=SeqID_10456
MWCNRVSHVKDVWAMYPNLVGRITVQCMSALYHLQALQSDAMAHLANLPQTTKFTLDSREDFVVDLSSELVEKDQQYAQAFNDLCQYAGYHANSDEKKRDRFRRGLNTKLRERLNTVRADSFNELVNLAI

SEQ ID NO: 53832 - protein, 666 aa, Zea mays
  Coding DNA Sequence Number=SeqID_10457
MGTCVAPGGRMSSPELRESSARMLEVTGGRWPKNLTIPWAEGEDMSTSRIARCLRIFPYGQNIAAIMSPVMNKDRQDAAQKRRVVIRLPDPRREAKRARGSEKFAAPGGSQPAPAAKPAAPGSSKVSESVKAVVAGGTKPALGEAAKAQELPSPGKRVADFGTNIRVDDYFLGGAFCASGEIPSAAAVKDVVSSMSCRLREASQQLSEHADAIREKSDAESKNHRLEEKVAALEAEKTDLRRQLVEERREANQAIAEAQAAQAEAKVARAEGSLTSQRAEEWEVKFNALRGRVDKAEASTRSEVERTLAQLVDSYRELGARTADFEVPDREAGLRFLEWLQEELLVLPTIMEGFMSFSSLVTCEGAMNALSCEGCRHYEVFERSDESFEREIFKAEDPAVKQSAGALFDRMWGAHGREAVRERSDRAREQVKMEHAEDVEDLGGLVGAPLEAAEVKPVLPSDAGEGPSAAPVPAMAGKDPASAPTPTVEGAPEVVAEPAVEGPTAAAMPSQGFGPAHATASDNANFVAASTVVAENDSDDSVSMFFESDDSGSSVVWTEESSDEDLDYFAALDVAAAEASPCVMDAKVLPGTSAGRRRRRAVAKRRVSEVESGRLRVDGAGKQELLSSPVGASVGEGELQNLFEGEELRIMLFNYREMGIIPKVEP

SEQ ID NO: 53833 - protein, 23 aa, Zea mays
  Coding DNA Sequence Number=SeqID_10458
MAPSWGAIGAAAPVGLSWGGSGS

SEQ ID NO: 53834 - protein, 294 aa, Zea mays
  Coding DNA Sequence Number=SeqID_10459
MASHESSEGGNSHSHTDGLAHESFPRILWEVLQGAGYTTPPQYVVQLFEEHRVPRCRVRMTLEPHPLQPGWRSLDSESFGFRVEDTIESIALHGLTTFCGFHPLELSTHPIGMFPAEKEDDPMWKDRVEHAKDVWALYPGQTAHLTVRCMNALYRLQAVRGEAMAQLMGLVESTKITLDNREDLVVDLSTELVEKDLQVEQMATQIQELEEQVGAKENTIEVLEDQLLTTQQQLEEANQHLDMHHQEIQDMEAEGADEDVDIEGGEEPELASNLDTAGSGRPPSPESSVALFAH

SEQ ID NO: 53835 - protein, 275 aa, Zea mays
  Coding DNA Sequence Number=SeqID_10460
  Gene Ontology: Mol. function=electron carrier activity; Cellular component=endoplasmic reticulum membrane; Biological process =electron transport
  Homolog annotation: Hit_ID=Q9FVM7; Match level="QueryCoverage=37%, HitCoverage=15%, E-value=1e-36, Identity=74%"; Hit description=NADPH- cytochrome P450 reductase
  Pfam annotation: Domain name=NAD_binding_1; Domain location=161-245; Score=12.9; E_value=0.00011; Accession=PF00175.12; Description =Oxidoreductase NAD-binding domain
MGPPRSADLAVGVDTSRLRRSGKVVLWWRGGGRFPARADGAFRSLVSGDDFSCAVQANASAAVRCWGSQGSAVQAVPGGINLDRMPLPGHQPINGACCIASTSGLVYNSDKIDEIMHHRQNLFEDWENTIPLEYSEECSWAPIFVRQSNFKLPADPSTPIIMIGPGTGLAPFRGFLQERLALKQSGAELGTSILFFGCRNRNMAQKQELARQVEVWFQNTHVQITHMFMLMLTPHRFIFEPRADWFGAEDDLFSYILILMFCFTRVDKRPRTLLP

SEQ ID NO: 53836 - protein, 75 aa, Zea mays
  Coding DNA Sequence Number=SeqID_10461
MGTPLADSLPSAVRQTLGKARAYQRLLSFLDFLSFGFKDAFLPFPKMSQDKKVAAETKLSEEEKLLEEKTAGFVE

SEQ ID NO: 53837 - protein, 495 aa, Zea mays
  Coding DNA Sequence Number=SeqID_10462
  Subcellular localization annotation: CTP_CleavageSite=44; ConfidenceScore=5.16e-01
MARCPRRFATRSRSRPFSRSPTRSFRGLVTSHLEPPPSSVGPVACAVDWVPNYDNWLSAPVAPTSLCPWSSSHSNLLLTGHAVELLALPPHRRCRMLLLVATARALRLGMSGVPDEEAVTIVGKTSDWMTRLMSAYRLSVLTIAERKMVEGRRSEDGGRREREEDGAAVGCPMAVLVMARLEATTEGGAWLGEWWIDPIQLSWGKGENTVHATVAASFVGSPIHIQCCSDLPLLPLLVDAPSSHEECGTSISRESFQEEVKNLNPKVVMFGDNVPQERAESAKEAARTCDALLAMLITKVLNMQHGNHLENCFVDAYNKRYFEDSGLNITCQGLLFQSNALNKENGKLGPTTALFKAEMPWLAQRENLSEKQRVKSLQNGERNFGGLRESWIVIFFVLVTLPLFSFASVLMLMLPIVEQVFLHFCSRMYQRYCEHNNWKFKSISWSYISTLKQQDLVEKGIFDIYEDVEKLLQALSKEEEVVRVWPGHLLRQRNT

SEQ ID NO: 53838 - protein, 230 aa, Zea mays
  Coding DNA Sequence Number=SeqID_10463
  Gene Ontology: Mol. function=microtubule motor activity; Cellular component=microtubule associated complex; Biological process =microtubule-based movement
  Homolog annotation: Hit_ID=A2XIZ8; Match level="QueryCoverage=29%, HitCoverage=6%, E-value=7e-16, Identity=63%"; Hit description =Putative uncharacterized protein
MAGSLCRSVDLQAWRRGCWLVRDGIWEQQSEFKRPNGSRKGRRGRSLLPLPSSSCFCGSTTPCEGDATAAAVDFEVRAFPLGFVSLAVLQICVTAQARAAHQARRNLIESEDSSFRSSYRRMGSREPFEGNVRLSAMSMIKNALAGFNTSLVCYGQIGTEKTYTMLGPLGTMVDSGSNHANCGVVPRVVQKRFSRIQREREDELDFVEALFASGGINHHSSLYPDGDRRS

SEQ ID NO: 53839 - protein, 30 aa, Zea mays
  Coding DNA Sequence Number=SeqID_10464
MTKVDALPKIVEFYSESEELVKSLPLSYVR

SEQ ID NO: 53840 - protein, 170 aa, Zea mays
  Coding DNA Sequence Number=SeqID_10465
MGRLRSAEWEMNLFKVAKFGFAHIGKRFCKVREVIIIVSACNNYVVDICENVATHLALFLILVLLENVYPTFSMPSELRSSQNVPNGRIAGSVLRLRSMIARLTPMRSRADHGLGHLLFDRARVARVFAVGGKVVYVPLAGNKVYLNVSRNLLVSVYGYHPLGAWDLHAQ

SEQ ID NO: 53841 - protein, 653 aa, Zea mays
  Coding DNA Sequence Number=SeqID_10466
  Subcellular localization annotation: CTP_CleavageSite=77; ConfidenceScore=5.09e-01
MDKDRQGAAQKRQAAIRIVDARPKRQKRGSATAAAPGGGKPPLAAKSGVPASSKAPEAAAGAGGSKPAKAVPPLSRVAEAAKAARALLPAGKHVADFATDICVDDYLGGSDEGQLATVAPDAAVAMAATVPKARGEALGSGGEAAALAVVRDEADAAVRRLKEVSEALSQVADFASRTASGALTTAVSAEVERLRTQHADAVREKSASDSKCRKLADKVAALEREKADLRRQLAAERREANEAVAKEQAAQAEAKLARAEGNLAKELAEHLQERLTALESRAKGPRPRCMRRPNGRARSLWIHIWVREELLELPAVAGGLMSYASLVTCEGAMNALSHEGCRHFEAFDQADEDFERDIYKVEDPVVKESTGALYDRMWGLYGREVVRERAEAAMAQALRGERVDDLGALNSALPDPEPTPAEAAPGVALEPTPETAPTPAAAGKDLPPKVDEGAPDALAAAVPSAGDPAVEVVETTAGTAAEPAAEAPAASGPSQVQDFGPAHATATAKFLAASTAEGGNECGGSGSEFSEFSDVAYSGSSVEWTESSEEDLDYFAALDVAAAETSPHTAGAQDVPSPSTGRRRRRAVAKRRVSTEEGSRLRVSRAGRQELLSLSAAASTGEGELRSLFAGEELRIMLFNYREMGIIPKVEPM

SEQ ID NO: 53842 - protein, 45 aa, Zea mays
  Coding DNA Sequence Number=SeqID_10467
MAISQALHGYVTMVRVTVFPFHPVRCSYCYSTFREKKIAVAVANQ

SEQ ID NO: 53843 - protein, 72 aa, Zea mays
  Coding DNA Sequence Number=SeqID_10468
MAEALAAMAGGIKLAGAKETGLAGEEIWSQEIRETLGDTGVSHPSPLKGISSRDSGQSPPRVKRRVRLIGNG

SEQ ID NO: 53844 - protein, 51 aa, Zea mays
  Coding DNA Sequence Number=SeqID_10469
MRYTGEWAQSAATDNEEAGVRAWSWAAQRHPETFLQLRYMKYIMNIRKMIR

SEQ ID NO: 53845 - protein, 250 aa, Zea mays
  Coding DNA Sequence Number=SeqID_10470
MDSYHELGARTADFEVPNRESGLRCLEWLQEELLALPTIVEGFMSYASLVTCEGAMNALSREGCRHYEVFDRSDEDFECEIYKVEDPVVKESAGALFDRMWGPPRSGGGQGAAVRDEKVDDFGALNSARPEAKSKPVAAGPEAAPALPPETVEGAPDAPAATTAGGGSSPTAAPRAEDPPKTAAEPAAEDPAAAGSSQVQDFGPAHATSTANFLAALTVDDGNESDESASKFSDFGDSGSSVEWTEGVVG

SEQ ID NO: 53846 - protein, 261 aa, Zea mays
  Coding DNA Sequence Number=SeqID_10471
MRCRLLLGHAYPASSSVGGEGDGTDPDVALPPRGEDVVDSATGGRADGRHCCRRAAEEGVSCLAAVEGHELKTPETEHHPGLERLLETTHPEHNGKLFVNTQQAPTWRANSRCFDPRGSLDRRPRVGRGGDSSEVEAESGPWGRARRRPSSEVEAESEPWGRARRSPSSEVEAESEPWGRARRSPSSGVEVESEPWGQARRSPSSGVEVEPELWGRARRSFLWRPRLDLAAVSLTLSSGTAVGVGQATQCIPVRSVSGAAK

SEQ ID NO: 53847 - protein, 290 aa, Zea mays
  Coding DNA Sequence Number=SeqID_10472
MNILEAEGGAEAAARLASPHHQTGAAADWVFTNTLQGPPLRHGGWVPRVMQAGPGQKEPNRCAWSAQLPSGYKHSSTFTQTSGPTRHETDAPVTTCKKLHRRLRQYRAFSTAEPVPRLEATLGTAQQCQPSTSVTGQSVAGEGATVDMAKSGPAVMAAAGGRKQQSSRLQAHVPSLDSERALSHGVKTTRLCFVPRTARARTTATPLTTRPVALTLRQDRRHLWQAKQATLHLRHNDRVKKGTEKGDTPKGILLHEGSGPRALLLIRGSKARPSEGFDSRLRALGLRAYY

SEQ ID NO: 53848 - protein, 130 aa, Zea mays
  Coding DNA Sequence Number=SeqID_10473
MRRKHGITLKIPRCSSPDSRNEQDTGTQGSSDKDLRSGRPNSSNDDLRADAAATRPSPTSPLEGQGQATKAVEPEVSPRVAPTISSAEKPLPAASVGGGTGSSTEATQAGEPDTRQLPAPWTVNALPPDH

SEQ ID NO: 53849 - protein, 633 aa, Zea mays
  Coding DNA Sequence Number=SeqID_10474
  Homolog annotation: Hit_ID=A2Y9N4; Match level="QueryCoverage=22%, HitCoverage=6%, E-value=1e-10, Identity=34%"; Hit description =Putative uncharacterized protein
MWIHQVQPEDFVLILPDEETASRVLNDGKAYRGPHFSLKFKRWSRFTHASSTIMSGMVEVEIRGIPEHAWFRSTAENILRDSCWISDVHPDTLQKKDYSAFRVSAWCFDPGRLHRDMDLLIVEPGLHALEKRCLTYKISVSATLSELSAADLGPPPPPPPAYGRRPDGDGGGGEDQDPQSRRSNGSLFQRRPVHLRLGPQLPSGRGAATLAPRAVFPAPSLFLRRSVHLRLDPQMSLGRGAATLAPRVALPAPSTTSGRETAYPVRDPDRDALPSLRIDETPVSEEPQEDRETTVTVMVGQISPGKINSPRIECDMTVGTSSEMVGSPRNLIGPPEMAWNASVSPLRPTGPLETWLPRPVSPQPCLTLETRLPAPVSPHCLPGLLNTTMPGAVSPHIRAGMLEIVPSVHVSPRPRVGTPEMTPDDVLPIEDTRTLKMALPAPVSPQHPPGSLETAASLQTEPTRMLKVYYRRGSKASQFHDGQQDGTGRELLATENGHTTDPRPDTLTAMGAPLSATRKEEFLNKICRRPDACLLIPNKNSKKATPPSPTTHAAAPRRSRRVAGAGLEFSMQDWGGRATKKAMKALQIITEDEGISQEALKAYAELFKHPLSQLQVEALSALFGWPTPPEGPV

SEQ ID NO: 53850 - protein, 77 aa, Zea mays
  Coding DNA Sequence Number=SeqID_10475
MGILGKLDIVQLKPKDVIKNCKFIQNPKNEDCNLADGEYILVLEQGVAQEVAHEPAPEPAIEDLPTPALEGKPRFYA

SEQ ID NO: 53851 - protein, 126 aa, Zea mays
  Coding DNA Sequence Number=SeqID_10476
MVPTLPKVQKASAATPKKRRMANVLDDVLETTKVLSPAATKKVAETTKTQAEAKTRQAETKAAQAQTKAEAGPSVPTEMELVDPKEKRQSGLHLKRSKLLLPKLRTKALTTSFVMLREKNYPKKKC

SEQ ID NO: 53852 - protein, 158 aa, Zea mays
  Coding DNA Sequence Number=SeqID_10477
MGMCTAGRALLRDSSGRRLTSGSLIAILSRTIIRGTLKAPNSQLGEADRQSGPTSGTIGSSASPDPGLGLGLSPGRRRTPLRPTQGSDLGSAPEDDELRSTRPRARTRAQPRKTANSAPPDPGLGLGLSPGRRRTPLRPTPGLGLSPGLSRRSPARPT

SEQ ID NO: 53853 - protein, 144 aa, Zea mays
  Coding DNA Sequence Number=SeqID_10478
MNDGAKKRDVSSNSMNVACRNTSLLGPTRLGGSYPTAAWRGERNAGVGDNDNDDQSGEAKDEAEPCHRSSLGARLGRLCCHGEKNAGVGDNDNDDQSGEARTRLNRATEAAVDAFSERQILKKNRWRGGLSAAWGRTVRGLVRS

SEQ ID NO: 53854 - protein, 147 aa, Zea mays
  Coding DNA Sequence Number=SeqID_10479
MPVRAPRVPRVAPKPSRRHGPAPAPYKAPRDLDRTPPHALDLTGAPNHRRLPVPGVPAAARSPCHRRPANRTLPNPVQPLEKTEHTSVKLPERGIGVCFAGEASPRSPDSTRPPASIGRVILCSILRFLVHIASTSPREAHCAIGLN

SEQ ID NO: 53855 - protein, 99 aa, Zea mays
  Coding DNA Sequence Number=SeqID_10480
MERTKGDRASRHAFVMRDWRTSSGSGLRLAMERTKGDRASYHVFIDVATRRRLHTKGSVFAFAPTFALRGTSSTESSGAEDVARWWRRCPHSKWSRGDF

SEQ ID NO: 53856 - protein, 241 aa, Zea mays
  Coding DNA Sequence Number=SeqID_10481
SQMEVQCQTSFCQNEDGFPNLLRACIVRLGIRSQPQYDGHEFIKHGSEKCVMTVYIGSSPHHVEWSVTAAGHRFKDTCQVDACKALRALCQIYEEELLEDDPTVVYLTAYLLTLDAQYVSGTIIRGTLKAPKSQLPTPEDLRLARGPPYGNEPTFGSPEAQSSPRSNLDQIATPTDQIAGAFNAKGSDSGSAPEDDELRSARPQGSDSGSAPEDDELRSARPQGSDSGSAPEDDELRSARP

SEQ ID NO: 53857 - protein, 173 aa, Zea mays
  Coding DNA Sequence Number=SeqID_10482
MALHVWRLLGEALQVGDEGLGFGEGLGVLHALHVAFVRVSRWKKRGREQEDGLGHQEGLQVVVSMAEERGEISYGVEKGLEQRMGELDWGARGSGAKADARNGDAAALATGEDAAGWRSEQGTDVVAKLEARAWGSEWRGWCALLLGGEGGWKMSTGERRRRDKETAGLKMDT

SEQ ID NO: 53858 - protein, 364 aa, Zea mays
  Coding DNA Sequence Number=SeqID_10483
  Homolog annotation: Hit_ID=Q6QP51; Match level="QueryCoverage=58%, HitCoverage=80%, E-value=6e-20, Identity=37%"; Hit description =Putative growth-regulating factor 1
MQAACNRTKGAHPFDFDASSMAAQAHTSCNRRAGCYVQETAPPLAPLPCLLDCGTSTAARGNPAHDPTVPTRHIGHGSVSHGRRRDGRYGQKWADNNGSGRRAEAAGRRHLSQAKQATLHLCHNDRVKKGTGKGDTPKGILLHEGNGPRAPLLIRGSKAGPSEGFNSRLRALGLRAHYWQRLAPEEFDSRLRRRARDDPGYVRYITKARATLPRAPSSNGHTFGSPETQSSVRSNLGQIATPTNLGQGSDSASAPEDDELRLARPQGSDSASAPEDNELCLTRPQGSDLTSAPEDDELRLARPQGSDSALASADGLRLARPGARTRPRPQEDRLDLDLGGASASPDPGLGPTTSQGGHHYPTPS

SEQ ID NO: 53859 - protein, 70 aa, Zea mays
  Coding DNA Sequence Number=SeqID_10484
MGDPVSGSVRGKVRARLHSGILPGSKSIDHHRSRYQDEYKSIPDLARVLEKSLDFYRDPDLAKQLLDLVY

SEQ ID NO: 53860 - protein, 189 aa, Zea mays
  Coding DNA Sequence Number=SeqID_10485
  Homolog annotation: Hit_ID=Q2QUK2; Match level="QueryCoverage=100%, HitCoverage=34%, E-value=4e-21, Identity=36%"; Hit description =Putative uncharacterized protein
MAPGIRFSKRVRAGPQLEEQSSKRLHSTETDGHNVQEPIDGNDDIPNSPTTPRLADHFSRVAEEAMASAAHDSTVMLNATVVLHLDLLIISAELKRKTWHLLLMTVQRAPRRPRAATKGKQLDRMTKVMQRRLPIAVEEGKKRPHESVQAAKFASEAGIIIRETMPILTRWKDYKDDQKYYNSFVSQLN

SEQ ID NO: 53861 - protein, 33 aa, Zea mays
  Coding DNA Sequence Number=SeqID_10486
MAGGGAACLRRSLVNFGSGRTESVRGVSSQQPY

SEQ ID NO: 53862 - protein, 162 aa, Zea mays
  Coding DNA Sequence Number=SeqID_10487
MSSTDDYNHNTGVSSHRTFGDEADPQQECARDSCRIAELSAEVTHLQQEITEHDTAIDWAVNSRSFSWDCESKALARVAKLSASLENLQANCNTLHEEVHVLYDRLTPNVPPEVAAMGAGPSGTTNGGSYGELDLFGAPPSMNLVDERSLEAGSGAAKDEED

SEQ ID NO: 53863 - protein, 58 aa, Zea mays
  Coding DNA Sequence Number=SeqID_10488
MGKPVPSLLMLLLSRVTALVPTITGMGDHVSGRVRGKVYCQVQSGNNMLLCQKSQKVT

SEQ ID NO: 53864 - protein, 150 aa, Zea mays
  Coding DNA Sequence Number=SeqID_10489
  Gene Ontology: Mol. function=aspartic-type endopeptidase activity; Cellular component=chromatin; Biological process=RNA-dependent DNA replication
  Homolog annotation: Hit_ID=Q10G32; Match level="QueryCoverage=90%, HitCoverage=10%, E-value=5e-10, Identity=31%"; Hit description =Retrotransposon protein, putative, Ty3-gypsy subclass
  Pfam annotation: Domain name=zf-CCHC; Domain location=62-79; Score =21.7; E_value=0.00079; Accession=PF00098.14; Description=Zinc knuckle
MARFLKGLRPELKTILASQDFLSFSHLSNKAIQVEMAKEEEKGHLKWKFQAPSVASNQPPANACWYCGDPSHFKNNCPQLKAPRPTYSNSVNGPKNTSAPASKALPSNNQQSRTQYQGRARVNHVDAQEAQQAPGVVLVLWKSMASLLHP

SEQ ID NO: 53865 - protein, 28 aa, Zea mays
  Coding DNA Sequence Number=SeqID_10490
EHEYIDLKRKDAENLSEDPRDLDLNLKL

SEQ ID NO: 53866 - protein, 445 aa, Zea mays
  Coding DNA Sequence Number=SeqID_10491
  Gene Ontology: Mol. function=transcription factor activity; Cellular component=nucleus; Biological process=regulation of transcription
  Homolog annotation: Hit_ID=A2Y7C5; Match level="QueryCoverage=96%, HitCoverage=50%, E-value=1e-153, Identity=67%"; Hit description =Putative uncharacterized protein
MRAPSRVVGLGRVTGDENLVRTINRIPQRLGVQFSASHGGSLTGTTVYFHERASTLSVNTITTTEKQTANGTSEGAIFRKGLSSIYERSSYLLHGFMLVRRLAFSVRDLWNLFSSEVHAKLTRILHRFWTTLQGSCEDIGWLQRTRASLRSVDGTGLFSNHSPLYFTNTKRFFSKMGLACHIAKIHSEASVEKNAWELKQYIEELYWGSGKQVLLLGHSKGGVDAAAALSLYWSELKGKVAGLALVQSPYGGTPVASDILREGQIADKETRRIMELIGDIRALEDLTYAKRKDFISQHKLPIDELPIISFHTEASTAPTALASLTRVAQAELLPWLPLPRFFLSASEFVESMLASLKVPVVAPVSAAMAVTALHLRLRYGERSDGLVTRRDAEVPGSVVVRPERRLDHAWMVYSTLKMGSAEADASEMCEALLAMLVEIGRKKFC

SEQ ID NO: 53867 - protein, 186 aa, Zea mays
  Coding DNA Sequence Number=SeqID_10492
  Homolog annotation: Hit_ID=A2Y7C9; Match level="QueryCoverage=25%, HitCoverage=10%, E-value=1e-14, Identity=81%"; Hit description =Putative uncharacterized protein
MNFQKKHQTASEQPDAFSKSSDGGAKNAPISISMDDGSTGENEDVASNAVVVPYQVPAQVSGPPTVTNAPNFHPASVMAVISADRSAVISADRSAPRPPAFPACPSASPAHRSGNGARPTLPAPPSPSPALTPTPATTSPSPSRVATLSPAACPFSPAGRSKAQRWASSCLTNPSSSALGVGAVGS

SEQ ID NO: 53868 - protein, 127 aa, Zea mays
  Coding DNA Sequence Number=SeqID_10493
  Subcellular localization annotation: CTP_CleavageSite=71; ConfidenceScore=5.44e-01
MSKNTRDTRFIPRFGHTTKAPYFLVEAPTKSRVSFNPNPPFADHKGRSRFTNLLSRRLDRFQNRLSREKIRLNRFSQKFCNDFSDNSDCQTEQSRDGRGTVPKPVEPVSGPVEPVSRAKNQVLNILK

SEQ ID NO: 53869 - protein, 24 aa, Zea mays
  Coding DNA Sequence Number=SeqID_10494
MEHHRLEKQEAGQRRLEDQDLNCK

SEQ ID NO: 53870 - protein, 127 aa, Zea mays
  Coding DNA Sequence Number=SeqID_10495
  Subcellular localization annotation: CTP_CleavageSite=71; ConfidenceScore=5.41e-01
MSKNTRDTRFIPRFGHTTKVPYFLVEAPTKSRVSFNPNPPFADHKGRSRFTNLLSRRLDRFQNRLSREKIRLNRFSQKFCNDFSDNSDCQTQQSRDGRGTVPKPVEPVSGPVEPVSRAKNQVLNILK

SEQ ID NO: 53871 - protein, 669 aa, Zea mays
  Coding DNA Sequence Number=SeqID_10496
MGGIGVSDSFARELMRTCAAPGERMSSPELRESSARMLRVTGGCWPRKVPVPCAAEEDCLTSRMARQWRVFPYGRNIGAVVWAVMDKDRQGAAQKRQATVRIHDARPKRQRGAAKAAASSGGKPPLAAKAGASAPGKAPETTAGAGVSKLTKVVPPASGVAEAAKAARTLPPPGKRVADFGTDISVDDYLGGSDEGRPAVVAPAAAIATAALSSKARGGTLGAGGEVSALALVRDEAGAATRRLKGVTEALSQATEALSQVADFTSRTASGALTAALSAEVERLRTQHAAAVREKSASDSKCRKLADKVAALEEEKADLRRQLAGERREANEVVAKEQAAQAEARLARAEANLAKDLAEDLRGRLTALESHAKGAEAAARTEAERTRTQLMATYRELGARTGDFVVPEREAGLRCLEWVQEELQELPHCLGWVNVVRLPGCQHYEAFDQADEDFGRDIYKVEDPVVKESAGALYDRMWGLYGGDVVRERAEAARAQAERGERVDDFGALNDALPDPEPAPETTEDAPGAPTSAATVEDLPLKVAEGAPDALAAAAPTVEDPAAEAVETMAEVAAETTAEAPAASGPSQVQDFGPAHATTATEFLAASTAEGGNQYSGSASEFFDFADSGSSVEWTEESSEENLDYFAALDVAAAEASPHRRGRVGRARP

SEQ ID NO: 53872 - protein, 22 aa, Zea mays
  Coding DNA Sequence Number=SeqID_10497
MGKRGSEGDVGDFDGEFIDEEF

SEQ ID NO: 53873 - protein, 231 aa, Zea mays
  Coding DNA Sequence Number=SeqID_10498
  Subcellular localization annotation: CTP_CleavageSite=55; ConfidenceScore=5.45e-01
MELDGGTAVGTVVLLLTSPCFRRASWRLLRGRGRVRPARQRQSPSPGSGKAEIVRQRPRRSPSPGSGEAEVVIFRELSPSPSPGSGGAEFAVFRGLSPSPSPGSGGAEFAVFRGLSPSPSPGSGGAEFAVFRGLGPSPSPGSGGASYGTSGEVWSPVGLTFCVEGPRDLVGWHGDLVRVTSYRRQGLGRAGDASAVKEETSGETESSQGWLPSPEARLGRGVIKSLVWTDP

SEQ ID NO: 53874 - protein, 164 aa, Zea mays
  Coding DNA Sequence Number=SeqID_10499
MTVAGAREQRSRHLPSSCPIRRQQENPLSRREDDAPVTRTSNGSRTRNGNLANYSPRRINSAARRTALRAEAAGDVSPSPKRPRQKRGSKAGPPRGSTAALDRVRPTPTTGQGFEGRPPKGSTTASGYSGSVPPTDQGFEGWPVEGFTVAPDAERGMTRGTFDT

SEQ ID NO: 53875 - protein, 267 aa, Zea mays
  Coding DNA Sequence Number=SeqID_10500
  Subcellular localization annotation: CTP_CleavageSite=28; ConfidenceScore=5.15e-01
MSPSSPMHRVSPSSKPPDGGNRRLFAPSLEERNSVGVGTFQPSFGFKDFHHAARLHPSTGGPTLSFKDVHHPRWGGCQTEPALYLPRGSVGHPPPLHSWERVPTGPADGPDFDNVGWIGDERHHLQRVGSAGSAPAASSVGGRLPRRVHGRSTLDAARREGGARVLGWPCFCTKAAPLRGGRCPTHRGGFEWGSAGRLVAPGASAEVGVAREVPVSDGITATIGASGLRLFVLVLAPGVALWARARQQLCPLLRPAPLRGEEPEFRL

SEQ ID NO: 53876 - protein, 231 aa, Zea mays
  Coding DNA Sequence Number=SeqID_10501
  Subcellular localization annotation: CTP_CleavageSite=55; ConfidenceScore=5.39e-01
MELDGGTAVGTAMLLLTSPCFRRASWRLLRGRGRVRPARQRQSPSPGSGEAEIVRQRPRRSPSPGSGEAEVVIFWELSPSPSPGSGGAEFAVFRGLIPSPSPGSGGAEFAVFRGLSPSPSPGSGGAEFAVFRGLGPSPSPGSGGASYGTSGEVWSPVGLTFCVEGPRDLVGWHGDLVRVTSYRRRGLGRAGDASAVKEETSGETESSQGRLPSPEARLGRGVIKSLVWTDP

SEQ ID NO: 53877 - protein, 31 aa, Zea mays
  Coding DNA Sequence Number=SeqID_10502
MSTWHDPKQARSSMAQQQTDRHGKTHPFEKP

SEQ ID NO: 53878 - protein, 158 aa, Zea mays
  Coding DNA Sequence Number=SeqID_10503
MNHWECAHQSAMFTVAVARTNLVTISEIVLGEMVGVDPISCPPLGSAGHGPVRPVCKLAGASPCSPPSWTSPCEKLELQGLFCKQSATQCNSDRTHLQLVKTPRTLLQENEEEIEVTEEKTPPPSESQAGNCFYFDICGSEPDSPINEGKPRCICHLP

SEQ ID NO: 53879 - protein, 27 aa, Zea mays
  Coding DNA Sequence Number=SeqID_10504
MSVSDSRKEEGVEADLQEFQDFGEFED

SEQ ID NO: 53880 - protein, 291 aa, Zea mays
  Coding DNA Sequence Number=SeqID_10505
MTSHGSSEGGNALSHTDGLAREGFPRILWEVLQGAGYTTPPQYTVQLFEKHRVPRCRVRMTLEPHPLQPGWRSLDSESFGYRAEDTIEAIALHGLTTFCGFHPLELSTHPIGLFPAEKEDDPMWEDRVEHAKDIWALYPGQTAHLTVRCMDALYRLQVTRGEAMSHLMALLEATKITLDNIEELVVDLSTEMVEKDLHVEQMSNEIQELEELVGTRENTIEVLEDQLINTQQQLAEANQHLDMHHQDIQDMEANEDVDIEGGEEPEPASILDTAGSGRPPSPKSSVALFAH

SEQ ID NO: 53881 - protein, 201 aa, Zea mays
  Coding DNA Sequence Number=SeqID_10506
MPPAPPQGLPAAGGDPDGDRDDDDAGGSLSHGTELSEEPEPKGWIARPITRDAARGCHFHDALNTMLCRAFDRHTWSIEYHCVYCSLFSGVADGLDLKYYPSRSTGSAGGVIVSPVGEGNPRLNSMVNLAVVLNTELDHALDELGKVWVEVAEVHVECAAHHYLDGGSPVPVGIQHPYRSPPRGRFDYGTPDYKTRIDLDP

SEQ ID NO: 53882 - protein, 26 aa, Zea mays
  Coding DNA Sequence Number=SeqID_10507
MSFYAKQLNKEMCKGAVLADSVNSED

SEQ ID NO: 53883 - protein, 153 aa, Zea mays
  Coding DNA Sequence Number=SeqID_10508
MPLSEDVSELQRGGDAENPNVVDGDTLADEVQVDLHMLHALMLHEIGREVDRADIVAVDEGATLKGDVELLEELVQQEGLCQAVEHISQLWTSGVDKASGLAAVDNLHQSAMEEGIIDVELMDRLVPREGEGEEDSHGGKLDNGAKGLIWGVG

SEQ ID NO: 53884 - protein, 155 aa, Zea mays
  Coding DNA Sequence Number=SeqID_10509
MAAQARSWRRLPFSMRAHDAVEHPFGQGARGEVEAAPWRVGPRPRRLGEAGSAAGSNPLNRNLAPEIQEEASKKTRCLRPIDAILEDLLDMWVRTHTRFRCATLILLVDVDHIVFIGRLEDANWTGARGKGIDRKDGGLSLQRGNYTKAIESQGE

SEQ ID NO: 53885 - protein, 408 aa, Zea mays
  Coding DNA Sequence Number=SeqID_10510
  Gene Ontology: Mol. function=ARF GTPase activator activity; Cellular component=cytoplasm; Biological process=regulation of ARF GTPase activity
  Homolog annotation: Hit_ID=A3BV99; Match level="QueryCoverage=31%, HitCoverage=17%, E-value=3e-46, Identity=70%"; Hit description =Putative uncharacterized protein
  Pfam annotation: Domain name=ArfGap; Domain location=282-389; Score =50.8; E_value=4.8e-12; Accession=PF01412.9; Description=Putative GTPase activating protein for Arf
  Pfam annotation: Domain name=Pkinase; Domain location=1-316; Score= -76.2; E_value=0.00048; Accession=PF00069.16; Description=Protein kinase domain
  Pfam module annotation: Pfam domain module=ArfGap::Pkinase; Domain location=282-389::1-316
MALERSVGYSGRVEAARATLDQVRVEDIDTNVAVLQDLIVQVNLKLKLWHMAESKLPIELLYQIAVHIFSMCHPGNRQKVARFGWVGRALQVLCLLVMFPLHGLQNFLFSTREEHSPMKIIDFGLSDFIRPVFLAADQCPIGYSLKMVELELLRFLCERIVKREKVKKILFSTREEHSPMKIIDFGLSDFIRPDERLNDIVGSAYYVAPEVLHRSYSTKADMWSIGVITYILLCVVGRGDLCMSPVEFEPSVSEDLVLEKKYENGQHDVRGTHHHRTSMKPEKPIDLLRKVDGDNMCADCGASEPDWASLYLGALLCIECSEVHRNLGVHISKVTNSQHCFFCSADGSDTSQYLSVSKPKHKDVFSAKEKFIHAKDSGSHQVTPPPHADFANRCLNSSGGATNNNPMF

SEQ ID NO: 53886 - protein, 338 aa, Zea mays
  Coding DNA Sequence Number=SeqID_10511
MAVMGSTSEKMYLCQDLVDVGLMIEDLLTGHMPHHGKQQIFVASVPRWCLKKKVKTEASGERLSEVRWTRTTVGGPNDLGGSVTADMPLRTRKSARKSTGPIGVPRHHLAPRHEDSSSRSNDPIGDLEAQVEQLRTELRHRNSVWVEDGQRINELRTDIRPLQDKLAKRDLALDWAVNSYSIAWDRDAKARAHVEELSTTVDNLQTLSEWELALLEQQMSSRTRAHDGAGTYRGQDDTPNPPLVPPTLAEAIAALVTATADNTHFLCEMVGQQLQQQGRRAYPQGPRKTSHLDLLETCPPLFVKAEDPLEADEWIQVIEQKFGLIRCTETQKPLFAAQ

SEQ ID NO: 53887 - protein, 126 aa, Zea mays
  Coding DNA Sequence Number=SeqID_10512
MKIQKQVMEVVVQRLVVASRPVEENYDRGVKVVTTMSDAQYAPNMIPLSEPANDCGTHDLQLDSSKGVPLAHTPCRDIPDIVVDPTIRTRVQFGDGIIASNSLDFRNEEEPYAFAMAVDSIGWDDL

SEQ ID NO: 53888 - protein, 301 aa, Zea mays
  Coding DNA Sequence Number=SeqID_10513
MESHDLREERESRLVGKVAMRWVVFGIDSGNASASPSSDRSVQHLERLHHRLHEEQERRRKELEQQGSSFSLQKEIESVRSCSPVLPLEAPPTPPLSALAPGVAAGGDLDDGGGDSSSSHDTDFSADQEPEGWVARSITRDAARSTVARSTRTARRRPAWCAVRRTVFGVLRSAQSTIPSLSETQLRRPCKMSHDVRFRTTAQCSVGIGGVIVSPVGEDNPRLSSTVNLVAVLNTELDHALDELSRARAEIAELRAEHAERRHLDDGSPAPVGTQHPYRSPQHGHQSYGNPDCKTKINLEP

SEQ ID NO: 53889 - protein, 219 aa, Zea mays
  Coding DNA Sequence Number=SeqID_10514
MTPPQYAVQLFEKHRVPRYRVRMTLEPHPLQPGWRSLDSESFGYRAEDTMEAIALHGLTTFCGFHPLELSTHPIGLFPVEKEDDPCGRIEWSMPRIYGLSIHATKITLDNREELVVDLCTEMVEKDLQVEQLSNEIQELEELVGTRENTIEVLEDQLINTQQQLAEANQHLDMHHHEIQDMEANEDVDIEGGEEPASSLDTAGSGRPPSPESSVASFAH

SEQ ID NO: 53890 - protein, 23 aa, Zea mays
  Coding DNA Sequence Number=SeqID_10515
MGKHVPSLLMLLLSRAAWIKQSH

SEQ ID NO: 53891 - protein, 165 aa, Zea mays
  Coding DNA Sequence Number=SeqID_10516
MVQRVTRSTCSGGFTNSDERDCTIPVGLVLGSSSGKLHGLPGELSEGSDRAEVGGKGFGHDGFPRVALAGRGEVAKAAGELGKVRRGVEEATGKMAVHEGELYSHSRARHERGHGGGQGRARGLHSIDCNLADGEYILVPEQGVAQEVAPDPAPEPAQRICLPQP

SEQ ID NO: 53892 - protein, 56 aa, Zea mays
  Coding DNA Sequence Number=SeqID_10517
MGKPVPSLLMLLLSRVTALVPTITGMGDHVSGRVRGKVRCQVHTEINSNYALVQKN

SEQ ID NO: 53893 - protein, 342 aa, Zea mays
  Coding DNA Sequence Number=SeqID_10518
MPSHSPHVAPFHLPSPRMGSARVAFVLLLEERNLMEDGDHQFDGGEKQAGLWPLPRPQLQGSSSDLLGRRAGQIGACLRVGRQVAVVVGAEVVAARGGFSADEIVGATWVGHRLFGLDGLSSPLVWGRGRGPSSSSVCPEAIAAVVLPSETEVVVAAAVVGCEPTGNPRLLCDEPEPEAVVSAWTEAESAREKASSAREHVASLAEEDQPRSHAAEAVSRADVLRGQLAEVTERPVEVEIFPLASPSEAGPDSAEGGNDAEGAVAPSVDDLFVGSRIAYPSESYFSRKVMSENPRLLCDEPEPEAVVSAWTEAESAREEASSAREHVASLVEEVQQRRLELG

SEQ ID NO: 53894 - protein, 290 aa, Zea mays
  Coding DNA Sequence Number=SeqID_10519
MDEGTTLGGLESEDDAKLSHGILTVLSSLWDRGYLAHRLRIRFPEDKGVRRPKQLDQPRRLTRPAGRGSGHGLTTLGAVSAVSATLPRPRERFSCLLDYIDNRILRTSKSARKRRGRPSRGTPMPPGYGYLTHHLPRKVTLARISNSAIDEQVLILETRGKETQLYKHDNKMFGPRRPQQAYTYYRQTVPAGSNIDRGSNNTLGVVSTFDGIWPGLGWRRERKDLHLEGGRQYHAWAIVAKVSVQTSTEGATAPSASFPPSAESGPASDGDASGKISTSKEDASTTLGPL

SEQ ID NO: 53895 - protein, 68 aa, Zea mays
  Coding DNA Sequence Number=SeqID_10520
CNLADGEYVLVPEQGAAQEVAPDPAPESAPEDLPATALEGKPRNPVEMNTSMLGRVAAFLSRISVEVE

SEQ ID NO: 53896 - protein, 207 aa, Zea mays
  Coding DNA Sequence Number=SeqID_10521
  Gene Ontology: Mol. function=phosphatidylinositol transporter activity; Cellular component=intracellular; Biological process =transport
  Homolog annotation: Hit_ID=Q10N10; Match level="QueryCoverage=100%, HitCoverage=89%, E-value=2e-83, Identity=66%"; Hit description =Phosphatidylinositol transfer protein, expressed
  Pfam annotation: Domain name=IP_trans; Domain location=3-179; Score =18.5; E_value=4e-09; Accession=PF02121.9; Description=Phosphatidylino sitol transfer protein
MEQQNTNSKEGVEVLQQAPFHEDAKLGKGHFTSKVYHLQRIHCQERKKKNEKAHGLSGEQLAAREVEIIDIASVSRDYWSKAIGAPSVDLTAFKSQRTERGPLLKGWMDSCHPVMTTYKLVTMDAPIWGLGERLEDCIIAGERALFLACHRLCFAWIDEWYGMTVEQIREMERQTDMLLKKTLKKAGSNKHEGNTKTLKDELVAVGS

SEQ ID NO: 53897 - protein, 169 aa, Zea mays
  Coding DNA Sequence Number=SeqID_10522
MPLQTELRFHSRGYEQPPHRRACGTTNSGWLAADHYSSVNDLRLGRQDSHSDGLKANAAAGGPSPTSPHEGRGQAAKAKEPEVRPQVVPTISSAEKPSLVATTSALTTAATCLPAPHQRVPAAPKRTGRSSLPSSPQERERDRLRTRVPPSRRTTCYETLWCGQPQSPG

SEQ ID NO: 53898 - protein, 77 aa, Zea mays
  Coding DNA Sequence Number=SeqID_10523
MQVACNRPTETHPFDFDASSMEAQAHMSWTRKGNISKGILLREGSGPRALLLIRGSKAGPSEGFDSRLRALGLRTHY

SEQ ID NO: 53899 - protein, 39 aa, Zea mays
  Coding DNA Sequence Number=SeqID_10524
MSDANASASYQWCLFGVSNGSYEHICLTGRRFKSHYGHI

SEQ ID NO: 53900 - protein, 83 aa, Zea mays
  Coding DNA Sequence Number=SeqID_10525
MKDAKPIKTPMGTNGHLDLDTGVFRDRGVPRPTSECRRVPQLRWVDARLSAKGGSEVAGDRRERGGNPAAFVFIPRPGRVRLQ

SEQ ID NO: 53901 - protein, 273 aa, Zea mays
  Coding DNA Sequence Number=SeqID_10526
  Subcellular localization annotation: CTP_CleavageSite=61; ConfidenceScore=5.49e-01
MNKNTGIHSAITNGTPVPSPRDRRGRRKALIRVPAQGTRTSHQSQRAGRSEAHRQVLVPVLATKARKRAECCILAGQQQFAFPGMAGGRLLCRAGGWLPPPAGERTGSHAGGMQPRQVGALLRLPTRPAWRPRPTRHATGAPDAACEQLHHRPRHYRASSTAEPIPRLEATQRTTQQRQPGVTVNAAKNGPAVMAVAGGQEQRSRRQPSLRPIRGQRENPLSQREDDAPVFRSSNGPRTRNGRPANHSPCRINSAAGQAAPLAGEASDASPSP

SEQ ID NO: 53902 - protein, 109 aa, Zea mays
  Coding DNA Sequence Number=SeqID_10527
MRMRSSSQLLETLMVCCCCLSIRKLAEKLSVWQSVAAFGDQKPREAETNRHIWRAESLKFLHRLDSKLHALVSSWKVENLDANECGVDGDPQPVDLSLVLSHFVGRQEM

SEQ ID NO: 53903 - protein, 153 aa, Zea mays
  Coding DNA Sequence Number=SeqID_10528
MGKSKKGGSSSHHSGDKRKREPTPPSEDFGDSEYSEDEFSSESEGSPVPASPPASSDDSDDQGLAAEVWTYIRAIERAGLAGSDESKYSSDEENSSDSSEEGGGGDGGDGDDDGGDGDGSEGDGKGGDGGGKGGSGGGGSSRGSSRGSSKASG

SEQ ID NO: 53904 - protein, 71 aa, Zea mays
  Coding DNA Sequence Number=SeqID_10529
  Subcellular localization annotation: CTP_CleavageSite=17; ConfidenceScore=5.19e-01
MQRRRLPVFPKTPTVPSALTLSGRLPRDPDSAAICPSALFGGCPASTRPSPVGGSPPWKPKNRMGAVCPFV

SEQ ID NO: 53905 - protein, 830 aa, Zea mays
  Coding DNA Sequence Number=SeqID_10530
  Gene Ontology: Mol. function=ribonucleoside-diphosphate reductase activity; Cellular component=ribonucleoside-diphosphate reductase complex; Biological process=DNA replication
  Homolog annotation: Hit_ID=Q5VRF5; Match level="QueryCoverage=100%, HitCoverage=100%, E-value=0.0, Identity=87%"; Hit description =Ribonucleoside-diphosphate reductase
  Pfam annotation: Domain name=ATP-cone; Domain location=1-91; Score =83.2; E_value=8.2e-22; Accession=PF03477.7; Description=ATP cone domain
  Pfam annotation: Domain name=Ribonuc_red_lgC; Domain location=215 -762; Score=1083.8; E_value=0; Accession=PF02867.6; Description =Ribonucleotide reductase, barrel doma
  Pfam annotation: Domain name=Ribonuc_red_lgN; Domain location=141 -213; Score=136.4; E_value=8.2e-38; Accession=PF00317.12; Description= Ribonucleotide reductase, all-alpha d
  Pfam module annotation: Pfam domain module=ATP-cone::Ribonuc_red _lgC::Ribonuc_red_lgN; Domain location=1-91::215-762::141-213
MYVVKRDGRQETVHFDKITARLKKLSYGLSQDHCDPVLVAQKVCAGVYKGVTTSQLDELAAETAAAMTASHPDYASLAARIAVSNLHKNTKKSFSETIKDMYMHFNKRSGLMAPLVAEDVYEIIMKNAARLDSEIIYDRDFDYDYFGFKTLERSYLLKLDGKVVERPQHMLMRVSLGIHKEDIESAIRTYHLMSQRWFTHASPTLFNAGTPRPQLSSCFLICMKDDSIEGIYETLKECAVISKSAGGIGVSVHNIRATGSYIRGTNGSSNGIVPMLRVFNDTARYVDQGGGKRKGAFAVYLEPWHADIFEFLDLRKNHGKEENRARDLFYALWVPDLFMQRVQNNGEWSLFCPNEAPGLADSWGEEFDNLYKKYESQGKAKKVVPAQTLWFDILKAQIETGTPYMLYKDTCNRKSNQQNLGTIKSSNLCTEIIEFTSPTETAVCNLASIALPRFVREKDVPLESHPSKLVGSSDSKNRYFDFEKLAEVTSTVTYNLNKIIDINYYPVETAKRSNMRHRPIGIGVQGLADTFILLGMPFDSPEAQQLNKDIFETIYYHALKASAELAAKEGPYETYEGSPVSKGILQPDMWDVVPSNRWNWPSLRETISKVGIRNSLLVAPMPTASTSQILGNNECFEPYTSNIYSRRVLSGEFVVVNKHLLHDLTEMGIWTPTLKNQIIYDDGSVQKIAEIPDDLKAIYKTVWEIKQKTLVDMAVDRGCYIDQSQSLNVHMEQANFGKLTSLHFHAWSKGLKTGMYYLRTRAAADAIKFTVDTTLLKENGNGVTRDTAHHEHHLHTQVSDGKPAEEDVDAKMAQMVCSLNNREECLACGS

SEQ ID NO: 53906 - protein, 311 aa, Zea mays
  Coding DNA Sequence Number=SeqID_10531
  Gene Ontology: Mol. function=oxidoreductase activity, acting on paired donors, with incorporation or reduction of molecular oxygen, 2-oxoglutarate as one donor, and incorporation of one atom each of oxygen into both ...
  Gene Ontology: Mol. function=donors; Biological process=protein metabolic process
  Homolog annotation: Hit_ID=Q5GAV6; Match level="QueryCoverage=45%, HitCoverage=31%, E-value=5e-30, Identity=55%"; Hit description =Putative uncharacterized protein
MAMVPVQGRLTTSGSAVEGRGRSGCLIRHGELLEEKLVPHGVEGGEGHAPLDESLQVAVAGAEATQEVQHQGTIGNWLAEITERVSQALHRAAVFSHGEVSLREQVELGVEVERPRIPIPEELVLESEPRLASSVRLIADDVLQLNGDGAVEPREDNAVHEAPGARRWSVVVDEDVIVEDEPPQREEDLSSPAGVVGRRRIQHHGHEGPDVVQTSGLSVESSDEVGVEVGVAGVLRGFHRGDRRATEEALRGGHLGGQSGTQGTLSLQGEGGGALALPRGRHSGLDLREGVDERGGDGGKCGGRDGVAPGG

SEQ ID NO: 53907 - protein, 496 aa, Zea mays
  Coding DNA Sequence Number=SeqID_10532
  Gene Ontology: Mol. function=ATP-dependent helicase activity; Cellular component=nucleus; Biological process=ribosome biogenesis and assembly
  Homolog annotation: Hit_ID=Q84T03; Match level="QueryCoverage=80%, HitCoverage=95%, E-value=9e-76, Identity=53%"; Hit description=DEAD -box ATP-dependent RNA helicase 27
  Pfam annotation: Domain name=DEAD; Domain location=206-356; Score =50.6; E_value=5.6e-12; Accession=PF00270.20; Description=DEADDEAH box helicase
  Pfam annotation: Domain name=Helicase_C; Domain location=310-377; Score=9.9; E_value=0.006; Accession=PF00271.22; Description=Helicase conserved C-terminal domain
  Pfam module annotation: Pfam domain module=DEAD::Helicase_C; Domain location=206-356::310-377
MGVWPKSRGVYGGGFAAVLLGSEGGTLKLTRWGPCVGVRAVRLCGGAEVPEAEKWAPHVGMRSECALGCVGERMEWAAQIWPIRSWGPSKSSVALPESGESMYAAARVEVEADRKKEKVDETERMAREKKNTHEKEQIRKVVMGKRKRNEDELGMEEKQMIAEKEKEEKVKKGNGGGILTTKLFSELYISELTAKAIREMNYSHLTEIQARSIPHLMLGNDVLGSAKTGSGKTLAFLIPAIELLHKASFMPRNGTGVIVVCPTRELAMQVVEFANFTFGQNEERQKKLVYVGVDDSKLKPTVEGLQQGYCVIPSEKRFLVLYAFLRRMQLRKEDLKVMEKNGILLCTNVAARGLDIPDVDYIVQFDPPDDPKAAKISLTEYVFSEKHVPKSQSQLEDVVGGNYFLNQSAKEAYRSYLLSYNSHSMKDIFDVHQLDLKKVAASFCFKNPPKVNLDLDSSSSKHRKMRKADGANRHGIGPSTPYGRSGRYGSRQLARF

SEQ ID NO: 53908 - protein, 64 aa, Zea mays
  Coding DNA Sequence Number=SeqID_10533
MWATNLQLLLIRQAIHKLLGLSSHRHHHYNLLIPEASSQKGASTPNNNNEIYLPHRFTKLKSHS

SEQ ID NO: 53909 - protein, 251 aa, Zea mays
  Coding DNA Sequence Number=SeqID_10534
  Gene Ontology: Mol. function=GTP binding; Cellular component =cytoplasm; Biological process=tRNA aminoacylation for protein translation
  Homolog annotation: Hit_ID=A3ABX3; Match level="QueryCoverage=31%, HitCoverage=5%, E-value=3e-33, Identity=84%"; Hit description =Putative uncharacterized protein
MSGGKQEDGKYKHIVDLTETTFGLRANSVQREPELQKLWDDNQVLKSVSERNTGTAFVLHDGPPYANGDLHMGHALNKILRTTESTLLTLQIWAASVDIQMFEILLCVGSKADLVPGHSVQNIEYIEACASNADFDKFRSVDGDSQGLERLFGALSAHMWPGMILKSGNRITAPFLVEKQESKDDESNYDLEYDVLSHGFDDHWKFVGETSTSRRFERSNEADGAQKHTHQVVKASIDSSTSNPLPSNTPT

SEQ ID NO: 53910 - protein, 157 aa, Zea mays
  Coding DNA Sequence Number=SeqID_10535
MARAAVWAYCPLSDWTGTPPVGWPGHRLPAEWTGHIKCRGGTSPVSRADRRRVFSVINVEIAWPRGLMSGSARWLTSRAIGHVATSGLRLSGERKRTGQSPDKCLRRTPDDPDGQTRNILPILLCHHVIDNATPGLEEAKQPTMNIAIARGTKTFIL

SEQ ID NO: 53911 - protein, 115 aa, Zea mays
  Coding DNA Sequence Number=SeqID_10536
MQYNGSSSLISCEKQTIQIEFLSLQVTALVPTITGMGDLVSGRVKGYVCGQALVLDLGLPPEQLLAPARGHTLRQQGYSLSNAMNRRVFSSAAGVPAKSRRSGSIQGHGELHGVT

SEQ ID NO: 53912 - protein, 182 aa, Zea mays
  Coding DNA Sequence Number=SeqID_10537
MTSHGSSEDGNALSHTDGIAREGFPRILWEVLQGAGYTTPPQYSVQQFEKHRVPRCDVPSDGTIGGDKDYLDNREDLVVDLSTEMVEKDLQVEQLSTDIQELEELVGTRENTIEVLEDQLINTQQQLAEANEHLDMHHQEIQDMEANEDVDIEGGEEPASSVDTAGSGRPPSPESSVASFAH

SEQ ID NO: 53913 - protein, 369 aa, Zea mays
  Coding DNA Sequence Number=SeqID_10538
MSLDSDHWSFDFWARLDVRCTPDMYCSMSGAPSLRFPEAGEFRRPLFLGASDTVRCTPNSPVNYSGVPLEIPEGGKFELESSGALDTVRWCTGHCPVYTGQSGAPDQSPTGYYKGWEFFPISSKIDQFEKHRVPRCRVRMTLEPHSLQPGWRSLDSESFGYRAEDTIEAIALHGLTTFCEFHPLELSTHPIGLFPAEKEDDPMWKDRVEHAKDIWAIYPGQTAHLTVRCMNALYRLQVMRGEAMSHLMALLEATKITLDNREELVVDLSTEMVEKDLQVEQRSNEIQELEELVGTRENTIEVLKDQLINTQQQLAEANEHMDMHHQEIQDMEANKDVDIEGGEEPTSSLDTTGSGRPPSPESSVASFAH

SEQ ID NO: 53914 - protein, 117 aa, Zea mays
  Coding DNA Sequence Number=SeqID_10539
MGRGTIGAMVCISKCSRYCIYFKKCTNVLLTITHSKKNLSYALAFGLSRPGCSTVILGRFSFILNDDASASYSNWCSEGFRMTDGYSKRFFVKHLLHLNHINEKIGAFVRSSLEVNI

SEQ ID NO: 53915 - protein, 213 aa, Zea mays
  Coding DNA Sequence Number=SeqID_10540
MASGSRQCPSVQGTPGRDKRPLLCDPTRDSASVAALETTHVGLATGHNTQSAAGLEGGVNAMFGAMNITGSDAAQDGRLRVQSPIGAPFLDATGVWSVTEMPDLLMGPAPFVLCRDVEERCGLVADRGAAAGEVGEGADGDEGGVVLVSEEGHDIALHLHEVPSGCVLQDIPNGCKGYVVYLVRVRRGGRKRLLPKCIVYGKPKHQGITQLKL

SEQ ID NO: 53916 - protein, 157 aa, Zea mays
  Coding DNA Sequence Number=SeqID_10541
  Homolog annotation: Hit_ID=Q6QP51; Match level="QueryCoverage=38%, HitCoverage=31%, E-value=8e-13, Identity=60%"; Hit description =Putative growth-regulating factor 1
  Subcellular localization annotation: CTP_CleavageSite=2; ConfidenceScore=5.18e-01
MVAFQGGHPPFKGDSPYLRPQPSWAKSSPTHSKVLPLWRGGWVPHIMQAGPEQKKSNRRARCMQPPSGYKRPSTFAQTSGRKGGGSERRFAFAIMTASKKAPSLPTDQRFEGWPLRRVQQPPQSAWAPHPLLVRGSKAGPSEGFNDRLRLLGLRAHY

SEQ ID NO: 53917 - protein, 128 aa, Zea mays
  Coding DNA Sequence Number=SeqID_10542
MEDEEESGLEDEEEATVTLSMEKDALECDICCLPFQSEVFMASFELFSTSDGHGAQQHHDRKHHEQHHRRPLRRARPVPPEAVPTRTLRLLLAPPPRPPIRRLESAAAAGALLLTGASSHARGNRRRR

SEQ ID NO: 53918 - protein, 295 aa, Zea mays
  Coding DNA Sequence Number=SeqID_10543
MAGWATGLARAQEAAGLLEHGRRRDTPRRGWASALGGGAGTAGPCPRPRRRGGGASERRNSDSKDRVQTERAPTDDGAPKRLRKVDEGAHLAITGARDETTTAGDLGNEGEKRRGSVDARIRQCGCVRRVPQRRGRDRGVGSVFHARTKSGGVAAAERVRRATGRATARGSGCTRSARRWANGCVRGHGGVGQLGVAAAGASGGAQGAGLRAREAVARLGWGEMGRALGLGARLGSTTRPRSAEWGRGRDGAGGAAQCALGCERDGAAKSSRPGRRGGPGGGRWAARLGGAEYSF

SEQ ID NO: 53919 - protein, 171 aa, Zea mays
  Coding DNA Sequence Number=SeqID_10544
MPHRAARLGRAMAGWATGLARTGGGWLARAWTATRHTTAWLGKRAGQGCWHGWAMPATKEKGRRGEWAQELGDRSTVMPALWPLAPNLGRGPCCTAPSSPSAAAFVSLVLTSPFISSSSSEEDDRAYERNRHGETRPEDVGRLVGPNGEAYFPTLQRPASGREASRRARPG

SEQ ID NO: 53920 - protein, 222 aa, Zea mays
  Coding DNA Sequence Number=SeqID_10545
MAAAQGQASPGIEHRPCVHGDRGRRDELGTAELQTQEQGRLRASGRGKMGRGCGSDAQPRLESRHERTQEPGSRGQGWTAAGLLPGMVTMPHRAARLGRAMAGWATGLARAQEAAGLLEHGRRRDIPRRGWASALGGGAGTAGPCPRPRRRGGGASGRRNSDSKDRVQTERAPTDDGAPKRLRKVDEGAHLAITGARDETTTAGDLGNEGEKRRGSVDARIR

SEQ ID NO: 53921 - protein, 177 aa, Zea mays
  Coding DNA Sequence Number=SeqID_10546
MGIAALLLVVPLLLLSSPLLVVAPLSHPDFGAPRPGRKHNHQESLAGPPSQQNPPEGLPTLTTPLLPLPLLGIDDDGSTSVLRRAPRPALRCSNLKGACATRFLDEDEAGSGFLTENEEADRAVHTSSAIHGESQGGGDEVVATPWTGSGTTTGAWGKLAGIYTRSTGQACRRRSGI

SEQ ID NO: 53922 - protein, 274 aa, Zea mays
  Coding DNA Sequence Number=SeqID_10547
  Subcellular localization annotation: CTP_CleavageSite=47; ConfidenceScore=5.06e-01
MAVVALGSSMVAKGLGRQGFILLMKKIPRTSRDLNKRNSTQGGDFARQDHLFTTPPLGALTTALSWTAGGSDLKPNSRNALAHKWSEYTKGFPVLITPFTAAVVGTKPLLILPKSYVIGWNWIQEHDSGGHEEHQEHGDEDDPAPVAEPREVRGEEVQRDCHDERVDRLVFGCVSRGGGGTEGAVEAWGGSPWSGSTGRRGCGSPQDERRSSWTMEAKVVESERSGWWWRDIHTHAAAGGDSYGEGGRLADQMAGDSPRARGNRGEGWAGCACA

SEQ ID NO: 53923 - protein, 162 aa, Zea mays
  Coding DNA Sequence Number=SeqID_10548
  Gene Ontology: Mol. function=nucleoside-triphosphatase activity; Cellular component=intrinsic to membrane; Biological process=defense response
  Homolog annotation: Hit_ID=A2Z2F6; Match level="QueryCoverage=70%, HitCoverage=13%, E-value=3e-26, Identity=54%"; Hit description =Putative uncharacterized protein
MAQGTFPFQVDMVLFIKKTALPLAVDSSMSLAVRLGSGAAQGVHECPGGGGEVLRVADAGLEPREVTLLKATLLETRAKLLLHGGLFDTGEELCRPCISIRTVMLGHGHAQTLAAQETLAKLVRAGAISSFVSMDNTTTNLLFTHSDEDDNEVLIWRSATYY

SEQ ID NO: 53924 - protein, 191 aa, Zea mays
  Coding DNA Sequence Number=SeqID_10549
PPGPPVGFLLPRNHPLHSQAANHVEPHDTHKKPPSLAHVEYLYGSSSPLMASLLRPWNCSLGAADFLPPVSRPAPNPTFCARPSPVRPGPRCPNRGKEACARLSPPVRASPIAWLTGAPLLRARSTELWPWRPAKNRPCPCVPPVKCPLADGHASPPLAMATCYSASYRSVQQGSRRADPPPAAVGRALSV

SEQ ID NO: 53925 - protein, 234 aa, Zea mays
  Coding DNA Sequence Number=SeqID_10550
  Homolog annotation: Hit_ID=Q9XGX7; Match level="QueryCoverage=15%, HitCoverage=38%, E-value=2e-07, Identity=80%"; Hit description =Mitochondrial import inner membrane translocase subunit Tim9
MEGRRRSETSAHTHAAVLSLCSALYGRPAALRNLHAHPRSHAIPALCSPWKAGAAIPRPICSPWKAVPAICCPWRARPQAFRNLHPTPATARSTPPCPICSPTYTIRVIHGQQTVPAPSRSASPTQSTHLCAPSGSASVEMVDDDGGSRLVRIVVASQCGSRLSTNFMGLFVTSDKICGGCLGAGSVVAAAAMDKSMLGDLDDLPEEDKMWMAAMIDQLQIRDRFVPYQLEPSR

SEQ ID NO: 53926 - protein, 314 aa, Zea mays
  Coding DNA Sequence Number=SeqID_10551
  Gene Ontology: Mol. function=carboxyl- or carbamoyltransferase activity; Cellular component=ornithine carbamoyltransferase complex; Biological process=amino acid metabolic process
  Homolog annotation: Hit_ID=Q8SA97; Match level="QueryCoverage=56%, HitCoverage=23%, E-value=2e-14, Identity=37%"; Hit description =Ornithine carbamoyltransferase
MALPVDVAGLRPRLGDVEAPLKPRSSLSSMAEAESEPLGRARRRSFGRGQGGVRALGSGEAEAEFAVFRDLARVRALGRAERRLSPSPSPGSGGAEFAVFRDLARVPSPGSGGAEFAIFRDLARVRALGRAERRPDCLSVSLCQVALQSEWRKRRYPSVRPLYADGGYQLRIRSLEASLVVPSCELAVARVYGRGPSSRAGMLTLSTVRPEPGLREQPPSLCIGREGDQGQTRLFAYAPASPFRKEEGGKAPCYPRWAPNMVSPVSCKRVIRVDVRAPFVRGRLGAQRHAQKYLRVICRTRSPGDGVRGLDASL

SEQ ID NO: 53927 - protein, 265 aa, Zea mays
  Coding DNA Sequence Number=SeqID_10552
  Gene Ontology: Mol. function=translation initiation factor activity; Cellular component=cytoplasm; Biological process=translation
  Homolog annotation: Hit_ID=A0MLU6; Match level="QueryCoverage=46%, HitCoverage=40%, E-value=4e-37, Identity=51%"; Hit description =Eukaryotic initiation factor 3e
MAAPSLSRGGCRRHLTLVLAELALSPVVPLPAEANTPSPRPSLLDSPIPGLPRLRPHLLPMGANWELEQQMSNSRELSLLRFYFDQVGMAATLASVCSVPLTSVLLLFELTKDYRILLPLMIGPDHIEALYQYAKFQFECGNYSGAADYLYQYGALCTNSERNNFSSPLNQLQNRIWLMHWALFIFFNHIRYLNAIQTNAHHLIRYLATSVVVNKRRRNMLKELIKLISILLSWKNRNDIKLQMYLRFERRQKYKRDAKANAKSA

SEQ ID NO: 53928 - protein, 168 aa, Zea mays
  Coding DNA Sequence Number=SeqID_10553
  Homolog annotation: Hit_ID=A6MZE2; Match level="QueryCoverage=30%, HitCoverage=50%, E-value=9e-17, Identity=80%"; Hit description =Aldolase
MGPREQEGPGYFLREAKRKVLEAKKKKKASAASGGNAAYLGGFAMQNDPPEQLKLRGYHMVAGAVDIAMFRKATLDDIRWFREAVMEIGEEDDEDEDEKCEKENDGYWRISYCSHFTSGHSWRPIEALTLHRMRAILIKARDVARSSAQNSLSERNNLKAMGHYGLKG

SEQ ID NO: 53929 - protein, 254 aa, Zea mays
  Coding DNA Sequence Number=SeqID_10554
MPLIRTYNVDSDLYGLKGVPRSVLQVLCKEFNIKANTKNDDMRQALSLRAQFDIKVMMALQDALGANSVSKRVKSEKLNNGDLIISAKRTNTDEDILTKAQRLAAKRNLELSESSFISLSPEVIISNCEKIGISLSSSENEVLQSVVAIKNIEIDRLTVAPSSYSRNLLSDAEEAEFDVVLSHTADRWDDESELTTLDRCCELSVAPRRKKSNKAFSNRKCVDFLWHLMPPRGRSGGMLLGVNPGVYDIGAIDE

SEQ ID NO: 53930 - protein, 162 aa, Zea mays
  Coding DNA Sequence Number=SeqID_10555
  Gene Ontology: Mol. function=catalytic activity
  Homolog annotation: Hit_ID=A2XU13; Match level="QueryCoverage=78%, HitCoverage=12%, E-value=4e-18, Identity=48%"; Hit description =Putative uncharacterized protein
MSGMLLTTEMAFKCARGLPPEAAAVPIVKSTILIPFPPILTQGLKSSVVHEANEAKGLRDDTTCIVIDIISPEKPKRTIQSQRTPGKGLVLLKKFFLRKTTSDSLSLPYKNNYPEPDLEEVFEDGCPSLSRRYHWNSVFSLTNNDLVAPKKEGVMIPQSVKL

SEQ ID NO: 53931 - protein, 679 aa, Zea mays
  Coding DNA Sequence Number=SeqID_10556
  Homolog annotation: Hit_ID=Q6JAD6; Match level="QueryCoverage=75%, HitCoverage=77%, E-value=1e-137, Identity=51%"; Hit description =Putative uncharacterized protein
MPRTKNVSAPGEEMTRTLLAPLGRSRERPCIWSSRKAARSGVWIEQQAAAAAAAAAEQAEQGDQLRISSDQIAYRVRRHASRPRSSAPTTPSTATTLPPTLPAPVTPTTSITSAIPTTSTTPASTAPSAPLCAPPIPPARFRERDETEVRPLAADPRLFDLQRAIAARVCRFRYVPVESWLPAQRDPAAADPFSTRIQESFYRAQLLAQIALRAHRLLDLPTFLLAAGADSEVHLSYLSGLLALLTTSGRYVEEWVRVFYATVWIDPDHHWLRFRFEREDVTIHASQIRQVFGFNESSTRLHSMCYGTSYPPRRPHGGVAPGTTHVAALFRPPFSDGSRRSPADFTTAARFLYQLMRRTLLPWMGYREAATHIQLWLLGALVSHSEFDVMDFLICEIEDTILDAPEDPVPAPALVIDTQAEDTTFHQFETQDAAVHDDDDDFGVPPPPPPPMPPRSHDHEAGSSSATPAAPPAIDPALVAILQTLTQQQAHLAAEQARQATTQQQMSERMLSMLQTIQDRQDTLQQQLIQDRAENGAFMTLMLQHTGVSIPPVQSAPPPPLQAPVVPAIRLGPPLPTLGPSSSPLWPVTLVFTSPVIGSVSSQPPVPPASAVTTAAVAVSVTSSAPAAPAAQLPSESVPALASTADPGSETDSDPHLAIALLPRPRSDAPPPPPPSSDV

SEQ ID NO: 53932 - protein, 95 aa, Zea mays
  Coding DNA Sequence Number=SeqID_10557
MARAGISRVDDVEAAKSAGSTRQKITSSRVKTLPKNLIRSLPVQDLEDEGFRSPALLIADAPLRSGRRELKGDSAMKRGESETGMIWRLAAGLLL

SEQ ID NO: 53933 - protein, 175 aa, Zea mays
  Coding DNA Sequence Number=SeqID_10558
DAEKRNRQWKVDLTTAQARATALESREVIAVEALKQAKDEHVQKLMEAYLVTHNQRRALRIQEPASSNPVQPRRVEDSQILKVSPKAMGKQEHHESSQDPPPELFEPLAMKKIPTPSLEVKEQAASTPPAPPPSEELQEPVSLEEEFDPVLPSQSPPEELINISSLLTHPGDISD

SEQ ID NO: 53934 - protein, 187 aa, Zea mays
  Coding DNA Sequence Number=SeqID_10559
  Gene Ontology: Mol. function=binding
  Homolog annotation: Hit_ID=Q9SE32; Match level="QueryCoverage=25%, HitCoverage=12%, E-value=4e-14, Identity=78%"; Hit description=Sgt1
MWLTFLPKIIPEKCKYQVLSTKVEIRLAKAEQVTWTTLDYSGRPKAIPQKISTPDVETRAKLDENTRQQPLGEDVGELQRGGDYEDPNVTSGDMLADEVPVDLHVLRALMLHGIGGEIDRADVVAVDEGGMLEGAVELLEKLAQPGGLGHAVGHSAVLRYSASALERETTGWRLAAQETRLAPKNTT

SEQ ID NO: 53935 - protein, 127 aa, Zea mays
  Coding DNA Sequence Number=SeqID_10560
  Subcellular localization annotation: CTP_CleavageSite=24; ConfidenceScore=5.16e-01
MPPNNHPCPAPNPRCHARNRPRPCAQPGGARARWHGGRWRVRDHGPAPPASTRGPGSSCPTPLSASARCSSPSAYDSVDMGDGELVVLDSRGVLPCFLIICKDAGSREAIFHPQQREAQFGHVRRLV

SEQ ID NO: 53936 - protein, 176 aa, Zea mays
  Coding DNA Sequence Number=SeqID_10561
MNDPNSNVLLNEMKIDLNMLRALVLDRVDREVDGTDVVVVDKCTPGEGAMKLLEELVQPARLSHSISNNPILSLSTRAGDHGLTLGGIGDEVVPKEHRIARVLDMVGKEGLVLHNVTLVKIGEGAMNIRQHWGDRQRGCRGEYKANDRVKNPNGLSNHHLVDVVRVMVKKRRMIDV

SEQ ID NO: 53937 - protein, 113 aa, Zea mays
  Coding DNA Sequence Number=SeqID_10562
MAPKRANSKTAPSVDEAAKAALLAKKKGKALADNTHQGAGEDEAHSKRQRNNQHTPEGTLRTCSSEGQPQVPPPGFAPPEGEDAAEDGEVLDVSVEEQLQLWAMRLKNRNLQK

SEQ ID NO: 53938 - protein, 93 aa, Zea mays
  Coding DNA Sequence Number=SeqID_10563
  Subcellular localization annotation: CTP_CleavageSite=59; ConfidenceScore=5.42e-01
MGEPDNTQPSYRGDPVLPGLRGRSLPSPRKSSWAPHGSRLSMSLCRNSCGVKTWTSSTSADGKRQSKMRGTTKRYHQWFVHNRKLRVRDLVLR

SEQ ID NO: 53939 - protein, 72 aa, Zea mays
  Coding DNA Sequence Number=SeqID_10564
EAASSCETFGAPKHDPNRKFPWQRTSDDEYSAPRSTGVLSANGMDRHAACGTGPRNPEALRQALLAGLCHAQ

SEQ ID NO: 53940 - protein, 112 aa, Zea mays
  Coding DNA Sequence Number=SeqID_10565
MTHQAGRLPAVRVDPATMLVDHTTILDRPSGGAASPSDWTVRPWDDEADAPRDERVSGPTVSTALIPLMSHPVLEGKPNANHVRARISNSRTQQLHNMDIITQCSNSIKKGK

SEQ ID NO: 53941 - protein, 682 aa, Zea mays
  Coding DNA Sequence Number=SeqID_10566
  Gene Ontology: Mol. function=microtubule motor activity; Cellular component=microtubule associated complex; Biological process =microtubule-based movement
  Homolog annotation: Hit_ID=Q9AVP4; Match level="QueryCoverage=90%, HitCoverage=85%, E-value=0.0, Identity=59%"; Hit description=BY-2 kinesin-like protein 10
  Pfam annotation: Domain name=Kinesin; Domain location=152-472; Score =441.6; E_value=1.1e-129; Accession=PF00225.14; Description=Kinesin motor domain
MNGGSRRQRYSSEQLLFDVPANAGAGRWAQQRGGVRRGDGEIFVSVEPATPARLCGGDAAAGDSPGQRQQLSPGLLDLHAFDTELIPDFQVPGIYDGAQKFGYGGGLDESDMRFTSNKMMSKSTIFPDGNYLKAFTEKEKAAPVAKIKVVVRKRPLNKKEVSKKEEDIVDIEQRSNSLTVHETKLKVDLTEYVEKHEFVFDAVLDEDVSNDEVYRETVEPVVPAIFNRTKATCFAYGQTGSGKTYTMRPLPLKASQDVLRLMHHTYRNQGFQLYVSFFEIYGGKLFDLLNDRSKLCMREDGKQKVCIVGLQEYRVSDIETIKELIEKGSATRSTGTTGANEESSRSHAILQLAIKRRVDGNDSKPPRPVGKLSFIDLAGSERGADTTDNDKQTRIEGAEINKSLLALKECIRALDNDQTHIPFRGSKLTEVLRDSFIGDSRTVMISCISPSSGSCEHTLNTLRYADRVKSLSKGSNAKKDVSLAVPLRESNSSPLPSVVPSFSASEVMNDITGRSNFGWPKQQYVKEQPAPTFVERMPKAKDAVEFTSSNIAEVPDIMYQLGRQPSRKDVTLANNMRNSVAYPTRRVEPDDDDEHLNNLLQEEEELVSAHRKQVEETLDILKEEMNILGDADQPGFQLDDYITRLSSMLSQKAAVIVDLQARLEQFQRLLNENNVLLYAQSP

SEQ ID NO: 53942 - protein, 171 aa, Zea mays
  Coding DNA Sequence Number=SeqID_10567
  Subcellular localization annotation: CTP_CleavageSite=51; ConfidenceScore=5.38e-01
MSGVPPDSVRCTRTVQGPTSHSRVSSGALRYNSPDCPVHQRSNGSFAQRLTAKAEEHRNNVQLCVKESKRRVRGASDSEQCMSGVAPDCPMAQEDKASNGRQLPNPNSWVTWLTHQTVSSGAPDCPVRPSIAALPNGLLVVEGYKYPQPPPPQASKNSESHIHYKSSSIHS

SEQ ID NO: 53943 - protein, 104 aa, Zea mays
  Coding DNA Sequence Number=SeqID_10568
MEVQLQPLALYKRRAEIAVAAVASHTAQVSSPSESETAAVESSRVSRLPGRQRHQLSASFLLSCLCLRCTLGLGLGVGERGQKPRLGFAAGADDTTHGTARHKS

SEQ ID NO: 53944 - protein, 303 aa, Zea mays
  Coding DNA Sequence Number=SeqID_10569
  Homolog annotation: Hit_ID=Q8H6I5; Match level="QueryCoverage=29%, HitCoverage=10%, E-value=3e-07, Identity=41%"; Hit description =Putative RIRE2 orf3
MGCTCVAFVLLLLEERDPAGVGASSVIARLQGFSSCSPAAVPHQWSSVGMITSLVVGRSKPGCGLCPSLRFKDVHPGWGGGRIELGPASARAGDPLLPLTFGGEGHPPALRRRRPPAMWGKANCCCLTRVQLSVLHPGDGRAVRRRLLSPDLWPLYDELKPEAAVSAWTEAELARKEASSAREHVASQAEEVQQRRLELGQVIREWDQPRSHAAEAVSRAEVLGGQLAEATERPAEVSAQADTLAKTLAVRAQVWCWRPPSRWRSFRPCRRLRPGQIPPRVDMTPRVLLLPLPMSEPAGTVCL

SEQ ID NO: 53945 - protein, 133 aa, Zea mays
  Coding DNA Sequence Number=SeqID_10570
MAAPRIARLVALTPRQGKRHLWQAKRASLHLRHDDRVKIRSCNVLEVENLDAIECGVVGVRYLYPQPPKMAVGRLLSHGAPDNPGSGKGIFRKGSFSAKETGPRALLLIRGSKADPSEGFDSRPRALGLRAHY

SEQ ID NO: 53946 - protein, 68 aa, Zea mays
  Coding DNA Sequence Number=SeqID_10571
  Homolog annotation: Hit_ID=Q6J9V9; Match level="QueryCoverage=61%, HitCoverage=14%, E-value=6e-11, Identity=76%"; Hit description =Putative uncharacterized protein
MEHKGGMRLVLSRTGAKKCLSPLEAQLANAKILRKNFVVDLLSYEDNSCRYIIPANIQQRLIDIVKND

SEQ ID NO: 53947 - protein, 110 aa, Zea mays
  Coding DNA Sequence Number=SeqID_10572
MAKLNFNFNWGPGKFNRGPERFNRGPRKVQPGYFFRTSLLWYYIEFFVDSLLLELLAPRRLGVSYVDPRAIDLAMRIAERMFLKMKEDEAKNKIEENDRWRPNDESTSSQ

SEQ ID NO: 53948 - protein, 142 aa, Zea mays
  Coding DNA Sequence Number=SeqID_10573
  Subcellular localization annotation: CTP_CleavageSite=51; ConfidenceScore=5.04e-01
MSPVGVPASSTHSGPTADKEGGGANPDAALPPRGKTSSSSPPPGELTTVVDAVALRGEEYHVVDAVEGHELETPEAEQRPGLNRLLKTTRLELNGKVFVNTQQVPTWRANCQRFGPEGPLTEPTSEFIAACPCLDGLALKVA

SEQ ID NO: 53949 - protein, 503 aa, Zea mays
  Coding DNA Sequence Number=SeqID_10574
  Gene Ontology: Mol. function=CDP-diacylglycerol-serine O -phosphatidyltransferase activity; Cellular component=integral to membrane; Biological process=phosphatidylserine biosynthetic process
  Homolog annotation: Hit_ID=A2Y796; Match level="QueryCoverage=51%, HitCoverage=92%, E-value=1e-131, Identity=79%"; Hit description =Putative uncharacterized protein
  Pfam annotation: Domain name=PSS; Domain location=262-451; Score =288.3; E_value=1.5e-83; Accession=PF03034.6; Description =Phosphatidyl serine synthase
LENTQPRPRHAQLKIHRAQRHAAGPVPTPTSDPGEERGVHSGSASRKGKNEVSAVGKKNGGEPLGSKVKSRKGKNLTVLGGDESQIQVRRRASESQIQVRRRASEFRTFGAAAARPANLAACIPPSPSALDRCCFPEVSAAAACRCRGQAQEALGCFLSVPSSMEAKQRPRHGEERRPPATDNGGGGGEEYDPWTAWLYKPHTISVLLVGACLLIWASGALDPEGAAAHSSLTSIKRGVWAMIAAFLAYCTLQAPSTILIRPHPAVWRLVHGLAVVYLVALTFLLFQNRDDARQFMKHLHPDLGVGIWAGMHTVRYFDGKTYEWVGLSRQRSIMGKVKRSLSQFTPAQWDKDQWHPFMGPLRFIQVLFLCVVFMTVELNTFFLKFCLWIPPRNPLVVYRLILWWLIAIPTIREYNSYLQDSKPAKKVGAFCWLSLAICIVELLICMKFGHESRDGNTLTRRLDCETESVSRVYRVTGVLLYLTSRRGKLKEKGRRVTPRVGQL

SEQ ID NO: 53950 - protein, 136 aa, Zea mays
  Coding DNA Sequence Number=SeqID_10575
  Gene Ontology: Mol. function=transposase activity; Biological process= transposition, DNA-mediated
  Homolog annotation: Hit_ID=Q67X25; Match level="QueryCoverage=92%, HitCoverage=56%, E-value=1e-45, Identity=64%"; Hit description =Putative uncharacterized protein P0690H04.13-1
MSKGNEKIERTIVWDEDQSKFMLGWFTDFIKEQHAGFKIKKQHHCKCAEALNRQFNMGVTATQVERHYRHYKENWKFVAAALSKSGNTFDTTRSMVVISESEKSNLKDRATRLLSKPIKFFNEMQECLLTAVLMAL

SEQ ID NO: 53951 - protein, 196 aa, Zea mays
  Coding DNA Sequence Number=SeqID_10576
MKAFMMILIMVLFNGTLERSPLDVPAHRPPLQSSLRIYCSLAGTIAPPPQQLQSLIDLEPYIWYRLAWVSTRSHGFCYQFHGIVLATGVPISMGYAAYHLRHAVLATVIPISMGCVPCHLRHVILATGVTISIGSTAYQFCHILDAGVPISRGSSKFRHIIFADGVYVPMGNATRASHGSTITSSINGGLVGQHKG

SEQ ID NO: 53952 - protein, 149 aa, Zea mays
  Coding DNA Sequence Number=SeqID_10577
  Gene Ontology: Mol. function=protein binding
  Homolog annotation: Hit_ID=Q688N3; Match level="QueryCoverage=24%, HitCoverage=4%, E-value=1e-08, Identity=86%"; Hit description =Putative uncharacterized protein P0605G01.6
  Subcellular localization annotation: CTP_CleavageSite=46; ConfidenceScore=5.32e-01
MAATGAEAGTAQIQICGGDRRHRNRRRRSGSAALVACSRQTTAEVRQESTAQIRFRSPCGVQQLRRAAGSNCRGAAGRRTQAQQANRQQVIELAKVGVIGNLVHSSPKIKKEVLNAGALQPVIGLLRMSNLLVQPQPLILHIFSIRDQT

SEQ ID NO: 53953 - protein, 94 aa, Zea mays
  Coding DNA Sequence Number=SeqID_10578
  Gene Ontology: Cellular component=intracellular
  Homolog annotation: Hit_ID=Q6QP50; Match level="QueryCoverage=65%, HitCoverage=25%, E-value=6e-13, Identity=59%"; Hit description =Putative 40S ribosomal protein S8
MDGYVDPYEEVVAEDDSDNPDEDDSDAESNYKDKSFDLLKSNKHRVRNPDDTFHGPFYPCKKSRGTRARTSSSRLPTTLMSPTSIDITAANGLL

SEQ ID NO: 53954 - protein, 424 aa, Zea mays
  Coding DNA Sequence Number=SeqID_10579
  Pfam annotation: Domain name=MAP7; Domain location=205-358; Score= -84.4; E_value=0.1; Accession=PF05672.2; Description=MAP7 (E-MAP-115) family
MAQERSYPPRGWRRLFTSRMARDLRVFPYGRNIAAVVSAVMNKDRQDAAQKRRAVIRLPEARPKRARWTAKATVPSGSQRMLAAKPDASGSSKVPESAKAVGAGGTKSAPDGAAKVRELPSPGKRVADFRTNISVDDYIVGSGEGQLVVVPPAVATTASTAVLGVKGGAFSAGGEISAATAVKDEAGTVSHRLREASQQLAQQLSQAADFADRVASGALTADVAAEVERLRAQHADAVWEKSAAESKSRRLAEKVVALEGERTDLRRQLVEERMEANQAIAKAQAAQAQAKLARAEGSLASQRAEEWEVRFNALQARMERVEASTRSEVERTRKQLVDSYRELGARTADFEVPDREAGLRFLEWLQEELLALPTIMEGFMSFASLVTCEGAMNALSRERCNHYEGFDRSMKTMGARFLRSKTLW

SEQ ID NO: 53955 - protein, 148 aa, Zea mays
  Coding DNA Sequence Number=SeqID_10580
MGEVEQVVVLDVAEDIRLSLAHGVRLVASSKRAVHQLFIYVLDNRIALPWKQEKCKKHYFLTICYFPDYYDSLACPSLLTFFQAAIEYIHSLSRAQPARSLNGAGLCPASRSLSTQATTTSSTPQLKAHPMSSSQAATMLSKTEDGKN

SEQ ID NO: 53956 - protein, 76 aa, Zea mays
  Coding DNA Sequence Number=SeqID_10581
  Homolog annotation: Hit_ID=Q6AUK4; Match level="QueryCoverage=75%, HitCoverage=74%, E-value=2e-16, Identity=66%"; Hit description =Putative uncharacterized protein OSJNBb0006J12.17
MESSSSNGSNVPLPASQHPLHVTDADEEDKSVKQLNECATIYLSLQDCLIESNRNWKFPELERHQKYVLSITIRRK

SEQ ID NO: 53957 - protein, 83 aa, Zea mays
  Coding DNA Sequence Number=SeqID_10582
MVISCSAARPPTAIWISAADRRSDGPGWPVPLRPGRLPKEPLTLCKINLPSCAEFSVSGGFYVLAPEFSENSGRRPESGNFRK

SEQ ID NO: 53958 - protein, 285 aa, Zea mays
  Coding DNA Sequence Number=SeqID_10583
  Gene Ontology: Mol. function=protein dimerization activity; Cellular component=nucleus; Biological process=regulation of transcription, DNA-dependent
  Homolog annotation: Hit_ID=Q5IRE8; Match level="QueryCoverage=37%, HitCoverage=52%, E-value=3e-52, Identity=96%"; Hit description=ABRE -binding factor Embp-2
  Pfam annotation: Domain name=Caleosin; Domain location=45-155; Score=- 77.9; E_value=0.025; Accession=PF05042.4; Description=Caleosin related protein
  Pfam annotation: Domain name=bZIP_1; Domain location=132-195; Score =89.7; E_value=9.5e-24; Accession=PF00170.12; Description=bZIP transcription factor
  Pfam annotation: Domain name=bZIP_2; Domain location=132-186; Score =34.8; E_value=3.2e-07; Accession=PF07716.6; Description=Basic region leucine zipper
  Pfam module annotation: Pfam domain module=Caleosin::bZIP_1::bZIP_2; Domain location=45-155::132-195::132-186
MRMWHVLRGAIVALVTVVLLSMLGPGSNDRVVEVEGSSSSSMADVYKGELTPLKRHIAFFDCNKDDAIYPSETYQGIDVIIYAIQDNIVRPNLNIGMDLWTDSPVKAETSGQGEINAATHSHHGSTLSMMDERELKRERRKQSNRESARRSRLRKQQECEELAQKVTDLTVVNGMLRSELDELKKACEDMEAVTSMEDGAELSMTGELEGSEQGGHGGGELEPPWWLALEEDGEGMEKMRCVQEIGLGGRLSEQWAVAAAPAMAEEGGGRSDGGCARRIGFRLFV

SEQ ID NO: 53959 - protein, 195 aa, Zea mays
  Coding DNA Sequence Number=SeqID_10584
MEVVGGRDHTTTPMMTKAERREGSIEKQGAEVGGALPRRKEEGTRNRDALAPSPLKAVWCVSDVAGDREDEVERNRGQFQFRSVETDAVCGCVVGVAAVPRGAAGAGLRLRPPDETGSEPGSPCRRGSSPACRRGCPPAHRRGACQRAVEGHAALVHRPRRPRASRAHRGWPLLGPRHQGISRPPTPEESRSEPP

SEQ ID NO: 53960 - protein, 135 aa, Zea mays
  Coding DNA Sequence Number=SeqID_10585
  Gene Ontology: Mol. function=actin binding; Cellular component =cytoskeleton; Biological process=cytoskeleton organization and biogenesis
  Homolog annotation: Hit_ID=Q6Z3N3; Match level="QueryCoverage=48%, HitCoverage=7%, E-value=2e-26, Identity=86%"; Hit description =Putative villin
MRFLPPASICKQINSVLTYFFHYTYPGDDKEECLIGTWFGKKSIEEDRLIAVSLASKMVESAKFQAVQARFYEGKEPIQFFVIINQCGSDVVVVLLNLLLECMSQTRLQSSGVVLPFQQTVNDLVVNDIIIVMLL

SEQ ID NO: 53961 - protein, 139 aa, Zea mays
  Coding DNA Sequence Number=SeqID_10586
MGGGLLAAASALRSVLLLFAPPEQKSSSSPLLEQHEQRQSWLENENLVGRSLAGLSVSGTDAGVDQPRPRIGPVPLEDGWPMPMGNRPSLLLGPDSRRSPWTTSPSEAWSDLAEGVVDAEGATAPFQREDPSLQDQIVL

SEQ ID NO: 53962 - protein, 178 aa, Zea mays
  Coding DNA Sequence Number=SeqID_10587
  Subcellular localization annotation: CTP_CleavageSite=52; ConfidenceScore=5.12e-01
MAALPTTRPVALTPRRDRRRFWQEKRATLRLRRNNRAKKGVRRLAPEGFTVASDAERGMTRGLGLGLGPGRRRTPLRPTQGSDSGPAPEDDELRFARPQGSDSALASAERPPPRPTQGLGLGLGHGRQTRPRLRRSLHVARPRAQASHVNRKRHHHPTPSRLGPQRTRPVSHLASSAR

SEQ ID NO: 53963 - protein, 27 aa, Zea mays
  Coding DNA Sequence Number=SeqID_10588
MTDAEQEEMRKCSWESYDDKGERLDVA

SEQ ID NO: 53964 - protein, 388 aa, Zea mays
  Coding DNA Sequence Number=SeqID_10589
  Gene Ontology: Mol. function=phospholipase A1 activity; Biological process=lipid metabolic process
  Homolog annotation: Hit_ID=Q6BTJ4; Match level="QueryCoverage=70%, HitCoverage=30%, E-value=6e-11, Identity=27%"; Hit description =Similar to CA1621|CaIFF6 Candida albicans CaIFF6 unknown function
MQSACNRAKWAYPFDSNAPSMEAQAHTSCNQRAGCYVRATAPPLAPLPRLLDCGTSTATRGNPAYDPTVPARRIGHGPVSRGRRRDIRCGQKWAGSNGGGRRAEAAVTSSAKLTSPHGTAREPSPTEKRATLRLRHNDRVKKAPEDDELRFARPQGSDSGSAPEDDELRFARPQGSDSGSAPEDDELRFARPQGSNSGSAPEDDELRFTRPQGLDSGSAPEDDELCFARPQGSDSGSAPEDDELRFARPQGSDSGSALEDDELRFARPQGSNSALASADGLRLARPRGSDSTSALEDRLDLDLGGASTSPDPGLGPTTSQEAPSLPYPKLTQATGNKTGVPSGSPRLQRSSDGHDTTRTGCQNLSGCHDGMALLQRVGRAGKDGTALA

SEQ ID NO: 53965 - protein, 37 aa, Zea mays
  Coding DNA Sequence Number=SeqID_10590
MELSLSYPSPLPHSSRPLSPSLMNFNVYLEVIIKRFI

SEQ ID NO: 53966 - protein, 292 aa, Zea mays
  Coding DNA Sequence Number=SeqID_10591
  Subcellular localization annotation: CTP_CleavageSite=32; ConfidenceScore=5.44e-01
MNPRSMPQGTPKTHFSGLSFTPFALRHLNVVSRSERRSEAFLVLTTMSSTHQLVDLLAYGPALLFIKAAQESSAACPAMTVVPPARVRLTAVESSLKRHRKLRLARPWASASGEVSASPDPRARPLPRPRKMDFASSDPRARPRPRPQKVVSASPDPRAQPQPRPRKVVSTSPDPRAQPQPRPRDKSRPHPTPASASGGVSASPNLGLGPTTPQGVHHYPTPSQLRLRGNETGVPSRLAPVTSNDGSTRASMTTVALSPFRKQGDVSKVPTAPTAVLLQGSNAPLTATTPCT

SEQ ID NO: 53967 - protein, 691 aa, Zea mays
  Coding DNA Sequence Number=SeqID_10592
  Homolog annotation: Hit_ID=Q6JAD6; Match level="QueryCoverage=89%, HitCoverage=89%, E-value=0.0, Identity=67%"; Hit description =Putative uncharacterized protein
MPRTKNVSASGGGDDEDPRRPFRQVKGKTVYLEQQEGRKKRRTDREARAAAAAAAAAAQAALGDQSHVPSDQIAFCARRLVSRPRSSTHTSASTPPPTLPAPVTPIAPSTSTAIPTTSTTPASTASPAPAPASAPPVPPPRFRERDETEVRPLVSDPRLFDLQRANAARVRRFRYVPVESWLPAQRDPAAGVLFSTRIQESFFRAQMSAQIALRVHRLLDLPAFLLAAGAESEAHLTYLPGLLTLLTISGRYVEEWVRVFYASVWIDPDHHWMRFRFEREDVTITASQIRQLFGFPESTTCLHSLCYGTSDPPRRPHGSVAPGTAHVAALFRPPFTDGSRRSPADFTTAAKFLYELIRQTLLPRMGYREATTHIQLWLLGALVSHSEFDVVDFLICEIEDTVLDGIRARRQLPYAHYLCHIFAQLIQSPRFQSTLEASRLAEDAALRQFDTQGTAADDDDDDDDDFGIPPPPPPPMPPRSHDHEAGSSSAAPATPQAMDPALASILQTLTQQQAHLAAEQARLSERMLSMFQNMQDRQDALQQQLIQDRAENRAFMALMLQHSGISAPPVQSALPPPLHAPVVPSILSGPPVDTSPLRPVTLAFTSPVLSSVCPQLPVPPASAVTTTAVAVSVTASVPVAPAARPPSESVPAPASTADPGSETDSDPPPAFALLPRPRPDAPPPPPPASGV

SEQ ID NO: 53968 - protein, 257 aa, Zea mays
  Coding DNA Sequence Number=SeqID_10593
  Homolog annotation: Hit_ID=UPI000069E2F5; Match level="QueryCoverage =50%, HitCoverage=19%, E-value=6e-07, Identity=33%"; Hit description =BUD13 homolog.
  Subcellular localization annotation: CTP_CleavageSite=41; ConfidenceScore=5.14e-01
MGDERMDCGVATAPSPHSPPAQPPVREWRGGTRRRKRLLDRTSMRNAGSGMHVLLGSPRLWLCRAAALFLLTPSFLPRATVMRLVFGLSRRIHWAKMLLIFRMGRSFVLDLCSRPFSGGEAVKNRPRPSPDGRCSHDSSENNLGRHKHDSPEAMPRWDNQPRLFRGHPRTGQADTTHPRTTPSGTGSNDSPEATPGEKGSNDSPEGNPGWERQSRFTRGHPRGGEAIMTRLRPPLGGRHNHDSSKAKPKRDRQPRLA

SEQ ID NO: 53969 - protein, 671 aa, Zea mays
  Coding DNA Sequence Number=SeqID_10594
  Gene Ontology: Mol. function=metal ion binding; Cellular component =Golgi apparatus
  Homolog annotation: Hit_ID=Q9FMJ2; Match level="QueryCoverage=83%, HitCoverage=70%, E-value=0.0, Identity=71%"; Hit description=Ankyrin- like protein
  Pfam annotation: Domain name=DUF248; Domain location=154-659; Score =1154.2; E_value=0; Accession=PF03141.7; Description=Putative methyltransferase
  Pfam annotation: Domain name=Methyltransf_11; Domain location=273 -368; Score=32.7; E_value=1.3e-06; Accession=PF08241.3; Description =Methyltransferase domain
  Pfam module annotation: Pfam domain module=DUF248::Methyltransf_11; Domain location=154-659::273-368
  Subcellular localization annotation: CTP_CleavageSite=74; ConfidenceScore=5.29e-01
MPFGHTRLDVRRPPQSSYLCCSTTTVAVFVALCLVAVWMASSMLVTPAEFPPFQSKVRPLRPHDSPPATGSLTSADQGDGITTHDDPPPATQQLPPVTDSMDGENQQQELFTTERGPWSTKAEQSNKDAKEQTLTSSSPLSFRWALCNVDAGADYIPCLDNVAAIKKLRSTKHYEHRERHCPEKSPTCLVPLPEGYRNPIRWPKSRDQIWYNNVPHTKLVEYKGHQNWVKVSGEYLTFPGGGTQFKHGALRYIDFIQEAKKDVAWGKRSRVVLDVGCGVASFGGYLFDRDVITMSFAPKDEHEAQVQFALERGIPAISAVMGTKRLPFPSRVFDVVHCARCRVPWHIEGGKLLLELDRLLRPGGYFVWSATPVYQKLPEDVEIWQAMSALTSSMCWKMVNKVKDRVNRVGIAIYRKPTDNSCYEARSETNPPLCGEYDDPDAAWNISLGACMHKLPVDPTVRGSQWPELWPLRLEKPPYWLRGSEAGVYGKPAPEDFQADYEHWKRVVSNSYMNGLGIDWSTVRNVMDMKAVYAGFAAALRDLKVWVMNVVPIDSPDTLPIIYERGLFGLYHDWCESFSTYPRTYDLVHANHLFSKVKKRCELLPVIVEVDRVLRPQGRLIVRDNIETTSEVENILKSLHWEVRMSYFQEKEGLLLVQKTTWRPNETEAKL

SEQ ID NO: 53970 - protein, 176 aa, Zea mays
  Coding DNA Sequence Number=SeqID_10595
  Homolog annotation: Hit_ID=Q6JAD6; Match level="QueryCoverage=76%, HitCoverage=20%, E-value=5e-27, Identity=54%"; Hit description =Putative uncharacterized protein
PRMQLFRQFDTQGTAADDDDDDDDDFGIPPPPPPPMPPRSHDHEAGSSSAAPATPQAMDPALASILQTLTQQQAHLAAEQARLSERMLSMFQNMQDRQDALQQQLIQDRAENRAFMALMLQHSGISAPPVQSALPLPLPAAQSHRQTELSLGSTKKYEHVPQFSASRRCKLLYLNP

SEQ ID NO: 53971 - protein, 284 aa, Zea mays
  Coding DNA Sequence Number=SeqID_10596
  Subcellular localization annotation: CTP_CleavageSite=66; ConfidenceScore=5.15e-01
MSRFMQPSLCGPTVGAAHCCRFVRSHLLPGNCFRRLHHRPTFSSLRLSLCAHPHAHAERLRLTAPVATAAVAASTTSPDFPAVGAVLGKPTMLVGSGREDRSREVHAEGSSILSAATSPPSSEPSSPPCPRSSIHHRVLEHPRDLAPSSATVAARRLPLRVSWPLTARAPDLLLQSFTARPTAVGQPFWWPQTSSRATDDYDCPGKELLKYRDAAQMVDVETTQEAAMAEILVRCLRQDGSKRLLPCDPQVRVDMIQQQRPDKDAFSPVLLVPFDFRSTFVISM

SEQ ID NO: 53972 - protein, 84 aa, Zea mays
  Coding DNA Sequence Number=SeqID_10597
MAELRLHKDHSDGGRRRAVAEVLGSRGQSEREGKSWVEGANGRGEVSEQGARFKRGARARSWPENARTWARQRRGDRGREVEDG

SEQ ID NO: 53973 - protein, 103 aa, Zea mays
  Coding DNA Sequence Number=SeqID_10598
  Subcellular localization annotation: CTP_CleavageSite=65; ConfidenceScore=5.48e-01
MPWPLPPCARDSPFGPFLAYFHACAVAPCSLSLSLTSRPHSPAALSRALTPAGRPAPPVSRFVVLPAYGSSQSPPTDVPSISPVPSPIPSPHRRVWHRPVLAA

SEQ ID NO: 53974 - protein, 150 aa, Zea mays
  Coding DNA Sequence Number=SeqID_10599
MGKNNKRKREPTPPSEEFGDSEYSEEEFSSESEGSPAPVPLRESSDDSDDSQGLAAEVWTYIRAVERSGLEGSDESEYSSDEEDSDGGGEDEDDDDDDDDDGDGDGDDSGRGGGDDSKDGDGSGGGSNRGGSSRGSTRGGSSGVSNRASG

SEQ ID NO: 53975 - protein, 44 aa, Zea mays
  Coding DNA Sequence Number=SeqID_10600
MCRARRRRSLGRAVDGQRSRGGPVEARVVADLVMAGGGKSGARA

SEQ ID NO: 53976 - protein, 409 aa, Zea mays
  Coding DNA Sequence Number=SeqID_10601
  Gene Ontology: Mol. function=zinc ion binding
  Homolog annotation: Hit_ID=A2YV26; Match level="QueryCoverage=51%, HitCoverage=81%, E-value=4e-34, Identity=41%"; Hit description =Putative uncharacterized protein
  Pfam annotation: Domain name=C1_2; Domain location=35-65; Score=21.8; E_value=0.0026; Accession=PF03107.7; Description=C1 domain
  Pfam annotation: Domain name=C1_2; Domain location=96-123; Score =25.6; E_value=0.00018; Accession=PF03107.7; Description=C1 domain
  Pfam annotation: Domain name=C1_3; Domain location=34-65; Score=37.0; E_value=6.7e-08; Accession=PF07649.3; Description=C1-like domain
  Pfam annotation: Domain name=C1_3; Domain location=95-123; Score =26.1; E_value=0.00013; Accession=PF07649.3; Description=C1-like domain
  Pfam annotation: Domain name=ZZ; Domain location=30-73; Score=5.7; E _value=0.047; Accession=PF00569.8; Description=Zinc finger, ZZ type
  Pfam module annotation: Pfam domain module=C1_2::C1_2::C1_3::C1 _3::ZZ; Domain location=35-65::96-123::34-65::95-123::30-73
MKMHEVEEPPAEITRDAHPAHALRLVATDDGAPFRCDGCKEPGSGQGRRYRCGHGCDFDLHVACALAGPTLRHPLFGEGLEFQLLPEAPPPVDKTFCDACGLRAPGLVYHCFDRDLDLHPTCAALKPESAFPGGHLAQLGWEAAEHRCVACDAAAAAAGKRFWAYRWAYGGTHGYLHVACMKKIAFQSWEQAYQASVVGGGLVEASVPTMTAVLHRKRTDEITGGVKIIDTGIRGQYLSSSTWEVPVGEIFTPKSWLSSRAFHALEHLPKKLANLYNLNKNFGNTIRRATLHSAFIQPLTVITDSHVKDGTVIPAASHNNNQLLRQKHQPVSHLLTKHEEGRENKIAHHRIQCDYLICNGELPKFRDKGQFGKPIAKAECKGYDFDLGKWWDNYGTQVPILQRMVVCHL

SEQ ID NO: 53977 - protein, 633 aa, Zea mays
  Coding DNA Sequence Number=SeqID_10602
  Gene Ontology: Mol. function=binding; Cellular component=nucleus; Biological process=cell division
  Homolog annotation: Hit_ID=P93646; Match level="QueryCoverage=33%, HitCoverage=44%, E-value=8e-94, Identity=82%"; Hit description =Cyclin type B-like
  Pfam annotation: Domain name=Cyclin_C; Domain location=363-473; Score= 92.7; E_value=1.2e-24; Accession=PF02984.10; Description=Cyclin, C -terminal domain
  Pfam annotation: Domain name=Cyclin_N; Domain location=235-361; Score= 183.0; E_value=7.4e-52; Accession=PF00134.14; Description=Cyclin, N -terminal domain
  Pfam annotation: Domain name=Mito_carr; Domain location=458-541; Score=46.3; E_value=1e-10; Accession=PF00153.18; Description =Mitochondrial carrier protein
  Pfam module annotation: Pfam domain module=Cyclin_C::Cyclin_N::Mito _carr; Domain location=363-473::235-361::458-541
MARPQRLAPPSDLRTWGPNSPCASDVDEPAADDDVASSLLEMGALVLSTADPLTKARRTHAAFSRWAIGLPIGQATAPYHPKRKDRLVERAPYARPSSPAEEPEKKTVKPASALASWLGLGSTEADRLTIATWSAPPSSPRSCETWVYPVAARPLAPSTSKPRKYTPERRQKFIGGQRSNHEKIHTATMKILTYQLCNSVAFVHDPKVLHRELKLHILLKDHKTMVLKIVEYVEDIYRFYKSTEDTCLPLSSYMSSQAEISERMRAILIDWIIEVQYRLTLMPETLYLTVYIIDQYLSMESVPRKELQLVGISAMLIATYTTSSDILQVKDLMCLCDNAFTRDQVLTKEKAILDRLHWNLTVPIMYMFIVRYLKAAMCDTELENMAFFYSELALVHYAMLVYPPSVTAAAAVYAARSTLGMNPPWTDILEHHTGIVEPQLLLWDIGKKDGLRVTGKETFHSEFFISLSHKSVTYPLDVLRLRLAVQSGHITLSQVALNMLREEGLASFYGGLGPSLVAIAPYIAVNFCVFDLMKKSVPEKYKNRPETSLATALLSATFATLMCYPLDTVRRQMQMKGTPYNTVFDAIPGSPRPLFTNSLKQKHNISQLSSCWGPSAYEGPQKQDLTVLLEHNV

SEQ ID NO: 53978 - protein, 152 aa, Zea mays
  Coding DNA Sequence Number=SeqID_10603
MDEGTPLGGLESEDNTEPSHGARISTVEGSRSTLGVDYTFGELGWSPGGLGHLSPEDISPARGLDRSTPASVPLTDDPARLRPTKSSFRANSASVRADTATPGFGSSKSGRGVPLTKQEKPQTARPTEPRDSYASGIRIPHSSPLHGATRSW

SEQ ID NO: 53979 - protein, 311 aa, Zea mays
  Coding DNA Sequence Number=SeqID_10604
  Homolog annotation: Hit_ID=Q6J9V9; Match level="QueryCoverage=20%, HitCoverage=33%, E-value=1e-07, Identity=45%"; Hit description =Putative uncharacterized protein
MAERYQLPRSCVPPTTRRKDCGHPPSGGSEGGKTRCIREREDMVAFQGGHPPFKGDSPYLRPQPSWAESSPTRSKVLPYGAGGWVPRVMQAGPGQKKPNRHARCMQPVQRLQASLHFRPDQQVKGRVALQAACNRAKWAHFSDFQHAQHGGPGPRVMQPARRMLRASNCTATRATATPPQLRNQYRDSRQPYAQPSSASLERRRSKRHFAFAIMTASKKGPGKGDTPKRILLREGNRLRASLLIRGSKAAPSEGFNSRLRARGLHTHYWSEVRRPAPRKGSTAASGHSGSAPTTDQGFEGWPSKGSHPPQT

SEQ ID NO: 53980 - protein, 298 aa, Zea mays
  Coding DNA Sequence Number=SeqID_10605
  Gene Ontology: Mol. function=kinase activity; Cellular component =ornithine carbamoyltransferase complex; Biological process=amino acid metabolic process
  Homolog annotation: Hit_ID=Q6QP54; Match level="QueryCoverage=41%, HitCoverage=37%, E-value=2e-27, Identity=57%"; Hit description =Putative kinase
MAPPVDVVGPRPRLGDVEAPPRPRSSLSSVAEVESEPLGRARRRPSVEARAESEPWGRVKRSLSSSGAEPESEPWGRADRNSSSSGAEPESEPWVGRSGVRRLPGLSPSPSPGSGKAEFAVFRGGARVRALGWAERSSPSSGAEPESEPWVGRSGVRRLPGLCPSPSPGSGGAEFPMVPEAGPDCLSASLCRVAQQSERRRRRCPSVRAATFALNAPAIWSVGVATWPGLLLGEDWASGEPELCADGGYQLRIRSLEDVRAPFARGRLEAQRHAQKYLRVICRTRSPIDGVRGLDASL

SEQ ID NO: 53981 - protein, 320 aa, Zea mays
  Coding DNA Sequence Number=SeqID_10606
  Homolog annotation: Hit_ID=Q53LP7; Match level="QueryCoverage=26%, HitCoverage=24%, E-value=4e-25, Identity=73%"; Hit description =Expressed protein
MQRRPEFSFPGSPARGLPPRPPANPMAPRYGDEEVRWLQASPQASPEMDYSSGGSGTPSPQLWAHHHQLHRQYPASAGSSPSRAQAIAGYRREMLDLVRGLPESAYELSLRDIVEHPSPPSPPHAPTNPLPPPTTAGPRASRAVPVPAQEKGESAGARKDAVAAADAEDGGGSRKQGGSKGKKQGRKQRTMRKQRSRSLDRSVSLDTGLLIKLFLPLSLGGKKKVSPKPDAAKDSKKKKRKEKKEAAVQEEEWWTKSEFSEAGNSSRTSSSNSNSSAASLRNANGAANPRAPDRSWSRKRTGCYAFFRANKGKKNEANQD

SEQ ID NO: 53982 - protein, 27 aa, Zea mays
  Coding DNA Sequence Number=SeqID_10607
MASFSSAFEVPSSYFSCKAEDCQRDNC

SEQ ID NO: 53983 - protein, 68 aa, Zea mays
  Coding DNA Sequence Number=SeqID_10608
MGEGRWASRARGSKGAWGLGRGRGTRGRGRVHGGEIVGERVFNSNSIQVSNSNQIKYVQQFKEYLGSI

SEQ ID NO: 53984 - protein, 174 aa, Zea mays
  Coding DNA Sequence Number=SeqID_10609
MAGGIELAGAKERGLAGEGGHAQRDWALTCGPRDIKNIELGSSNTQQARRLLDDLDAACQWMGPDALNAERREAEAKARTRVSAEPLHTLGSFSFRDPAGVRTHPEAPDLYVYRGPVSFCGGLALLGCGVLPCHVAPFGLPIRWGQVRSSVWLRGVAWARCLHAVGEGTPNFGY

SEQ ID NO: 53985 - protein, 321 aa, Zea mays
  Coding DNA Sequence Number=SeqID_10610
  Homolog annotation: Hit_ID=Q6QP51; Match level="QueryCoverage=18%, HitCoverage=31%, E-value=3e-11, Identity=59%"; Hit description =Putative growth-regulating factor 1
MDKTPAFKMPLQTELRFRPRGNEQPPHQGACGATSSGRLASDLCSSSYGGTNGLNGGEASPGCHHVSTDDGVRLSTNAAPANAGRSEAHRQVLAPVLAMKTRKRVECCILAGQQQFAFLGMAGGCLLRRAGGWFPPPEAGRGGGQLTRAGGRAPARLALRPSKDNQRVKGRTAVRAACNRAKWARPSDFQRTQHGGPGPRVMQPARRLLRASNCIATRTTTTPPRLRNQCRDSRQPCVRPSSASLARRRSKRRFAFAIMTASKKAPSLPTDQRFEGWPLGGVQQPPQSAWVLRPLLVRGSKAGPSEGFNGRLRPLGLRAHY

SEQ ID NO: 53986 - protein, 274 aa, Zea mays
  Coding DNA Sequence Number=SeqID_10611
MRKPRIALSHLVLTFLIDVLVPTMGVPLHAEYALVQGLVYLGRLILRNRLGWVLLPGGMARRQNGIVVYPLPPIDDEDVRVIGGGSSSTDLMTAPTMLSDCGVGRLCLGALEDDRALDPFSALTDLSPVGVSRPGVPKPTSECAACPSPDGSSAWASAKGGEARWPETGVREVEVPRPSCSSRAQVRCACSRGVTSVHVGEGSERPQESACPVLGPARPTFSKKALVLPFIVVRRGSRCTMRGVAECYVSSGERASALSTCQCGSRRDLGTLLA

SEQ ID NO: 53987 - protein, 73 aa, Zea mays
  Coding DNA Sequence Number=SeqID_10612
MVSHSGYGGYKCGHCTTAVGVSEALYAKARYRSRLLTPGSLEDMVAGVTWPSILPPGWTVEWDPTSAEEEHEE

SEQ ID NO: 53988 - protein, 92 aa, Zea mays
  Coding DNA Sequence Number=SeqID_10613
MKLPEQGIELCLAGEASPRSPNFTRPSVNVDRAPRMHISYSLHSIDCNLADGEYILVPEQGVAQEVAPDPAPEPAPEDLPALALEGKPRFYA

SEQ ID NO: 53989 - protein, 185 aa, Zea mays
  Coding DNA Sequence Number=SeqID_10614
  Gene Ontology: Mol. function=heat shock protein binding; Biological process=protein folding
  Homolog annotation: Hit_ID=A2X204; Match level="QueryCoverage=37%, HitCoverage=43%, E-value=1e-19, Identity=50%"; Hit description =Putative uncharacterized protein
  Pfam annotation: Domain name=DnaJ; Domain location=100-158; Score =37.2; E_value=5.8e-08; Accession=PF00226.22; Description=DnaJ domain
  Pfam annotation: Domain name=TCP; Domain location=1-183; Score=-37.1; E_value=0.00016; Accession=PF03634.4; Description=TCP family transcription factor
  Pfam module annotation: Pfam domain module=DnaJ::TCP; Domain location= 100-158::1-183
MRLSVGVAREFLALQDRLGFDKASKTLNWLLAQSKSPIDCLVDAADQVAVVTGGRPTLMKGREKGSNSSTCCLTDSRAGVLLPVLLAARGVDEMQRRNAKILGVGKTTSQQEIKKAYHKLALRLHPDKNPGDEVTEADIEEFEAKYRGSDYEKTDLKDLYTKYKCNMNRNNYLLYHIVKSETVLL

SEQ ID NO: 53990 - protein, 72 aa, Zea mays; identical to SEQ ID NO: 49183
  Coding DNA Sequence Number=SeqID_10615

SEQ ID NO: 53991 - protein, 278 aa, Zea mays
  Coding DNA Sequence Number=SeqID_10616
MSYAEKEVAIERRMDSPPRCDCGDRAVIDEVHEKQFCCPNIDYPYGWRKCRFREWLYGPLSHWPEPEETRKCSWESYDDKGESIRRLKAADEKRAHDAREWEAAQAEKQMLDNLADRLKGKIGCGVNYLADEAHARYVQDKMATVELMEEEEDDTSRLSELIALAEAGLHEEEEDDTSTLSELIALAEAGLRAQEEEDEFMSQAAEEVEASYYKKKSDEAEAEDELFSQAADEAEANYYKRTVDKCDAGQCSKWNEVVVEDCATDDSEDELLIYCDSD

SEQ ID NO: 53992 - protein, 153 aa, Zea mays
  Coding DNA Sequence Number=SeqID_10617
MGKNNKRKREPTPPSEEFGDSEYSEEEFSSGSEGSPAPVPLRESSDDSNDSQGLAAEVWSYIRAVERSGLEGSDGSEYSSDEEDSDDGGEDEDDDDDDDGDDDDDGGGDGSGSGRGSGGGSKDGDGGGSRGSNRGGSSRGSTRGGGGSNRASG

SEQ ID NO: 53993 - protein, 399 aa, Zea mays
  Coding DNA Sequence Number=SeqID_10618
  Gene Ontology: Mol. function=DNA binding; Cellular component=nucleus; Biological process=response to DNA damage stimulus
  Homolog annotation: Hit_ID=Q84KJ3; Match level="QueryCoverage=100%, HitCoverage=75%, E-value=0.0, Identity=74%"; Hit description=UV -damaged DNA binding protein 2
  Pfam annotation: Domain name=WD40; Domain location=205-244; Score =23.9; E_value=0.00058; Accession=PF00400.23; Description=WD domain, G-beta repeat
  Pfam annotation: Domain name=WD40; Domain location=314-349; Score =4.7; E_value=8.3; Accession=PF00400.23; Description=WD domain, G -beta repeat
  Pfam annotation: Domain name=WD40; Domain location=41-80; Score=20.6; E_value=0.006; Accession=PF00400.23; Description=WD domain, G-beta repeat
  Pfam annotation: Domain name=WD40; Domain location=85-124; Score=9.9; E_value=1.9; Accession=PF00400.23; Description=WD domain, G-beta repeat
  Pfam module annotation: Pfam domain module=WD40::WD40::WD40::WD40; Domain location=205-244::314-349::41-80::85-124
MEHGVIPAPKRNANTSLDYVFQSQVKGKIPMVKPKFLIPNQLEHGNIKFHQRRVTCLEFHPTKNSVLLSGDKKGLLGIWDYVKLHEKITYDSVHSCILNSMKIDTTNDGMIYTASSDGTISCTDLDTGIGSPLLNLNPNGWNGPSSWHMIYGMDLNTDKGLLLVADNFGFLYFLDRRSKTRIGHPILIHKKGSKARIWDTRKLEANSPLASLAHGRVVNSGYFSPRSGNKILTTCQDNRIRVWDYILGDLQSPSREIVHSHDFNRHLTPFKAEWDPKDYTETVAVIGRYISENYNGVALHPIDFIDTSSGKLLAEVMDPDIITISPVNKLHPQDDILATGSSRSIFIWKPKIEDELTEERAKHDNSSDDDSGGDSGGKNKKAKKTRFTHAVKGKGKSKV

SEQ ID NO: 53994 - protein, 117 aa, Zea mays
  Coding DNA Sequence Number=SeqID_10619
CQRFIYNYTKSTVRNTVDYSGQEKLFGKTGQARTVRALVADRPQHKDDPRTEPMQKSVSALWTVRRISADRLGPRSDRPTSGADRPARRHHLVVGPCRNFVFQYEKESSLVKERWKR

SEQ ID NO: 53995 - protein, 27 aa, Zea mays
  Coding DNA Sequence Number=SeqID_10620
GAPTEGSSGIDLVGVLGSTAHPGLPLK

SEQ ID NO: 53996 - protein, 117 aa, Zea mays
  Coding DNA Sequence Number=SeqID_10621
  Subcellular localization annotation: CTP_CleavageSite=72; ConfidenceScore=5.66e-01
MKRNPRVTSSRRKCRKAHFTAPVLRPPRAHVRGAIDGSSATSTMCVPSRSARTTRCRSCAAPTRAVRAKWCRCTAVAGSSTLSGSPARRSWVTKLKLDKDRKALLDRKGPGPRRRQG

SEQ ID NO: 53997 - protein, 373 aa, Zea mays
  Coding DNA Sequence Number=SeqID_10622
  Gene Ontology: Mol. function=metal ion binding; Cellular component =nucleus; Biological process=regulation of transcription, DNA -dependent
  Homolog annotation: Hit_ID=A2WR72; Match level="QueryCoverage=84%, HitCoverage=25%, E-value=1e-103, Identity=55%"; Hit description =Putative uncharacterized protein
  Pfam annotation: Domain name=C1_3; Domain location=112-141; Score =7.8; E_value=0.064; Accession=PF07649.3; Description=C1-like domain
  Pfam annotation: Domain name=PHD; Domain location=113-161; Score =10.7; E_value=0.00073; Accession=PF00628.20; Description=PHD-finger
  Pfam annotation: Domain name=PHD; Domain location=218-274; Score =22.9; E_value=2.8e-05; Accession=PF00628.20; Description=PHD-finger
  Pfam annotation: Domain name=PHD; Domain location=275-320; Score =54.5; E_value=3.6e-13; Accession=PF00628.20; Description=PHD-finger
  Pfam annotation: Domain name=zf-C3HC4; Domain location=219-271; Score= 7.2; E_value=0.014; Accession=PF00097.16; Description=Zinc finger, C3HC4 type (RING finger)
  Pfam annotation: Domain name=zf-C3HC4; Domain location=273-317; Score= 8.4; E_value=0.01; Accession=PF00097.16; Description=Zinc finger, C3HC4 type (RING finger)
  Pfam module annotation: Pfam domain module=C1_3::PHD::PHD::PHD::zf -C3HC4::zf-C3HC4; Domain location=112-141::113-161::218-274::275 -320::219-271::273-317
MVRELSPLFLVLITLRLTFPHQSAKISSSAAGVRCPKPIAARIVCQNCRAKMHAVGRERGSDDDELNEAVVARSEPKNLVQPNASVPLTSQGFNQLLDQPGPSDPSVVYKDSICNRCGKVAGAGSVLKCYRCMLPCHISCIEATGSPISTGRWCCKNCSAGTKEPVEGDMVLAHGNPNCLHESCVVCDRLAACRSPKCDNSRALVISSVDPEIDTCYSCKICGGTEEDEKRFLICGNVLCRYMYYHIGCLKSMQISTSVERGSPCWYCPSCLCRVCLCDKDDDLTILCDGCDEAYHIYCITPRHTSIPKGQWYCSSCSVERAEEGMRQYERRTLKLHRKEDAGLQSWNFDGVDLLLSAAEQLRIDEQLETRTD

SEQ ID NO: 53998 - protein, 297 aa, Zea mays
  Coding DNA Sequence Number=SeqID_10623
MRQGPYPIPDKFLNKIAPATHAGSAPKGSFIFIILRYLKLRTIMFCEDFHRGLTAIRSCRLDILRQGHHGIRRQLVDLDLESLQDLRHESMRRQTKASGEKSLKNDQLAFWLGDLLRPRDMPHSAAKISKLLHILHADRGHPRHAKLHCITKMQLLRRHVAPAGGVSAAEEEEDGMATYRRRRLAKEYLTRAAPPPFIHRTRRFGKPAVQQCRVRQRSHQKPPRNHFERGQRLHHLATSSAPDDLVELVPRRANVGAKAKTLPFARCLRRSCRTNGGKATGGFHPSSNTLQDEGLRR

SEQ ID NO: 53999 - protein, 745 aa, Zea mays
  Coding DNA Sequence Number=SeqID_10624
MPSRGRQLVRSSAFALDLRGRDPAAFVREAEDGATRIVGHYMPRTEGLRSWDIRGSNDRLNRVFELNRLSYGGYPGEDAVDCRGKKPMGGTEEGSSQEAALAAKKRNLGTIVGGMVVSDKFAVELMGTCAAPGGRMSSPELRESSTRMLEVTGGRWPKNLSIPWAEGEDMYTSRIARGLRIFPYRQNIVVVVSAVMYKDRQDAAQKRRAVIRLADPRREAKRTRGSAKAAAPAVASRRRLRNWLRPDPARRRRGVAFCASGEIPSAAVVKDVVGSMSRRLREASQQLSQAADFTDRVASGALTADVAAEVERLRAQHVDAVREKSAVESKNCRLAEKVAALEAEKTDLRRQLVEDRREANQAISEAEAKVARVEGSLASQRAEEWEARFNTLRGHMDKAEASTRSEVERTLAQLVDSYRELGARTADFEVPDREADLRFLEWLQEELLVLLTIVEGFMSFASLVTCEGALNALSREGLQALRAGALFDRMWGAHGREAVRERSDRAREQMEGAEDVEDLGGLTGAPSEAAEVNPVLASDAGEGPSAPAPQQARAGEDPVSAPAPAVEDAPKVVAEPAVEDPTVAAVPSQGFGPAHATATNNANFVAASTVVTKNDSDDSVSKFFESDDSRSSVVWSEESLDEDLDYFAALDVAAAEPSPRVMGAEVLPSPSAGRRRRRAVAKRRVSEAEGGRLRVDGASKREFLSSPVGASVGEGELRNLFEGEELRIMLFNYREMGIIPKIEPM

SEQ ID NO: 54000 - protein, 50 aa, Zea mays
  Coding DNA Sequence Number=SeqID_10625
MAHRTVRCATVAPTGSFFLGPAWPHLAEGAPDSPVHTGQSGAPRDRNPTS

SEQ ID NO: 54001 - protein, 194 aa, Zea mays
  Coding DNA Sequence Number=SeqID_10626
MEQEQQDSSPSPQREVESGRQPSPAPPQGTPAAGGDPDEDDDDSGSSSHSTELSEDLPAPSRVIPGPVGATFLVCHTDDDLQGVEACSEHYSITKWDTTEDCSLFSGVADGLDLKYYPQHLTGSTRGVIVSPVSEGNPRLSSRVNLVVVLNTELDHALDKLGKARAKITELRAERAEHRHQEDGCGGTTRIIPT

SEQ ID NO: 54002 - protein, 58 aa, Zea mays
  Coding DNA Sequence Number=SeqID_10627
MKDAIWEKDESISKLRMKKLRLRARAVMENGTDLKAFENKSPTTTLPDRGKGSRGVGV

SEQ ID NO: 54003 - protein, 206 aa, Zea mays
  Coding DNA Sequence Number=SeqID_10628
  Homolog annotation: Hit_ID=A2Z5Q4; Match level="QueryCoverage=50%, HitCoverage=23%, E-value=5e-26, Identity=59%"; Hit description =Putative uncharacterized protein
MQGLQEMQVFKDTELDPYSVMIDDAMYDEGNPITDWLCNLRSESPPILDEYDDNELDSPIPSRVLMDELGMDGEVTALKRKLDFNTRDGKKKRKAGLVDIEEEMRTMLSQILQKVAQYMLNYVIAVQMVAQCNLYGLKVGDEFGDEWEFGGPSGGGACDVGASDDGSRDGAMHEQAAPNPPFRPRSTRLKKVLVKELYKESCASLN

SEQ ID NO: 54004 - protein, 658 aa, Zea mays
  Coding DNA Sequence Number=SeqID_10629
  Homolog annotation: Hit_ID=Q6J9V9; Match level="QueryCoverage=17%, HitCoverage=30%, E-value=4e-10, Identity=44%"; Hit description =Putative uncharacterized protein
MNKTPALKVPLQTELRFRLRGTDAAARRLSFASPLKGREPDIKAKEPEVGPWVALTGLSAEKLSPAATSSAPTAASTNTAPASAGRPKAHRQVLTPVLATKARTEDRMLHPSWAATVRLPRHGWRTPPPQSWRMVSTPRSWKKRWAADPRMSPACFSPPSNWWSPSWVTTGKGMQPGCLMKILEAERWLKGTNFREVAFLQRQQDESDASAPHPGAQNVEGRDARRECEDMVAFQGGHPPFKGNSPHLRPQSARTESSPTHSKVLPLRHGGWVPRVMQAGPGQKEPKPPRAVHATAQRLQAFLHYRPDQWVKGRTAMQAACNRTNGAHPFDFDASSMKAQAHTSCNRRAGYYVRETAPPLAPVPCLLDCGTGAVTRGDPAHDPTVPTKHIGHGSVSRGRRRDGRYGQKWASSNGGGRQAEAAVKSSASSRPLLGQRENPLPWREDGAPVFRSSNGSRTHNGCPANHSTHRINSAAGQAARTGKGDTPKGILLREGSGPRAPLLIRGSKAGPSEGFNSRLRALGLRAHYWSEVRRLAPRKGSTAASGHSGSAPTTDQGFVGWPPKGCDSRLRARRVRDDPGYVRYITKARATLPRRHHVRRPPRATWRFPPLLLAERRRRGGRSDRSHFAAPLTDLTRKQRRPPGSDCRATRQSEVDSG

SEQ ID NO: 54005 - protein, 107 aa, Zea mays
  Coding DNA Sequence Number=SeqID_10630
MTHFFSGFVDLSLKISQSCHLLLLSLYLLMDYLHVPNLLVQLLLLECWIGGLSFLAPSFSEKRVSWFGSSGCNAAAPLAEAFFGSMTKKDRNNIVGVSTPGGPWTDE

SEQ ID NO: 54006 - protein, 144 aa, Zea mays
  Coding DNA Sequence Number=SeqID_10631
  Homolog annotation: Hit_ID=Q6JAD6; Match level="QueryCoverage=84%, HitCoverage=18%, E-value=6e-19, Identity=47%"; Hit description =Putative uncharacterized protein
PHALSLDPTGPAPEAPVPASVPVFDSQAEDAALRQFDTQGTAADDDDDFGVPPPPPPPMPPRSHDHEAGSSSAAPAAPSAMDPALASILQSITQQQAHLAAEQARLSERMLSMFQNMQDRQDALQQQLHQDRAESRAFMALMLQ

SEQ ID NO: 54007 - protein, 171 aa, Zea mays
  Coding DNA Sequence Number=SeqID_10632
MEDRLDPGFGGASTSPDLRHRPATSTGSAIITLPRADSGRREQDRLRCSSDSHDTTPAGCQDLSGYHIGMAFLEKVGRAGTRTGQALSWGRSLPSPAWTLVTPYCKRTRPGRGTNTKAAGFPPLSRPSPATSLPPFALAHALDPSGLGHTAHSLVGLGTPRSRDADSWRTR

SEQ ID NO: 54008 - protein, 434 aa, Zea mays
  Coding DNA Sequence Number=SeqID_10633
MACIICREFGVKTQRFHRLRTYPRWTAGWFKKITRVLMQNANGEEEITDVTKRGFRFGLEEEDRADSGSHRPVTVFDTRVKVIGWPVGPIRQRRGEGFGLCGRWYPLPTSHVTRLPRDRDFPYTSTEEARQGFLPDRHRSKINQGPPYTDHSPTALAPFGTYPRWTAGWFKKITRVLMQNANGEEEITDVTKRGFRFGLEEEDRADSGSHRPVTVFDTRVKVIGWPVGPIRQRRGEGFGLCGKEERKRDEEEELKQTSSRKAEPWLTVKTRQYSDSGMLRLAVTFESVKRSRQLDKVVALEVGEKAKGTIVEAYLVRTQERVLVDVKTTHVQGRHIGGGTWKSRCCTWSHASDQNHPTSASSAPSLPSKRAASSLDLARVRPLTPPVPPVACSPAADVRRQTPLEDDSGTTCAVDVATGGHDNDAALIGAQRAR

SEQ ID NO: 54009 - protein, 723 aa, Zea mays
  Coding DNA Sequence Number=SeqID_10634
  Gene Ontology: Biological process=intracellular signaling cascade
  Homolog annotation: Hit_ID=A3B312; Match level="QueryCoverage=42%, HitCoverage=34%, E-value=1e-149, Identity=79%"; Hit description =Putative uncharacterized protein
  Pfam annotation: Domain name=DUF231; Domain location=535-710; Score =216.8; E_value=5.1e-62; Accession=PF03005.6; Description=Arabidopsis proteins of unknown function
MGTRAHESYSSGVGLHVRRRRTAAGPGPRVILLGRQFLGAEKSNCRSRQYRASSGPPRRIEKVNFQNQCSGIEARRAWPSKTIKCEDHGSVSHGERRDSWRNRGWTGSNYDSKRTEAACQSPIKLGPTYRLVSSFEAGPGATVGTLNQGYPLLQYEGTVSMQLSLVARQTAPNPTTWAALGPPRGQRRQSTLRACPAPRHKETSSNAKKAAAACLLLAVAAPAAAEAEELRPSSRFRAAPVPMRIPRRKGGAGPLAVGVPSRRAQVAAVFALATLLGVSVLYDAAHIAASLRRHGGPTAYAKLSSSDGAASVSGVARTLAHVSRAVWSDGADRTDPPPHEHLEEAEEGAAKPGASLQQDAPLTDEVVEGGSGGHGRRRLAGAGAGSGPGDLRPVTCTRNGRRDDDYQKWRWQPDGCDLPRFEAKLLLEKLRNKRLMFVGDSLNRNQWESMVCLVQSEAPWDKKSLVKNGSLNVFHLQEYNATVEFYWAPFLVESNSDDPDIHSISDRMIKPTSIAKHAANWEGVDYLIFNTYIWWMNTPQMKTVHGGSFSRKHVKYDEIERVEAYRKVLKTWSRWVEAHIDPKRSTVLFMSVSPVHMQSEGWGSPNAVKCFSETQPAINYTKKLEVGTDWDLFAAAQRVTRSMEKVPVRFVDVTALSEIRKDAHTSVHTLRQGKLLTPEQKANPRKFADCIHWCLPGVPDTWNQFVYGHIVSSPPPPQDQPHR

SEQ ID NO: 54010 - protein, 561 aa, Zea mays
  Coding DNA Sequence Number=SeqID_10635
  Homolog annotation: Hit_ID=O48967; Match level="QueryCoverage=38%, HitCoverage=84%, E-value=2e-30, Identity=52%"; Hit description =Putative uncharacterized protein
  Subcellular localization annotation: CTP_CleavageSite=49; ConfidenceScore=5.25e-01
MSILLTGGGQAILQAACPFAPVAGSTPMLRHTLCSSSLGGMMVQIVEHRAETSVDFLVEEEAASSTPQLPNRPVPGAAAGVDTPPPSSMASPGAMKQWRDDVDRLLDMTNDLRAKLNSRRAGEDARVSLERARERRRNIEGRNLDQDFAAVAPQTPAGAQIQAGVPLADVGCATLADHLRAATWPPKFCASIITAFRQGVRDEKMLEKLATHDVETVTTLFALADKCARATEGRAWHSAPQTEVAQIGGSDAISQDGKKKKKKKKKRTVALRGHRLLLRSSQLRLGAKTSATSAHGRRGVTPAHALYTPTVTIALRSVARSSNSRSASANGASRPPRTAPLLIAGLARKGSTTARWPQENRTSGISHPRGSSRTFSLEAPTPVMTTSRAIGETPSFLVYGAEACPGPSRGCLLGVVANSFRYAGTQPRHVEPTSQGARYDLLDISRVALKARGHHLHGVRRLVRPPRVASSAARPADTIGGGTEAIKAKEMEPQHGSLPTPRSWGREGWSRSSARCPPSRGWLTSFPPNAGGRSGKERRPHEHPAEVGDDGRLKDEAGRNV

SEQ ID NO: 54011 - protein, 130 aa, Zea mays
  Coding DNA Sequence Number=SeqID_10636
  Subcellular localization annotation: CTP_CleavageSite=55; ConfidenceScore=5.52e-01
MVAPPPPPVAGKVTGQARMPFFRHVGKTSSIPPPSGGMTAVVVVVARRRKEYHVVAAVEGHELETPETEHRPGLERLLETTHLELDGKLFVNTQQAPTWRANCRRFDPGGSLDRRVNCHYVSQPRWVGAR

SEQ ID NO: 54012 - protein, 219 aa, Zea mays
  Coding DNA Sequence Number=SeqID_10637
MVASHRGDASAPDYAMGLPARLLASARPALLCAWQRGRSCALAPALSMAMDGMLAYEAATAASELRTRDVNGTRYPLTRGEFPLLGYGYGTKNIPIGMDMGQNLHPLGKRVGRPEPRHHLGSLLPDGVPPGSEIQAPPATSAASAYARTVRPQGADRPAVRQRSPSRAPGRGPSGLRPRTVRPCAESTTAPRTRPRTVRPCARTVRSCAEDTATVLLSN

SEQ ID NO: 54013 - protein, 610 aa, Zea mays
  Coding DNA Sequence Number=SeqID_10638
  Gene Ontology: Mol. function=prephenate dehydratase activity; Cellular component=cytoplasm; Biological process=L-phenylalanine biosynthetic process
  Homolog annotation: Hit_ID=A2Z9H3; Match level="QueryCoverage=63%, HitCoverage=100%, E-value=1e-161, Identity=77%"; Hit description =Putative uncharacterized protein
  Pfam annotation: Domain name=PDT; Domain location=207-384; Score =208.3; E_value=1.8e-59; Accession=PF00800.9; Description=Prephenate dehydratase
MAEKLDKFTEAIRDEAPKGPTSKKISTLEEIDGLDEDTFLDLFDILTDDARKYEYLLTLPGILRKRWLLKQLKKQQSTGTRTPAASRVIKVNSLRPPPCRLSKLKVTPPKPHRRSHRPAPRSMAYTSSLNLPKHLLLPSPRRTRHRPSSFVPTAAAKVNGDAPERPAPNGKARINGQGKKGVNGHADRIHLSVSTGGGGQDGSGLRVAFQGAPGAYSEFAAKTALPGCDTVPCRAFADALAAVERGGADRAILPVESTMEGTALRNYDLLLRHGLVVVQEINLFVHYCLLAMPGVRAAEVRRVISHPMALAHCGRALARLGVDREPVEDTAGAVEMLRSKRMLDTAAIASPRAADLYGLQVLAHGLQDESWNVTRFLLLSRPPSPVAVALGVDADAKTSMVVAHRGGSMVVVLKVLSAFSSRNINLTKLEVINNEGAGSGPGERPPVVILDTSARGAPTLRAFPHVLYVDCEGAAHDPRVREAIQEMERFAVFVRVLGCYAADSTVYDLQSETHTCQAATSLPPQHGCGRWHHRQNANAAGAGRRRRNTVAQACERGLAAAVSPPKESAGTVPAAAAPQASIPAGPPMPPRAGTSARARTAAAMTGEPQP

SEQ ID NO: 54014 - protein, 414 aa, Zea mays
  Coding DNA Sequence Number=SeqID_10639
MPSHGGKLVRSPAFALDLHSRDPAAFVREAEDGAVRIVGRVFEMNRLSYGGYPGQDDVDRRGKKPAVESGDDPAPAAAPSSKKRKLGTAVGGLGVSDGFARELMRTCVAPGGRMSSPELRESSARMLRVTGVMDKDRQGAGQKRQAVVRLHEARPKRQRGGCEGYCPPRGRRRLRAAAGGSKTTKAAPISGRVPEAVKAARGLPPPGKRVADFVTDISVEDYLVGSDEGQLVVVPPAAATTAVAVVPKAKGGALRAGGEMPTLAAVRDEAGAVSRRLKEVKEALSQAADFADRTASGAFTAVVSAEVERLRTQHADAVREKSAADSKCRKLADKVATLEGEKTDLRRQLAEERREANEALAKAQAAQAEANLAQVEGGLARERAEQLEERLRALQSRVDRAKAATRTEAERTRK

SEQ ID NO: 54015 - protein, 139 aa, Zea mays
  Coding DNA Sequence Number=SeqID_10640
VAMRLMVLGFDSGNAQDPLESSEMGLLWGVHMQAHLLDDVGDVWPGEVGHASALQDVNGVLALVEEETLRPALGDDVEEVVSGGCRENNLVVVEKEVDHVTTAQVDEQGRARLSLDEAGGGQVAGETIVPYPRRLLEVV

SEQ ID NO: 54016 - protein, 102 aa, Zea mays
  Coding DNA Sequence Number=SeqID_10641
MEEDILDIELMYCPIPREGEGEDSSNDGELDDGVEGLVIVHSGALGKAPNDLTGLVAIEGPVRGFRTLLQSVILVGVGEGDKNGGGDWGDTRRSGSRVGCQD

SEQ ID NO: 54017 - protein, 68 aa, Zea mays
  Coding DNA Sequence Number=SeqID_10642
MGSLARTTRPLAAPRPWGAPPFGPLEGGNEIDGSDYDYGIGCQHCNHCSGEDEAVEGDFQEFQDYDEF

SEQ ID NO: 54018 - protein, 103 aa, Zea mays
  Coding DNA Sequence Number=SeqID_10643
MEARMIAEREAEWEALSADQQRMAKMFQYMQSLGAAHGFAPPPLLFPLVDPARFHTPVSIKILVLHDIYSSETIWGGIQQPSWIVQPITAPVQPPTSMRYYLC

SEQ ID NO: 54019 - protein, 160 aa, Zea mays
  Coding DNA Sequence Number=SeqID_10644
MATRAAWALRLRASCAAEAGTVLRAFRGAKPAKPCLRLLGGKDTYPLRTKANRAHGETPQASVPAGAAEPQIRAKAKAGHHVIVLVILVVIVIVRRLRRWLPRESVPLLPLTAPLQASRARIRLRARAFFASFFSFIFSVATLRAARSTVSSETGGREGL

SEQ ID NO: 54020 - protein, 97 aa, Zea mays
  Coding DNA Sequence Number=SeqID_10645
  Subcellular localization annotation: CTP_CleavageSite=47; ConfidenceScore=5.32e-01
MANPGPAPLPSLSVIYIVAPTIFKSTLPPMATPTRGKKRLVVDVDVEVDSEVEVASAFSRLSISIVAKRTGDGCSKEHSIGKEHSTGKELTYAATSV

SEQ ID NO: 54021 - protein, 177 aa, Zea mays
  Coding DNA Sequence Number=SeqID_10646
MGGASASRDFAAHVCGLVRRGPWSGRRQLHVGAHQSALGRGRGIPCCNCRSASLPQIHILVWYLFLSSRSTPPAADPFYRQALLGTSFSVVRSDLAQAIAKMHVVGKELKDLAGDEIMDSPDTAKEVSVNFTMWRVYELAQSLEAGPSPPLSECFNNQFAEDEDMGGGEWALDDVSS

SEQ ID NO: 54022 - protein, 1075 aa, Zea mays
  Coding DNA Sequence Number=SeqID_10647
  Gene Ontology: Mol. function=carboxylesterase activity; Cellular component=integral to membrane; Biological process=chitin metabolic process
  Homolog annotation: Hit_ID=A3BZ67; Match level="QueryCoverage=96%, HitCoverage=62%, E-value=0.0, Identity=63%"; Hit description =Putative uncharacterized protein
MGLQDVTTTWWLAHLMALPWLFTAADSDDICTVVQFINSKRPWTTLMGVGWGYGANMLTKYLVEVGESTPLTAAVCIDNPFDIEEATRSFPHHITLDEKLTAGLVDILRSNKELFQGKAKGFNVQKALSASCLRDFDVAISMVSHGFDTLHDFYAEISTRLSVAHVRIPLLFIQSDDGTVPLLAVPRSSISENPFTSLLFCSCVHSTMSMFQRYSVLWCQNLALEWLSAVEFALLKGRHPLIKDVDITINPSKGLAFVEPQVNQRKSPKGNSFRQHSELILYNNVAHGINGLLVDSANKYSGAQNKENGQLNNNGDIGTVDKDLEEELEESSEDVEKGQALQSASLVMNMLDATMPGTLNDDQKKKVLVAVEQGETLVKALEEAVPEDVRGKLTASVTEILHSKRETFSLGALNRLGWNNVRPTTTKTLAQEKLKDSDHESGLKDTKMVDQNRISATAFEGDLKDINMTNDDKPGESIESSQGKPSQTSEPVGTATEIGTEQPYKSDKANYGTNDSSEGQHITEQDNEMTPKQVSDDQSVANCNGPSKEREQSADATTDQNLQSNTTTEKEGDTSRTGEDKTAHNVNDQSTQVSKTEESKPSPITVTQALDALTGFDDSTQMAVNSVFGVLENMIDQFEKQQDSENGESADGNDGITSVDETESHVKENTENVSSGEDINHSSKQPEGSSPGKTDSIMSKYDCAFGEENPNLSIVSYGRGKMRYYRGNKVGDHVGADGIERVSGLPDYLLDIAVNSYLKAQYAMYLREFLYTELQLKSPESNSATDLFLDPQEGKWKIEEQMGNVQNDNFESSQESSKMDNAIEPPYFIPGKNPDIAYKSNKWNNTVATRSKPGNDLNEALTHFVRDELSSALKIEVGRKIGITDTKQLERSLANDVEQIAAEVSKTVVLDCELYSAIHVQRSPTTIKFGSTHGKNVVEAVSTAVQQSQHLRNILPVGVIVGVTLACLRNYFHVGVSKHGDHMIATMKSDIFGEEVIVQDSSKENVQDSGKANTNDNNIEKTSGENQQDMTKSQGQDMMVGAVTAALGASALVAHQVSKLISQLYFLVYDFLWTC

SEQ ID NO: 54023 - protein, 40 aa, Zea mays
  Coding DNA Sequence Number=SeqID_10648
MVMAPWVKYLSQEYDPMLTWAASTYRSPSCPSFRLNKEYR

SEQ ID NO: 54024 - protein, 120 aa, Zea mays
  Coding DNA Sequence Number=SeqID_10649
MTVVVVVLRGEEYHVVAAVGGHELETPKAEHRPGPKRLLKIIHLELNGKSVRGRGRARWRFLLRPRLRSGEVVTPPEVEAEAEARGRVRQRPSPEAEAEAEAWGWARRRPSPEAKAEAEA

SEQ ID NO: 54025 - protein, 268 aa, Zea mays
  Coding DNA Sequence Number=SeqID_10650
  Gene Ontology: Mol. function=serine-type endopeptidase activity; Cellular component=chloroplast; Biological process=response to stress
  Homolog annotation: Hit_ID=A2Y7L6; Match level="QueryCoverage=76%, HitCoverage=37%, E-value=3e-64, Identity=69%"; Hit description =Putative uncharacterized protein
  Subcellular localization annotation: CTP_CleavageSite=31; ConfidenceScore=5.40e-01
MVAPSSAATACFVSPLPPPRRPRHFLRHLARAAVAEPTPAPASASSLAHPSPWPWAQRLCDLVPTEAVGRLLSSVVGSLIVALAFASLILGDTDAASAFVVSTPRKLQADELATVRLFQENTPSVVYITNLAVRQDAFTLDVLEVTQGSGSGFVWDKSGHIVTNFHVIRGASDLRLVGTTECFMLSYYTFLVVWLCSNRSLSILVLMVDRAGRKELWCFNVLLDKDVVVLRIKAPKDKLRPIPVGVSADLLVGQKVYAIGNPAYTDLF

SEQ ID NO: 54026 - protein, 58 aa, Zea mays
  Coding DNA Sequence Number=SeqID_10651
MVNADESGPAVMTVAGGWEQQSRRQPGSRPIQGQQESLLPRREDGTGKGGYPEKDPSL

SEQ ID NO: 54027 - protein, 174 aa, Zea mays
  Coding DNA Sequence Number=SeqID_10652
MNKDRDLQNGIGIQMGQIQAIEIKETAEKRRNGKSKVAEEEWNVDDGFMSVLCWNSDPTADPLGTELLWRKNPDRYKMEKVRFRDNGHMVTCERQLTVGVDGGMTATDELEAFRLGAISTLPANGAEAALKESGEGLGAEKQELGHGMWRRATVQCIWGFSKPDAESKKRPVIT

SEQ ID NO: 54028 - protein, 108 aa, Zea mays
  Coding DNA Sequence Number=SeqID_10653
DMRQQVDKGKGGPVANDDGGGHACEGHEWVVGSMTLMFVVSGSKNLLLSVCDWIGSSVAYSMLQGGLGITNFKPDSFSSSKASAQLQSETSPGWVKRELMLMTSSGSN

SEQ ID NO: 54029 - protein, 334 aa, Zea mays
  Coding DNA Sequence Number=SeqID_10654
  Subcellular localization annotation: CTP_CleavageSite=86; ConfidenceScore=5.28e-01
MRGPRGKDVFARAPGVFGADAEGYQGSARRSSGSMRPGRRGRGGLRRLRPPGGSQPPLATKSAAPRSSRVPEAAKAAAAGGTKSVPAGAVKAQELPPPGKRVADFATDISVEDYLVGSGEGQLVVVPPAVTTAAAAVVPRAKGSALIAGGEMPALTAVRDEAGAVSRRLKETLSQAADFAYHAASGALTAVVSAEVERLRMQHADAVREKSAADRKCRKLADKVAALEGERAELRRQLAEERKEANEALAKAQSAQAEANLARVEGSLARQRAEELEERLNAMLTRVERTEASTRSEAERTRKHLMDSYHELGARTADFEVPDREPGLRCLEWL

SEQ ID NO: 54030 - protein, 191 aa, Zea mays
  Coding DNA Sequence Number=SeqID_10655
  Homolog annotation: Hit_ID=Q0WWS3; Match level="QueryCoverage=21%, HitCoverage=51%, E-value=4e-17, Identity=95%"; Hit description =Putative uncharacterized protein
MKNVAKCDTWCELQNPANHRVFERKLRPKPSGGGHVCLGVTPKDTPNTPPRGEGRGVWPPAPQGERPGARPAIRPYGPIERSSLSSDRDPSKYSNENFEGRRGERFHVNGTCTWPEVGSSGRKSTAHRAVSGAPPAALENPEDRIPSTLGRTHNRIRSPSALNVKVKKFNQARVNGGSNYDSLKVAKCLVI

SEQ ID NO: 54031 - protein, 155 aa, Zea mays
  Coding DNA Sequence Number=SeqID_10656
MNALSREGCRHYEVFDQADEDFERDIYKGPYGREVVRERAETARGQAARGERVDDFGAFNSALPDPELNPTEAVSEAALEPPSETAEGAPDAPAAATAGGGPPPKTAEGAPDAPAAAAAGGGPSPTAAPRAEDPVTVAAEATAETPATAGSSQVA

SEQ ID NO: 54032 - protein, 130 aa, Zea mays
  Coding DNA Sequence Number=SeqID_10657
MTLEPHPLQPGWRSLDSESFGYRAKDTIEAIALHELTTFCGFHPLELSTHPIGLFPTENEDDPIWKDRVEHAKDIWAIYPGQIAHLTEIQDMEANEDVDIEGGEEPASSLDTAGSGRPPSPESSVASFAH

SEQ ID NO: 54033 - protein, 226 aa, Zea mays
  Coding DNA Sequence Number=SeqID_10658
MSSRSLMHRVFPPSKPPDGGYPPSFCLVVGGTQLRGSCFKDVHHPCWGGGRAEPELYLPRGFVGHPLLRRSRERALTGPACGSDFDNAGLVDGGCRQLQRVELVGLAPGAPSCQKGGCRAVCTGGPPKMSRAARAAFVFWGGPAFSPVLAPPRGGRCPTRLGGSEWGSAGGLTAPVVDAEVEAAQEVPVADGITATIRASGLRLFVLVLAPRASEWARARLRQHRP

SEQ ID NO: 54034 - protein, 76 aa, Zea mays
  Coding DNA Sequence Number=SeqID_10659
MSSQHGPDYDWKTSPIDPQAVYASGGKAHGRYTMFANVINTSQTPPATLPTHEQDDVLDFVETLFTSGGIDHHSSL

SEQ ID NO: 54035 - protein, 152 aa, Zea mays
  Coding DNA Sequence Number=SeqID_10660
  Subcellular localization annotation: CTP_CleavageSite=35; ConfidenceScore=5.55e-01
MARARAYKALPGFDCTLPRPLKPHRSLARRRLPVRSVSAAAQSLCHRRPANRAIPNPVQPSEKTVHTSVKSPSEESEFASPERPVHARRSSQPRRNCNLADGEYILVPEQGAAQEVAPDPAPEPAPEDLPATALEGKPRFMHNLLFMLFYFT

SEQ ID NO: 54036 - protein, 180 aa, Zea mays
  Coding DNA Sequence Number=SeqID_10661
MAGASWPRWPKLGWLGGRWRVVLRGKSGELGLGRDYERARDRAFRLRVWAENKWLAMARGPKTKGGKRMGAGDVPRPYAERLLLVRLSARGVDRCRPRQRPKPGGPGAPGSHRRRGRYPRASCAPLGALRHNGLRAPHPTHLETQTKESDMRASRRFQKPEMRKEADEQEALTGRTAGRP

SEQ ID NO: 54037 - protein, 259 aa, Zea mays
  Coding DNA Sequence Number=SeqID_10662
  Subcellular localization annotation: CTP_CleavageSite=79; ConfidenceScore=5.45e-01
MAHVRAYKALPGFDCTLPCPLKPHRSLARRRLPVRSVSAAAQSLCHRRPANRAIPNPVQPSEKTMHTSMKLPERGIGVCFAGEASPRSLELSTPPEYVDRVIHSTILRFLVHTVTMLPREAHRALGLNQFAVVWPVHSPPTRTPACARGPSDSGHPRRQAVPRRDRQSLPEPTPHFAGPPSPPDTRAIQIPYVYPQQKPKPKDCNLADGEYILVPEQGAAQEVAPDPAPEPAPEDLPATALEGKPRFMHNLLFMLFYFT

SEQ ID NO: 54038 - protein, 176 aa, Zea mays
  Coding DNA Sequence Number=SeqID_10663
  Homolog annotation: Hit_ID=Q0WWS3; Match level="QueryCoverage=23%, HitCoverage=51%, E-value=3e-17, Identity=95%"; Hit description =Putative uncharacterized protein
MKNVAKCDTWCELQNPTNHRVFERKLRPKPSGGGHVCLGVTPKDTPNTPPRGEGCGVWPPAPQGERPGARPAIRPYGPIERPSLSSDRDPRGVLSDGPGPSSLERDAWEGFELEHACQDPKDGELCLSRAKPEETLVEARSDTDDSWSPHEFYRVKPMIRGIGGATPSTYSQTLNR

SEQ ID NO: 54039 - protein, 137 aa, Zea mays
  Coding DNA Sequence Number=SeqID_10664
MANGPKTDFRPRPRKRARGRARDPPVVPPRETWKFGSTHEGKRVTLAKPLILSKNAVFGHLRWVSWGPGKMPWFSEGRTPRSPRRGYAPQVSSAEPRTPSRPSRGRSAPYRAQLRAGAVGCLADPWFGRDAATTGYG

SEQ ID NO: 54040 - protein, 136 aa, Zea mays
  Coding DNA Sequence Number=SeqID_10665
MEETNRHVFDTFCHARARPRMSRAAPEPSQRPAIPNPVQPSEKTVHVSVKLSERGIGVCFAREAGPRSPDFTRPPATVDREPPRADPTLRRTSLAAEYILVPEQGAAQEVAPGPAPEPAPEDLPATALEGKPRFYA

SEQ ID NO: 54041 - protein, 83 aa, Zea mays
  Coding DNA Sequence Number=SeqID_10666
MPPWIGRSTRRRRARPPARVDRAIPAIPDDEPYLDVIARTSPSRPHPSPDLPRRRIRKIENVIKLMNQRVPLFLLGYFFNIVH

SEQ ID NO: 54042 - protein, 60 aa, Zea mays
  Coding DNA Sequence Number=SeqID_10667
MAHGRKLRFGHDPENKLSPSVWKDTEGKTARRRATTGGMAVRPSVWAENEGFAHGAGGEN

SEQ ID NO: 54043 - protein, 54 aa, Zea mays
  Coding DNA Sequence Number=SeqID_10668
MTLGNGYLGSRIDEERSKMRYLRPGARPAIRPYGPIERPSLSSDRDPRSVGTTR

SEQ ID NO: 54044 - protein, 23 aa, Zea mays
  Coding DNA Sequence Number=SeqID_10669
MATKGCSVGGDGASGEKSRGPGA

SEQ ID NO: 54045 - protein, 268 aa, Zea mays
  Coding DNA Sequence Number=SeqID_10670
MVQENIAPTSTKIVETIISPLAKELDEGDVDKIVPQNVDANIKKEAKVDTNVEGPTTSKKIHQRIATDDVKKPSESVARYLQKLQRVMTNQSKAESASRGVRTRSQIDNFEVWEEDEMIHTRESLRLKINIPIYKKEVVPPKFVNGRLFLTTVQLSKLSTPEIRMHEWMQYMDDKKKQLKTGFLDPLMISQARYKEVARRHGEEYKDLDDDEFEKAVKQNQRKKNEVHTVFIGKILAANIQRTSLICPYHYFHMVTNNLQVPKSMLNG

SEQ ID NO: 54046 - protein, 158 aa, Zea mays
  Coding DNA Sequence Number=SeqID_10671
SWTRQKAFVERFHSLTTKSLLGRRQRRHPSLEAFADNHWSDRDRTGRDTLRSIRHQTKTGDEPPPGFAPLEGADLTEDGEVLGVSTEEQLQLRALRLKNRNLQRQKEILEAKRQRVSALAKVRQMIRDEEQKAQDLEREITLMQREGHLGLQQEPPLQ

SEQ ID NO: 54047 - protein, 148 aa, Zea mays
  Coding DNA Sequence Number=SeqID_10672
  Gene Ontology: Mol. function=carboxyl- or carbamoyltransferase activity; Cellular component=ornithine carbamoyltransferase complex; Biological process=amino acid metabolic process
  Homolog annotation: Hit_ID=Q8SA97; Match level="QueryCoverage=99%, HitCoverage=24%, E-value=3e-21, Identity=44%"; Hit description =Ornithine carbamoyltransferase
MALPVDVAGLCPRSGDVEAPPKPGSSLSSMAEAEPEFLGRARRRSFGRGQGGVRALGSGEADPSPSPGSGEAEFAVFRGLARVRALGRAEQSGAVLLSDRSVERRSDGGHFGSAGGARVRIKLYADGGYQLRIRRLEGTPNYGPRQSC

SEQ ID NO: 54048 - protein, 179 aa, Zea mays
  Coding DNA Sequence Number=SeqID_10673
  Pfam annotation: Domain name=SlyX; Domain location=89-156; Score= -8.7; E_value=0.064; Accession=PF04102.3; Description=SlyX
MDDTVEAAAMKTLTTFYGYHPLEMVMHPLGLFPAEKKDDPMWCNRALQSDAMAHLANIAQIAKLTLDSREVFVVDLSTELVEKDLQVERLSQRITTLEQQVEIRDNTIDVLENQLHDVQRELEEANDHLDMHHLEMEANEVGSEGEEAPEELGPAPGANGTTSAMPPSPVSSVASTAQG

SEQ ID NO: 54049 - protein, 98 aa, Zea mays
  Coding DNA Sequence Number=SeqID_10674
MISGEHSTKVVPPSPSRAAKLLRGEASLGFIKAVSREEGKHGLNDAEPHVGVQRILCLGEQGRLRTQKLLVRNEDNMVTNIPQISKVHRVTSIRGRYP

SEQ ID NO: 54050 - protein, 320 aa, Zea mays
  Coding DNA Sequence Number=SeqID_10675
  Subcellular localization annotation: CTP_CleavageSite=68; ConfidenceScore=5.45e-01
MSSRSLMHRVFPASKPPDGGYPPSFRLVVGGTQLRGSWYLSAIVRLQGFSSCSPAAPLHRRSPKMVTSGLMVGESEPGCGLYPSLSLKDFHHQGWGGESVELGVPGFRTRVASEPLAAPASATTAGRGSSADEIARAAHGPTSNSTAFCPSLPHKFGHGRGPPGSSIRPEVSAAAVRPPGAEVVVVAAAGAGDGAPFVGLLLLRRPTPIEWGYSPVAYLNRFTKHESPRVKVTSEHEQGRSWLENENLVGRSLAGLSVSGTDAGVDQPRPRVGLAPLEDGVRTASPSEARSNLAEVVVNAEGAAAPFQRQDPSLQDQIVL

SEQ ID NO: 54051 - protein, 193 aa, Zea mays
  Coding DNA Sequence Number=SeqID_10676
  Homolog annotation: Hit_ID=Q6J9V9; Match level="QueryCoverage=48%, HitCoverage=32%, E-value=8e-35, Identity=81%"; Hit description =Putative uncharacterized protein
  Subcellular localization annotation: CTP_CleavageSite=33; ConfidenceScore=5.21e-01
MMTASKKGSRKVVFQKRILPSEGNGPRALLLIRGLKVTPSGVGQPPQSTRALSPLLIRGSKASPSEGFDSRPRAHRVRDDPRYVCYMAEARATLPSERTLGSPEAQLGQTLSCSDLGRIALPVDRLGLSLGLGRRSPPRPTPGLGLSLSLGRKSPPRPTLGLGLSLGLRRSLRLARPQPRTDYATGDTSLPYS

SEQ ID NO: 54052 - protein, 44 aa, Zea mays
  Coding DNA Sequence Number=SeqID_10677
MGAWVGLGFEGGDAVEIAGEEEEGRREMGDAEDPLGEEAAWGGY

SEQ ID NO: 54053 - protein, 208 aa, Zea mays
  Coding DNA Sequence Number=SeqID_10678
  Homolog annotation: Hit_ID=Q5GAU8; Match level="QueryCoverage=15%, HitCoverage=23%, E-value=2e-09, Identity=87%"; Hit description =Putative uncharacterized protein
MTDEEKEVATERRMDSPPRCDCGDRAVIDEDYDKQFCCPNIDYSPEVKEKRYMGWAAEEVKFDPVLCKCGIEAKYGLVPSELGVGYFCGHMVDYDEETRKCSWESYDDKGEVMRTIESKRIMGQKMCCGSRLVDSYINDRIRDMRREAKSAFYDSPKRAEYRRLKAADEKRAQDAREWEAAQAEKQMLDNLADRLKGKMGSGVNYFGR

SEQ ID NO: 54054 - protein, 92 aa, Zea mays
  Coding DNA Sequence Number=SeqID_10679
MSARDRETAEALVREDKGFHSVTHPSPSLRASLHLFGESSKQKDFVFGTIFTHLFMTKGGESRSRALMIPFLVIYAKGGENISPKQKDRTTT

SEQ ID NO: 54055 - protein, 101 aa, Zea mays
  Coding DNA Sequence Number=SeqID_10680
MTVTPCPHLDECGGGAALVRRGLPVLRCIISVPVGTLSVLIVVHRGLVLGLSAARCSSSRAGAVDVSLGSGSGSSISVNLPPCRPGRGRRNWFSGTELRVR

SEQ ID NO: 54056 - protein, 390 aa, Zea mays
  Coding DNA Sequence Number=SeqID_10681
  Homolog annotation: Hit_ID=A2Y2N2; Match level="QueryCoverage=17%, HitCoverage=9%, E-value=5e-15, Identity=64%"; Hit description =Putative uncharacterized protein
  Subcellular localization annotation: CTP_CleavageSite=50; ConfidenceScore=5.42e-01
MSELTPAPSSKPLRALCSAAVPAPLRGPLPLRHTRRIARSGPRKRGPLLPAAPSSPSPSSLPLHLTVPIPAPWRSHPPPHSFLSLAAQALVLAISLHPLPTLAAFLASHRDELLRADITSLIKALELSGHWEWALALLRWAAKEDMHVMRCPLCKRNSCRGEQVDGAGMGNVSCPATAGGIGGSGNKQILDARHSELFLEKAYWDETLEYESLGEHFQDEEVAAALCAVVNTKQFASPSTTSVLNRARAGKHDDPMTRHCASATAAAIHTNLQSNGDKWGTPYYSMKIRCPARKPREQNPSPATSSSPPMPNLELPKRLLLTYKPEESEDIPEPASVEEENAPVEEPVLVPPVTEVVSPPKTEVADIGESLCKYLPLTNPDCNRHLGQKS

SEQ ID NO: 54057 - protein, 90 aa, Zea mays
  Coding DNA Sequence Number=SeqID_10682
  Subcellular localization annotation: CTP_CleavageSite=33; ConfidenceScore=5.79e-01
MPAHAPSSLLRAPLVPSRSPPPLNFTQHRPLSRSAHTASSRRRPAPAFPTTQLAGDRANPPRDNKQSEVPKCVVGDLPEQQPGEGKCPLT

SEQ ID NO: 54058 - protein, 116 aa, Zea mays
  Coding DNA Sequence Number=SeqID_10683
MQDFEEFQEWPVSGAPHVSPVIWRDFIVTCTRSRSADAQEQEQQDSSPSPKREVESERAAFPCTSARDAPCTAIGHLGCRRRPRWRWRRRRRRWQFEPQHGALGGAGVGGMDRVTP

SEQ ID NO: 54059 - protein, 258 aa, Zea mays
  Coding DNA Sequence Number=SeqID_10684
MAPSSPLPNSGNPEASLARACLNSGDLTAAERSDAASRTSVSPIARPITRDAARGCHFHDALDTLLRRAFDRHTWSIEYRCVVYQHRRGLYPDQWEATCLVRHPDDDLRGVEAFLEHYSITERDTAEAAMQNAARRALSQYCLLFSGVADGLDLKYYPRCSTDSARGVIVSPVGEGNPRLSNMVNLVAMLNTELDHALDELGKVWVEVAELRDECAARHYLDVGSPAPIEIQHPYRSPPRGRFDYGTPDCRTQIDLDP

SEQ ID NO: 54060 - protein, 51 aa, Zea mays
  Coding DNA Sequence Number=SeqID_10685
MYGLQVVMRRMVMIMTMVMVAFGAIYAQVKKKENGVEADLREFEDVDEFED

SEQ ID NO: 54061 - protein, 90 aa, Zea mays
  Coding DNA Sequence Number=SeqID_10686
MITKWKLVLVLLLTFLLSSIMKIYKKESAQASWVDLHPKEERKKKPLQREDSQMKEENIKNNTTYFYETINGVVGEPFYLDYVETIALSQ

SEQ ID NO: 54062 - protein, 454 aa, Zea mays
  Coding DNA Sequence Number=SeqID_10687
  Homolog annotation: Hit_ID=A2YFL5; Match level="QueryCoverage=75%, HitCoverage=93%, E-value=1e-22, Identity=32%"; Hit description =Putative uncharacterized protein
MAASSADELVAAAAGIICSMRGADLAAGWAPPRRKQQEPAREGALIWPAVARGKRSRRRSPSAGFSSSGKARWGGRASPASTLDYSGGSGSGSGSAPASTSGGEDGGFCSLPHRPIHTSIRTCYAARLDLDIVSTISSPTSFLDADAKFATSPEARAAPGVPIPTERFFLPGAVRSFSAVLFYPPAQLLVGATDRPQLIFPTPPLPRLAGQRPRKKLRVVWLVSWREGDEKTVSPTRFAVPSEKPLKADPVVLSDLHYGKRLPEMQQLVRSLAVDNERLREVTVTHRSSSQEMRDLQGACEALSKENDELETRLGQSSRQSEVASKEQRGKGLLDPRQPARDSFALPDLNLPPQDSADVSTVSLIAPDRKPHYSPSSDYCANHQGKTNDSKSRPPPNSASGATGSSASPDPRPRPRGKVSASPDLSLGLRRSRYLAQPRPQIDYATGDTSLPYL

SEQ ID NO: 54063 - protein, 151 aa, Zea mays
  Coding DNA Sequence Number=SeqID_10688
MGKSNKRKREPTPPSEDFGDSEYSVEEFSSESEGSPAPVSPPASSDDSDDSQGIAAEVWTYIRAVERSGLEGSDESEYSSDGEDSDGGGEDEDDDDDDGDDGGDGDGSGSGRGSGDGSRNGDGGGSRGSTKGGSSKGSTKGGGGGRGRASG

SEQ ID NO: 54064 - protein, 18 aa, Zea mays
  Coding DNA Sequence Number=SeqID_10689
MPGEDLVDYEASPERPEN

SEQ ID NO: 54065 - protein, 109 aa, Zea mays
  Coding DNA Sequence Number=SeqID_10690
  Gene Ontology: Mol. function=kinase activity; Cellular component =ornithine carbamoyltransferase complex; Biological process=amino acid metabolic process
  Homolog annotation: Hit_ID=Q6QP54; Match level="QueryCoverage=60%, HitCoverage=36%, E-value=2e-10, Identity=47%"; Hit description =Putative kinase
MALPVDVAGLCPRSDDVEVPLKPRSSLSSMAEAEPEPLGRATWRSFGRGQGGVRALGSGGAEFAVFRGLARVRALGRAERTFENKSPTLAPTSGELTPTSSLREHLRKL

SEQ ID NO: 54066 - protein, 137 aa, Zea mays
  Coding DNA Sequence Number=SeqID_10691
MALDSLHELFDICLKGKCALGPFLSILVIKCKHKCFSVNLCPWMNKVQITSKDLQRSAAPVKERNRAPDSVRCAPDCPVHPATEGKDGLPDLFSTAPSCLGAIKGTPRRMEEDTKHSLSTLDHSHINLTHLFDILVI

SEQ ID NO: 54067 - protein, 187 aa, Zea mays
  Coding DNA Sequence Number=SeqID_10692
  Gene Ontology: Cellular component=integral to membrane
  Homolog annotation: Hit_ID=A7PEB8; Match level="QueryCoverage=29%, HitCoverage=4%, E-value=1e-13, Identity=63%"; Hit description =Chromosome chr11 scaffold_13, whole genome shotgun sequence
  Pfam annotation: Domain name=DUF292; Domain location=27-116; Score= -12.2; E_value=0.00024; Accession=PF03398.5; Description=Eukaryotic protein of unknown function, DUF292
  Subcellular localization annotation: CTP_CleavageSite=44; ConfidenceScore=5.20e-01
MHKSKGKFSGVLHKGFKPDKCKTSPRMAVGRIKLLRNRKEVQVRQMRREVAQLLEANQDMTARIRNQCQLIILVPYLLLHACLCKHVYLAGTVIPRAVHHIFEILAARKADYSIEGNSQSGFQIVGFEVVPCSVRHDPESMSKLKMYDKVGSVNCPFAALGFLSPASRGMLLTGIIILYLFLGIIAG

SEQ ID NO: 54068 - protein, 100 aa, Zea mays
  Coding DNA Sequence Number=SeqID_10693
MTSRKRTMNRKPKTVESSQPNVGKDKEELNEETRVPSKPPISVSGTKMQNHRARRVKNSEMGRAQVLFLPPQNGVKHIEDDEHNPREEAGSQPSNRFPPF

SEQ ID NO: 54069 - protein, 528 aa, Zea mays
  Coding DNA Sequence Number=SeqID_10694
  Homolog annotation: Hit_ID=O24478; Match level="QueryCoverage=8%, HitCoverage=13%, E-value=4e-08, Identity=72%"; Hit description=B -keto acyl reductase
MDRKPHEPSHIPCSLPPPRPHQTPIVFASLHSEPMMSYQYARYFHEVDEELMHNLIYVNVEGVTLGMHDVLPRMVETRESHRKLRFARPQGSDSGSAPEDDELRLARPQGSDSGSAPEDDELRFARPQGSDSGSAPEDDELCFARPQGSDSGSAPEDNELRFARPQGSDSALAPADGLRLTRPRGSDSTLALEDRLDLDLGGASTSPNLGLGPTTSQEAPSLPYPKLTQATGNKTSVSSGSLRYTTTGLGLAVRRSELPSATIALGGGWGGFGAESEHIGLGARSTRMCGRPLSRCRPLLPQPPLPISQSATASSSRPIPFEPRLHTNTPSAVVDQPHASSSGTWPPVTICSTVASGSNPTVADQTEGVSHYVASKGFMVCVRTEGSTFEHQRSARRHNKRATAGRPSCFFDCPDVEEPRQGGRWQRTRLRRSWWPRPQKNRRGNGESGREGHDSDGSSLEDGDPAKGTMDLAGKIAKTVNLAGKAATATDPTKAGKGKGDGADPVGQGPSSSLARGVDAIDKKNSKG

SEQ ID NO: 54070 - protein, 191 aa, Zea mays
  Coding DNA Sequence Number=SeqID_10695
  Homolog annotation: Hit_ID=A7P1J7; Match level="QueryCoverage=53%, HitCoverage=65%, E-value=5e-19, Identity=50%"; Hit description =Chromosome chr19 scaffold_4, whole genome shotgun sequence
MSVARPLCFTHAFSAQTAAPTSIWCAMARYVATAWCRVGGNPLRAGEVFKMSEALQKDKEIGEEEEEEEYVLLELDNCLYSDISPGAQFVLSGLDTLTPTLIVGDNLKMVGEYDETIGTCYLFSESETEPKPASDELAPSKENTETPLNSSKEAPLKEVNHLASVQKILKFKPINVEHSQHRAYQHKDKEL

SEQ ID NO: 54071 - protein, 393 aa, Zea mays
  Coding DNA Sequence Number=SeqID_10696
  Homolog annotation: Hit_ID=Q6JAD6; Match level="QueryCoverage=79%, HitCoverage=46%, E-value=1e-131, Identity=72%"; Hit description =Putative uncharacterized protein
  Subcellular localization annotation: CTP_CleavageSite=103; ConfidenceScore=5.04e-01
QSEELSYRFLLIRLPIEFVASPLVLAPTTPTTATTPPPTLPAPVTPAPSTTSAIPTTSTTPSSTAPPPAPLSAPPIPPARFRERNETEVRPLAADPRLFDLQRATAAQVHRFRHVPVETWLPAQRDPTAVDLFNTYIQESFFRAQMSAQIALRVHRLLDLPAFLLAADADSEVHLSYLPGLLTLLTTSGRYVEEWVRVFYASVWIDPDHQWMRFRFEREDVTIHASQICQLFGFNESSTRLHNLCYGTSDPPRRPHGGVAPGTTHVAALFRHPSQMGCDVLWQTSPQEAATHIQLWLLGALVSHSEFDVVDFLICEIEDTVLDGLHACRQLPYAHYLCHIFAQLIRPPQFQGTLEASRLLFGSYRPALEDPVPAPAPVIDTQAEDTTFHQFET

SEQ ID NO: 54072 - protein, 95 aa, Zea mays
  Coding DNA Sequence Number=SeqID_10697
MTGKKTTASSDGGTPKKAKVVVEDEEEAGLEDEEEATVTLSVEKDTLECDICCLPFQSEVFMASQITMHCKNGHSGCAKCCIRTDESRVKLHDMS

SEQ ID NO: 54073 - protein, 34 aa, Zea mays
  Coding DNA Sequence Number=SeqID_10698
MDMGMAKVSRRRSKSVHNRKEYSAVIPSRVPRPG

SEQ ID NO: 54074 - protein, 168 aa, Zea mays
  Coding DNA Sequence Number=SeqID_10699
AAEVVGGTCSGQTTAVGFNESVRGAPLGDVEAMHARNREMVQCFTRSTCSGGFTNSDERDCTILVGLVLSSSSGKLHDLLRKLSEGSDRAEVGVNGLATAGVLGRLWWVAGRSLELRAGSGRLGTVRRGDWEGVLWARSRVPAHVEHVVGSLGAILLIGPFGFEVWKK

SEQ ID NO: 54075 - protein, 231 aa, Zea mays
  Coding DNA Sequence Number=SeqID_10700
  Homolog annotation: Hit_ID=Q6QP51; Match level="QueryCoverage=20%, HitCoverage=21%, E-value=1e-09, Identity=64%"; Hit description =Putative growth-regulating factor 1
MAERYQLPRSCVPPTTRRKDDGSPPSGGLEGGKTRCIREREDMVALQGGHPPFKGGSPYSHPQPSRAKSSPTHSKVLPYGAGAGSHTSCKPTQGRRSQTTAHGAYNRPAVTSDPPLLPRPMGERVGSHAGGMQPRQVGALLRLPTCPAWRPRPTRHATGTGKEGYPEKDPSPRRNQAPSPPIDQRFEGWPPGRVQQPPQITWALHPLLVRGSKAGPSKGFNDRLRLLGLRA

SEQ ID NO: 54076 - protein, 60 aa, Zea mays
  Coding DNA Sequence Number=SeqID_10701
MQAACNRAKWARPFDSNEPSMEVQAHASCNRRAGCYVDRERGIPRKGPFSMKETCSEPPY

SEQ ID NO: 54077 - protein, 162 aa, Zea mays
  Coding DNA Sequence Number=SeqID_10702
MQVWVEPSATKDMMDKVEQVRQRRKAEKSLLSLQRRLATTSAEELENSGCQKTYASPRKSECENQRFTRKNHVEQQLSTKVDISSEKEVDCAQQETIDLKSKLQSKEAKIEKMKYEHLTREAALTENELLEEEYKKKLDEANKELSLENDLAGIAFAPRRSR

SEQ ID NO: 54078 - protein, 113 aa, Zea mays
  Coding DNA Sequence Number=SeqID_10703
  Subcellular localization annotation: CTP_CleavageSite=43; ConfidenceScore=5.92e-01
MAISPAGSGPVGFCTRRSLMSDQGASRPSRSSRQVPTKSSAVVAGGSSSAATPTSAAANEMPSSSVQAPPSEGTEHVVVNDDDDNVQVGCKRKLKSDVWLEFEQDEADSTIVD

SEQ ID NO: 54079 - protein, 437 aa, Zea mays
  Coding DNA Sequence Number=SeqID_10704
  Gene Ontology: Mol. function=helicase activity
  Homolog annotation: Hit_ID=A2Z0R6; Match level="QueryCoverage=62%, HitCoverage=71%, E-value=3e-42, Identity=35%"; Hit description =Putative uncharacterized protein
  Subcellular localization annotation: CTP_CleavageSite=61; ConfidenceScore=5.32e-01
MAQPTVGRQRAVGAPDMSGAHRTVRCPLLAVGSATCPAQIARPTVGSPNSPVYTGQSGFFPSSYKRTCIEILSSIADVIGRITALSDATPFHTSSGIVCMKRLIHLVDLRGNKIEVSLWRRRAEEFPGQQVFKASEMNHVIVIFVGTSVKSYRGSPPFLSGTAACRWYINLPEIHEINTFYASIGEQYQSIQKLHIQTMNEMQNKIEQKTFLEMKLVDPFDDMSKRFECTMIVTRIADNEPWYKISLYATDGTYELEFVLFDERATSLIGKTAEKLLRQSNKSELPEEIKAIVGEKLTVVAKFFPGKSIKKRGPNKVNKDPTFDILSIKKRHGKDLLLFVFKKEEPVVLHSASSSQLPKLPPLVPIEPKTQDIQTSGSEAASPHELQLMEIDQTSCFDNVRVSYKRNFNAIDDSDKEETHGADQLSVFAKRPKMKNN

SEQ ID NO: 54080 - protein, 299 aa, Zea mays
  Coding DNA Sequence Number=SeqID_10705
  Subcellular localization annotation: CTP_CleavageSite=10; ConfidenceScore=5.16e-01
MGARTVRSPSADRPPSSRSPYCGFRGLKKKLVGRFVSKRRRADDSDYNPATDSEAQSSAGGSVSLDAEDAPHSHPDYPIDIIGWTYPRMKFSMAEYSSRSTVDQFSLPNDTNNQYFHTQLQFDGQTVMEGLLAKFQACGLYEFMGQWTDFNELTVKQFLATAEINIEDQLIVWMTGFKCYVATFDEFSIANSLNYDMISRGVDLYTEDQLKILPNIMNLPGWHKLQTHMDGQFQGMMSHVDDRFDHMQSTFDGQFSDLHDRFSVVDSQLDGVHSQFTDLRSHIQTTIHDPIMSRMNNMQ

SEQ ID NO: 54081 - protein, 700 aa, Zea mays
  Coding DNA Sequence Number=SeqID_10706
MRDSFVRDAEDLAVRLVGRYVPRTEGQRSFDIRGSNDRLNRVFELNQLPYDGYPGQDEADRRGKKPAVETRDDPAPAAAPSSKKRKLGTAMGGLGVSDSFARELMRTCAAPGERMSSPELRESSARMLRVTGGCWPRNVPIPCAAEEDCFTSRMVHRWRVFPYGRNIGAVVWAVMDKDRQGSDEGQLAMVAPGAETATAAIVPRARGEALGAGGEVSALAVVRDEASAATRRLKGVTEALSQATEALSQVADFASRTASGALTAAVSAEVERLRTQHADVVREKSASDSKCRKLTDRVAALEREKADLRCQLAAERREANEAIAKEQAAQAEAKLARAEGNLAKELAEHLQERLTALESRAKGAEAAMRAEAERTRAQLTDTYRELGARTGDFEVPDREPGLRCLQWVQEELQELPTVVGGLMSYASLVTCEGAMNALSREGCRHFEVFDQADEDFERDVYKVEDPVVKESAGALYDRMWGLHGCEVVRERAETARAQAERGERVDDFGALNSALPDPEPTLAEAVTGVALEPTLETAAITTAASTSAAAGEDLPPKVAEGAPDAPAAAVPSAEDPAVVAAETTAEAAAGPTAEPTAEAPAASGPSQVQDFGPAHATAITEFLAASTAEGGNEYGGFASEFFDFTDSGSSVEWTEESSEDLDYFAALDVAAAEASPHAADAPDVPGPSTGRRRRRGGCKT

SEQ ID NO: 54082 - protein, 68 aa, Zea mays
  Coding DNA Sequence Number=SeqID_10707
  Gene Ontology: Mol. function=aspartic-type endopeptidase activity; Biological process=DNA integration
  Homolog annotation: Hit_ID=Q8W0X4; Match level="QueryCoverage=76%, HitCoverage=3%, E-value=9e-09, Identity=51%"; Hit description =Putative pol protein
MGHTELTVQIMIEMTREKQEGNMVEKNNFYRKKGEGHIDKQWDSDCSSSNYDDEGLATITFNNLLSFL

SEQ ID NO: 54083 - protein, 228 aa, Zea mays
  Coding DNA Sequence Number=SeqID_10708
MPWLRESEKNRANEMGVNYCCEIAAMWTDLADIGACTAEKKEEVVERDDRVALAPPASGIYGHDTINAVGAHHVRRANKRRVLSAINAEAARLRAIMSCSIRWPTSRAISHVAALDPRPSGSRGAPNRAWTRVNTGPMPRGPAPSGPDGVISENATLTAHEIPLGLFSAWLRVAAQASCLHIVVRVTAGPPMVTPTATPAPVADWPVTSVLNVFVGPCAGCLESLHRF

SEQ ID NO: 54084 - protein, 259 aa, Zea mays
  Coding DNA Sequence Number=SeqID_10709
MARLPLRRADYAGAAAGMNDDGNDNTLGSRRMRTRLRRACASESRARQPHAGRAEGTHTGRTGREREATTGAHGRVAPDATARPRWGHTHGPRRSTAWLRAAGRADVRARCTKRAAPAARHAGRMSRTKQAAPGTQGRAQRLHLQAARPSHAQQLRRPRTDGSSGCMGEPRATGRAGEMSWLRKRGKNGANEMGVNYCCEITATLTDLADIGTCTAEKKEEVVERDDRWGQIAAALGQRRSAGRCPRARGPLGHRSVSV

SEQ ID NO: 54085 - protein, 116 aa, Zea mays
  Coding DNA Sequence Number=SeqID_10710
MAAGSLCARGRRMPCLACVRRLAAAASLLLKDVDGFGTQQQEEIPPTTLHIPIAFSPKTAHVAPHNCSLQLLDMEHCSPPKRARPPWLAGMVEARRANNIGTMRTTRVFLENAMEL

SEQ ID NO: 54086 - protein, 53 aa, Zea mays
  Coding DNA Sequence Number=SeqID_10711
MGLGVCGSLCQGGNEIDGSDYDYGIGCQHCNHCSGEDEAVEGDFQEFQDYDEF

SEQ ID NO: 54087 - protein, 157 aa, Zea mays
  Coding DNA Sequence Number=SeqID_10712
  Gene Ontology: Mol. function=cysteine protease inhibitor activity
  Homolog annotation: Hit_ID=Q4FZ48; Match level="QueryCoverage=100%, HitCoverage=100%, E-value=1e-14, Identity=40%"; Hit description =Putative cystatin
  Subcellular localization annotation: CTP_CleavageSite=30; ConfidenceScore=5.24e-01
MAFLSTNALMSVPITAAAAPRHRRSLVVVRAAAVKSNEHLQERASIRGPTELVGVARAHGVVGPPTAAVTGSSRSHLQRTSGPICPGCRRMGCQEHNRQTGESLQSRGGQWHGTVVVGINSSSPRTEDSTSSYPAVCVLIRCQTPAKNRQLMSFKSI

SEQ ID NO: 54088 - protein, 102 aa, Zea mays
  Coding DNA Sequence Number=SeqID_10713
  Subcellular localization annotation: CTP_CleavageSite=25; ConfidenceScore=5.15e-01
MAHRRGSFAPPPVSAQLGRRSCTVRCGAGDPRFKGLHSGSFIRYARSNPRHQDLIGRLSTLDTPSVVTFSHEPLKLLETNPPSWRLRSVSWDFSRINPCTFL

SEQ ID NO: 54089 - protein, 34 aa, Zea mays
  Coding DNA Sequence Number=SeqID_10714
MPTALSGDGGTPGFRGGWRRDFCAGKRQANAFHI

SEQ ID NO: 54090 - protein, 41 aa, Zea mays
  Coding DNA Sequence Number=SeqID_10715
MNVCELTLAVSHPPQVKNRFKAILGMVRAATIGTGVTIAKA

SEQ ID NO: 54091 - protein, 234 aa, Zea mays
  Coding DNA Sequence Number=SeqID_10716
  Homolog annotation: Hit_ID=Q8SA97; Match level="QueryCoverage=50%, HitCoverage=18%, E-value=6e-08, Identity=41%"; Hit description =Ornithine carbamoyltransferase
MPSWQSERFWHPVHVMSWPSEECLSRVEPEVGRGGGSSEVEVESGLEGRARRRSTSEVEAESEPWGRARRSSSSEVKAESEPWGRVRRSPSSEVEAESEPWGRARRSPSSGVEFEPEPWGRARRSFLWRLRLDLAAVSLTLSSGTAVGAGQAALFSRQLRADGGYQLRLGVLGVPLIMVPDTPSHLTIHWLQGSPWRCCPLRWHDEGERLPKVVEVSSPEVGANVGHLFLNVVN

SEQ ID NO: 54092 - protein, 98 aa, Zea mays
  Coding DNA Sequence Number=SeqID_10717
MHPRSGRIKGWVRAPASSLPTVPATRLWRSSTERGTEDICEPSKSTPDIISESSNRRSVKGSTLRRWMAATTPAAGPGKGMLRKGSFSAKEAGPESSY

SEQ ID NO: 54093 - protein, 248 aa, Zea mays
  Coding DNA Sequence Number=SeqID_10718
MEQRPGLERLLETTHLELDGKLFVNTQQAPTWRANCRRFDPGGPWTDDRGLQASAREGESLSDSLSSRAATSFYEGPGPSFYRCKERVQGNDVPHYNVVGPSPRSGEAVTPPRSRLRPSPGVGRGGDRLPRSRLSPSPGVGRGGDHLPRSRLSPSPGVGRGGDRLPRSRLSPSPRVGRGGDCLPRSRRGRAPGSGEAELPMAPEAGLGCCQPHPSGWHSSRSRAGGVVFLSGQSVERRSDYGHFGPAD

SEQ ID NO: 54094 - protein, 145 aa, Zea mays
  Coding DNA Sequence Number=SeqID_10719
MPRAPWQVVRSWSVYGSTLSVGQIIVGNVERGPKDEGHPGPTGPHLSGRCVRGKPSWRLKRKAKFEGVPRPLFSIRNACGRRRRPAAACGGEKRDVGREKESWGGKEKENQVAEGIVRLRGKLQWLSRWRLREAEMGLLGLRCSP

SEQ ID NO: 54095 - protein, 226 aa, Zea mays
  Coding DNA Sequence Number=SeqID_10720
  Gene Ontology: Mol. function=phosphoprotein phosphatase activity; Cellular component=cytoplasm; Biological process=protein amino acid dephosphorylation
  Homolog annotation: Hit_ID=Q8S7U0; Match level="QueryCoverage=87%, HitCoverage=55%, E-value=2e-78, Identity=69%"; Hit description =Serine/threonine protein phosphatase
  Pfam annotation: Domain name=Metallophos; Domain location=89-216; Score=68.1; E_value=2.9e-17; Accession=PF00149.19; Description =Calcineurin-like phosphoesterase
MDPMNVDNGGCGGLDAQIEQLMQCRPLAEQEGTLRVSRLLFGALFGWKCDPVFRWFGGYLNLFWYLVKALCEKAKEILMEESNVQPVKSPVTICGDIHGQFHDLVELFRIGGKCPDTNYLFMGDYVDRGYYSVETVTLLVALKVRYPHRITILRGNHESRQITQVYGFYDECLRKYGNANVWKTFTDLFDYFPLTALVCTLKTGTTFFQLYLEHLFYASSSQYAES

SEQ ID NO: 54096 - protein, 37 aa, Zea mays
  Coding DNA Sequence Number=SeqID_10721
HCGTGGYEIDGFGYDYGAGEDEAVEGDFQEFQDYDEF

SEQ ID NO: 54097 - protein, 153 aa, Zea mays
  Coding DNA Sequence Number=SeqID_10722
MARGMSLAALPFRRNLEPRGVIDGDDVWFQNPPRGSRHTSVRRDRPLRSRPFPDFALLRLQCRHCVPSSLALLQRHPPLRGPSTAPYSSMTSPAAYSCLALLRRQAPIEEAIGALPSVTHDVDADDVGDPPPPPNVLIEIQRSIGCLSILDAT

SEQ ID NO: 54098 - protein, 119 aa, Zea mays
  Coding DNA Sequence Number=SeqID_10723
  Homolog annotation: Hit_ID=Q337D8; Match level="QueryCoverage=74%, HitCoverage=40%, E-value=5e-12, Identity=46%"; Hit description=MSP domain containing protein, expressed
MARVWDRTKHFKEVAMLSHGYTESVFFPKKQINHVAPKPLSEIAEEHDGLERVLVPMQGIMDNVKSTSELLTGSVSLRSAEVARSPVGRIVKCEEFLKAAGPAMVSVNPKKDSIFLSIF

SEQ ID NO: 54099 - protein, 70 aa, Zea mays
  Coding DNA Sequence Number=SeqID_10724
MALNVWIHSRNICLSYRRSQEKSQVKSRKLCKNGVWFGYYECIGRGPVVHQTKVPESLLSDAEAWDADKG

SEQ ID NO: 54100 - protein, 189 aa, Zea mays
  Coding DNA Sequence Number=SeqID_10725
  Homolog annotation: Hit_ID=A2Y4A7; Match level="QueryCoverage=64%, HitCoverage=50%, E-value=1e-23, Identity=52%"; Hit description =Putative uncharacterized protein
  Pfam annotation: Domain name=VQ; Domain location=38-68; Score=47.5; E_ value=4.6e-11; Accession=PF05678.5; Description=VQ motif
MDRELSPRGNAPGRGSGGASSSKHKNGGGGKKPIKVLYIANPMRVQTSAEGFRALVQELTGQHADPSKYSPGDLDSGAAAQGLSPRARVADVSSETIVASHSPGSKAAPHGGDYYDVEEDEDDVFRSPHMLLENNYTVFSPPTLLYDHHPHSKLFSMESIKLTKDNCMKKRQRHQIIANGEQEQQPLVH

SEQ ID NO: 54101 - protein, 153 aa, Zea mays
  Coding DNA Sequence Number=SeqID_10726
MKCKCSTCEDDGWKCRSGKESASQRDDISSREGRSNGESGREGHDSDRSNEGDEGGGGEAGPAGQGPAPDLVGRVDPSDRRSSKLGGAAGTGRHNPVTGALASEHRRRLCWGGVHPSSKAQPTTQQEASWLRVREQQQGRPPGKLLAAAAEAG

SEQ ID NO: 54102 - protein, 51 aa, Zea mays
  Coding DNA Sequence Number=SeqID_10727
MVMMLQGICLKVEFVEFVIQILKNAAKLASEVEARRREAWAGADVFGLRSK

SEQ ID NO: 54103 - protein, 104 aa, Zea mays
  Coding DNA Sequence Number=SeqID_10728
MAASFSLLRLSPKDSAQQPPRGHGLQQEVARYMFDVLRSSSDVSARLAVLCCAERNPVFCEEKASRSTLVDGEAMHKSESPSFLQTPFGFVYGEPMQVALDRLD

SEQ ID NO: 54104 - protein, 136 aa, Zea mays
  Coding DNA Sequence Number=SeqID_10729
MGAGLAPCWLLAAVGAREEEGRLLQGCRAPEQRADHGREASALGGREPSSLRWGRRAPWLGRVEQGSLVAAAALRKDEEGIFGVVDTKVDTQQTRIIRRLIQRRRCEQYPRTVHADLTITFASRLYFHLLQAEEIN

SEQ ID NO: 54105 - protein, 735 aa, Zea mays
  Coding DNA Sequence Number=SeqID_10730
MPRTEGQRSWDIRGSNDRLNRVFELNRLPYNGYPGQDDVDRRGKKPVVESGDDPVPAAAPSSKKRKLGTAVGGLGISDGFAKELMRTCAAPGGRMSSPELQESSARMLRVTGGWWPRNVPIPRAAGEDFFTSRMVREWKVFPYGRNIAAVVSTVMDKDRQGAAQKRQAVVRLHEARPKRQRGVAKATAPGGGHPPKSAVPASSRAPEPAAAAGGSKAAKAAPASGRVMEVAKSARGLPPPGKRVADFATDISVDDYLVGSDEGQLVVVPPAAATTAAAVMPKAKGGALSAGGEMPALAAMRDEAGAVSRRLEEMKEALSQAADFAGRAASGALTAVVSAKVERLRTQHADAVREKSAADSKCRKLGDKERREANEALAKAQAALAEANLVRAEGNLARERATQLEEWLNALQSCVERTEAATRAEAERTRRQLVDSYHELGARTGDFEVPDREPGLRCLEWVQEELQALPTIVEGFMSYAFLVTCEGAMNALSHEGCQHFEVFDQADEDFERDIYKVEDPIVKESAGAIYDQMWGPHGREVVRERAETARAQAARGERVDDFGALNSALLDPESNPAEAVSRAALEPPSETAEGTPDAPAAAAAGGGPPLEAAESVPDAPAAAAAGEGPPPTVVPRVEDPATVAVEATAEAPATAGSSQVQDFGPAHATATTNFLAASTVDGVNKSDGSTSKFSDFGDSGSSVEWTEESSDEDLDYFAALDVAAAEGEFQQRASC

SEQ ID NO: 54106 - protein, 56 aa, Zea mays
  Coding DNA Sequence Number=SeqID_10731
MTAVGVSEALYAKAVSPSLLTGSLEDMVAGVTWPSILPPGWTVEWDPASAEEEHEE

SEQ ID NO: 54107 - protein, 170 aa, Zea mays
  Coding DNA Sequence Number=SeqID_10732
MYCLMSGAPVVRERSDTARGQAASNEKVENFGALNSAQPEAESNLVAAGPEVAPTPLPETVEGSLAAPAATAAGGDFGPARATATANVLPASTVDAGNESDESASKFTDFGDSGSSVEWTEESSDEDLDYFAALDVAAAEASPRAADAEVMPGPSAGRRRRRAVVKRRVS

SEQ ID NO: 54108 - protein, 153 aa, Zea mays
  Coding DNA Sequence Number=SeqID_10733
MSDDLVVPVHFEVGQELCFCLLDHPLLMLLKLELLVSRQGFPNGVAKKYVDAFLEAPITQENQRQCSLHRGGRSARGGRTVRGLVRGGGALWSGADGPRPGPDGPRPGAGAQVPCLTAGRSAPWGRTVRAYAGTAEDRRRRLDLAPGRDPVGE

SEQ ID NO: 54109 - protein, 92 aa, Zea mays
  Coding DNA Sequence Number=SeqID_10734
MAMSSSTPSATPEEAPAAPAPTIEADAGGASSSILPPTPEETEVIFGRRLWSGPEPEAAPVPLPRVLSRAHQALHETEAAILRDWEALEAEH

SEQ ID NO: 54110 - protein, 332 aa, Zea mays
  Coding DNA Sequence Number=SeqID_10735
MAEEGGGQRWPPGGWSGGEVLKLEAELLQQHQEERRDRQRQPAGDVRGEQNELPGGEVTEKEGASADPPGERQRTPSKQVAHHIEHRLGLEAVRLAKQSHGVGNGAAVSRRLARRPVKPSCVGVAGQSATGTDVEVGVTEGGLAGITSANVQKWRANRQPSFGPTCRLVSSPEVGPRATVGTLKQGSPLLQCEGTVPTRLSLVAWRTAPVATTWTAPRPPHGQRRQYPPRYQRRVWTPMRKCRPMHIRTGPRGRVRTSAGTDRTPGTGPRSLCVGSGPPSVESRDSGTKSTRTLLKARRGSGADTCPDHTVYASAPRPGGDPMLPCGPLPVA

SEQ ID NO: 54111 - protein, 45 aa, Zea mays
  Coding DNA Sequence Number=SeqID_10736
MGQSHRAVVCGVVLLLLWAHITPWNVGHCRDSDAEALITEVDLAP

SEQ ID NO: 54112 - protein, 65 aa, Zea mays
  Coding DNA Sequence Number=SeqID_10737
MATARSPFRGSVVAIRGKMAPGDKAHKSATNEGGATDVIMDITPQPITLNQRSKSYNHKNKHSSI

SEQ ID NO: 54113 - protein, 28 aa, Zea mays
  Coding DNA Sequence Number=SeqID_10738
MANYLAQFQTIKSSCDRIVIAAECLLVA

SEQ ID NO: 54114 - protein, 70 aa, Zea mays
  Coding DNA Sequence Number=SeqID_10739
MARVACTLHGKRLDGGVSMLWVGVNLICQHILESLLLCRVKKQQTFVASVQRWYQKKRTKTKAARGKVLR

SEQ ID NO: 54115 - protein, 62 aa, Zea mays
  Coding DNA Sequence Number=SeqID_10740
MRLHILRGMKAEVILAFADICTHESEFEKISRFEFLGCYTRPVSALSFQPKVWYLPEGFKEK

SEQ ID NO: 54116 - protein, 187 aa, Zea mays
  Coding DNA Sequence Number=SeqID_10741
  Subcellular localization annotation: CTP_CleavageSite=87; ConfidenceScore=5.16e-01
MNGHAKMSYCDVVEHLGTWQPIDRQPTPVSLSGPIVRQGGTAASPRSHSWRRSFTLKRYLTTNGMNRVTSVNPGVGVTGGKGGQEVADEAIKKNEKESHEAREEAKRAEEAAERARRIAELSPPPEPYDPEADPAMKAALETIRIAEEAVDEAVNKLLNEAAEKILKEDYIFVYLRNVVFKECNVRT

SEQ ID NO: 54117 - protein, 121 aa, Zea mays
  Coding DNA Sequence Number=SeqID_10742
MGPHVERSEAMWPALGVVRGDGAARGAEATRIGGVKLHGTRIVGGEPTNRKKILDDVGSNNNVFEVEQSWKNRVTYWGNQEGGTVPYNNRGWKGWMRGMGVRERASTRSGAVGGSRVHHLV

SEQ ID NO: 54118 - protein, 132 aa, Zea mays
  Coding DNA Sequence Number=SeqID_10743
MAQPTVGSPGWLEHRTLSGALCQPLERATRRPRIWRPTVALAAVGSPDSPMHHRTVRQSLVVFAASVIRSLKSLMVFASARWSKGGAQAFAWTTSVASLAEPVDTAFDLWTVDVEILEGGGGVFAFAPTFAL

SEQ ID NO: 54119 - protein, 171 aa, Zea mays
  Coding DNA Sequence Number=SeqID_10744
MESWCLGMIKECLGDSSMRLGVPFIAPRQLGAVGTQQGRQFLPSIGWRTGQSGAPPDIHCSMFSADLLPFLAQSTVGSSGWLAHQTLSGAHQTVWCPLPTVGAGHASPADLAADRCDGGRWLTGQSGAPPNSPVNYSRTPPQFPESGLFAGVQPGTPDTVRCTTGQSDVPD

SEQ ID NO: 54120 - protein, 189 aa, Zea mays
  Coding DNA Sequence Number=SeqID_10745
  Subcellular localization annotation: CTP_CleavageSite=30; ConfidenceScore=5.02e-01
MSGEGQGLLQEVLAVTTVYGSTAGVAGIVRSTRAGGCSRRRRVLRPNHGDLVQSNGTESKNGAEDYPVYARRRSGGVRRPWTGLSGEANSDSSLGELHRGVHSLLRGLDGVGKGPAGRSTVAGRSGGRGHAVRGQTPVGLGSGEVERVRRGTVKVPWVLYRCGHGPWRPAGLWRDAGHAGRASGVLWRA

SEQ ID NO: 54121 - protein, 259 aa, Zea mays
  Coding DNA Sequence Number=SeqID_10746
  Homolog annotation: Hit_ID=A2XFR6; Match level="QueryCoverage=58%, HitCoverage=43%, E-value=5e-21, Identity=38%"; Hit description =Putative uncharacterized protein
MNGVILEDSSKEILATPTPLSESLAFAAGASSSAPPAPVAQAPTPGGDDLDDSGDGGEDDDEEEEEEEEINNEEANDEQEENFVGIWPIMEHYTSMFETGHFPNLLQDVLHALGTYARPLYDTRRVSEPPQACYYISRVHIWVMDAGDRGFRTLSSHESLTPLSTYAASVSNAARKALWSLSHIYRQQLHDTRYIHLPICLRGESQTTVVLGEAGKDRLNTLVGVVAGLNTDLDSATLDLSRVHRELEEAHARIAALEA

SEQ ID NO: 54122 - protein, 610 aa, Zea mays
  Coding DNA Sequence Number=SeqID_10747
  Pfam annotation: Domain name=MAP7; Domain location=131-315; Score= -81.0; E_value=0.064; Accession=PF05672.2; Description=MAP7 (E-MAP -115) family
MNKDRQEAAQKRRAVIRLPEARPKRARGTVKATVPGGSQPTLAAKPAAPGSSKVPESVKAVGAGGTKSAPNGAAKVQELPSPGKHVADFSTNISVDDYLVGSGEGQLVVVPPAVATTASTTVLGAKGGAFSAGGEISAATAVKDEAGTMSRWLREASQQLSQQLSQAADFADRVASGALTADVSAEVERLRAQHADAVREKSAADSKSRKLAEKVATLEGERTDLRRQLVEERREANQAIAKAQAEAKLARVEGSLASQRAEEWEVRFKALQARMERAKASTRSEVERTRKQLVDSYRELGARTADFEVPDREAGLCFLEWLQEELLALPTIVEGFMSFASLVTCEGAMNALSHEGCSHYEAFDRSDEDFGREIFKVEDPVVKDSAGALFDRMWGPYGREVVRERSDRARDQMARAEDVEDFEHLNGAQPEAEANPVVAEAEVDPAPPLETGEGSLAAPASTVSGGGSSPATVPLAEDPPKAAMELAAEDPVVAAGSSQVQDFGPAHATATANFVAASTMVTGNESDESTSKFSEFDDSRSSVVWTEESSEEDLDYFAALDVAAAEASPRVTDAEVLPGPSAGCRRRRAVAKRRGWQAGIVVLVVWGECR

SEQ ID NO: 54123 - protein, 561 aa, Zea mays
  Coding DNA Sequence Number=SeqID_10748
MEVVELVPCARNKWGNWWDFWFYVSEGAIEDHPGLPVAVMCSHYYVAYPQFEVAEDDEDEGALRCAARMSSERDLVEEFVGYGLVRSPAFALDLRGRDPAAFVREAEDGAARIVGRYVPKTEGLRSWDIHGSNDRLNQVFELNRLPYGGYPGEDAADRRGKKPMGGTEEGPSQEAAPAAKKRKLGTIVGEWGVDGDMCGPRGKDVFARAPGVFGVNAGVMNKDRQDAVQKRRAVIRLADPRREAKKARESVKAAAPGSSQPAPAAKPASPGSSKASESAKTVIAGGTKPPPGEAAKTRELPSPGKHVADFGTNISVEDYFVGSGEGQLVVVPPAVATTASTAVVGVKGAAFCASGEIPSTAAIKDMAGSMSRRLREASQQLSQQLSQAADFADRVASGALTADVAAEVERLRAQHADAVREKSAAESKNRRLAEKVATLEAEKMDLRRQLGSLASQRAEEWEARFNALRGRVDKAEASTRSEVERTLAQLVDSYRELSARTADFEVPDREAGLRFLEWLQEELLVLPTIVEGFMSFASLVTCEGAMNVLSREGCRHYEAFD

SEQ ID NO: 54124 - protein, 1114 aa, Zea mays
  Coding DNA Sequence Number=SeqID_10749
  Gene Ontology: Mol. function=transferase activity, transferring glycosyl groups; Cellular component=cytoplasm; Biological process =sucrose metabolic process
  Homolog annotation: Hit_ID=P31927; Match level="QueryCoverage=93%, HitCoverage=99%, E-value=0.0, Identity=82%"; Hit description=Sucrose- phosphate synthase
  Pfam annotation: Domain name=Glycos_transf_1; Domain location=448 -631; Score=83.4; E_value=7.3e-22; Accession=PF00534.11; Description =Glycosyl transferases group 1
  Pfam annotation: Domain name=S6PP; Domain location=754-1003; Score= -69.2; E_value=9.9e-06; Accession=PF05116.4; Description=Sucrose-6F -phosphate phosphohydrolase
  Pfam module annotation: Pfam domain module=Glycos_transf_1::S6PP; Domain location=448-631::754-1003
MAGNEWINGYLEAILDSRTSSGGGGGGGGGDPRSPVAGASPTKGASPRGPHMNFNPSHYFVEEVVKGVDESDLHRTWIKVVATRNARERSTRLENMCWRIWHLARKKKQNPTLNCDVTSKKKLFADLQCFIAVHIKLELEGIQRISARRKEQEQVRREATEDLADDLSEGEKGDTLAELVPVEAAKKKFQRNFSDLTVWSDDNNEKKLYIVLISVHGLVRGENMELGRDSDTGGQVKYVVELARAMSMMPGVYRVDLFTRQVSSPDVDWSYGEPTEMLCSGSNDGEGMGESAGAYIVRIPCGPRDKYLKKEALWPYLQEFVDGALAHILNMSKALGEQVGNGRPVLPYVIHGHYADAGDVAALLSGALNVPMVLTGHSLGRNKLEQLLKQGRMSKEEIDSTYKIMRRIEGMDFSNVVVHEDIDGDGDSKDDIVGLEGASPKSMPPIWAEVMRFLTNPHKPMILALSRPDPKKNITTLVKAFGECPPLRELANLTLIMGNRDDIDDMSAGNASVLTTVLKLIDKYDLYGSVAFPKHHNQADVPEIYRLAAKMKGVFINPALVEPFGLTLIEAAAHGLPIVATKNGGPVDITTALSNGLLVDPHDQNAIAQALLKLVADKNLWQECRRNGLRNIHLYSWPEHCRTYLTRVAGCRLRNPRWLKDTPADAGADEEEFLEDSMDAQDLSLRLSIDGEKSSLNTNDPLSSDPQDQVQKIMNKINQSSALPPSMSSVADGAKNATEATGSTLNKYPLLRRRRRLFVIAVDCYQDDGRASKKMLQVIQEVFRAVRSDSQMSKISGFALSTAMPLSETLQLLQLGKIPATDFDTLICGSGSEVYYPGTVNCVDAEGKLRPDQDYLMHISHRWSHDGAKQTIAKLMATQDGSGDTVELDPASSNAHCFTFLIKDPKKVKTVDEMRERLRMRGLRCHIMYCRNSTRLQVVPLLASRSQALRYLFVRWGLYVGNMYLITGEHGDTDHEEMLSGLHKTVIVRGVTEKGSEGLLRSPGSYKKDDVVPSETPLAAYTTGEMKADEIMRALKQRFMASKSGEPRMTLLGVVLLLGLLQLSQHAAPVGADESAAPTKKNTSFSFHNTAGGRTLSSFSVNGAYSKKPVGKGN

SEQ ID NO: 54125 - protein, 164 aa, Zea mays
  Coding DNA Sequence Number=SeqID_10750
MTEEASFRGRIIAHNLQGNNKALSGHQLQGAEAAGASEEDMGISPGNSTAYSVVRTRATLQEYAKSPSRSKKRLPKQKRGRISRSRFYTLLHATLPIYQNMWVINLQLLLLRQVIHKLPGPSSHYHHHCHLLIPEARSQKGTSTPNSSATSGRSLKLVQSIALY

SEQ ID NO: 54126 - protein, 221 aa, Zea mays
  Coding DNA Sequence Number=SeqID_10751
MNVNGNLQNGIGIQVGQVKTVEIKEAAEKGRNGETETAEKKRNINHGLVGILCRNSDPVANPPRTKLPQGKDPDGHKVEKWHLDTGPVAAFAAAAAVAAPAAAAVAAPAAAVAAPAAAVAAPAATVAAPAAVVAAPAAAVTVVAAVASVVVVVTFAVLLGRVLLVRGVLRLIRALEPGALDGPDVSPDLRGNPLIVVRVIGRRWGRDGSRRPLGLRGELLL

SEQ ID NO: 54127 - protein, 130 aa, Zea mays
  Coding DNA Sequence Number=SeqID_10752
MRIRLKKMRLKIKKMSHLKNRTMIKGEMKMIKIRKMSKRFMVKDRHTQESTKQFNEITSSTPSLVIFIRGVEDALRDSDWVLAMQEELNNFTRNEDGKPIKTPMGTNGHLDLNTGAPRERKYCKIRQHLP

SEQ ID NO: 54128 - protein, 140 aa, Zea mays
  Coding DNA Sequence Number=SeqID_10753
MGKSNKRKREPTPPSEDFGDSEYSEEEFSSESEGSPAPVSPPASSDDSDDSQGIAAEVWTYIRAVERSGLEGSDESEYSSNEEDSDGGGEDEDDDDDDGGDGDGSGDGRGSGDGSRGSTKGGSSKGSTKGGGGSRGRASG

SEQ ID NO: 54129 - protein, 226 aa, Zea mays
  Coding DNA Sequence Number=SeqID_10754
  Homolog annotation: Hit_ID=Q6J9V9; Match level="QueryCoverage=21%, HitCoverage=17%, E-value=4e-14, Identity=77%"; Hit description =Putative uncharacterized protein
MAEARATLLRYPRTFPRPAGTICNGIPPEGGIEPSDPVEGVQVRRITRRPHEGMIRPAEAPRKAFRPQRSQSTPPRPRGLHPENSAARPAPTVVPTTQVKTDNKSRLTTEFGLGRNRKLRLARPQAPASGGGLRHARTPDSASTSSSGLGRRSPPRPTPGLGLDLSLGRNRVLARSRPWPQEKSPPRPTLGSDRPCQQGIHHYPIPSQLRLQGTRPASHLAYPGDG

SEQ ID NO: 54130 - protein, 30 aa, Zea mays
  Coding DNA Sequence Number=SeqID_10755
MTAVSEKGPGKEMFRKGSFSAKEAGPEPSY

SEQ ID NO: 54131 - protein, 468 aa, Zea mays
  Coding DNA Sequence Number=SeqID_10756
  Gene Ontology: Mol. function=sugar binding
  Homolog annotation: Hit_ID=Q7XBE1; Match level="QueryCoverage=23%, HitCoverage=18%, E-value=2e-29, Identity=52%"; Hit description =Putative uncharacterized protein Z013I05_4
MAYMELRLTDALVGRGGDRVEDTVSGLQSSNSATSSVATPMYDDVFDSSVAPMYPGDVFGSSAASPPGFDGEPTFDEEHNNSITEYVDVSCHDHLFLLDTTWDSSQQHNASIPGRRQHPGCSARLQRRPLQHLTVDPVSAVDTMPLDFNLTLDEFNQRFDASASVPPSPVAVIADNWGGCFDSEQYHTRPSVVADSWGGFFGGEDLASSGNATRFVLPIASTDEPSIDIALARANSEVTDDSVFVTTEPAGYDDSELHATAILDVLSRVHTLDKCMTSQDKLVIDLDPDDMETPLSESALPVVPSANEMETPTTCSTPVLTEHAPAEAAHNCTLRVPRGEPLPRLLHAFLAHDWLDHSADTDDSVLTSMSGCTKLVELQPRGVNLRGCIPDALFDVELETLNVPSHALSGILPLGSTKLAEMLQSLDLSVHQLTYGILTEMSLFFKLRVDLYCAIPVDLCESVTQGVN

SEQ ID NO: 54132 - protein, 34 aa, Zea mays
  Coding DNA Sequence Number=SeqID_10757
MAPKRKTASSSAVVIPPIDPNSQLPFAEHSATER

SEQ ID NO: 54133 - protein, 277 aa, Zea mays
  Coding DNA Sequence Number=SeqID_10758
MEAQAHASCNRRAGCFVQATAPPLAPLPRLLDCGTDTATRGDPAHDPAPPAWRDDDAPVFRSSNGPRTRNGRPANHSPRRINSAAGQAAPLAGEGPGKGDTPKRILPREGTRLRASLLIRGSKAGPSEGFNSRLRARGLHTHYWSEVRRPAPRKGSTAASGYSGSAPTIDQGVRRLAPEGGNDLVTESHQREASSPRTPSTGDRVRQITRSSPETPCSAPTEGNMALSPLLLAERARTRAKPRKTANSAPPDPGLGLGLSPGRRRTPLCPTQGSDSG

SEQ ID NO: 54134 - protein, 298 aa, Zea mays
  Coding DNA Sequence Number=SeqID_10759
  Homolog annotation: Hit_ID=A2WM92; Match level="QueryCoverage=49%, HitCoverage=55%, E-value=2e-38, Identity=59%"; Hit description =Putative uncharacterized protein
MSKSTKIADKAIILMQDHAKHIYRICNEKLILGKGLTAFEVKELREALEFAAEGLDQDSLFAKRNWMQLLRRNNWSMTRRLAVHCPACWIHWEPVQLAERQFGDVNWEPVELVGAEPVRADWEPRKGAKYTRVPPTFKGRKQIENRRVVELGGKSVKKHRTPLSVAKLALKNQKKREQKKMEEVEVLNLSGALFITCFQGHKQGVTHQNSMQEKLLGIFRKRDKDTKPHKKRPEDRVLRATEGRFRNGILNVKHLLAPPKPSGKDMSEPKMRKDKHKGKVKQKEETLKKAHFCNQACY

SEQ ID NO: 54135 - protein, 299 aa, Zea mays
  Coding DNA Sequence Number=SeqID_10760
MTRSFGKCSAYPLLLDVLSELHKSPPLLRRAWPSSRGIARVVCPDPPQGLGPQLAPAGCQRETQAQGRCHLAACRGGCLRCDPLDRCGDTRGLGRNPHRRSFWSMDGGEVPSGTECTVISGTRLTPSKSFARVLASSIRLRCEDNTRHVPRRGAGVVDSLWSDSRRGATSCMATVAPSPPPPARRVAGQTWVFLFCHGGKSSSSSPPLGEPTTVVAVALRGKEYHVVAAVKGHELETPEAEHRPRLKRLLEATHLELNEKVFVNTQRAPTWRANCRRFGPARTVNRPVNLLLRVPAQMG

SEQ ID NO: 54136 - protein, 28 aa, Zea mays
  Coding DNA Sequence Number=SeqID_10761
MTERTPRVSDVGERLSTGVRVPPYSGRS

SEQ ID NO: 54137 - protein, 97 aa, Zea mays
  Coding DNA Sequence Number=SeqID_10762
  Subcellular localization annotation: CTP_CleavageSite=57; ConfidenceScore=5.42e-01
MAGSTPSHGRPEIPAASPLLAVLRGARRLFVKMCSKPHAAGSLFREARLTARRDARRAFAVFGADPLATSSTLATVKVTLRAWPFDEMPSLVDSPCD

SEQ ID NO: 54138 - protein, 63 aa, Zea mays
  Coding DNA Sequence Number=SeqID_10763
MERLAEASARAGTLAESLAEAVGSAQSAQAEASQQRARDEGFKTALDESIKNCKALAEAAEQK

SEQ ID NO: 54139 - protein, 149 aa, Zea mays
  Coding DNA Sequence Number=SeqID_10764
MGKNNKRKREPTPPSEEFGDSEYSEEEFSSEPEGSPAPVSPPASSDDSDDSQGIAAEVWTYIRAVERSGLEGSDESEYSSDEEDSDGGEEGEDDDDDDDDDDDGGSGGGGDGDGRGGTKGGSGGSGDSTRGSSRGSTRGGGGGRGRASG

SEQ ID NO: 54140 - protein, 137 aa, Zea mays
  Coding DNA Sequence Number=SeqID_10765
  Homolog annotation: Hit_ID=O48967; Match level="QueryCoverage=87%, HitCoverage=20%, E-value=1e-22, Identity=52%"; Hit description =Putative uncharacterized protein
MAHSGSTRSRPRSSRRQHEATTSVRSPSVRGAQTDDLRVDLNHRRAGEDARVSLDRARERRQNFEGREDARVSLERARERRLNIEGRNLDQDFVAVAPQTPVGARTLSPLQGPPQLGVSCFDYNDLENKKGGRRKVI

SEQ ID NO: 54141 - protein, 603 aa, Zea mays
  Coding DNA Sequence Number=SeqID_10766
  Homolog annotation: Hit_ID=Q338U1; Match level="QueryCoverage=45%, HitCoverage=15%, E-value=2e-07, Identity=25%"; Hit description =Retrotransposon protein, putative, Ty3-gypsy subclass
MALPVDVAGLRPRLGDVEAPPKPRSSLSSVAEAESEPLGRARRRVRRLLGLSPSPSGAEFAVFRDLARVRALGSGGAEFVVFRDLARVRALGSGGAEFAVFRDLARVRALGSGGAEFAVFRDLARVRALGSGGAEFAVFRDLARVRALGSGGAELPMVPLAGPDCPSVSLCQVALQSEWRRRRCPFVRPLYADGGYQLRIRRLEGTPNYGPRQMEAPLGPDLHRGTLDPCEYESRAPEETCRVPPSEVRALARRKLAAAAWLVARDISQRAEPNNEDGFPKLLRACTVRLGIRSQPEYDGREFVEHGTEKCVVIVYIGSSPHHVEWSVTAAGHRFKDTCQVVARKALRALCQIYEEEVADTPLKFFPPFQRNRPVCMTRMRALEGQKLLEDDPSVVYLTAFLLTLDAQYDFLARHHRQMIARAEDAEKLNRKLHVDLTATQARVAALESCEVIVVEALKQAKDEHVQKLMEAYLVTHNQRRALRIQEPASSNPVQPTRAEDPQILEGHPVSIRGENKAWELPEGAIVLEGIPVFPQAMNKQEHPESSQDPPPELFEPLTMKKIPAPSREVKEEAASTPPAPPRSEELQEPVPLEEEFNPVLPS

SEQ ID NO: 54142 - protein, 84 aa, Zea mays
  Coding DNA Sequence Number=SeqID_10767
MDKVYRILSFIGCTGGAPNGCSSRASSRFWKYLLEGLLQKYFICAPAFGEVAFNLSTPRVALSADDIMGCTGGASWCSSDFNGF

SEQ ID NO: 54143 - protein, 168 aa, Zea mays
  Coding DNA Sequence Number=SeqID_10768
MPHQALGDTAIYPSPTYLPTSSIDIHATVAKAAELHAALLQGGSAAASITDKPLKLLAPTFVSLSACFSVLEAIICIIICQNPKGQNHHAPVTQHGREAKCENDVFSIHVSDVAEKLKIKLHEDGISGQETNYIVSSPFYKEGTSIRRRPSRLRERGVPLEYPQRSYG

SEQ ID NO: 54144 - protein, 272 aa, Zea mays
  Coding DNA Sequence Number=SeqID_10769
  Gene Ontology: Mol. function=protein transporter activity; Cellular component=membrane coat; Biological process=intracellular protein transport
  Homolog annotation: Hit_ID=Q5VQ77; Match level="QueryCoverage=51%, HitCoverage=42%, E-value=5e-58, Identity=80%"; Hit description =Coatomer protein complex, beta prime subunit-like
MAEECLLQAKDLSGLLLLYSSLGDAEGIEKLASLAKEHGKNNVAFLCLFMLGKVEDCIQLLVDSNRIPEAALLARSYLPSKVLEIVAIWRDDLSKINPKATESLADPSEYPNLFEDWQVALTVEKSVASQRGNYLPADQYDARVPLDTVFTASVMKMYLKYESLEVLANECRRPLCPAPLFDGLHAQFLLLLPFYLSRHHLQDEAATVPCRGAHLEYQEHHVHPVGQEYRDRQGHCCHCEQRLEQYVHDLPVPVTQQSAQPPPDVVCFLCFL

SEQ ID NO: 54145 - protein, 889 aa, Zea mays
  Coding DNA Sequence Number=SeqID_10770
  Gene Ontology: Mol. function=nucleic acid binding; Cellular component= chromatin; Biological process=regulation of transcription, DNA -dependent
  Homolog annotation: Hit_ID=Q53QK3; Match level="QueryCoverage=91%, HitCoverage=90%, E-value=1e-164, Identity=40%"; Hit description=PWWP domain, putative
  Pfam annotation: Domain name=PWWP; Domain location=95-168; Score =43.6; E_value=6.9e-10; Accession=PF00855.8; Description=PWWP domain
  Subcellular localization annotation: CTP_CleavageSite=27; ConfidenceScore=5.12e-01
MADSRGIASKSADKDSTSTRPARLRVMRQEVKDFLTSPRRSRPKKQPPPPHPPPPLEEKVKERKKGKEKAATEEEKFERAQYSCAFQDEGDGGRDFAPPELVWGKVRSHPWWPGQVFDAADASEIALQHRKAGAPLIAYFWDRTFAWSDSSALLPFCANFTRLSTQSTMSSFVSAIDSALLEVERRVEAGLSCGCFSSNIATKQEVQNSGIRQGAYGAAIDSVYTRDAFHGKTFLDYISALGKKPLAGADLLDLATAKAQLRAFNRSRGSRDLPEFVMFEGIAEITEMTHTKGERMHKSEDDVLSKEKKSRRAGSSRRKGEALPEAANDDAIDEDSNGGAGNDTLSQGEKSKRVKSSSKKKTDIYKHLYGLKTDSVADSRTLDKKGVDDVLSERKSGRTLRSTSKKEDALEGLKRLAKHGIEELAGKSKDAPVLKENNQRHGAGSAHKGRITEDGYHRLGDCNAEDLTSPSKRRLGHNENSIIKPVTISEHGRKKKKLSELMAAIGRPNSVSGGKSKARGKRSLHGLAEKPEDADRHSKDTLMTRKRKKLNTLGDLSSQSEPLSPKKSTKVGELMSKAAGSNMLQAAPAVKAISAVSQTKPRRAKHRQVNAADKSPRHMKVNRGNSKAASKESLSCGEMLRQISLAACGLKQREEIAPSSVNFFTDFRKNSIFSSSDVDERMPEKATNAESTPSEQPIVDHMQDDYWSDILINVEEPLSSLKKKIYKSKKRANKKAPQVKKPPVNSLATAENADEPRSEGNQDTENGEQLRNKTKLFSANGSQQNGTKSGEEMENSFLSGLVLHFSRPSDVPSCSDLIKIFSQYGPVNEAKAEVANSTSSAQVIFKRRMDAEAAFAGAGKISALGPALTSFRLTDFPASASGNKASHGA

SEQ ID NO: 54146 - protein, 240 aa, Zea mays
  Coding DNA Sequence Number=SeqID_10771
  Gene Ontology: Mol. function=nucleic acid binding; Cellular component= ribonucleoprotein complex; Biological process=regulation of RNA splicing
  Homolog annotation: Hit_ID=A3C8A8; Match level="QueryCoverage=91%, HitCoverage=87%, E-value=3e-93, Identity=77%"; Hit description =Putative uncharacterized protein
  Pfam annotation: Domain name=RRM_1; Domain location=154-224; Score =17.1; E_value=0.0039; Accession=PF00076.13; Description=RNA recognition motif. (a.k.a. RRM, RBD,
  Pfam annotation: Domain name=RRM_1; Domain location=35-102; Score =11.7; E_value=0.012; Accession=PF00076.13; Description=RNA recognition motif. (a.k.a. RRM, RBD,
  Pfam module annotation: Pfam domain module=RRM_1::RRM_1; Domain location=154-224::35-102
  Subcellular localization annotation: CTP_CleavageSite=20; ConfidenceScore=5.02e-01
MGSNTGGASGGFYQPFNSNLAGAGASTGIQNFPGVRLRGLPFDCNDIDICKFFVGLDIVDCLLVNKNGRFTGEAFVVFPTAMQTESGLHHNRQNMGRRYVEVFRCKKLEYYRAIANEVSQGGYFESEYRRSSPPLRPPKKPAEDKGSMEYTEVLKLHGLPYSATTEDIIKFFLEYELTEENVHIAISSDGKATSEAFVEFPTAEVAKTAMCKDKMTIGTSSLAALVNIAYLLTDGVLSCI

SEQ ID NO: 54147 - protein, 499 aa, Zea mays
  Coding DNA Sequence Number=SeqID_10772
  Subcellular localization annotation: CTP_CleavageSite=13; ConfidenceScore=5.00e-01
MSSSSSSAATTPPAAASSEETLSSLMVEELRAGDSVDFGVSRMTSARVQDMQRLGYFGGGVARAPGTEEVPEPEGSDEGQLAIVAPGAAIATAAIVPKARGEALGAGGEVSALAVVRDEAGAATRRLKGVTEALSQATEALSQVADFASRTASGALTAAVSAEVERLRTQHADAVREKSASDSKCRKLTDKVAALEREKADLRRQLAAERREANEAIAKEQAAQAEAKLARAEGNLAMELAKHLQERLTALESRAKGAEAAMRAEAERTRAQLMDTYRELGARTGDFEVPDREPGLRCLQWVQEELQELPIVVGGFMSYASLVTCEGAMNALSRERCRHFEVFDQADEDFERDVYKVEDPVVKESAGALYDRMWGPHGREVVRERAETARAQAARGERVDDFGALNSALPDPEPTPAEAVSGVALEPTPETATIATAAPTSVAVGEDLPPTVAEGAPDAPAAAVPSVEDPAAEAAETTAEAAAEATAEAPAASGPSQVA

SEQ ID NO: 54148 - protein, 151 aa, Zea mays
  Coding DNA Sequence Number=SeqID_10773
  Homolog annotation: Hit_ID=Q10MT4; Match level="QueryCoverage=83%, HitCoverage=43%, E-value=1e-10, Identity=36%"; Hit description =Expressed protein
MGMVPDASAAGGRKVELDGDMRWTSQVGPSSDPSQTLASGDDAKSSNGEAARGGSNGGEKQGDESNGGGILSAVASRIGVVVSSANGDRSGSAEDGAKTSAGDAGHGSKGEEKGRGVNGGRIVEQIISNLPSDDQAPDADEASLLIAIIED

SEQ ID NO: 54149 - protein, 166 aa, Zea mays
  Coding DNA Sequence Number=SeqID_10774
  Gene Ontology: Mol. function=structural molecule activity; Cellular component=cytoskeleton; Biological process=actomyosin structure organization and biogenesis
  Homolog annotation: Hit_ID=Q94ET5; Match level="QueryCoverage=42%, HitCoverage=18%, E-value=2e-33, Identity=97%"; Hit description=Actin
  Pfam annotation: Domain name=Actin; Domain location=4-166; Score= -220.3; E_value=0.0082; Accession=PF00022.10; Description=Actin
MADAEDIQPLVCDNGTGMVKAGFAGDDAPRAVFPSIVGRPRHIGVMVGMGQKDAYVGDEVQSKRGILTLKYLSLHITLFPTLQQSVQQSEHLFRDSCNDMGSVNEVPAQPIYIDSFPKLRAWFCKPIMTKPKVALKPQTLSPQPEAQAPHDPQTPEQQQSGTGVGV

SEQ ID NO: 54150 - protein, 155 aa, Zea mays
  Coding DNA Sequence Number=SeqID_10775
MGKGERGWGREERGRGELTGEGRDGEGRPAAGAAEGGGWAGGGGGLGQGCQRFIYNYTNSTVRNTVDYSGQEKLFGKTGQARTVRALAADRPRHEDVTRPEPMQKSKSVLWTVRRKSKDRPSPCADRPASSADRPGRTVRTRRADRPRSAEWPNG

SEQ ID NO: 54151 - protein, 148 aa, Zea mays
  Coding DNA Sequence Number=SeqID_10776
MSSNFSKSPPKKARDLATYENLNEPHKKVYDETIDEFKTKFIAYFECTSKKAIRLNGYPLEGVLGGINLTMPFDQQIEGISLQTTLTITRQGTPSTLYFIRPKEEEQPFSARRANEIELEDIEWNNMYKSKLEETKTTLTMDKLTEIL

SEQ ID NO: 54152 - protein, 122 aa, Zea mays
  Coding DNA Sequence Number=SeqID_10777
  Subcellular localization annotation: CTP_CleavageSite=74; ConfidenceScore=5.24e-01
MAREGHAVSRRSGQSGSPTAVLSQGAGHGGMHAQQLSRKGMRDLTSRGGVGDVLRTVFQRSTSMAELQTSTRVSTSSFKGTPFLDTTRRYGSESLALRMGENENMADGVVLIGQDRTGSCRR

SEQ ID NO: 54153 - protein, 155 aa, Zea mays
  Coding DNA Sequence Number=SeqID_10778
MELKHAFLRRPFRIPPGSGLQTGMNYLHTSKGRGIAGSKRLASGSDCISSDGGGHLCTDNSPAAAIILASCLKVLAPVFAKGVRTSKNVVAAPATYDVIHAPTQQQKAASEAAPKPSKPKHQARGGLVGPVVGQPHEGGRSPACFSPPQGWWSSP

SEQ ID NO: 54154 - protein, 968 aa, Zea mays
  Coding DNA Sequence Number=SeqID_10779
  Gene Ontology: Mol. function=binding; Biological process=ethylene mediated signaling pathway
  Homolog annotation: Hit_ID=A3AGY5; Match level="QueryCoverage=86%, HitCoverage=95%, E-value=0.0, Identity=65%"; Hit description =Putative uncharacterized protein
  Pfam annotation: Domain name=TPR_1; Domain location=587-620; Score =7.9; E_value=0.59; Accession=PF00515.19; Description=Tetratricopeptid e repeat
  Pfam annotation: Domain name=TPR_1; Domain location=713-746; Score =2.8; E_value=2.4; Accession=PF00515.19; Description=Tetratricopeptide repeat
  Pfam annotation: Domain name=TPR_1; Domain location=787-820; Score =20.7; E_value=0.0053; Accession=PF00515.19; Description =Tetratricopeptide repeat
  Pfam annotation: Domain name=TPR_1; Domain location=916-949; Score =17.5; E_value=0.043; Accession=PF00515.19; Description =Tetratricopeptide repeat
  Pfam annotation: Domain name=TPR_2; Domain location=457-490; Score =10.9; E_value=1.3; Accession=PF07719.8; Description=Tetratricopeptide repeat
  Pfam annotation: Domain name=TPR_2; Domain location=587-620; Score =8.6; E_value=2.6; Accession=PF07719.8; Description=Tetratricopeptide repeat
  Pfam annotation: Domain name=TPR_2; Domain location=713-746; Score =15.2; E_value=0.26; Accession=PF07719.8; Description=Tetratricopeptid e repeat
  Pfam annotation: Domain name=TPR_2; Domain location=787-818; Score =5.7; E_value=5.8; Accession=PF07719.8; Description=Tetratricopeptide repeat
  Pfam annotation: Domain name=TPR_2; Domain location=819-852; Score =13.2; E_value=0.68; Accession=PF07719.8; Description=Tetratricopeptid e repeat
  Pfam annotation: Domain name=TPR_2; Domain location=883-916; Score =12.5; E_value=0.83; Accession=PF07719.8; Description=Tetratricopeptid e repeat
  Pfam annotation: Domain name=TPR_2; Domain location=917-949; Score =3.7; E_value=10; Accession=PF07719.8; Description=Tetratricopeptide repeat
  Pfam annotation: Domain name=TPR_4; Domain location=457-482; Score =18.5; E_value=0.025; Accession=PF07721.5; Description=Tetratricopepti de repeat
  Pfam annotation: Domain name=TPR_4; Domain location=713-738; Score =7.2; E_value=5.4; Accession=PF07721.5; Description=Tetratricopeptide repeat
  Pfam module annotation: Pfam domain module=TPR_1::TPR_1::TPR_1::TPR _1::TPR_2::TPR_2::TPR_2::TPR_2::TPR_2::TPR_2::TPR_2::TPR_4::TPR_4; Domain location=587-620::713-746::787-820::916-949::457-490::587 -620::713-746::...
  Pfam module annotation: Domain location=787-818::819-852::883 -916::917-949::457-482::713-738
  Subcellular localization annotation: CTP_CleavageSite=89; ConfidenceScore=5.10e-01
MTNNFLTTIKSLKLIEGCKAAQLYALSSVGAASTSGSGDAGGSSNGKPQPPPPPKTISMRSGSLYYPHAAPSTSGAFVPEPHLPCGLPVADALEPALDACLRPVDHVGVLAASYRRVSAATAGGDDDLCDAYLEQHALFQSIGDARLIRRALRAARVHADNPHRRAVLAAWLRYERREDELDPAPPPLAPCTATTPLLECPRAAVFASVSHSHSVDPVCPCRRPPLPPVTPPPHRLRRNTSGAASEMSEEEEPETNDLWFIIGEEEVACERSCIAALSKPLNTLLYGGFAEAHRDRIDFSRDGITPRGMRAVSAYSRHGRVDDFPPDVISQLLAFANKFCCEGLKAACDNQLAAMVRGLDDARSLIDIGLEEASHLLVASCLQAFLRELPKSLTCPDIARLLCSPEGRERLDISGNASFALYHFLSYVAMEQDMRSNTTVMLLERLNEFAEQPWQKQLALHQLGCVMLQRGEFEEAQEWFEAAVGEGHVYSVAGEARAKYKRGHKYAAYKLMNSILGEYDEPAGWMYQERSLYCVGKEKLADLQAATELDPTMTFPYKYRACALLEEDNAASAIAEISRVVGFKMATDCLELRAWFYLALEQCELAVQDVRAILTLDPTYMMFHGRMHGEQLIELLRGQVQQWDMADCWMQLYGRWSAVDDIGSLAVVQQMLSREPGNSSLRFRQSLLLLRLNCQKAAMRSLRYARNSTLHEHERLVYEGWILYDSGHRDEALAKAEQSIGLQRSFEAFFLKAYALGDSSLDTESSLSVVQLLEHANSCASDNLRKGQAYNNMGSIYVDCDMLDEAAECYGIALNIKHTRAHQGLARVHYLKNRKKVAFEEMTKLVEIASNCASAYEKRSEYGEREAARSDLNMATLLDPTRTYPYRYRAAVLMDEGKEEEAIAELSGAIAFKPDLQLLHLRAAFFDSMGERESALRDCEAALCLDPTHGDTLELYSKASTTKAEPQS

SEQ ID NO: 54155 - protein, 423 aa, Zea mays
  Coding DNA Sequence Number=SeqID_10780
  Homolog annotation: Hit_ID=A3AGY1; Match level="QueryCoverage=94%, HitCoverage=38%, E-value=1e-162, Identity=72%"; Hit description =Putative uncharacterized protein
MMREGDARVTLLRSKLHGLVERNRDLEEENKQLRHQVSQLKGQISSLEGQETNKRMLWKKLENSATGISYSKEKQFVQSNDGAKEAVDLNSSLSHSRQQFSSVNQVRSRAPRVPNQPPNPTSTQPKATVRKEGCMAPPPPPPPLPSKLQRSTKAIQRVPEVVELYRSLVRREGKNNAKSGSVGIPAATNSREMIGEIENRSAYVLAIKSDVENQGNFVNFLASEVQNAAYKKIADVEEFVKWLDGELSYLVDERAVLKQFPNWPEKKADALREAAFNYRDLKNIESEASSFHDDRRVATPMALKRMQALQDKIEQGIHNTERVRDSASGRYKDLKIPWEWMLDSGVISQVCLPFTLKMASLKLAKEYMNRIVKTLKSDPFANEEELLLQGVRFAFRIHQLAGGFDEGCRKAFQELNTNASKSE

SEQ ID NO: 54156 - protein, 196 aa, Zea mays
  Coding DNA Sequence Number=SeqID_10781
MPKPDKTFPFLILPVLPSLLNPGVGPHEFGSSDCPHSLEWLYDKGVQKHFALLPDPHFVTGNNMLMRAISPFTMQCSPMIPGLGSGREKRFNLGQRGSGGGLPTGRGRSSAAGIAAGGLWVGNGGWKAVLRVRGYARELLGSFNSLPDQQRRRGRRRKGLTGEEDDAGSLRIGLGGGGRGMAEAGARNKELGASFL

SEQ ID NO: 54157 - protein, 225 aa, Zea mays
  Coding DNA Sequence Number=SeqID_10782
MAERYQLPRSCVPPTTRQKDGGHPPSGGLEGGKTRCIREREDTVAFRKGPTGERGGQPCRRHATGPSGRASPTPDTPAWRPGPMRRATGAPDAACKQLHRLRHHRASSIAEPIPRLEATQRATQQRQPDAAANAAKSGPAVMTVAGAREQRSRRQPSSRSIRGQQKNPLSRREDNAPVVRSSNGSRTRNGCPANYSPRRINSATRQTTLLAGATGDASPSPEQPR

SEQ ID NO: 54158 - protein, 463 aa, Zea mays
  Coding DNA Sequence Number=SeqID_10783
  Gene Ontology: Mol. function=asparagine synthase (glutamine -hydrolyzing) activity; Cellular component=phagocytic vesicle; Biological process=asparagine biosynthetic process
  Homolog annotation: Hit_ID=Q5QFC3; Match level="QueryCoverage=69%, HitCoverage=54%, E-value=1e-151, Identity=81%"; Hit description =Glutamine-dependent asparagine synthetase
  Pfam annotation: Domain name=Asn_synthase; Domain location=109-351; Score=280.3; E_value=4e-81; Accession=PF00733.12; Description =Asparagine synthase
MQAHKRVVDKPITEVREAGICMRENSFYVDIVRRRSLNIQGHAAGNIRAFRSQNIFKKIDFSSGAVSEANEAQPSPKPSYRGTPSNPPWYNNDDDEAVVTPSIPYDPPALWKVFEKVVVERLMIDVLFGVLLSGGLDSSLVAAIIVRHLTGTEAARRWGTKLHSFCVGLEGSTDLKAAREVAEYLGTLHHEFHFTVQDDIDAIEDVIYHTETYDVTTIRASTPMFLMSCKIKSLGVKMVISGEGSDELFGSYLYFHKAPNKEELHRETCRKVKALHQYDCLRANKATSAWGLEARVPFLDKEFINAAMSIDPEWKMVWPDLGRIEKWVLRKAFDDEEQPFLPKVHILYRQKDQFSDGVGYSWIDGQKAHATSNVTDKMLSNAKFIFPHNTPTTKEAYYYRMVFERFFPQIASGDDGEHRTKMWTEHRGWMKQPARHGGRSNSGQWQSSESRLSKRCELRCMGD

SEQ ID NO: 54159 - protein, 295 aa, Zea mays
  Coding DNA Sequence Number=SeqID_10784
  Gene Ontology: Mol. function=iron-sulfur cluster binding; Cellular component=nucleus; Biological process=regulation of transcription, DNA-dependent
  Homolog annotation: Hit_ID=A3A206; Match level="QueryCoverage=85%, HitCoverage=68%, E-value=3e-91, Identity=70%"; Hit description =Putative uncharacterized protein
  Pfam annotation: Domain name=Radical_SAM; Domain location=68-239; Score=19.6; E_value=0.0021; Accession=PF04055.12; Description =Radical SAM superfamily
MDVSVTALSFPPNEIHAQAHYIHENIHTWRVVVLYASIYKDVPILVNLSDFTIVQVLSVEPLLLGTVIQTVVGCPLRCSFCATGKGGFARNLQPHEIVEQVLAIEETFKYRVTNVVFIGMGEPMMNLKSVLEAHQCFNKELKIGQRMMTISTVSVPNTIKMLASHKLQSTLAVRRKYYSATLLTWLEWISWPAGINDEKEHAEELAELLRMCGGGYHVNLIPYNPIEGSEYKRPYRKVVQAFVDALEARKITVSVRRTRGLDANVACGQLRNAFQKNPLLEIEPSPSIERTLVTA

SEQ ID NO: 54160 - protein, 594 aa, Zea mays
  Coding DNA Sequence Number=SeqID_10785
  Gene Ontology: Mol. function=molecular_function; Cellular component =nucleus; Biological process=negative regulation of transcription by carbon catabolites
  Homolog annotation: Hit_ID=A2ZIJ2; Match level="QueryCoverage=93%, HitCoverage=93%, E-value=1e-170, Identity=57%"; Hit description =Putative uncharacterized protein
  Pfam annotation: Domain name=WD40; Domain location=319-357; Score =33.5; E_value=7.6e-07; Accession=PF00400.23; Description=WD domain, G-beta repeat
  Pfam annotation: Domain name=WD40; Domain location=361-399; Score =9.9; E_value=1.9; Accession=PF00400.23; Description=WD domain, G -beta repeat
  Pfam annotation: Domain name=WD40; Domain location=511-547; Score =6.1; E_value=5.7; Accession=PF00400.23; Description=WD domain, G -beta repeat
  Pfam module annotation: Pfam domain module=WD40::WD40::WD40; Domain location=319-357::361-399::511-547
MAGAPGVGPGAGGGGGAAAGLKTYFKTPEGRYKLQYEKAHSAVLHYSHGGKTVSQVRMGTGKCASARGIYADCCGGWMLLLTVAYLKEKPASQGSQPSTPSASSGMRSAAARLLGTGNGSKALSFGGGNGASRAVAGSSRVGGGLGTPTGLGGSQGGTNYDGKGTYIVFNAADTLFISDLNSQEKDPLKSIHFSNSNPLCHAFDPEAKEGHDLIIGMGSGDVYSMSLRQQLQDPGRKPVAALHYNKGDKDVSPNGRHDQGSIGTCLNKDGNTDCTFPAVKDQSQFMVAHAKSSKVHLHLFEYRHKNQELKQLLFWNEGSNPVARWHICQGSINAISFSPDGAYLATVGRDGYLRVFDFSKEQLIFGGRSYYGALLCCTWSSDGKYLLTGGEDDLVQVSGVAFDSYWSPPSSDGNGENVYRFGSVGQIRDKNYFFSVLMGLFSHDVLKVIYVFDTQLLLWDLALDEIVVPLRHPSSASPTFSSGSPSTHWDNACPPTGVLQPSPRMRDVPKLSPLVAHRVHADPLSGMVFTSESILTICREGLIKIWVRPEQSENNQQSNSSEFALGPASKDRAITSSNKASSSSFKKLPPVLVT

SEQ ID NO: 54161 - protein, 277 aa, Zea mays
  Coding DNA Sequence Number=SeqID_10786
  Subcellular localization annotation: CTP_CleavageSite=75; ConfidenceScore=5.56e-01
MPASGSGPCQHTSAGSVTGDLPTATVAPSVSAPSPSSAAEGVPATSAPIVQDDAGAEVASSSPQDSPVTVEATPSGSQVPAGGPEAAVPPTSIADPPTAIPPGAPPVVLIRAHQALQETEAAIQREWKALETEHQRLGDWCSQLERRTKATSCQFASERAELEQEREDFKKDNRKVSDREEEWDKQAAAEAKLQQELSNKASDIARVEGNLKAREASLAKRTTDLAWQEEDLAFREEMWARWNKLLDELELEAEEKVKRLEGKVRALEGQVRQFQAA

SEQ ID NO: 54162 - protein, 228 aa, Zea mays
  Coding DNA Sequence Number=SeqID_10787
  Homolog annotation: Hit_ID=Q6J9V9; Match level="QueryCoverage=15%, HitCoverage=12%, E-value=5e-09, Identity=83%"; Hit description =Putative uncharacterized protein
  Subcellular localization annotation: CTP_CleavageSite=34; ConfidenceScore=5.06e-01
RKLRLGATKDWASATIVAGEKPSKGGALQGGSTRAQGSSTAGRAQERAQELGQAVRREEDAQRSWGSRAPAEQRTPASMAGLDALEEIGDHSACGEHRQAAGRWNPSQGRSHGRRKEPAAASRDARGRGARTGESGEASSRSARSDREESRELQCGASAGRSEKKTRRSSGRAGPSEGFDSRPGAHRVTDDSGYVCYMAEARATLPRGSGAALAPGYDQTVDSVNKPA

SEQ ID NO: 54163 - protein, 669 aa, Zea mays
  Coding DNA Sequence Number=SeqID_10788
  Gene Ontology: Mol. function=hydrolase activity, hydrolyzing O -glycosyl compounds; Cellular component=cellulose and pectin -containing cell wall; Biological process=carbohydrate metabolic process
  Homolog annotation: Hit_ID=Q7XIV4; Match level="QueryCoverage=30%, HitCoverage=48%, E-value=3e-97, Identity=83%"; Hit description =Putative alpha-galactosidase
  Pfam annotation: Domain name=Amino_oxidase; Domain location=209-662; Score=-19.1; E_value=9.1e-05; Accession=PF01593.15; Description =Flavin containing amine oxidoreductase
  Subcellular localization annotation: CTP_CleavageSite=77; ConfidenceScore=5.06e-01
MSSIDEWCDANWQVMAARSPNVRLQKAIDRKNQSSMLKCPHSAPPKRPRARFARLSAETEAAEKAPVEPKPRVERICAMRASPIRTKTARVECPSERKKALTTPRSKAVRSRQELFHNVKHQKESLAAAARKGTVVKSLFMSTTRKKEPVQTLAADKSKGAVSEVCSKLRKLNLACREVPSRYISQPQPKNTKTAKKSEETTVAKSEKRGLESKTNAKKKILGRSVKRANAGPNGENRNGCSTAADESSLAETAGSHQERKVVLRELRIEVDASRRGNSDDNKENVSSALSEEALDNSSHYGSENRLLENNENVPLKENVALKKKVHQEQAGKLKKTTNPRVLWDGGQYDPALWAGKVGNSWHTTDDITVTWKSMTYIADKNNKWASYAGPGGWDDPDMLEVGNGGMTLAEYLSHFSIWALMKAPLLIGCDVRNMTSETMEILSNKEVIQNPLGVQGRKILGQGKYGCREVWAGPLSGNRLVVALWNRCSDTANVTMKLPAVGLDGYAAYSVRDLWKHETLSENVVGTFGAQVDVHDTKMYIFLCNHVASEYYDPNRSMLELVFAPVDEWIGRSDTEIIDATIEELAKLFPNEIAADQSKAKILKYHIVKTPRSVYKTVPNCEPCRPLQRSPIEGFYLAGDYTKQKYLASMEGAVLSGKALRPVHSAGL

SEQ ID NO: 54164 - protein, 308 aa, Zea mays
  Coding DNA Sequence Number=SeqID_10789
  Subcellular localization annotation: CTP_CleavageSite=28; ConfidenceScore=5.25e-01
MGRGGGGGGSRASMAGNRGARAGVRWIRSALRARFTTGEGARWRGAARAGGGVRGRGRTRAEDATLAYNAAALRFCDGCAKLNFPEDTAARHARDAEAASAAARVGPPAALLDSQVVSDDMADYLDYSRILEATEPSGHGNGRFVGSGFEMGSVAADADEGRWGRDALVAPHLRAALLLLLPRAAHLLLAAPLRDLRRAHLRRGPTRGAVPRMARGTVLRGCGGRGMAGCFHHAWEGARLWLARDPRGQDPWRGDGGRMEGQAGVGRGLARDPRGARSGAAGKDCLLPCACVGDRQNRAPFPLCGRLH

SEQ ID NO: 54165 - protein, 641 aa, Zea mays
  Coding DNA Sequence Number=SeqID_10790
  Gene Ontology: Mol. function=protein binding; Cellular component =integral to membrane; Biological process=biological_process
  Homolog annotation: Hit_ID=Q5Z6I5; Match level="QueryCoverage=95%, HitCoverage=93%, E-value=0.0, Identity=64%"; Hit description =Putative uncharacterized protein OSJNBa0055N24.35
MAGTTPGYTYISAWPLETAQETSPGGGAGACKDEAALGLPWSEMFRSASRRRPKQESDDAPPKKPALKTAGAKEMKAKPSSVGTGAGAGADIAGLSLEPDARLALYIAMAHAGLATALLVLYGLYLLLADFLRPLQWALLCSVPLRETQRALVAFWEPPLRGGLSAALLALPLAVLRSSTATLADARAALLRRPLPSSPAFPRLLRWLVSFFFFLILFERLGAATALLLLVFALAFFAASPKLKRAASSRISGRPPSSRGLLLTGGILRHLKTLVALGLMLGMIAGFITGSIFFSYKIGLEGKDAVMSLKSHVEKSNYSEKIGLKKWMDDNDIPGLVDQYSAKIYDTLWEQVDQLAVQYNLTDFTSGFRHFLISQSVDPKSKALISSRPHPYSMKLQSIATRVRNREWVEIYWELDSFFRELLITREDLVIKAKELALQGTEIAKRLLSSSTSVLGGSANLMLSITLRIVSGAAEVVNFLSQLMVFLWVLYYLITVEGGGATEQIIDLLPVSKQVKDRCVEVMDHAISSVLLATAKIAIFQGGLTWLLFKFFKVHFVYTSTVLGFISALVPILPFWLSSIFATGQLLMEGRYVLALVVTVIHLMLMDYGTTTILEDIPGYNGYLTGLSIIGGMTLFPNALE

SEQ ID NO: 54166 - protein, 248 aa, Zea mays
  Coding DNA Sequence Number=SeqID_10791
MVTNSSTVRVPVAWLEQRQRPTQGDNRTRGHDNDGICKSTETHNSRTNQPVKKELTALELETEYRQGIMENASAGNGSRSRAGRKLQLGATKDWASATIVAGEKPSKGGALHGGSTHAQGSLTAWRAQERAQELGQAMRREDRLGEGRTTTMAEGENPTCKNGQEGAEKERSMAGRAPNLVQERARTTPGTRGRSSERQRPRQGKGNPSWGKLGWAGARTGGEIGGRAAERMKARTAAADGITTTRRG

SEQ ID NO: 54167 - protein, 371 aa, Zea mays
  Coding DNA Sequence Number=SeqID_10792
MQQLGYFGDGLGRVSRVEEIPEPEGELVVHQLTPNAVVALAKYVWAVTSYGGQPSVEVFSKNYYLHWQKRKIGNKIAQFGSEVEDLPGLPAAVICSHYYVAFPQFKVAEDDEDEVPSAAFVREVEDEAVRIVGWYAPRTETLRSWDIRGSNVRLNRVFELNRLPYGGYPRYDAAAAVDRRGKKPVVVAEEGPSPEAAPATKKRKIVDGDLRGPQGKDVFARAPGVFDANAEIVMDKDHQDAARKRRTITRVGDPMREVKQARGGAKSAALAAANHRRLGLEQGYGVGSDAGQLAIVPSPVAATSPAVAVGAKDTSQDPWSNFCASGQISSATAAKDVAGSVSQQLRHASWQLKHLKCPGRTLKGSNTLKQE

SEQ ID NO: 54168 - protein, 508 aa, Zea mays
  Coding DNA Sequence Number=SeqID_10793
MELCSAMGREMAGGAMASRRCGQARRLHEHLAEVRPWMDDGAREVGVEVREKAAAAFWNREEEKWRVGEGKERGGLPFIELELWTCQVAVSSGRWKNVDIGRPFLAFSACFRTLVAVEDFFLDLHSTIVAAAFADHIALGALTLEFAAERATTRGQIERLRAQHTDAVQDNLRKPRPSLRGRRPVSPANARGDGDEARQPARPPGQDRSLDACGGRADAYVARGREELEVLPTIVTGLMSFASLVTCEGAVKDPVLKRSATALFDRMWGTHGQETVWERFDRAMDQLKMAHDEEVEDLDDLDSTLPEASGVELAPPSDAGEGPSATPAPTGAGEDPTPATVLASEDASKVVGEPAAEDPAAAAGPSQVPTFGPAQATAAGNTDFVVASTESSDEGLDYFVALNVAAAESSLRVEGVGDLPGESTEHRQRRVVSKRSVGEFSRSGRCRHMEMEHGRLRVDWIGKRELLTLPIGASIGEGDLRNLFEGEELRIMLFNYREMGIILKVEPM

SEQ ID NO: 54169 - protein, 302 aa, Zea mays
  Coding DNA Sequence Number=SeqID_10794
MVGETSPAMTRHSMPSGRAMLRDAGHRAEIELELGMTRKDRQPSGQRAGARIGAESGLRYKGGRLGRGHGPAGPLAPPLRTQRGEQEQGHDSREEQEGWATKRRLLRRAPTSSRAWPWMEELERRQRAEMEQGTWPGKGLGTGRGGWTQGEPWRWAPSSMDAGRREELAGWLGMEEEKSTRAIEGLRQGQGTAGKWRERSKGAARLLVDRSWRKKPRPERRRARRGHGWGRGTAGDLERGVLEDGAEEAVQRRNAGRRKRETGVEELRDDDDDDRRQPRPDKAPARVRDKEEGDLERWDFSG

SEQ ID NO: 54170 - protein, 56 aa, Zea mays
  Coding DNA Sequence Number=SeqID_10795
MGKPVRSLLMLLLSRVTALVPTITGMGDHVSGRVRGKVHCQVQSVDNLEHLQQRDL

SEQ ID NO: 54171 - protein, 47 aa, Zea mays
  Coding DNA Sequence Number=SeqID_10796
MTSQHEEETVVEDEVVSQAENPPTENNVYFDICEVYPKPPATQGKPR

SEQ ID NO: 54172 - protein, 395 aa, Zea mays
  Coding DNA Sequence Number=SeqID_10797
MGRGQLLEGREGLTARENGGDCYREWGRLLEGREGWLGYGGVEWLRPSSALGPYPKAHRIGDYHPIADVCGKVSGTEEPEAETYCRAPLRRRARAPSFTATKLVKRGAGASMGALSRPHSAQEPPRRVLRWSCPLLQRRLSPGSLQPRRFQHALHHRWRPSSSPLGRRRRRMILCRYSVTHGLQPLACHPRHPEVALSSGAGVAEEAGPTEPPKGPFEDIIIQPPLSGGSGDLVRVVLDPSIWGGPTVTWMSTWHDMYFVLDDTEERELWEDLRVVTQLALRSDKVVDLTSWCMGLKEEGLADRTSVHRLVDGVRHIKAEADKHEEEMRQMKGNLQALMVEWDKSQCQDVEASLRVDSLSKHLEGERSEGRALKARIGGLKKDLETAVQTSRTLS

SEQ ID NO: 54173 - protein, 102 aa, Zea mays
  Coding DNA Sequence Number=SeqID_10798
MTRLRGRRRTRKGYDSSWRRERRNHLGLEVENVSLAHPLEIDLVVGGNHDQHSLHPEVDGVAEFTPYEATQGLHTGPRGPTLGDVHHVEVLKELRHRIGQLP

SEQ ID NO: 54174 - protein, 429 aa, Zea mays
  Coding DNA Sequence Number=SeqID_10799
MAAAGGRKQQSNRLQAHVPSWDSDRALSHGDRQHLWQAKRATLHLRHNDRVKKGTEKGDTPKGILLHEGSGPRAPLLIRGSKAGPLEGFDSRLRALGLRAHYWLDPRKGLTAASGHSGSAPTTDQRSDSVTKSHQRETSSPQTLSNGIGSGKSPAGSGAALANPAPAKPLTASTYQPENLEPDYAPGLRPLVNPISTKLQRPDGRDSGQGSVHSRDTISPRPSPASGRNGKPRQIHALPDGLLKQQTHLRLTRGPARAGFAEKQPWPDHYTNRPYRRSIQCKDRLTPYPDARSSVDKAEPPRPASGAIGSSASLDPRARTQPRPRTTVFASPDPRARTQPRPRTTVSAPPNPRGSDSTSTPDNGLRLARPQGSDSASTPKGGLRLAQPLELGLNLDSGRRSPPRPTPESGLSLDLGNGKSGKLISKMNF

SEQ ID NO: 54175 - protein, 175 aa, Zea mays
  Coding DNA Sequence Number=SeqID_10800
MGVVRFAVVPLMGLGVYGSLFQGWFAPWEECGGDEDDGHDYAYGNVPGILSIWKGVYLDRWEATCLVHRLENSLRGVEFCSEHYSISERDSAEAAMQDAAWRALSHYYSVLGGVAYGLNLRYYPCCPSGRTGGMVVSSVGEDNPRLSSTVNLAIVLNMELDHALDELSRAHAEIA

SEQ ID NO: 54176 - protein, 107 aa, Zea mays
  Coding DNA Sequence Number=SeqID_10801
MSSSLGGEWNRPPSSTTNQPCLGKNLLSGKLADEGIDVVMPGDTMKPEKETRRNLYHKMRSWRWAKIQMNESSGKEGTPADVIIGKLKSKPSRRRDIAERTLSLDET

SEQ ID NO: 54177 - protein, 122 aa, Zea mays
  Coding DNA Sequence Number=SeqID_10802
  Subcellular localization annotation: CTP_CleavageSite=68; ConfidenceScore=5.22e-01
MEGFGRGETRHGRTALGADGPVGAGRGPWLSAAGSRRRASVGVASRRSVRGWAGAQARLERVSWRLARSTAGAPGSGRLGGVRASRHGQGEQGSSMGAAWTGLRLLVGQGVAAKNGSTRRGL

SEQ ID NO: 54178 - protein, 149 aa, Zea mays
  Coding DNA Sequence Number=SeqID_10803
MDKGNTVLRWGPWRKFLKELQTGPWCTIHMSLRLYRKPPRVSGNRTRGPSLMEQWPRRKKEAEGLTGGETAPVGDRSPGVSDLGPPVKFCRVRGLGKLHELMVKLTEWLARLRSDWRELATVAEARVVMAGGGAACSRRSPANLGSGRT

SEQ ID NO: 54179 - protein, 281 aa, Zea mays
  Coding DNA Sequence Number=SeqID_10804
MDTGPWGRVVYETKIGIRINVLQGAGYTTPPQYTVQLFEEHRVPRCRVRMTLEPHPLQPGWRSLDSESFGYRAEDTIEAIALHGLTTFCGFHHLELSTHPIGLFPAEKEDDPMWKDRVEHAKDIWALYPGQTSHLTVRCMDAMYCLQVMRGEAMSQLMALLEATKITLDNREELVVDLSTEMVEKDLQVEQMSNEIQELEELVGTMEKTIEVLEDQLIKTQQQLAEANQHLDMHHQEIQDMEANEDVDIEGGEEPEPASSLDTAGSGRPTSPESSIASFVH

SEQ ID NO: 54180 - protein, 373 aa, Zea mays
  Coding DNA Sequence Number=SeqID_10805
MAIQFNPRVWEASRGAKESTRARNRKITHCGARSTFVGGRLKSGDLDLASPTRQSSIPRSGSFTEARRVSLEGWTGLGMARLAGLRRWVLGQPLARHLQSKLRRSRAPGMSNTWRCSSAHVQKLAKIANVRMLAKIRRRPLTGTYGYLLYPGWRSLDFKTIGLRTDDTTEAAAMKTLTTFCGYHPLEMVMHPLGLFPAEKKDDPMWCNRVSHVKDVWEMYLDFVGRVTVQCMSALYRLHAPQSDTMAHLANLAQTTKLTLNNREDFVVDLSSELVEKDLQVERLSQRITTLEQQVEIRDNTIYVLENQLHDVQRELEEANDHLDMHHLEMEANEAGSEGEEAPEELGPAPGANGTTSSMPPSPASSVASTAQG

SEQ ID NO: 54181 - protein, 38 aa, Zea mays
  Coding DNA Sequence Number=SeqID_10806
MPRNMINRYGGYKCGHCTTAVGVSEALYAKAVLLRLIG

SEQ ID NO: 54182 - protein, 51 aa, Zea mays
  Coding DNA Sequence Number=SeqID_10807
MAGRRDGRVAAGVSALHRGGLIRSKEVFAGRCSPPDHLDPGANRGAERSSA

SEQ ID NO: 54183 - protein, 156 aa, Zea mays
  Coding DNA Sequence Number=SeqID_10808
MESRGYDGGAGTRRTTVGELRLRENHSGERGSAEPGREGAHRRMSRATNSEAELTVALDGARMRQWPQNRRWSAAGGGGALYTRGQSKREGERVWLRAQMGEGRWASRARGSKGARGLGRGRTTRGRGRVHGGRSWARGFFIQIQFKFQIQTKSNI

SEQ ID NO: 54184 - protein, 158 aa, Zea mays
  Coding DNA Sequence Number=SeqID_10809
MAGSREEQPREEELSQDAGQRWKKGRTPWLLGAPTGEVHRGARREEDRELGMAPMATAATKTSHPNWRSRAPRAGVWPWATASSLPWGKLQCAEEEGAGGRHGEEHGSLRAGEEGAAVRGGRKQGEKKVAARENRGVGVENFQVSTPIYRRSPRVRVS

SEQ ID NO: 54185 - protein, 176 aa, Zea mays
  Coding DNA Sequence Number=SeqID_10810
MAQSRSYAQGSFGVIAEKETDLKGKRLFRPRWITIELLANHGQEQEGLKFVAPLRRQAETRAKSPLEDFGDSEYLEEEFSSESEGSPGIAAEVWTYIRVIERPRLEGSDELEISSDEGNSSDSSEEESGGDGDDEYDDGDGGNDGGDGDGDGSKGNGGSGKGDSGSNKASGKAPLV

SEQ ID NO: 54186 - protein, 167 aa, Zea mays
  Coding DNA Sequence Number=SeqID_10811
MQESLAGPPSQQNPPEGLPRNPLQDRHHSKILPRAFPGIPCRTAITAKSSRGPPYTDHSPTALAPFGSTVRVLPNRRGSYLPILAAHHQINGQEIFAYHPAHATRQRPQATRRRAPRRTRSRRRRALNPNWTELHDAGVRVNARRRFSPTEEAQSKQSTAEGEPAAA

SEQ ID NO: 54187 - protein, 67 aa, Zea mays
  Coding DNA Sequence Number=SeqID_10812
MAVRRGIPVMGKTLRNWRKMSPYRDVNGDPIPANPWGIPLLGYGYGTKIVPMGMDMGQNLHPLGKRV

SEQ ID NO: 54188 - protein, 155 aa, Zea mays
  Coding DNA Sequence Number=SeqID_10813
MGVVASTTATFMSGEPIDAEAPQLVPWTCVPLACKAKHQKAFVKQVIKEGNQIQGSSRKGPRVLVNSQLAVPDGVQARPRSGEQLRRPIEAKTGANLRLSPNSSSYERFPQLNYTIGGLGSSGHGGRKHNGNMIVFPAMGASLVQLKGSGSITEA

SEQ ID NO: 54189 - protein, 272 aa, Zea mays
  Coding DNA Sequence Number=SeqID_10814
  Gene Ontology: Mol. function=carboxyl- or carbamoyltransferase activity; Cellular component=ornithine carbamoyltransferase complex; Biological process=amino acid metabolic process
  Homolog annotation: Hit_ID=Q8SA97; Match level="QueryCoverage=59%, HitCoverage=23%, E-value=4e-16, Identity=38%"; Hit description =Ornithine carbamoyltransferase
MARPVDVAGLRPRLGGVEAPPKPRSSLSSMAEAESEPLGRARRRSSAEARAESEPWGRAERSSSSSGAEPESEPWVGRSGVRRLPGLSPSPSPGSGGAEFAVFRDLARVRALGRAERIGAAQAALSFCQAGQWSGEVTVVTSALPLYADGGYQLRIRSLEGSSASPDPRARPPSRPRTTNSASPDPGLGLSLGSGRRQTPPRPTQGSDSDSALEDDELRLTRPQGSDSTSAPEDDELRLARPQGSDSASAPEDDELRLARPQGSDLALASDD

SEQ ID NO: 54190 - protein, 77 aa, Zea mays
  Coding DNA Sequence Number=SeqID_10815
MPVTPLWRSSAGRGTKDIYEPPKSTPDVISESSSRRSVKGSTLRRWMAATTPAAGPGKGILRKGSFSAKEAGPEPPY

SEQ ID NO: 54191 - protein, 469 aa, Zea mays
  Coding DNA Sequence Number=SeqID_10816
MAERYQLPRSCVPPTTRRKDGGSPPSAGLGGGKTRCIREREDMVAFQGGHLPFKGSSPYSRPQPSRAESSPTHSKVLPNGAGAGTHTSCKPTQGRRSQTAARGAYNRPAVTSDPPLLPRPAGERVGGHAGGMQPRQVGALLRLPTRPAWRPRPTRHATGAPTASCMQLHRHLRHHCASSTAEPIPRLEATQRMTQQRQPGAARLAHAQRPPHQPLAPSHQLRGGTGGASGRKSGRRFAFAIMTAPVKAPSLPTDQRFEGWPPEGFDSRLRSRGPYTHYWSERLGGCSRKPGSGRTVDSVNIPARELGTRPYTRATTSSHEGTTRPAEALREALRPRRSETTPPRPRGLHPAGALARTHQNKTQPRKAGPLAKKCDESLQARANTPFEARGLLSGTIIRGTLKTPNSQLGSDSGSTPEDGELRSARPRARTRAKSRKTANSAPPDPGLGLGLSPGRRRTPLRPTQGSDSG

SEQ ID NO: 54192 - protein, 66 aa, Zea mays
  Coding DNA Sequence Number=SeqID_10817
  Subcellular localization annotation: CTP_CleavageSite=55; ConfidenceScore=5.19e-01
MATCSALNARQRAQKSGTPMLAHRTLYSTCPVCHRTSRRAQKTELQRPVHTGHVRCASHVTKVVGF

SEQ ID NO: 54193 - protein, 312 aa, Zea mays
  Coding DNA Sequence Number=SeqID_10818
  Homolog annotation: Hit_ID=Q75KB0; Match level="QueryCoverage=27%, HitCoverage=52%, E-value=8e-17, Identity=58%"; Hit description =Expressed protein
MASLCGVVGLSEVVTPPRSRLSPSPGVERGGDLLPESRSSPSPGVGRGGDRLPESRSSPSPGVGRGRDRLLELRLSPSPGVGRGGDRRPRRGRVRALGSGEAEIPMAPEARLGCCQPHPGGWRSSRSSAGGAVFLSGQSVEGRSDGGRFGLVDWKARVRIRCQAILALNAPAIRSAWRGDLTKLCADGGYQLRLGALGSHSAVGWGAGSSEADEDLREVVRAASQRRVEQRRAELQAVARSQSMAASLSMARIDEDAPCDFGAPGALCPRSQSCVGDAAGRRPPPPRPREGGGLALTESELLSGRRRRWHSV

SEQ ID NO: 54194 - protein, 76 aa, Zea mays
  Coding DNA Sequence Number=SeqID_10819
MVTSSSTVGKTGQAAASTPLPASRIFVIQAKMEDEASRGAASAWVGCPFLPPAPGGEGRPRAPRRLPPAMPGYAGR

SEQ ID NO: 54195 - protein, 116 aa, Zea mays
  Coding DNA Sequence Number=SeqID_10820
MESDYFLEKQMCKGYTFVGGLHRNEVLVKVVKISRAFDALPRSHPKPCLDALQKMTKFRWISDKVGIGEPKLTVTELGIESMCSKSFKDDSEVVLVLFLALGVDENVVDEEYDKLI

SEQ ID NO: 54196 - protein, 51 aa, Zea mays
  Coding DNA Sequence Number=SeqID_10821
SSDCSREALYKRRNRSRPPAATGQVQGFVGRAWAGFGYGLRRIGFLGRSLQ

SEQ ID NO: 54197 - protein, 162 aa, Zea mays
  Coding DNA Sequence Number=SeqID_10822
MACLGLGGRRKHTLQDNPILQARILTVGGSSSTLGVNYTFGEGLLQESGSSRRLGCSPRGLGQLSPEDISPARGLGRSTPVSVPLTDDPARLRPTKSSFRANSAFVRADTATTGFGSSKSGRGVPLTKQEKPRIARPTKPRDSYTSGIRIPHSSPSHGATHA

SEQ ID NO: 54198 - protein, 98 aa, Zea mays
  Coding DNA Sequence Number=SeqID_10823
  Subcellular localization annotation: CTP_CleavageSite=69; ConfidenceScore=5.60e-01
MQAACNRAKWAHLSDFQHAQHGGPRPRVMQPARRSLRASNCTATRTTAAPPQLRNQYRDSRRPSARPSSASLARRDRERGIPRKGSFSVKETGSEPPY

SEQ ID NO: 54199 - protein, 348 aa, Zea mays
  Coding DNA Sequence Number=SeqID_10824
  Gene Ontology: Mol. function=galactosylgalactosylxylosylprotein 3 -beta-glucuronosyltransferase activity; Cellular component=membrane
  Homolog annotation: Hit_ID=Q50HV9; Match level="QueryCoverage=27%, HitCoverage=21%, E-value=2e-23, Identity=58%"; Hit description =Glycosyltransferase
MRCGGRWRRGRGTVAVRSGELAWGDLVTPPLFDIGTPSPRPLPDSIVGAPRSCPLLHRRFRRPCPFVVSCLLATEPPLVASPTRPRPASVDGWVGRQGRGVPSPRARAGAAISSLTVPPTPTCALPRRILPLYADIDTNKACGLGLGDRIGSRGTSHWCRGGGSEQHSCLWGGDSEAAGLKVQDDEQQQWWRRRRPWFRHGPGVPDVPLGCRDGKSFTYNSSINIAIAVAIDGGLITSVLQDAGKLIAGEIKIKGVELQESCSLSFFSMVGIFIGFIQLFSVDVYKKIVSKNKMLLFHEGVIETETVGTRVKESEAVVVEKEVELIDEPQIQESPPVPALLDDEVDFA

SEQ ID NO: 54200 - protein, 85 aa, Zea mays
  Coding DNA Sequence Number=SeqID_10825
ATGERNLARLASIEQGGAVRLGKDEAVPNFVVLDNEGRMEVGGVGARHCVPVKMTLLTSRAELVVGERGGRQGLGWDGPRWSGRA

SEQ ID NO: 54201 - protein, 93 aa, Zea mays
  Coding DNA Sequence Number=SeqID_10826
MKEWRRRGPTSIHRRLSLDRCPRAVTRGPWKLTLGSPAIRAVSGVRNFSSGFNHRHRPHPTVARVPFAASSGENRTLIITRNQVPLALFNLEF

SEQ ID NO: 54202 - protein, 124 aa, Zea mays
  Coding DNA Sequence Number=SeqID_10827
  Subcellular localization annotation: CTP_CleavageSite=63; ConfidenceScore=5.33e-01
MAYGQFLAAALARPPLLATPFSASMELALARLLQRAWPPRRSCSSTPASLVPAPSHLPHVLCPAAMGALAPALSISATSRALVSRILDSSTTLPQARGLVELPQLAPDHSRTPTSPLVMEQQQL

SEQ ID NO: 54203 - protein, 306 aa, Zea mays
  Coding DNA Sequence Number=SeqID_10828
MARLRHTARKSVIPFLPSRLAERPLHRTVSGQSSHLERLHHRLREEQERRRQHGEQQGSSSSPQQEVETVRPRSSVAQLEAPLVPPRDVPAVGGATGGDPDDDDSAHNTESSEPQEAEGWVARPITRDAARGCHFHDALDTLLRQAFDRHTWSIEYRCVVYQHSRGRYPDRWEATCLVRRPEDDLRGAEAVSEHYSISERDTAEAAMQDAARRALSQYCSLFGGVADGLNLRYYPRRPTGSTESVVVSPVGLEPEIAELRAELAERHHQEGGSPAPVGTQHPYRSPPRGHHTYGSPVCKTRIDLDP

SEQ ID NO: 54204 - protein, 53 aa, Zea mays
  Coding DNA Sequence Number=SeqID_10829
  Subcellular localization annotation: CTP_CleavageSite=16; ConfidenceScore=5.39e-01
MEFHPLPQSLCRLAVSSSSAGSVLPKLRKRRSFDSTATREQASAPAPPRRFPT

SEQ ID NO: 54205 - protein, 91 aa, Zea mays
  Coding DNA Sequence Number=SeqID_10830
MAGEGSVRLTALGETREQPPGSDSASIRGQRRHGEGRGRDWRRKGEPKAREGRDSGGAAKGRGGDGGELQVEESAAVRESAGRRSLGELHA

SEQ ID NO: 54206 - protein, 304 aa, Zea mays
  Coding DNA Sequence Number=SeqID_10831
  Subcellular localization annotation: CTP_CleavageSite=2; ConfidenceScore=5.32e-01
MSSSSLMRRVFPSSKPPDGGYPPPFRLLVGGTQLHGSWYLSAIVRLQGFSSAGPAAPLCRRSPRMVTTSFWVGKSKPGCDLGPTLSFKDVHHPRWGGGHAEPALCLPRGSAGHPFPRRLGVEALAGPTDGADLDSVGLIDGGRRHLQRVGVVGRASGGPSCRRATVAPGRCPTRLGGFEWGSAGGLVSPAIGAEAVADREVLVADGITATTRAPGHRAGVLVLAPRALAGARARSQQRRPTVAVVRMGGGEPSVGLLLLRRPSPWSGVESLGPFGLVVWGSSSLAKETPRPPFDEPRPGVAISV

SEQ ID NO: 54207 - protein, 245 aa, Zea mays
  Coding DNA Sequence Number=SeqID_10832
MFGLHVATRMMVLALAMVMMARLRCTARKSVIPFLPSHLVERPLRRPVTGQSSHLERLHHRLHEEQECRRQELEQQDSSFSLQQEIAPPAPPLSALAARVAAGGDPDNGGGDDSSSHSADLSADQELEGWVARPITRDTARGCHFHDALDTLLRQALDRHTWSIKYRCVVFQHSRGVYPDRWEVTCLMSENRRRGGRRAQQEQAAPQDEAPQQQQLPPPPLMSIKQMFMMQTQVVQAIGQTLADI

SEQ ID NO: 54208 - protein, 112 aa, Zea mays
  Coding DNA Sequence Number=SeqID_10833
MAAIIVVARRRKEYHVVVAVEGHELETPETEQCPGLERLLETTHLELDGKLFINTQQAPTWHANCRRFDPEGSLDRRGAENRRRHGSTRGAIITCLPGRARWDAGLVPRSLS

SEQ ID NO: 54209 - protein, 180 aa, Zea mays
  Coding DNA Sequence Number=SeqID_10834
MVKTKADVAPKLHVGELRLNGGKRNRLKVVGPTETRQQAGTPFAPYDIRRRPATSTAGRKKGKALALTHSTHHEATEDDVLRTCEDDALRTCGPEGQSQPPQGFAPPAGADLTEDGEVLGVSAEEQLQLRALRLKNRNLQRQKEILEAKRQRVSALAKVRQMIHDEEQKAQDLKREIALM

SEQ ID NO: 54210 - protein, 904 aa, Zea mays
  Coding DNA Sequence Number=SeqID_10835
MEVVELVPCARNKWGNWHEFWFYVAEGAVEDHLGLPVSEMCSHFYSAYSPFEVAEEDADEGALRCAAGLSSGRDLVEEFVAYGVWPLAHGWALGEVCPRQMPSHGGKLVRSPFFALDLQSRDPAAFVREAEDGAVRIVGRVFELNRLPYGGYSGQDDVDRRGKKPVVESGDDPTPAAAPSSKKRKLGTAMGGLGVSDGFARELMRTCAAPGGRMTSPELRESSARMLRVTGGWWPRNVPIPRAAGEDFFTSRMVREWKVFPYGRNIAAVVSAVMDKDRQGAAQKRQAVVRLHEARPKRQRGATKAGAPGGGQPPLAAKSAVPASSRAPEAAAAAGGSKSGKVAPASSRVPEAAKAGRGLPPPGKRVADFVTDISVDDYLVGSDEGQLVVVPPAAASTAAAVVPKAKGGALSAGGEMPALTAVRDEAGAVSRRLKEMKEALSQAADFADRAASGALTAVVSAEVERLRTQHADAVQEKSAADSKCRKLADKVSALEGEKTDLRRQLAEERKEANEALAKAQAAQAEANLARVEGGLAREHAEQLEERLRALQSRVERAEAATRTEAERTRKQLMDSYHELGARTAEFEVPDREPGLRCLEWVQEELQALPTIVEGFMSYASLVTCEGAMNALSREGCRHYEVFDQADEDFERDIYKVEDPIVKESAGALYDRMWGPHGREVVRERAETARGQAARGRPGAAPEDRRRRPDAPAAAAAGGDPPSETAEGVPDAPAAAAAGEAPPPPAAPRAEDPVTVAAEATAESPATAGSSQVQDFGPAHATATTNFLAASTVDDGNKSDGSASEFSDFGDSGSSVEWTEESSDEDLDYFAALDVAAAEASPHAADAEDVPGPSTGRRRRRAVAKCRLCALAHSAMLAKCYLLGQVYLLCWTGARVVGVCAGSLV

SEQ ID NO: 54211 - protein, 294 aa, Zea mays
  Coding DNA Sequence Number=SeqID_10836
MEEAVESARRLRTPPTPTASSISAALGGIFLAARGFSSGVLVGDVVHLLLIAAVSTGVLLRSPRPRVAGLWSIFGLPLRLNLALVLGRISDEVAIEDADAKATDGVVDGDLVVAEGSCDLSSLPFQLLAEREFGQGIGVWAVPLEVEQELVPEASPGINGQRRQPGEPGESWAFEGDDERLGHCGVVPSGRCNGDLITHYVLCRVSAAVVLGIGPCPEVGRPRHHLQMWRQGTSLVEVVDPLEWRGVREGVVALGETRVFRLCALLQGWPMLQAEVAFTRVFQLCALLQGWPVL

SEQ ID NO: 54212 - protein, 57 aa, Zea mays
  Coding DNA Sequence Number=SeqID_10837
MGSGTVLALLKLVAEVLDLVLLVTLPLGRGCPHCIQCSGGDAGNMEDFEEFQDYDEF

SEQ ID NO: 54213 - protein, 59 aa, Zea mays
  Coding DNA Sequence Number=SeqID_10838
MDWPLRRSRLRFLARELHRGLSLIRESPWQICPRYGDLWTPNQNLGGFGAIFKVNTEDL

SEQ ID NO: 54214 - protein, 186 aa, Zea mays
  Coding DNA Sequence Number=SeqID_10839
MPSRCPALPCQLRPPLSAPPSPRPPWTSERTLTHVAGILGHVALPTPQLLFEPRPCPHSIPASFHVVPLPLALCSRRQTSPKTRACLSDHLARRRPRQATPSFVPRDQLRMVSVKSFCSLGNYRTRKEIYILRSLPRTVSLTIFSKKKVLKVDAPIINNPFRLNWVNWKLLRPKTLTLLGRVIAAS

SEQ ID NO: 54215 - protein, 29 aa, Zea mays
  Coding DNA Sequence Number=SeqID_10840
MADFDIHGYFIGSFVMPIGYGGRGHDVAI

SEQ ID NO: 54216 - protein, 123 aa, Zea mays
  Coding DNA Sequence Number=SeqID_10841
  Subcellular localization annotation: CTP_CleavageSite=5; ConfidenceScore=5.12e-01
MTVLRANTYAISNRCSILFPYFKLVFTNSVINSFTRDNLRKFEQNIPVATAVFVHAVQISIFANSHAVRHISSFSSSSGLRQQQQLTSTLPPDDAQHQVSVATGTLVWAAAQDRMLIMYSPVN

SEQ ID NO: 54217 - protein, 59 aa, Zea mays
  Coding DNA Sequence Number=SeqID_10842
MHTSTHLVVKGVRMEGFRSSLRLSGCVAAQDSPPTLKGDQRSSTNVTALSYQIRVLDQM

SEQ ID NO: 54218 - protein, 31 aa, Zea mays
  Coding DNA Sequence Number=SeqID_10843
MPAYLGPEYYMSRNSSSRRVMLTALELSYRD

SEQ ID NO: 54219 - protein, 256 aa, Zea mays
  Coding DNA Sequence Number=SeqID_10844
  Homolog annotation: Hit_ID=Q6J9V9; Match level="QueryCoverage=46%, HitCoverage=41%, E-value=2e-52, Identity=83%"; Hit description =Putative uncharacterized protein
  Subcellular localization annotation: CTP_CleavageSite=80; ConfidenceScore=5.04e-01
MMTASKKVRHTVSKYLLSSFPLSLSLFLRRDRERRHFEGVLLSKGNGPRALVLIRGSKVAPCGVRQPPQSTQAPSPLLIRGSKAGPSEGFDSRPRTCRVRDDPGYVRYMAKDRATLLRYPKTFPRPAGTVCNGIPPKGGTKPSDPIKWVRVQRITCRPHKKQQGRPRSNKKSVKDLRGVKPLLRGLVGYTRRDDDTIHPVQTTVPTTRVRLTTILNYDLNKPAMAAENRAWIFCGLEFSAARMGVAESLLFSAAVW

SEQ ID NO: 54220 - protein, 405 aa, Zea mays
  Coding DNA Sequence Number=SeqID_10845
MAAKPVAPGSSKPRKHVADFGTDISVDDYLVGSGEGQHVVVPPAVATTTSVAVVGVKGSAFSAGGEISAVTAVKDEAGTVSRRLREVSQRLSQMCLPKSRDFGRSTLTPSGKSRLRIASAASWRRRWPALEGERTDLRRQMVEERREANQAIAKAQAAKAEAKLARVEGSLASQRAEEWEVQFNALQARMERAEASTRSEVPDREAGLRFLEWLQEELLALPTIVEGFMSFASLVTCEGAMNALSREACSHYEVFDRSDEDFGREIFKVEDSVVKDSAGALFDWMWGPYGREVVRERSDRARDQMVRAEDVEDFGPLNSVQPEAEANSVVVEAEVGPAAPQETSEGSLAAPMSTMSGGGSLPATVPMVEDPPKAATELAAEAPPKAATEPAAEDPVAAAGSSQVA

SEQ ID NO: 54221 - protein, 124 aa, Zea mays
  Coding DNA Sequence Number=SeqID_10846
MAPKRASSKADEAAKAALLAEKKGKALVDTTHQEATEDDALNKRQRNEQPTPEGSLRTCRSGGQPQLPPGFAPPEGADVIEDGEVIGVSAEEQLQLCALRIKNRNLQKQKEILEAKRHRVSAQS

SEQ ID NO: 54222 - protein, 340 aa, Zea mays
  Coding DNA Sequence Number=SeqID_10847
  Gene Ontology: Mol. function=two-component response regulator activity; Cellular component=nucleus; Biological process=two -component signal transduction system (phosphorelay)
  Homolog annotation: Hit_ID=Q9ZQW0; Match level="QueryCoverage=30%, HitCoverage=65%, E-value=3e-38, Identity=84%"; Hit description =Response regulator
  Pfam annotation: Domain name=Response_reg; Domain location=185-298; Score=-7.7; E_value=0.015; Accession=PF00072.15; Description =Response regulator receiver domain
MEGARPWGWGRSWREVAWGPVRAAPNGQPVGHVVRLHAAAGTTRARARGRAPCHRDRGTRGPINKPYAPRRSPRRDERSEPWALFNYRKPRPAVVSPRGRRPTAALHQERATTTLRGRRASGDGAVEADGRRQRTLGSATTTVVPSVSVMATAAAAQASVAPSLAPKANDSRKAVVPVDASELEKHVLAVDDKSVDRVAIARILCGSRYRVTAVESATRALELLMMGLLPDVSMIITDYWMHGMTGYELLKRVKESVALRGIFAVIMSSMTIDSWLSYAWLTHARVQWADRDLVVSGTIIRGTLKTPNSQLKDSAACATPTAVPLDRVRLTGGQALPKAP

SEQ ID NO: 54223 - protein, 343 aa, Zea mays
  Coding DNA Sequence Number=SeqID_10848
  Gene Ontology: Mol. function=DNA-directed RNA polymerase activity; Cellular component=chloroplast; Biological process=transcription
  Homolog annotation: Hit_ID=O82725; Match level="QueryCoverage=64%, HitCoverage=21%, E-value=1e-102, Identity=81%"; Hit description=DNA -directed RNA polymerase
MDNQYPWFLVTGPYKLIRQCEVTAILILYELPRLLTGSILAHEMVHAYLRLTDASSSSSTSSSMKKGAKTEFEKRLGEFFKHQIETDSSVAYGDGFRALHVIPLPERTELEDPDEMQKWKWSLKKAKKTNRELHAERCDSELKLLILWCSLYAIALLELYLFLFCKHVARKLREKDGFYYPHNLDFRGRAYPMHPHLSHLGSDLCRGVLEYAEGRPLGKYGLCWLKIHLANKYGGGIEKLSHEGKLAFVENQLFDIFDSASNPVDGNCWWTNVEDPFQCLAACMDLSDALRSPSPYHAVSHLPIHQDGSCNGLQHYAALGRDYFYTIDCIVYRVKFEIGDEDE

SEQ ID NO: 54224 - protein, 110 aa, Zea mays
  Coding DNA Sequence Number=SeqID_10849
MAKALLIWPLKDTVRGETFTNQARNAQRPRSACYNGPDHTWASVLDEAAIWDDLVTDLRPATRGTKGKSASRLVSVGAARLAKASSEGWRLRLRPNSTTGQCPVHQGDQL

SEQ ID NO: 54225 - protein, 232 aa, Zea mays
  Coding DNA Sequence Number=SeqID_10850
MVTSSLMVGESEPGCGLCPSLSLKDFHHQGWGGDCSVPGFRTRVASEPLAAPASATAAGRGSSAGAIAKAGHGPTSNSTSFCPSLPYEFWHGRGPPGSSTRPEVGAAAVRPPGAEVVVVAAAGAGGGAPFVGLPLLRRPSPMEWGCSYLRRGNRSSVCNGTLNASVFVHCGCRGLNMGNRPSRLLGPDSQRSPWTASSSEAGSDLTEGVVDAEGATAPFQREDPSLQDQIVL

SEQ ID NO: 54226 - protein, 146 aa, Zea mays
  Coding DNA Sequence Number=SeqID_10851
MHEYIRADNEFRQRREEAYMCSEMTRGFRGGFIRGMSGQFTIPVKVKTEAIIVKGTNTVPSQVKIKNLENNVELQMYLRLEGDKSTSVTQKRMPNQREQYGEILLNPVFEDLRKPKAPNSLHRSESLAVIHKFMGAKTPMNNKREE

SEQ ID NO: 54227 - protein, 592 aa, Zea mays
  Coding DNA Sequence Number=SeqID_10852
  Gene Ontology: Mol. function=oxidoreductase activity, acting on paired donors, with incorporation or reduction of molecular oxygen; Cellular component=chloroplast; Biological process=carotenoid biosynthetic process
  Homolog annotation: Hit_ID=Q8LJ81; Match level="QueryCoverage=99%, HitCoverage=99%, E-value=0.0, Identity=81%"; Hit description =Putative lycopene epsilon-cyclase
  Pfam annotation: Domain name=DAO; Domain location=172-457; Score= -3.2; E_value=1.8e-05; Accession=PF01266.15; Description=FAD dependent oxidoreductase
  Pfam annotation: Domain name=HI0933_like; Domain location=171-457; Score=-262.8; E_value=0.015; Accession=PF03486.5; Description=HI0933- like protein
  Pfam annotation: Domain name=Lycopene_cycl; Domain location=172-570; Score=771.1; E_value=6.8e-229; Accession=PF05834.3; Description =Lycopene cyclase protein
  Pfam annotation: Domain name=Pyr_redox_2; Domain location=172-459; Score=-43.8; E_value=0.04; Accession=PF07992.5; Description=Pyridine nucleotide-disulphide oxidore
  Pfam module annotation: Pfam domain module=DAO::HI0933_like::Lycopene_ cycl::Pyr_redox_2; Domain location=172-457::171-457::172-570::172-459
MGLSGATISAPLGCCVLRCGAVGGGKALKADAERWRRAGWSRRVGGPKVRCVATEKHDETAAVGAAVGVDFADEEDYRKGGGGELLYVQMQSTKPMESQSKIASKVSPPFIVLVFGDLFTGWNPEHHAPTEYYLFRRTSPALATATRMFTGKQGDRLAGELSPISDENTVLDLVIIGCGPAGLSLASESAKKGLTVGLIGPDLPFTNNYGVWEDEFKDLGLESCIEHVWKDTIVYLDNNKPILIGRSYGRVHRDLLHEELLKRCYEAGVTYLNSKVDKIIESPDGHRVVCCDKGREIICRLAIVASGAASGRLLEYEVGGPRVCVQTAYGVEVEVENNPYDPSLMVFMDYRDCFKEEFSHTEQENPTFLYAMPMSPTRVFFEETCLASKDAMSFDLLKKRLMYRLNAMGIRILKVYEEEWSYIPVGGSLPNTDQKNLAFGAAASMVHPATGYSVVRSLSEAPRYASVISDILGNRVPAEYMLGNSQNYSPSMLAWRTLWPQERKRQRSFFLFGLALIIQLNNEGIQTFFEAFFRVPRWMWRGFLGSTLSSVDLILFSFYMFAIAPNQLRMNLVRHLLSDPTGSSMIKTYLTL

SEQ ID NO: 54228 - protein, 210 aa, Zea mays
  Coding DNA Sequence Number=SeqID_10853
MGPFCHSHLSPFFAILVRSASTTRAPCVDSFLASRELGHDPDSEGSVDKSRAHALFLPYPLFSPISPRHQNATASRVRGFSPPSSTGRFLSDWTEVWGAGAPPGPVGHGWNLAWAHRAADDLEFLVVAASSPCAADRAERHSIPGKNLTNAFAMLSYSFSSVLSEGRELGALMAECRRWRRRVESPRRPELGDAAELMRGAVDLLSDGRD

SEQ ID NO: 54229 - protein, 167 aa, Zea mays
  Coding DNA Sequence Number=SeqID_10854
MSHLMALLEATKITLDNQEELVVDLSTEMVEKDLQVEQLSNEIQELEELVGTRENTIEMAGRARHGQNERVPPPPPPPPTLQELMAQQNEILRQLAQRQPPPQHYGGGDHQRHPVAATYQEFLSTQCHTRVSGHQDPGMNIITRCAGTKSHTYDESWHRIECHIFTT

SEQ ID NO: 54230 - protein, 97 aa, Zea mays
  Coding DNA Sequence Number=SeqID_10855
MTVIPAHKNSWPNNPRVVGIGNDHEVSLFGDGQREVELAVAKLLLIVDERRQRERLVLVVFVRDCNAEVTLLGATDLGAEGMHACAALRLAYFLFTL

SEQ ID NO: 54231 - protein, 94 aa, Zea mays
  Coding DNA Sequence Number=SeqID_10856
MEGEMHGVGEVRGDRGVLGMAPMEERDRRAVAREAAEDSGMALFIAVNGGHWEMAGHGEAMSDAERGLPGKYTDIRVGYGYTNFGYPFFIFRII

SEQ ID NO: 54232 - protein, 148 aa, Zea mays
  Coding DNA Sequence Number=SeqID_10857
MAPGVAGLGLLGSVAAARMRGCAGLGAGRGWAQELCRWVPEHGRRGGRVGEGSEGRSGWRLHGRGASRWLVVVQESGHRGFGCGLERVMAGCLALLAVSRLLGGPQLPARCARGEAERQGGGEREWLVPAGFGGARGGGYREGAGRAV

SEQ ID NO: 54233 - protein, 21 aa, Zea mays
  Coding DNA Sequence Number=SeqID_10858
MGSTSEKNYLYQVVPKQEEEN

SEQ ID NO: 54234 - protein, 144 aa, Zea mays
  Coding DNA Sequence Number=SeqID_10859
MCLFIRSDVDVHLPKQLFGGGWRFLEYSSDEGRVIGSPERSNGLVVPAPDGFEVPWLHWLVGEGLDICDETMTEDVDAVSGKMSETLQRVLPQDNGQVRRHDILRRPSGSGGSRVDSQPAAWVLLRLVLVDIGDLEDGRPLDGS

SEQ ID NO: 54235 - protein, 196 aa, Zea mays
  Coding DNA Sequence Number=SeqID_10860
MACTLHGKRVDDGVIVLSVGMNPMSLWLEDASSPEGGLVRFMYELCKGSTFLLLYVHKLNPRKVRLVFNDGAQERLEETKVQAEQDVGLEHQVVELQAQHQAYQNRIKELEHQLTNAHSKSKVLIQQQEDTHSYDVTVREELSETIGVLSHQDQVLEELHRTCPIEFQTVQCLINHLQQTVHMLHIACYSTPTPVD

SEQ ID NO: 54236 - protein, 304 aa, Zea mays
  Coding DNA Sequence Number=SeqID_10861
  Homolog annotation: Hit_ID=Q6J9V9; Match level="QueryCoverage=33%, HitCoverage=36%, E-value=2e-27, Identity=62%"; Hit description =Putative uncharacterized protein
MASDMAMRSASFCSAAWASVLQLLTDSLRAVSNPEDSRTIFFRHAEKNEAKTKAEGKRKWQGGRAPFHLRHDDCLKKGAPHCFEISPFFLFSLFLSLQKDRERGHFEGARRSKRNGPQALLLIRSSKVAPCRVRQPPQSTRALSPLLIRGSEAGPSEGFDSRPRTCRVRDDRRYIRYMAKARAMLPRYPKTFSRPAGMVCNGIPPKGGKQHYSPCSDYCANHQGKTNDRKSRPPPSSASGATGSSASPDPRPRPWPREKVSASPDLRPRPQPQPQKESQPRPTSSSASGEVTASPDLDLGPIMP

SEQ ID NO: 54237 - protein, 122 aa, Zea mays
  Coding DNA Sequence Number=SeqID_10862
MAVGKNPALELPINCSGRGGGIDLPPNQHTRRIYRQPQPQPAEMNPPNPPPGGVDPLVAAQMAVMQQMADTMADMRAQMQQERQEMRQEREDIRQELRQERDEIRQERRAQQQQLQQQLQQQ

SEQ ID NO: 54238 - protein, 312 aa, Zea mays
  Coding DNA Sequence Number=SeqID_10863
  Subcellular localization annotation: CTP_CleavageSite=37; ConfidenceScore=5.50e-01
MPANGSSPHQHTSAGNVTDDPPTATAAPSASAPSPPSAAAEGVPVASAPNAQGDAGAEVAPSDPQDLPVAVEATPSSSQVPAGGPEVVASPTAVADPTTAIPSDAPPVETEVAIRREWKALETEHQCLGDWCSQLERRTKAASYQFSLERVELEQEPEDFKEDIQKVSDREEEVTRKERSLDNKKKHLDQKEEAITALHDKLKAYNAVLEKQRDKQAAAKAKLQKLQQELTDKANDIACVEGNLKAREASLAKRTTDLTWQEDLAFREEMWARRNKLLDELELEAEEKVKRLEGKVRTLEEQVRQFQAAQAT

SEQ ID NO: 54239 - protein, 274 aa, Zea mays
  Coding DNA Sequence Number=SeqID_10864
  Gene Ontology: Mol. function=protein serine/threonine kinase activity; Biological process=protein amino acid phosphorylation
  Homolog annotation: Hit_ID=Q8H334; Match level="QueryCoverage=40%, HitCoverage=18%, E-value=1e-17, Identity=42%"; Hit description =Putative uncharacterized protein OSJNBa0077M12.113
  Subcellular localization annotation: CTP_CleavageSite=85; ConfidenceScore=5.02e-01
MEVCDLRKVWEIHELKTKLDAAGAQTTLGLCSSLRLLSSCATPPRATSSSTPRGLGFYSVRRSISFHADALALNKLATLLSSSVTAGGAGGNREQTRARHPRVASCRNRPRPWPRSWLPTNVLGTVGDLITSGAFRHVYLGMDLESSEILVVKQRYIGMTWEENTLNILLEFVPGGSIQSLLGRLGSFPEAVVKLFLVSERYDTDLNSLKLSGISPMSLFLQAGVDSNLTRERVVPQADYPQKWTTLQGIGQLTIQPIGGQDGQRVQVIGIPVK

SEQ ID NO: 54240 - protein, 162 aa, Zea mays
  Coding DNA Sequence Number=SeqID_10865
  Subcellular localization annotation: CTP_CleavageSite=68; ConfidenceScore=5.63e-01
MESCPRLSQRSRVFSKEIHASLPARLRLSSSLRSPGPSGGTRTSPSACLRLSFVRRSPGGAVLTEGVRSGADASCQRQDDRGLGLTEPVCTMPRRRSMSSCHCLIAPGEAVGLGKWRNNSLAAESAPTGYPLTESRTPALACAAVQGAWLQCQASDGQSSVA

SEQ ID NO: 54241 - protein, 58 aa, Zea mays
  Coding DNA Sequence Number=SeqID_10866
MGRLEPWAEWESRLVGKVCNLCRVLETGCPHCSQCLGGEVGNMDDFEEFQEYDDFQFT

SEQ ID NO: 54242 - protein, 259 aa, Zea mays
  Coding DNA Sequence Number=SeqID_10867
MPPTPPHGIPATGGDPGGDGDDDNVGGSSSHGTERSEEPEPKGWIARPITRDTARGCHFPDALDTLLRRAFDRHTWSIEYRCVVYQHRHGLYPDQWEATCLVHRPDDDLQGVEAFSEHYSITKRDTAEAAMQDAARRALSQYCSLFSGVADGLDLKYYPRSSTGSAGGVIVSLVSEGNPRLSSMVNLAVVLNIELDHALDELGKVRAEVAELRAECAACHYLDGGSPAPVGIQHPYHSPSRGRFDYGTPNYRTCIDLDP

SEQ ID NO: 54243 - protein, 86 aa, Zea mays
  Coding DNA Sequence Number=SeqID_10868
MAGNAGAGLRRRLAAWASTREGEAARNEVRGVHGALAGLYEGSWAHGRASWPRNPATCASAHALVHGERGGRGTNRFFQIQIQTRF

SEQ ID NO: 54244 - protein, 432 aa, Zea mays
  Coding DNA Sequence Number=SeqID_10869
  Homolog annotation: Hit_ID=Q2QYT4; Match level="QueryCoverage=23%, HitCoverage=39%, E-value=1e-23, Identity=61%"; Hit description =Expressed protein
  Subcellular localization annotation: CTP_CleavageSite=70; ConfidenceScore=5.53e-01
MAASSTSAPTMPAMVTPLPGYGYQGSAAGAGAGGEPLYSSSGSSSMGTFFGVLVAVVVLTLLSCVFGRVCAGHAEGPDERYDCTRLAPRWWCGWRRAPRRTAVKREAKAPPVLELEAPAASPPPGEPSASAAASIHGAAASINQQRALRNPAPLSAVEDAILAVASVIRAPTRRQPSAIPSTRRAPSVPLHRRPTSNHLFLRSPRPPNPSNHCPPLFVVLQTPMPPPSPQRCCSLPNDVALLSSLNPIPYGCGWGRERSKRIRVMQMGSMEFVAPALEELLPELSLEEQPRLQNQSRERDRTRKRHTKHSPPPRPSLISVRYVMEMGSMGMDFVAPALEELLPDLSREEQLRLQNKARGHDRILKPHNKHTPRPRPSSFSEWDQCNFFKIPKVLQALAHYNARHPGGEFDDVKPLKQSRVGFRGQAWFHINF

SEQ ID NO: 54245 - protein, 589 aa, Zea mays
  Coding DNA Sequence Number=SeqID_10870
  Homolog annotation: Hit_ID=A3AAL4; Match level="QueryCoverage=31%, HitCoverage=61%, E-value=9e-84, Identity=86%"; Hit description =Putative uncharacterized protein
  Pfam annotation: Domain name=DUF617; Domain location=327-497; Score =319.9; E_value=4.5e-93; Accession=PF04759.4; Description=Protein of unknown function, DUF617
  Subcellular localization annotation: CTP_CleavageSite=45; ConfidenceScore=5.70e-01
MRGLLRSPSGTAKRRTPHVASATALFHSEATRSSSLVSRHTGTARAGSGRASCPLPPACGLPPRAAPASLFRFTQPGRRQPLSHTLVHAYAAMLRCGAGPGPGPGPALPSRIRISDRADQCIYADTGRTPGVPSGPAPARPLCQKRSSRAAHAPAPNLPQVPSQALKSVSALGLRLRHQILPPRARALALGTYHYCHHAPRSRTLRPIERAYPTPTMARAFRAASPLPLPSSRSAAAAATSGGGRGNFPWLTKKQGSSSSSKPSPSGGGQESKGDEHEGASAAGSVEQSPSPSPSPSRRRADALARLRALFLAAITHRRRRRQLGSCVTGTIFGRRRGRVHVALQTDPRSPPVLLVEMAAYSTGALVREMSSGLVRLALECEKPPLAAGEKRRGLLEEPTWRAYCNGRKCGFAVRRDCGADEWRVLGAVEPVSVGAGVLPDDDVAGSVSGSGAAEGDLMYMRARFERVVGSRDSEAFYMMNPDGSGGPELSIYLLRLVVNNSPAGASNASASGMKKKKVQRMVGRQEAARMIGVRTFWRELYCVDKYGTQCHQYSEEEEEEEKKLLLQACARASPWIKDRLGMCSTVTF

SEQ ID NO: 54246 - protein, 102 aa, Zea mays
  Coding DNA Sequence Number=SeqID_10871
MWPEKTIHSKIPTVGPDPHGKVPDPCTCRPNLRSKVQDPRGVQAILQAACLSIPLPNSTPVLRSALCPSIITHTLPGKLPLHANTTQIADIRAQGDCFNEEH

SEQ ID NO: 54247 - protein, 242 aa, Zea mays
  Coding DNA Sequence Number=SeqID_10872
  Gene Ontology: Mol. function=hydrogen ion transporting ATP synthase activity, rotational mechanism; Cellular component=proton -transporting two-sector ATPase complex; Biological process=ATP synthesis coupled proton transport
  Homolog annotation: Hit_ID=A2YFL3; Match level="QueryCoverage=98%, HitCoverage=99%, E-value=5e-89, Identity=74%"; Hit description =Putative uncharacterized protein
  Pfam annotation: Domain name=OSCP; Domain location=56-236; Score =172.1; E_value=1.5e-48; Accession=PF00213.9; Description=ATP synthase delta (OSCP) subunit
MAAARHLRSGLPLLRAHLASSESAAVAQVSRGFASQAAKPTGKEIKVPKALFGGTGNYASALFLTAAKSNALDKVESEIKAIVEASKKSPLFSQFIKDLSVPKATRVKAIAEIFADAGFSDVTKNFLVPNFVLVYEAVLADNGRLKYIERIAERFVDLTMEHKGEMKVVVRTVISLTKEEEKELKETLQDILGENKTILVEQKIDYSIMGGLVIEFGQKVLDISIRNRAKQMEAFLRQPLDF

SEQ ID NO: 54248 - protein, 475 aa, Zea mays
  Coding DNA Sequence Number=SeqID_10873
MGPMGVLLTLPSRRCVQVQVPVEAASWGSLPTLLGMTYSTSVGSRWERATATSTAYDILYDPPGGVFSSQASGHHWRRHQSHQSQRDGARKMEPQLSSLPAFTRLTPPLVPRNATGSLPQCTLVYPTYDTGARPHKSYSWCAGLRVRRRRTAMQGPHVMHLACRFLGAEKVNRHARSESPRLFIPAESSGLAPNTGARAHKSSSLGIGLRVRRRQTAAPLRLRRKQRPSLWHEGLGPRVILFGRRPPYAEKANRRVKSTPPPAVVRLFTSVETNSPVSDAGAWAHESSSLGAEDREGEFSKPNAAVSRHPAHGLVKPSSAETTGQSAAGTGVAVDVTEDRLAVNTTASARKQHANRRSSFGPTCRLVSSPEVGPGATVGILNQGVTMWPEKMIHSKIPTVGPDPHGKVSDPCTCRPDLRSKVQDPRECNPDPSAWSPDYPQLGLGTLGQRIPRPCSGRGPVPTCVQAQPGADLSA

SEQ ID NO: 54249 - protein, 74 aa, Zea mays
  Coding DNA Sequence Number=SeqID_10874
MAHRTVRCATGAPTVRHRGLDAFTKDRGRKASRYQVHGRRSRRLRNPKPRVKKKACKVKGDRVENSYDTSRITI

SEQ ID NO: 54250 - protein, 147 aa, Zea mays
  Coding DNA Sequence Number=SeqID_10875
MPHGMFEVSTVPQGVAHVLLVRTLEVEDFIQCSHSSAGCASSPSSRRPGGVHLLARPFLPTLVQLLVHVQPWHRWRKYRASDEVLGSLIRGDVDVCLPEQLFRGGWRLLGYGSDEGRVIGSSIEDFNYSRLSDFGDVVLHYLKPFEE

SEQ ID NO: 54251 - protein, 66 aa, Zea mays
  Coding DNA Sequence Number=SeqID_10876
MAHRTVRCATGAPTVRHRCANGAPTALSGFCDWEGSAVDQPGPTRQRVHRTVRCTPDSPVPQSQKP

SEQ ID NO: 54252 - protein, 360 aa, Zea mays
  Coding DNA Sequence Number=SeqID_10877
MAPKQASSKADEAAKAALLAAKKGKALALTHSTHQEATEDDVPAPAKTTLTAPAALKDSRNLPQASLHQRARTSPRMAKSSVSPQKNSYSCALCASRTAISRSRKRYLRPSANVYLHKPSVENGVVLEDSSEEFLPTPTLLSESLAFAVGASSLATPAPAVQAPSPGGDDPDDSNDDDEDDKDEEEEEDNNNEEANEEQEDNFMGIWHVTEHYTSMFETGHFPNLLQDVLHVLGTYVRPLYETRRVSESPQACYYITCFHIRVMDVGGRGFRTLSAHESMVPLSTYTASVINAARRALRSLSHTYREDRLNTLVGVVAGLNTDLDSATLDLSRRVLLTKVRLLPKLDRLTLKRVMLMKKR

SEQ ID NO: 54253 - protein, 203 aa, Zea mays
  Coding DNA Sequence Number=SeqID_10878
MVDDSSWPSVAAGARTHGRKGGRGGRETPCPGGRGGAGEAAPAVPVTVGGPGGRGGGATAAGVPDNPALTAPVALAQGRRGGFDQRSRSRRGAAAQGGFGRARAAAQGRRAQGRLWSRAGAVSVEAWAAWPPGRLRRRLDGDETERRTRVLGSLRKARHKPNGNGQMGLTLGPSRGQVRLRLGRLPLSRPWSGGSHFGPFRAC

SEQ ID NO: 54254 - protein, 188 aa, Zea mays
  Coding DNA Sequence Number=SeqID_10879
  Subcellular localization annotation: CTP_CleavageSite=62; ConfidenceScore=5.45e-01
MEPRRRPSPLLPPSSLEPRSTPACRPRHNVVVPPSRRPRQRGAPSPDRHRLACSSRAPLGLLAGQSSPPMHRHRRVCMSAIVLFVSLQVSETSLYREDTRPSGSTSAIGSLSPLEPQMNVLITLYHGGNVEKNVYGNLSFDGMKKSPPFPLPLVLSSRLPPSNSYAQHASGCHNPAIPRTYASPVCDL

SEQ ID NO: 54255 - protein, 230 aa, Zea mays
  Coding DNA Sequence Number=SeqID_10880
  Gene Ontology: Mol. function=unfolded protein binding; Cellular component=chloroplast; Biological process=response to stress
  Homolog annotation: Hit_ID=Q2QV45; Match level="QueryCoverage=68%, HitCoverage=22%, E-value=6e-65, Identity=83%"; Hit description =Stromal 70 kDa heat shock-related protein, chloroplast, putative, expressed
  Subcellular localization annotation: CTP_CleavageSite=81; ConfidenceScore=5.75e-01
MASFTCSQVGAAAAGGASPFLGYRRRSGPGGAIPSSSLFVGRRLAAVQMRAPSRGVRGGSALRVTCEKVVGIDLGTTNSAVAAMEGGKPTVVTNAEGARTTPSVVAYTKTGERLVGQIAKRQAVVNPENTFFSVKRFIGRKMSEVDDEAKQVSYGVVKDDNGNVKLDCPAIGKQFAAEEISAQRIAPGPGKSFVKVHQIQMDAFCNASGYIAFELRSWSFVFLCPYDLGE

SEQ ID NO: 54256 - protein, 228 aa, Zea mays
  Coding DNA Sequence Number=SeqID_10881
  Gene Ontology: Mol. function=unfolded protein binding; Cellular component=chloroplast; Biological process=response to stress
  Homolog annotation: Hit_ID=Q2QV45; Match level="QueryCoverage=92%, HitCoverage=30%, E-value=1e-104, Identity=91%"; Hit description =Stromal 70 kDa heat shock-related protein, chloroplast, putative, expressed
  Pfam annotation: Domain name=HSP70; Domain location=1-228; Score= -32.6; E_value=8.7e-13; Accession=PF00012.11; Description=Hsp70 protein
RFDNEPTAASLAYGFEKKNNETILVFDLGGGTFDVSVLEVGDGVFEVLSTSGDTHLGGDDFDKRIVDWLASNFKKDEGIDLLKDKQALQRLTEASEKAKMELSTLTQANISLPFITATADGPKHIEATLSRAKFEELCSDLIDRLKTPVNNALRDAKLSVSDLDEVILVGGSTRIPAVQELVRKLTDKDPNVTVNPDEVVSLGAAVQSIILTWRAPTTTTKPFSPKQD

SEQ ID NO: 54257 - protein, 213 aa, Zea mays
  Coding DNA Sequence Number=SeqID_10882
MGTYSWLRYLTQGVTTIGFRNLSGLLRIKLVVKKVPVDLPHNRVENVVILEDSSEEQLPTPTPLVESLAFGTRSSTSAPPAPAIQAPAPGGNDPDDSRDDDDEDDDDDEGGDEHVNEEADYAQQDYFMGFGPVVEHYTSMFEMGHFPNLLQDVLHALGTYVRPLTLSAHESLTPLSTYAASVSDAARRTLWSLSHMLGPCFVAEGPAGRNSFG

SEQ ID NO: 54258 - protein, 94 aa, Zea mays
  Coding DNA Sequence Number=SeqID_10883
MVLRSRAQSLGGDLLGRLSSEHLILDWHTSPSEALMRSFSRGGPPSFDLVSTGKVVIELQTGYPDPLLGAIANGAEVTQLGAIGYGAEIFRLCR

SEQ ID NO: 54259 - protein, 34 aa, Zea mays
  Coding DNA Sequence Number=SeqID_10884
MGQVDAWVIQPFDLETVSQVVKLTSFVEMLQTNF

SEQ ID NO: 54260 - protein, 95 aa, Zea mays
  Coding DNA Sequence Number=SeqID_10885
  Subcellular localization annotation: CTP_CleavageSite=26; ConfidenceScore=5.27e-01
MAEAWAMLPRVKLTTVSHDLPRVQPRAQQGALPRPTLGLGLSLGLGLGRRSPPRPTPSLGLSLGLGRSHNLARPQPRPREKVSASPDLGLGPTTP

SEQ ID NO: 54261 - protein, 137 aa, Zea mays
  Coding DNA Sequence Number=SeqID_10886
MTVAGGREQRSRLRPGSRPIRGQQENPLSRREDRAPVIRSSNGSRTRNGRPANHSPRRINSAGPGKGDTPERILPCEGTGLRAPLLIRGSKAGPPRGSTTASDRVGPYTHYWSEVRRPAPRRAPRAASGYSGLRAHY

SEQ ID NO: 54262 - protein, 121 aa, Zea mays
  Coding DNA Sequence Number=SeqID_10887
MNKNTGVQSAITNGTPVPPPQVRTAPLHGGRPAEQHKTDERLAAARSDYDDNHPRPGRRSSFGSGFGAGVTTGGLSPAEDESQPFRPGDRDPGLLAELAISPVEKPSPAADASKRAGRSSP

SEQ ID NO: 54263 - protein, 305 aa, Zea mays
  Coding DNA Sequence Number=SeqID_10888
  Homolog annotation: Hit_ID=Q6J9V9; Match level="QueryCoverage=40%, HitCoverage=45%, E-value=2e-47, Identity=73%"; Hit description =Putative uncharacterized protein
MEARAHMSCNRRTGYHVQRNRTATCANVASSRDYRTSATTRGSPAHDPTVPIKCDGHRDREKGHFEGALRSKRNGPRALLLIRGSKVAPRGVRRPPQSTQASSPLLIRGSKAGPSKGFDSCLRTCRVRDDPEYVRYMAKARATLPRYPKTFPRPPGTVCNGIPPKGGTKPSDPIEWVRVQQITCLGLSLGLGRRSPPRPTLGLGLSLGLGRSHNLARPQPRPQEKSLPRPTSASDRLRYRGYIITLPLASRLGLRRNKTGVTSRLLRQQGRTASYDSTGLKHFSAGHDSTQLHPHMYSWITSLYL

SEQ ID NO: 54264 - protein, 581 aa, Zea mays
  Coding DNA Sequence Number=SeqID_10889
MQPRKAGPLAKKCDESLQASANTPFEARGLLSGTIIRGTLKAPNSQLKDSAACAASTAVPLDRVRLTGSQVLQKAPQETPLRPTQGSDSGSAPEDGELRSARPRARTRAQHRKTANSTPPDPGLGLGLSPGRRRTPLRPIQGSDSGSASEDGELRSARPRARTRAKSRKTTTTSASPDQGLGLGLGHGRQTRPQLRRSFHLAQPRAQTSHGPLRKGWPRGDEDETGALLGPLASLSRVDACNPLLQAHPTRAQDEHEGRGIPTSLTPVSGRLASPPFALALALDPSGLGHAATLTRRPEGPPRSRNADNIDRGILKMTRETSNGKADRAKGLLSLRDTDTLLITFRERNELPPHQKGCKITNSKRLTGDHCTSSDNDLRLGRLDNSSDCPRANATVKRPSPPSPHGGREQAIKAKKLEVWPQVALTVSLAEATTSAVGSLTYGGHHLSTDDNGHLRTDAAPANGGRPSAHKEVLAPVLATGARTRPSRNADTAPAEYDVLYDPPVWPATRDGPWTWPTCARRDRRPCGGRTATPRPGSRWQFASSARLVNALLPRMLEEEAGRQPMGRQDPNSACPSPQHG

SEQ ID NO: 54265 - protein, 865 aa, Zea mays
  Coding DNA Sequence Number=SeqID_10890
  Gene Ontology: Mol. function=1-phosphatidylinositol-4-phosphate 5 -kinase activity; Cellular component=plasma membrane; Biological process=phosphatidylinositol metabolic process
  Homolog annotation: Hit_ID=A2XB57; Match level="QueryCoverage=76%, HitCoverage=100%, E-value=1e-178, Identity=80%"; Hit description =Putative uncharacterized protein
  Pfam annotation: Domain name=MORN; Domain location=271-293; Score =22.5; E_value=0.0016; Accession=PF02493.11; Description=MORN repeat
  Pfam annotation: Domain name=MORN; Domain location=294-316; Score =36.0; E_value=1.3e-07; Accession=PF02493.11; Description=MORN repeat
  Pfam annotation: Domain name=MORN; Domain location=317-339; Score =12.5; E_value=0.3; Accession=PF02493.11; Description=MORN repeat
  Pfam annotation: Domain name=MORN; Domain location=340-362; Score =27.0; E_value=6.8e-05; Accession=PF02493.11; Description=MORN repeat
  Pfam annotation: Domain name=MORN; Domain location=363-385; Score =36.0; E_value=1.4e-07; Accession=PF02493.11; Description=MORN repeat
  Pfam annotation: Domain name=MORN; Domain location=386-408; Score =33.2; E_value=9.3e-07; Accession=PF02493.11; Description=MORN repeat
  Pfam annotation: Domain name=MORN; Domain location=409-431; Score =25.9; E_value=0.00015; Accession=PF02493.11; Description=MORN repeat
  Pfam annotation: Domain name=MORN; Domain location=432-453; Score =28.3; E_value=2.8e-05; Accession=PF02493.11; Description=MORN repeat
  Pfam annotation: Domain name=PIP5K; Domain location=577-861; Score =164.6; E_value=2.6e-46; Accession=PF01504.9; Description =Phosphatidylinositol-4-phosphate 5-Kinase
  Pfam module annotation: Pfam domain module=MORN::MORN::MORN::MORN::MOR N::MORN::MORN::MORN::PIP5K; Domain location=271-293::294-316::317 -339::340-362::363-385::386-408::409-431::432-453::577-861
  Subcellular localization annotation: CTP_CleavageSite=59; ConfidenceScore=5.21e-01
MALRAAFGAAAAVVAGGVGGGGGEQPSRSRAAVVVDSSSGARPLGVGGDWGRFAEALVSSSRAGEFAPPHRRECAASSLPPCREPAPPSVAAWLSGWNAGCCRWKLDRAPELKDGKISKSPAASTRGLQNQQQPAGSSSARQTRPGLPSARPPIKDQQHTGTPPVSFIPSLHCAAPDARDPLHLLRRIPFLPGKLPSDPLFRGLCMTAPVSLPNELEAVSHSARVELFRDASCNIENEVLASLGNGQDSTAVGATPGFRVGEIRFANGDIYSGTLLGNTPEGSGQYRWSDGCTYDGEWNKGMRHGQGKTEWPSGATYEGEYSGGYVYGEGTYKGPDKIIYKGRWKLNHKHGLGHQTYPNGDMFEGSWIQGEIVGHGKYTWANGDTYVGNMKSGKMSGKGTLTWKNGDSYEGNWIDGMMHGYGIYTWNECGYYIGTWTRGLKDGKGKFFPKGCRVPVNDEMYINNLRNRGVLPDIRRQNHGSRILHSSSVDMGNMKVGMARQSSDVLFKRNSAEQSSLKNVSLERRWSLEVAIEKFIGHESSESSGLESLENLSDSRLPILEREYMQGVLISEVVLDRSFSDSSKKTKRRQKKTVRDTKKPGETIIKGHRSYDLMLSLQLGIRIHRRFDLKGSSLGRSTDKIEIDENTTLKDLDLNYSFYLEPSWREALLKQIETDSDFLRTQRIMDYSLLLGVHYRAPQHLRTRASYHRSMAADRLTVVSEEDAQEDDALSHPEGLVLVQSSGENSVIVGPHIRGSRLRASAAGFGEVDLLLPGTARLQIQLGVNMPARAEQTPKEDESKPFREVYDVVLYLGIIDILQEYNMTKKIEHAVKSMQYDSVSISAVDPQFYSERFLNFIQTVFPENS

SEQ ID NO: 54266 - protein, 43 aa, Zea mays
  Coding DNA Sequence Number=SeqID_10891
  Homolog annotation: Hit_ID=A2XBR4; Match level="QueryCoverage=88%, HitCoverage=15%, E-value=7e-09, Identity=65%"; Hit description =Putative uncharacterized protein
MGSCSVCWYFTDSWEQFRISGSIDVIDASTTDPAKLQVCCPQA

SEQ ID NO: 54267 - protein, 208 aa, Zea mays
  Coding DNA Sequence Number=SeqID_10892
  Subcellular localization annotation: CTP_CleavageSite=16; ConfidenceScore=5.16e-01
MANGPKTDFRPRPRKRARGRARDPPVVPPRETWKFGTPRSPGRGYGPQVSSAEPRTPSRPSRGRSAPYRAQLRLALLAAWPAVKCLRAATRPTGSRARYTLPSSSSPPGVRLVGSRAPAAFASCRRRPMAGGTEDTSLALLVSDVAHAEGRRRVGVTRPRIGPPERTTASPARRLRAEAGAGPSARTCYLVDPASSHMLVSKIKPCMC

SEQ ID NO: 54268 - protein, 305 aa, Zea mays
  Coding DNA Sequence Number=SeqID_10893
MNSRLPETEHRPELERLLETTHLELDGKLFVNTQQAPTWRANYRRFDPGGSLDRRVNCRRVPQPRWVGARRSAKGGDRRKRGNPWPSCLSRAQVRRKERVQGNDGTSCDVVGPSPGLGEAEAPPRSRSSLSSEVEVESEPLGRASGVRRLPGLSPSPSPGVGRGGVRRLPGPSPSPSPGVGRGGVRRLPGLSPSPSPRVGRGGVRRLQGLSPSPSPRIGRCGVSYGARGRTWLLPASLCRVAQQSERRRRRCPLVRPAILAFNAPAIRSVVVATWPRLLLGEDWASGEPKLCADGGYQLRLGVLR

SEQ ID NO: 54269 - protein, 527 aa, Zea mays
  Coding DNA Sequence Number=SeqID_10894
MNSHRHSRCQYKRNPGSVPAGGADDLDGGEAFSSCHHVSTDGGVRLSTNAALASAGRSKAHRQDASSAELEDGLHHQKLEEEVASRPVREVEPRLTSLSAPARMMKILEAEGGTKIAARLASPHPGAGGHRLGHRGLSLLQHAPRSSPYYTGAGPHASCKLARGRRSQTATRAVRATARQLRAILHFRPDQRVKGRTVMQAACNRTKEAHPFDFDASSMEAQAHTSYNRRAGCYVQETAPPLAPLPCLLDCGTSTVTRGNPANDPTVPTRHIGHGSVSRGRRRDGRYGQKWAGSNGGGRRAEAAGPGKGIPRKGSFSAKETGLEPPLLIRGSKVGPSEGFHSRLRALGLRAHYWSEVRRPAPRKGSTAASGHSGSAPTTDQGFVGWSSKAPEDDELRLARPQGSDSGSVSEDDKLRLARPQGSDLALALADGLRLARPRGSDSTSASEDRLDLDLGRSLRLAQPRARTDHVTGGAIITLPKLTQATGNKTGVPSSSPRLQRPSDGHDTTRTGCQNLSGCHDGMYLGH

SEQ ID NO: 54270 - protein, 52 aa, Zea mays
  Coding DNA Sequence Number=SeqID_10895
MARVACTLYGKSLDGGVSVLLVKKRQIFAAFVQRWCPKKKIKTEGSGGSVLH

SEQ ID NO: 54271 - protein, 231 aa, Zea mays
  Coding DNA Sequence Number=SeqID_10896
EIESVRSCSPVLPLEAPPAPPLSALAPRVAAGGDPDDGGGDSSSSFSTDLSANQELKGWVARPITRDAARGCHFHDALDTLLRWALDRRTWSIEYRCVVFQHSHGVYPNRWEATCLVCRPENSLRGAEYYPRRPSGNIGGVIVSPISEDNPRLSSTVNLAAVLNTELDHALDDLSRARAEIAQLWAERAKHRHLDDGSPAPVGTQHPYRSPRHGHQSYGNPDCKTKINLEP

SEQ ID NO: 54272 - protein, 179 aa, Zea mays
  Coding DNA Sequence Number=SeqID_10897
  Subcellular localization annotation: CTP_CleavageSite=61; ConfidenceScore=5.39e-01
MEQYFIRPLPFLLDVTPLPLSHLHSPQTFAALTTQNPSRPSISLPPSKVQPSRVFSVVWLRSQLEFGGRKKEGGREELKMVDFRITLRDLPKLPVKASKTVMFRRDLMVRPYQYNEHHMLPEKGHLISALGKKGCSSTATTPLIKEPLLNNVVNQGGSSLGNYYVLAFHGSCADFFGVG

SEQ ID NO: 54273 - protein, 474 aa, Zea mays
  Coding DNA Sequence Number=SeqID_10898
MDGCMYVCTRLENDPVEEPEELAGEAPEQQSVGGGKCPLTYLCPIHYLIHLPLYIFMPKVVMRLMVLVMIMVLVVSIATTAQAKMKLWKETSRSSKTTTSSRCGLAATPSRLPVKAALSTFLFRTLIYCKNYMDVSDMARLRHTTRKSVIPFLPSRLAERPLRRPVAGQSSHLERLHHRLREEQERRRQEQQSSSLSLHQEIESVRSCSPVLPLEPPPAPPLGAPASGVAAGGDPDDGGGDDSSSHDTDFSANPEPEGWVARPITRDAARGCHFHDALDTLLRRAFDRHTWSVEYRCVVYQHSRGVYPDRWEATCLVRCPEDSLQGAEACSEHYSISERDSAEAAMQDAARRALSHYCSVFGGAADGLDLKYYPRRSSGSTGGVIVSPVGEGNPRLSSTVNLAAVLNTELDHALDELSRARAEIALLRAERAERRYLDGGSPAPVGTQHPYRSPQRGHQSYGNPACKTKINLEP

SEQ ID NO: 54274 - protein, 128 aa, Zea mays
  Coding DNA Sequence Number=SeqID_10899
  Subcellular localization annotation: CTP_CleavageSite=50; ConfidenceScore=5.04e-01
MQDAARRGLSQYCLLFSGLANDLDLKYYPHRSTSGTGGVIVSPVGVGNPRLSSMVNLVTMLNTELDHALNELGKARAEIAELCAERIERCHQEDGSPASVGTQHPYRSPRGHHAYGTADCRTWINLER

SEQ ID NO: 54275 - protein, 268 aa, Zea mays
  Coding DNA Sequence Number=SeqID_10900
MERLLHRPVTSQSSHLERLHHRLHEEQEPAGVAAGGDPDDGGDDNSSSHITDLLEEQEPEGWVPRPITRDATRGRGVYPDRWEATCLVRHPENSLRGAYVCSEHYSISERDSAEAAMQDSARRALSHYCSVLGGVADGLDLSQPIGSFAESSPVPSVLHSVNQLIVESRNSPSAALGKAAFAECPKQGTRQSGRHSAKSWIPVVLATMPNTDLDHALDELSKARAEIAQLRTECAERRHLEDGSPAPVGTQHPYRSPQCGHHAYDNPD

SEQ ID NO: 54276 - protein, 125 aa, Zea mays
  Coding DNA Sequence Number=SeqID_10901
  Homolog annotation: Hit_ID=Q2R0B1; Match level="QueryCoverage=79%, HitCoverage=36%, E-value=6e-07, Identity=34%"; Hit description =Putative uncharacterized protein
MQHDQQEILYGTKLDASAGKRNGYLNPILISEESHTFRIRKDNEELKGKTDKEVEERLKVMKKDFDARFATYIANTMLQLQDREAIMARTTLRTTGYASSFILRLGKVLVLDSLNYDPFDLCEIS

SEQ ID NO: 54277 - protein, 147 aa, Zea mays
  Coding DNA Sequence Number=SeqID_10902
MTAADGTSPWAGISTQPSMLLFIVHVKIITLIGIWRTTREKQCYHKGDSDVKKRDRFRRGLNTNLRECLNTIRANSYNELVKLAISLEDCIVAHRAEKKRKALMSGSSAPPQRFQIVSNNQSREMGHQAATVVAASTQPFPRSRSQE

SEQ ID NO: 54278 - protein, 77 aa, Zea mays
  Coding DNA Sequence Number=SeqID_10903
MAWARGQALQWPARARSCSSGFDLGLASYEEVKLEGVAEPPKLLGPHEPVLVSKTSDGYACAPDNLTGSVQCPKDPE

SEQ ID NO: 54279 - protein, 412 aa, Zea mays
  Coding DNA Sequence Number=SeqID_10904
LKFNPLPEMSSPTPANGGDTRFSFDYLSHDGFPSILWEVLCSAGYPTPPLYTVQLYEEHRVPRCRVWLTLESHPLQPGWRSLDAETDGFKADDTTEAATIKALMTFYGYHLLEMMMQPLGLFPTEKRDDPMWCNRVSHVKDVWAMHPDQDGRITVQCMSALYHLQALKSDTMTHLNGLAQATKITIDNQEDFVVNLSLELVEKDLQVEQMNQRILTLEQQVEIRDNTIDILEIQLHDVQEELAEANAHLKMHHQDMEANEAGSEGEEDPEEIEPTSGPNVAPSGVPLLLHPVLPLPIMVRRMAARPRRGQNEHVPPPPPPAPTMQELMAQQNEILRQLVQRQPYPQQFGGGQQQCPPAAATYQEFLSTQPPLFTKAEDSLDADVCLRVVESKFPLLTGACPDAAKTTRFATQ

SEQ ID NO: 54280 - protein, 78 aa, Zea mays
  Coding DNA Sequence Number=SeqID_10905
  Subcellular localization annotation: CTP_CleavageSite=38; ConfidenceScore=5.33e-01
MAYFFSGFVNLPLKGPSSSGFGPLEEKRVSWFGSSGCRAAAPVAEAFFGGMTKASSETNSLLLGIAKDAVAKIHRTIQ

SEQ ID NO: 54281 - protein, 53 aa, Zea mays
  Coding DNA Sequence Number=SeqID_10906
MVGTSAVTALRQSGSVGHCSLEDMVAGVTWPSILPPGWTVEWDPTSAKEEHEE

SEQ ID NO: 54282 - protein, 370 aa, Zea mays
  Coding DNA Sequence Number=SeqID_10907
  Gene Ontology: Mol. function=structural constituent of ribosome; Cellular component=ribonucleoprotein complex; Biological process =translation
  Homolog annotation: Hit_ID=Q9FUL7; Match level="QueryCoverage=19%, HitCoverage=57%, E-value=8e-20, Identity=73%"; Hit description=40S ribosomal protein S24
  Pfam annotation: Domain name=Ribosomal_S24e; Domain location=42-115; Score=66.5; E_value=8.9e-17; Accession=PF01282.10; Description =Ribosomal protein S24e
MARQCMVFGVRRGRTPPRAPSRCQPLTSVARDVVRPPPRTGVVLEVIHLDHANVSKAELKERLAKMYKVKDPNTIFVFKFRTSSTGSGLIYDNLYSKKFEPKYCLMRRKFAQWRKRFKSMDLHPTKPWFHPNIHLDARNSIINKELGQLLISHINGLSFIFLSGFLPSSFKKNLFIQLLTTAGPAVLDREDAYLAQVVFEHMQLDDNEVVLGGGQDAMNVTMIDCRVGKFEAKFYHKFPIGIDSDCFKRALELLALKRHISEFIECFAGRKVFVFVAAECENPHDSLNQKTDICEGEVPWAPHSEFCQALPHHGGSVVFSIKRLDIPSQFTRSTKEYIDIKDGGKRNVNDIGQSRIVTVCMPHANHNPKA

SEQ ID NO: 54283 - protein, 171 aa, Zea mays
  Coding DNA Sequence Number=SeqID_10908
MTSPIEHASFPSGQTVLDFLDQRLDMNSLECPGVKLEAQLFSRLVTKPEAQPKACRMSLTARRSSLEGLIKIAASSAYREVLSFAVVSGMGEMIPFLAARSRIRCSGSMARMNNIGERGSPCLTPLLCWMFAPCWPLRRARDEADPKRMESTHANKGQNPWFGGLPGDNPN

SEQ ID NO: 54284 - protein, 236 aa, Zea mays
  Coding DNA Sequence Number=SeqID_10909
  Gene Ontology: Mol. function=carboxyl- or carbamoyltransferase activity; Cellular component=ornithine carbamoyltransferase complex; Biological process=amino acid metabolic process
  Homolog annotation: Hit_ID=Q8SA97; Match level="QueryCoverage=36%, HitCoverage=21%, E-value=1e-15, Identity=52%"; Hit description =Ornithine carbamoyltransferase
MALPVDVAGPRPRPGDVGAPPKLGSNLSSVAEAESEPLGRARRKSFGRGQGGVRALGSGEADPSPSPGSGGAEFAVFRVLARVRALGSGGAEFAVFRVLARVRALGSGGAEFAVFRVLARVRALGSGGAEFAVFRVLARVRALGSGGAEFAVAPLARPDCLSDSLCRVAPQSEWRRRRCPSVRLQLARRLLDAWAWASKLACQKSEKRVHLARLHAACMAARPFRPLVWAKVGGRS

SEQ ID NO: 54285 - protein, 327 aa, Zea mays
  Coding DNA Sequence Number=SeqID_10910
  Subcellular localization annotation: CTP_CleavageSite=86; ConfidenceScore=5.18e-01
MDKDRQDAARKRQAFTRVRDPSREVKRARGGVKSTAPGSSKPLQAAKPAVLGPSKSSAGSRAVASGMGKLPLAEPTKERRPLSSVRTDEAAAGGADFDTDICVENYLVGSDAGQLAVVPAPEAATSPAAAVGAKCTSQDPWSKFCASGEISSAAAAKDVAGSVSQQLRHASRQLKHAVAFANHVTSGTLTSEFAAERQRLEGRIERLRAQHTDVVRDKSATENKSRRLAERLAATEAKKADLRRQLVEEWRDANKACAEAQSAQAEAKLARAVANLARQRAEEMETRLGSLRDRLDKMEASTRAKVERTHMQLVDTYGELGARTAPF

SEQ ID NO: 54286 - protein, 137 aa, Zea mays
  Coding DNA Sequence Number=SeqID_10911
MTGKKTTASSDGDTPKKAKVVVEDEEEATVTLSVEKDALDARTGILDVQSAASARTGAIVLPCPSWHTQVIELRGMLRSTFLILVGWSMKRDMSMNWLKSSKSDTPSTPIACCFPGKTTCFGLSVLFFSLLEMICSA

SEQ ID NO: 54287 - protein, 88 aa, Zea mays
  Coding DNA Sequence Number=SeqID_10912
  Subcellular localization annotation: CTP_CleavageSite=39; ConfidenceScore=5.24e-01
MRTLQSSTSFRKPATVYGKSTCKNPRLTAIAAKSTREPPCMQLPYCPCPFRDECPSGQGVTLHKIVTAIGGGVSVAKAQRLWKAVVGP

SEQ ID NO: 54288 - protein, 149 aa, Zea mays
  Coding DNA Sequence Number=SeqID_10913
MQAACNRARWTHFSDFRHASLEAQAHASRNQRASCCMQATAPPLVPPSHLFGCGAYAATRGDLAHDPAAPAWRVGTGKGGYPEKDPSPRRNWAPSPSLLIRGSKTGPPKGSTVASDRVGPTPTTGQGFEGQPPEGFHGRLRLLGLRAHY

SEQ ID NO: 54289 - protein, 139 aa, Zea mays
  Coding DNA Sequence Number=SeqID_10914
  Homolog annotation: Hit_ID=Q8SA85; Match level="QueryCoverage=20%, HitCoverage=2%, E-value=2e-07, Identity=82%"; Hit description=Prpol
  Subcellular localization annotation: CTP_CleavageSite=72; ConfidenceScore=5.29e-01
MSGAPGDSNSNSPPSGISRGTRAIIHRTVRCTPDSVRCAKEKQPQELASFGNPQRLVRYNSPDMSGVHRTVRCNSGATAISAPTTTCGALNARAEVRRAHTGTPDSKQRLSPGSYKLRDMEGNDIPRSWNADELQRYYV

SEQ ID NO: 54290 - protein, 211 aa, Zea mays
  Coding DNA Sequence Number=SeqID_10915
MAHSSSAAATYVLLPSLSDTSSISLFVIPSPFYSRGDDPDDEDELMCDEAEEHPRMRPTVSSGTVTCSCHGGTALCAGQQQPPVSNRQDIFYRRKKAKVRALVLFQKLLVSTYRYDGQHFYQFFFSQTVVRSNGTISKATLRQSATSGGMVTYEVQIVVGSFDGDGKKRQYLAQSPVPLKLMPTVVATGFYTSGCNSCISKDYYSLYIRGQ

SEQ ID NO: 54291 - protein, 136 aa, Zea mays
  Coding DNA Sequence Number=SeqID_10916
  Homolog annotation: Hit_ID=Q6QP51; Match level="QueryCoverage=70%, HitCoverage=44%, E-value=2e-08, Identity=40%"; Hit description =Putative growth-regulating factor 1
  Subcellular localization annotation: CTP_CleavageSite=38; ConfidenceScore=5.44e-01
MGAVQVKASSTQGARSRLARAQPQAGTVAPDEVTSRPRASSGSGHTLGTPEAQLEQASSRSNLGQIASPTDRIAGKQRRSLRSDCCATHQGEADNSQVQPQAQQEAPPRPTLGLGLGRRSPPRPTPGLGLNPGLGR

SEQ ID NO: 54292 - protein, 125 aa, Zea mays
  Coding DNA Sequence Number=SeqID_10917
MEVAATLLVQRSPNLRPLYDELEPEAAVSAWTEAESAREEALSAQEQVASWAEEVQQRRLGLGQVIRERDQPRSHAAEAVSRAEVLGGQLAEVTEQPTDVSARAGALAEALAAMAQARCWRPPSR

SEQ ID NO: 54293 - protein, 180 aa, Zea mays
  Coding DNA Sequence Number=SeqID_10918
  Homolog annotation: Hit_ID=Q6QP51; Match level="QueryCoverage=33%, HitCoverage=27%, E-value=8e-17, Identity=70%"; Hit description =Putative growth-regulating factor 1
MAPRKGSTATPKHSGFRLITDQRFEGWPLGRVRQSPHSTWAPCPLLIRGSKAGPSKGSIAAPEHAERGMTLDEADSSRVQPQAPQEAPPRSTLGLGPRLGLGRWSPPRPTPGLSLDLSLGRWTPPHPTPGLGLDLDLERWSPPRPTPGLSLNLDLGGVSTSPDLGLGPTTPQGGTSLPYP

SEQ ID NO: 54294 - protein, 177 aa, Zea mays
  Coding DNA Sequence Number=SeqID_10919
VRGFGPAHTTATDNTNFVALTGVAGDNSDDSVSKFFGFDDSWSSIVWTEGSSDEDLDYFVALDVVAAKTSLRVTGEDIPCANAGRRHRRAVAKRRVSGLSRSDRRHGEVEGGCLRVDGTAKRELLSSPAGASVGEGELRNLFEGEELKIMLFNYREMGITPDDRRQGWPSGFALNAP

SEQ ID NO: 54295 - protein, 324 aa, Zea mays
  Coding DNA Sequence Number=SeqID_10920
  Gene Ontology: Mol. function=carboxyl- or carbamoyltransferase activity; Cellular component=ornithine carbamoyltransferase complex; Biological process=amino acid metabolic process
  Homolog annotation: Hit_ID=Q8SA97; Match level="QueryCoverage=39%, HitCoverage=23%, E-value=2e-14, Identity=45%"; Hit description =Ornithine carbamoyltransferase
MAPPVDVAGLRPRLGDVEAPPKPRSSLSSVAEAESEPLGRARQRSSAEARAESEPWGRAKRSGAVLLSGRSVERRSDGGHFGSAGGRAASGEPEICSPLEGGLGRDGNPPGPLQLYADGGYQLRIRSLEAVLGCILFRWVRASAPAGCSPRGLGGVVSLLRDLNASRNASAGLVVPSCELAVARVYGRVPSSWAGMLTLSTVRPEPGLREQPPSLRTGREGDQGQTRLFYIRPCVAFPQGGGGKAPCCPRWAPNMVSPVSCKRVIRVDVRAPFVRGRLGAQRHAQKYLRVICRTRSPGDGVRGLDASLRWDSVTRSFPLVSEMS

SEQ ID NO: 54296 - protein, 219 aa, Zea mays
  Coding DNA Sequence Number=SeqID_10921
MRRKDGGYPPSGGLEGGKTRCIRESEDMTSGRKGRAAMQAACNRAKWTPFSDSQHAQPGGPGPCVMQPARRMLRACNCTATRATTAPPRLRNQYRGSRRPSARPSSASLARRSVRPKMTASVKGPGKGETPKRILPREGTRLRASLLIRGSKAGPPEGFDSRLRSRGPYTHYWSEVRRPTPRKGSTATSGYSGSAPITDQGFEGWPPKGSQLPQTPSEG

SEQ ID NO: 54297 - protein, 42 aa, Zea mays
  Coding DNA Sequence Number=SeqID_10922
MGGGTLLALPRLSAEVLSFCFCKEEGVEVDLQEFQDFDEFED

SEQ ID NO: 54298 - protein, 75 aa, Zea mays
  Coding DNA Sequence Number=SeqID_10923
MDEGEGADGWALAASERGLREREGELSNSIKLNNNNPKGNQGQGQRTLAFTKQMLRVFDLIELEEFDHLVAMLNR

SEQ ID NO: 54299 - protein, 107 aa, Zea mays
  Coding DNA Sequence Number=SeqID_10924
  Homolog annotation: Hit_ID=Q6J9V9; Match level="QueryCoverage=70%, HitCoverage=26%, E-value=7e-33, Identity=90%"; Hit description =Putative uncharacterized protein
MSRLLDCGTSTATRGSPARDPTVPIECNDHGGLKVAPSGVRQPPQSTRASCPLLIRGSKAGPSEGFDSRPRARRVRDDPGYVRYMAEARATLPRYPRTFPRPAGTIL

SEQ ID NO: 54300 - protein, 218 aa, Zea mays
  Coding DNA Sequence Number=SeqID_10925
MPHVHDVDGGLCPCNEKLLESGKEKDWKRVGCVQPTAAQSGTPDCSVWHTRLDSGELATLGKLWRRTAIIHRTVRWCTRLFGEPTAASATVGRAIYARRVAPANGRLGAPDSVRCANQPEDPMVDCARNGRRSTLDMLQWLSRGAPDCPVRHPTEGKNCLPRMPPMAPSCLGAIKETPKRMEEIPKHTLSILNLPHSVSAHLIDFLSDLSSVLVVNLL

SEQ ID NO: 54301 - protein, 233 aa, Zea mays
  Coding DNA Sequence Number=SeqID_10926
  Gene Ontology: Mol. function=aspartic-type endopeptidase activity; Cellular component=chromatin; Biological process=chromatin assembly or disassembly
  Homolog annotation: Hit_ID=Q8SA91; Match level="QueryCoverage=85%, HitCoverage=7%, E-value=7e-09, Identity=24%"; Hit description =Putative gag-pol polyprotein
MLERKVTTNTISAIHAKTRDTTFDSFHADLEQSLKERRHKHVEGMEAAAWDHLNEFTADTTTCVTVLENVTSIFEPWRPRIESTVDGIKHSVGNVRAEVSKVSHLLKRGVVEDSFNPVGILGQTLSAARHPSIALLNVDDPIGHCADSQQWECGFGCVYTHHHISANGMHKSPPLPIAPDISSHFPFRGASEPGYQPPPSTFGSRAYDAQFNSYLGQLPKLNFPEFDGTNPKM

SEQ ID NO: 54302 - protein, 262 aa, Zea mays
  Coding DNA Sequence Number=SeqID_10927
MRREHQVNEILGHANVEAGGLGAGVVGDVDGLAGWDGGQARLVAEALAVAPKEIGGGWRMGIWGGSGRRIRLLWRARRGRGSRGNMSCHGLGAAPTSFREVVASGAGGALAAGGERARGARLRLLLLLLLISASIFFSSSHALLISFSPLPSAASAEPLFIEANLRKQMRAEERPARGAVPRIAYLVSGSAGDDTARLWWEGHGGLLPSRVGRCTGRRGYSRGWPRLGAWSRLAVVTSARSTGGEIRGRAAGEEWKGRRGLA

SEQ ID NO: 54303 - protein, 98 aa, Zea mays
  Coding DNA Sequence Number=SeqID_10928
  Subcellular localization annotation: CTP_CleavageSite=11; ConfidenceScore=5.19e-01
MVSASPDPRARTQPRPGRRRTPPRPTPGFELGLDSERRQTPPRPTPGLGLGLNPGRRRTPPRPTPGLGLNLDLGGIATSPKLEFGPATSPGGPSLPYP

SEQ ID NO: 54304 - protein, 72 aa, Zea mays
  Coding DNA Sequence Number=SeqID_10929
MEDEASRGAAPAWVGCPFLPLASGEEWHPPVSRRLPPAMPGKANCCCPARMQHSAPSLAFAARTAARTCRCA

SEQ ID NO: 54305 - protein, 669 aa, Zea mays
  Coding DNA Sequence Number=SeqID_10930
MPSSSSSADATPPAAASSEETLSDVMVEELRAGDSVEFGVSRMTSARIEDMQRLGYFGGGVARAPGTEEVPEPEGELVVFEAFFVAGLRLPAHRVFELNQLPYDGYPGQDEADRRGKKPAVETGGDPALVAAASSKKRKLVMDKDRQGAARKRQATVRVHEARPKRQRGTAKAEASGGGKPPLPAKVGASAPGKAPEVTVGVGGPKLTKVVSSVSGVAEAAKAARTLPPPGKRVADFGTEINVEDYLGGSDEGPLALVVPGAAIATAAPAPKVGGETLGAGGEVSALALVRDEAGVATRRLKGATEALSRATEALSQVADFTSHTASGALTAALTAEVEGLRTQHADAVREKSASDSKCRKLAEKVAALEKEKADLRRQLAGERREANEAIAKEQAAQAEARLARAEGNIAKELAGELQRRLTALESRAEGAEAAMRAEAERTRTQLMTAYRELGVRTGDFEVPEREAGLRCLEWVQEELQELPTVLAGLMAFTSLVTCEAAMNALSREGCRHFEALDQADEDFGRDIFEVEDPVVKESAEALYDRMWSSYGCEVVRARAEAARAQAERGERVDDFGALNSALPDPETTPAEAATGVAPGPTPETAENAPCAPAPAAAGEDLPPKVAEGAPDAPAAAVPSAEDPAEVGAGAAAEASAEAPAAAGPSQVA

SEQ ID NO: 54306 - protein, 184 aa, Zea mays
  Coding DNA Sequence Number=SeqID_10931
GGGRAEPELYLPRGFVGHLLPHHSGERVLTGLAEGADFDNVGPNGRKRRQLPRARFAGSASSGAASGATFHRWADHGYLPDVRAAVAPRAPGDRPRCRALLGRRSCSWAILPLLRYDAPAWRSVFARLGGPGWGSAGGQTAAVVGAEVVAAEEVLVADEIAATIHAPGLWLFGFDSLSSPLEWG

SEQ ID NO: 54307 - protein, 158 aa, Zea mays
  Coding DNA Sequence Number=SeqID_10932
TSFMLFDYFESGILKTTEYKIRHQWGSSSTLGIDSTFGGVRPSLGRRHGRRVSTPNQLSPEDISPARGLGNPTPASVPPVDGPARALADEASFRANSASVRADTAASGFGLITERLRVSLTKQEKPRTARPTELRDSYASGIRIPHTSPFRTRQLTLG

SEQ ID NO: 54308 - protein, 281 aa, Zea mays
  Coding DNA Sequence Number=SeqID_10933
  Gene Ontology: Mol. function=hydrolase activity; Biological process =cell redox homeostasis
  Homolog annotation: Hit_ID=Q1XBU3; Match level="QueryCoverage=91%, HitCoverage=83%, E-value=2e-96, Identity=72%"; Hit description=Beta -carotene hydroxylase
  Pfam annotation: Domain name=FA_hydroxylase; Domain location=144-259; Score=47.7; E_value=4e-11; Accession=PF04116.4; Description=Fatty acid hydroxylase
  Subcellular localization annotation: CTP_CleavageSite=59; ConfidenceScore=5.51e-01
MTSFVAKNPLLAAAARRRALPPLAGRALPFSPLTTARAPRRRGLGTVTCFVPQDTEHPAAAAPAPVAPVPETALDEEARAAAARRVAERKARKRSERRTYLVAAVMSSLGVTSMAVAAVYYRFSWQMEGGAVPVSEMFGTFALSVGAAVGMEFWARWAHRALWHASLWHMHESHHRPREGPFELNDVFAIVNAVPAISLLAYGFFHRGLVPGLCFGAGLGITLFGMAYMFVHDGLVHRRFPVGPIANVPYFRRVAAAHKELEEVGGLDELEKELARIGRTI

SEQ ID NO: 54309 - protein, 98 aa, Zea mays
  Coding DNA Sequence Number=SeqID_10934
MFVGVAPCTSLFRHFFVLVKSGKAKDHLGAYYFQTSDFLKRRIVQLQRRARLCCWFTDPNDIGRIQRRPGTDLSWEELELLVKAITCESFVPMSLILP

SEQ ID NO: 54310 - protein, 74 aa, Zea mays
  Coding DNA Sequence Number=SeqID_10935
MRLNCVFELNKLPYGPYPEGDSTDASDDRGKQVKHRTDEGTSKEKAPVAATRKRKLGMGDDETEPRASGFFVSS

SEQ ID NO: 54311 - protein, 109 aa, Zea mays
  Coding DNA Sequence Number=SeqID_10936
MAMGKHIGGADHPGYGSFPGLPGYAGALATGHRGLLGSQERKARGCSAARSGGRDAREGEGEGSSVTAQGTSGSRKALGPSDRGIFQEILELSLDTPPLGGGWFRHRSE

SEQ ID NO: 54312 - protein, 45 aa, Zea mays
  Coding DNA Sequence Number=SeqID_10937
MGSRHSACSAEAGCRGCLWCNLCLGKEEGVEADLQEFQDFDEFED

SEQ ID NO: 54313 - protein, 235 aa, Zea mays
  Coding DNA Sequence Number=SeqID_10938
  Subcellular localization annotation: CTP_CleavageSite=60; ConfidenceScore=5.72e-01
MVAFQGGHPPFKGDSPYLRPQPSRAESSPTRSKVLPCGAGAGSHTSCKPAQSRRSQTAVRGAHNRPAVTSDSPLLPRPTGERAGQPCRRHATAPSGRASPTPNTPSMEAQAHASCNLRAECFVHATAPPLAPPPRLLDYGTNTATRGVPSHDPAAPAWRDGGAPGRRSGRCFAFAIMTASVKGSGKGETPKRILPREGTRLRASLLIRGSKAGPSEGFDSRLRSRGPYTHYWSEV

SEQ ID NO: 54314 - protein, 57 aa, Zea mays
  Coding DNA Sequence Number=SeqID_10939
MARMLRWSPLLGRRPGAEVVAAAEVVAAVDAEVVASAGEPLGASYPRGPTGVEVVHT

SEQ ID NO: 54315 - protein, 131 aa, Zea mays
  Coding DNA Sequence Number=SeqID_10940
  Homolog annotation: Hit_ID=A2X8E8; Match level="QueryCoverage=58%, HitCoverage=14%, E-value=5e-17, Identity=60%"; Hit description =Putative uncharacterized protein
MLPLPPFPLFPVFIFFFESFVSGSKGKVFTLQLKHGRGPGAPRDRDRLSKKQQKKDARKAEKAGTVAQPQQQHLFNTEDLFAANYGDVAVEVIKLKAISDRLWSQIGDLDESAAGCKVLIRGASIQPCIPC

SEQ ID NO: 54316 - protein, 140 aa, Zea mays
  Coding DNA Sequence Number=SeqID_10941
  Subcellular localization annotation: CTP_CleavageSite=46; ConfidenceScore=5.38e-01
MGVGTFQPSFGFKDFHHTARLHPPPPRRRSPKTVTTSPWVGRSKPGCDLGPTLSFKDVHHPRWGGGRAEPELYLPHGFVGHPLLRRSRERALAGPAGGSTAGVVGPSVSSSSAWLPVPPPAGRRLPRRVHGRTAQDVVRC

SEQ ID NO: 54317 - protein, 294 aa, Zea mays
  Coding DNA Sequence Number=SeqID_10942
MARLRHTARKSVIPFLPSRLAERPLHRTVSGQSSHLERLHHCLREEQERRRQHGEQQGSSSSPQQEVETVRPRSSVAQLEAPLVPPRDAPAVGGATGGDPDDDDSDHNTESSEPQEAEGWVARPITRDAARGCHFHDALDTLLRQAFDRHTWSIEYRCVVYQHSRGRMQHGVHSPQYCSLFGGVADGLNLRYYPRRPTGSTESVVVSPVGEANPRLSSTVNLVAVLNTELDHSLDELSRARTEIAELRAELAERHHQEGGSPAPVGTQHPYRSPPRGHHTYGSPVCKTRIDLDP

SEQ ID NO: 54318 - protein, 94 aa, Zea mays
  Coding DNA Sequence Number=SeqID_10943
MVRAEARRNKKRVIQVQAAEIHAPAHSEFGRLSSEYLALQVHANCEREASALLLRQLRTDSVLVPYFLESFPCSVATLIGRIRSAWTRPNDTPC

SEQ ID NO: 54319 - protein, 359 aa, Zea mays
  Coding DNA Sequence Number=SeqID_10944
  Gene Ontology: Mol. function=metalloendopeptidase activity; Cellular component=integral to membrane; Biological process=proteolysis
  Homolog annotation: Hit_ID=A2XIU5; Match level="QueryCoverage=84%, HitCoverage=35%, E-value=1e-30, Identity=54%"; Hit description =Putative uncharacterized protein
  Pfam annotation: Domain name=Peptidase_M50; Domain location=60-341; Score=66.4; E_value=9.3e-17; Accession=PF02163.13; Description =Peptidase family M50
  Subcellular localization annotation: CTP_CleavageSite=58; ConfidenceScore=5.14e-01
MIATHLSPAPKQYRFPSLLHSTSHNHHLPVHLSLPRRHRNFAKPTAAAQDLLASVESVASAASVLAAIVLVHESGHFLAAASRGIHVSQFSIGFGPTLARFRLSPVEYALRAIPLGGYVGFPDDDSESGFAPNDLNLLHNRPIPDRLLVVSAGVAANLAFAFLIVYAQLRSPSASPCRRSSLGFSCPSFARDSPWMPCRRLRGHQPRQGQQAQPDPAAVATPDLLASVESVASAASSGHFLAAASQGIHVSQFSIGFGPTLVRFCLGPVEYALRAIPLDGYVGFPDDDPESGFAPNDPDLLCNRPVPDHLLVVSAGVAANLAFAFLVVYEQALTIVLRRWLGHGCGAHGGRRASDEDVM

SEQ ID NO: 54320 - protein, 668 aa, Zea mays
  Coding DNA Sequence Number=SeqID_10945
MDKDRQGAAQKRQAAIRLVEARPKRQRLGAKAAAPSGGKPPLPAKSGAPASSKVPEATAGAGGSKSARVVPPAGGVAEVAKAAQALPLSGKRVADFATNISVDDYLGGSDEGQLVMVAPAAATAVAATAPKAKGGALSAGGEVSALAVVMDEAGAATRRLKEVTEALSQVADFASRTASGALTAAVAAEVERLRTQHADAVREKSAADSKCRKLADKVATLEGEKADLRRQLAGERRETNEALVKAQAAQAKANLARAEGNLARERAEQLQERLTALESRVERAEAMSRAEAERMLQLLVDTYRGLGAGTGDFEVPDRESRLRCLEWVQEELQALPTVVEGFMAYASLVTCEGAMNALSREGCRHFEVFDQVEEDFERDIFKVEDPVVKESAGAIFDRLWGEHGREVAARGERVDDFGALNSMLSDPEPAPAEAVPGPVLGPTPETAGDAPGASVAAAAGEGLPPEVAEVAPDASAAAAPSAVDPAAVVAEITAEATVEPTAEAPAASGPSQVQDFGPAHTTATTKILAASTAEDGNECGGSASEFLDCADSGSSVEWTEESSEEDLDYFVALDVAAAEASPHVADAGDVPGPSTGRRRRRAVAKRRVSGTEGARLRVSGTGRQELLSLPAAVNTGEGELRSLFAGEELRIMLFNYREMGIIPKVEPM

SEQ ID NO: 54321 - protein, 52 aa, Zea mays
  Coding DNA Sequence Number=SeqID_10946
MTTDRPLELLHMDLFGPIAYISIGERKITNPRDLKGILEMGSKRVRIKDQKD

SEQ ID NO: 54322 - protein, 99 aa, Zea mays
  Coding DNA Sequence Number=SeqID_10947
  Homolog annotation: Hit_ID=A2YYT9; Match level="QueryCoverage=36%, HitCoverage=9%, E-value=2e-09, Identity=80%"; Hit description =Putative uncharacterized protein
MAANAIVVNITLDGQNYPEWAFCVETALWRHGLLFHLTDAATVQEDMRVIGYLGTGYPKKAPRPTKNGPPAKYDPYTGGVGQYVVLGMRLHLMKYDTRR

SEQ ID NO: 54323 - protein, 77 aa, Zea mays
  Coding DNA Sequence Number=SeqID_10948
GYEIVDSGYDYGAGGDEDDGFGYAYGNGCPRCNHCSGEDEVVEEDFQEFQEYYVKEDEVCSEEVTRDKEYLEEQLYK

SEQ ID NO: 54324 - protein, 83 aa, Zea mays
  Coding DNA Sequence Number=SeqID_10949
  Subcellular localization annotation: CTP_CleavageSite=50; ConfidenceScore=5.18e-01
MGRIVRGPPNWTRPHGGRTSSQAFVWRHTERRVSLPVLSSSDRRHRRGLRAEGGGYAFAPTSSEQKKDMPTQCNILFTSSVKF

SEQ ID NO: 54325 - protein, 253 aa, Zea mays
  Coding DNA Sequence Number=SeqID_10950
MNENGDLQDRIGIQMGQVKMVEIKEAAEKGRNGKTEVAEKERSINHGLMGILSWDSNPMANPPRTEYPRRENPDGHEVEKFGLRDNGHVTGFGSKKARTRAQKAEAAKSAALMGYSRARYRFKKRQGDSAIIHRTVRCTPDSVRCAKGGQPQELASFGKSQRLVHYNSPDCPVCTGLSGAPPKQRSSPRQRLSAAHLMRPLRAQKSESPMLAHRTSNSTCPVCTGHPGGPTSQKLQRSESNGSDDVAGGTGLS

SEQ ID NO: 54326 - protein, 282 aa, Zea mays
  Coding DNA Sequence Number=SeqID_10951
MPRSSCIHHALPPSRPPDGVRRCSLEGFASGPPPPAISLPESSRSWWCCRSCLLLAAVRGAQPHGGWRSSAIARLQGFSSCSPAAISRQWSSKGMTTSLVVERSEPGCGLPLPSASRMFIIHAGEEGEPSWGLAFCMGWRLASSSSIRGRRAFTSLAKEANFGYAGPADCRRRRPPRARFLGLDGFGAASDAASCRLVGAWLSIHRTGDGHAVRSEDGSEDLFTRTEATAAGEAARCRGGCLRWRDHQCHLPPSLQLFGFNGLVVAPRRKTGARTLSQWRTC

SEQ ID NO: 54327 - protein, 189 aa, Zea mays
  Coding DNA Sequence Number=SeqID_10952
MAGDSNPHNPLIIPQFGIATLRGENEGSKGQLITLDSAGKEHGGCEDLESSRDPRHKPSPGGRVISADSVICPGNGARWMPDLSSGARKSVARGACSVPRWTDELTMGPTNQCREHHQRVRPACGPAESNEDNERWEDDGKEDLQEGAAATIVIRISRKVQQRLSTIGILVVGALPWGSDRMRVHRSEG

SEQ ID NO: 54328 - protein, 432 aa, Zea mays
  Coding DNA Sequence Number=SeqID_10953
  Homolog annotation: Hit_ID=Q5GAU8; Match level="QueryCoverage=28%, HitCoverage=96%, E-value=1e-50, Identity=73%"; Hit description =Putative uncharacterized protein
MYREELWQKRGRPRELYPDVSSKDAPIPPEFPVPNCDCGRLAWGHQRCFFFQWIDGPDKFDPRYLLFVNWLSGRTSHERFKRWVPPPPNPPPMTDAEKEVATERRMDSPPRCDCGDRAVIDEDYEKQFCCSNIDYPYGWRKCRFREWLYGPLSHWPEPEVKEKRYNQWPEEEVKFDPVLCKCGIEAKYGLVPSELGVGYFCGHMVDYDEETRKCSWESYDDKGEVMHTIESKRIMGQKMRCGSRLVDSYINDRIRDMRREAKSAFYDGPKRVEYRRLKAAVEKRAQDAREWEAAQAEKQMLDNLADRLKGKIGSGVNYLADEAHARYEDDTSRLSELIALAEAGLHAQEEEDEFMSQAAEEVEAAYYKKKSNEAEAEDELFSQAADEAEANYYKRTGDKCDAGQCSKWNEVVVEDCATDDSEDELLIDCDSD

SEQ ID NO: 54329 - protein, 179 aa, Zea mays
  Coding DNA Sequence Number=SeqID_10954
  Gene Ontology: Mol. function=nucleic acid binding
  Homolog annotation: Hit_ID=Q6IVC9; Match level="QueryCoverage=21%, HitCoverage=61%, E-value=2e-12, Identity=89%"; Hit description =Arginine/serine-rich splicing factor 2 variant 1
  Pfam annotation: Domain name=RRM_1; Domain location=4-55; Score=6.0; E_value=0.041; Accession=PF00076.13; Description=RNA recognition motif. (a.k.a. RRM, RBD,
MRPIFVGNLDYDTRHSELDRLFYRYGRVERIDMKSVITTFSGAVASSIGRRPMLIAWDVLHFVTGLVTSAKSAQTTIIHIVGYSGSDLRALCEEAAMMPTRELDPHNILTVKANQVRPQLAETEVAHIGQVALVTQPKWLETSMEPIKSISRMIMNYRNSGKFRHNALQCVLCGLELEM

SEQ ID NO: 54330 - protein, 209 aa, Zea mays
  Coding DNA Sequence Number=SeqID_10955
  Gene Ontology: Mol. function=fatty-acid synthase activity; Cellular component=fatty acid synthase complex; Biological process=fatty acid biosynthetic process
  Homolog annotation: Hit_ID=Q9FJI2; Match level="QueryCoverage=45%, HitCoverage=56%, E-value=2e-21, Identity=54%"; Hit description =Arabidopsis thaliana genomic DNA, chromosome 5, TAC clone:K9B18
  Pfam annotation: Domain name=MaoC_dehydratas; Domain location=26-147; Score=83.0; E_value=9.4e-22; Accession=PF01575.10; Description=MaoC like domain
MRLRSRAIFPLVRTTAITTSAVSSPPAVLSVGHALRERRRFTEDDVAAYAAVSGDRNPVHLDDAVARELSGFQRGRVVHGMLVASLFPSVIAASFPGAVYASQTLKFAAPVYVGDEVVARVKALNIRMIGDFTNSLYEPFASRQNGVGNWNNAIVEVWKTGSVNTLVDIYQHSKFQRNKDHNALVIIDLLLGILWYWLTISFPFREIKE

SEQ ID NO: 54331 - protein, 101 aa, Zea mays
  Coding DNA Sequence Number=SeqID_10956
MATFVALANGPHRTETPLPFPHVYAARDFVFLGQAFFRRGVIPSGSGVHRLSHCRASSELPRRRAAVGADDLHAQPETSARAGLADNGTAALGAAVTLLAQ

SEQ ID NO: 54332 - protein, 15 aa, Zea mays
  Coding DNA Sequence Number=SeqID_10957
MRIFGEVDLLDAVFI

SEQ ID NO: 54333 - protein, 102 aa, Zea mays
  Coding DNA Sequence Number=SeqID_10958
  Homolog annotation: Hit_ID=Q7XBD9; Match level="QueryCoverage=36%, HitCoverage=2%, E-value=8e-08, Identity=72%"; Hit description =Putative gag-pol
MAIIFQHKIALCPGSVFCFGTILSVADEEGILHRIVDPLEKKSSLKISKKSRNEAGNSATSSAPGKDYLLQARSREFVYLENPVVHLIHEKMDTDYKEKRSK

SEQ ID NO: 54334 - protein, 398 aa, Zea mays
  Coding DNA Sequence Number=SeqID_10959
  Gene Ontology: Mol. function=nucleic acid binding; Cellular component= intracellular; Biological process=regulation of transcription
  Homolog annotation: Hit_ID=A7NV78; Match level="QueryCoverage=94%, HitCoverage=91%, E-value=3e-78, Identity=43%"; Hit description =Chromosome chr18 scaffold_1, whole genome shotgun sequence
  Pfam annotation: Domain name=zf-C2H2; Domain location=154-177; Score =28.8; E_value=2.1e-05; Accession=PF00096.17; Description=Zinc finger, C2H2 type
MVKTTTTTNKEELESPSYRLAAFKSLFSCRNSHARPRAPDTGTGSRSKRLGCSAPSICKLKDDSVPVPPKETTGTASAGEPCKRRASVSGSSDRCVKKPQCGAGSNKQLQRGGSSSSSGGSSFRAGMQLRRLSGCYECHMVVAGSASMRATTICPCPDCGEVFVRQESLQLHQSIRHAVSELGTDDTSRNIIEIIFQSSWLKKQSPVCKVDRILKVNNTPRTLARFEEYRDAVKARAGAEQLAVAAANSNRHPRCTADGNELLRFHCATLACSLGLNGATHLCDAAGTCAACGIIRDGFSSGGVLTMATSGRAHDAAEAGAGLDEETTPRAMLVCRVIAGRVKRPKEAVPEEEAVADAAEESEYDSVAGSAGVYSNLEELLVFNPRAILPCFVVVYKA

SEQ ID NO: 54335 - protein, 28 aa, Zea mays
  Coding DNA Sequence Number=SeqID_10960
MERAHRHPETFLQLRYMKDIVNIHEMIR

SEQ ID NO: 54336 - protein, 82 aa, Zea mays
  Coding DNA Sequence Number=SeqID_10961
MGRVRRFSSQHIEYNIYFCIIWTHRHLKMNSPLIIGKITKRSNQSLNVFRRGSHSKTQTTITSRRVGHEMKKDLGGGRFQAE

SEQ ID NO: 54337 - protein, 171 aa, Zea mays
  Coding DNA Sequence Number=SeqID_10962
MTHILVVRALGVEDVVQCSFASVGCPSGTRDGWSSGMDFFTRPLLPALVGLLVRVMPWCRWSGLRSPDEVLGTLISDDIEYGSDEGRVIRSSVEVLDHYCFSNLGNTISHGLKAFEVRPKSLIVTEPPKSLGPPTVVLVQRTSDNPAGAPDHLTSSVSEFLTFPRAFYLSR

SEQ ID NO: 54338 - protein, 119 aa, Zea mays
  Coding DNA Sequence Number=SeqID_10963
MAGVGRSTRAGGDARRRRGVRPGHGEIVQLDGSERSMGCQRRYERKELGGDSLDSSVHARRRKTEVRMCSREFGTTLIFGSPGFEFRKTENADDLWEEVWHLRETLGDTGVSHYAPEVP

SEQ ID NO: 54339 - protein, 68 aa, Zea mays
  Coding DNA Sequence Number=SeqID_10964
  Subcellular localization annotation: CTP_CleavageSite=24; ConfidenceScore=5.56e-01
MGAIKVKAQSTQGTRSRLARAQPRAKAADPGGSTSRPRVPSSNGRTFDSPEAQLGQASRRSNLGQDRH

SEQ ID NO: 54340 - protein, 222 aa, Zea mays
  Coding DNA Sequence Number=SeqID_10965
  Homolog annotation: Hit_ID=Q6QP51; Match level="QueryCoverage=100%, HitCoverage=86%, E-value=1e-16, Identity=33%"; Hit description =Putative growth-regulating factor 1
  Subcellular localization annotation: CTP_CleavageSite=85; ConfidenceScore=5.55e-01
MGAIKVKAQSTQGTRSRLARAQPRAKAADPGGSTSRPRVPSSNGRTFDSPEAQLGQASRRSNLGQIATHFAAPLTDLTGKQRACPASTAVPLDRVRLTAAKSNLGRHRKLRLVRPQGSDSASTSEDELRLARPQGSDSASTSEDELCLARPQVSDSDSTSEDGLRLARPQGSDSASTSDDSLCLARPPGPDSTSTSKEPPPRPTLGSDRPRHRGGHHYPTPS

SEQ ID NO: 54341 - protein, 18 aa, Zea mays
  Coding DNA Sequence Number=SeqID_10966
MGVIAGEMAWLYSRRIQI

SEQ ID NO: 54342 - protein, 28 aa, Zea mays
  Coding DNA Sequence Number=SeqID_10967
MAGGIELAGAKGKWLAGEGCVQGNLAQL

SEQ ID NO: 54343 - protein, 86 aa, Zea mays
  Coding DNA Sequence Number=SeqID_10968
MGPDCVETVAELSVEAPPEPVSLLFINVSMVACILTQVIESLGVLQHGVPSSCEFQGKIGSGLGDMVAPSQGISLFNLRQNLCQPM

SEQ ID NO: 54344 - protein, 111 aa, Zea mays
  Coding DNA Sequence Number=SeqID_10969
  Homolog annotation: Hit_ID=Q6QP51; Match level="QueryCoverage=44%, HitCoverage=22%, E-value=4e-15, Identity=77%"; Hit description =Putative growth-regulating factor 1
MAAPRTTRPVALTLRQDRRHLWQAKQATLHLRHNNRVKKGWPLGRVRQPPQSTRAPSPPTDQRFEGWPLGRVRQPPQSTRAPRPPLVRGSKAGPSDGFDSRLRPLGLRAHY

SEQ ID NO: 54345 - protein, 189 aa, Zea mays
  Coding DNA Sequence Number=SeqID_10970
MAGVGRSTRAGGDARRRRGVRPGHGEIVQLDGSERSMGCQRRYERKELGGDSLDSSVHARRRKTEVRMCSREFGTTLIFGSPGFEFRKTENADDLWEEVWHLRETLGDTRVSHYAPEVTQGRMKKAESVLDRPLALCGGSGAALANPALAKPLTASTYQPENLEPDYAPGLRPVRMREQPDQPKHHERH

SEQ ID NO: 54346 - protein, 167 aa, Zea mays
  Coding DNA Sequence Number=SeqID_10971
  Subcellular localization annotation: CTP_CleavageSite=76; ConfidenceScore=5.65e-01
MGAIKVKAQSTQGTRSRLARAQPRAKAADPGGSTSRPRVPSSNGRTFDSPEAQLGQASRRSNLGRIATLRRHRKLRLARPQGSDSASTSEDGLRLARPQGSDSALTSEDGLRLARPPGPDSASTSEEPPPRPTSGSDRPRHRGSIITLPLASSGYGEQDRRPIWLAL

SEQ ID NO: 54347 - protein, 76 aa, Zea mays
  Coding DNA Sequence Number=SeqID_10972
MGQSEAEREGGRKVAGDRRERGGNPAAFVFVPRPGRAGVPCLGRVCGTWADWARPDYVSGLTGPCRVVLGRPFGQL

SEQ ID NO: 54348 - protein, 187 aa, Zea mays
  Coding DNA Sequence Number=SeqID_10973
MDKVQIKSKGEIESEKSWLCTAKRLFGREHRTVRWRTRQCPVRQTDSGELAALGNLPATYDYNSPDCPVSKVHLYTKSTVRNTVDYSGQEKLFGKTGQARTVWAPTADSPRHQDTLRTEPMQKYMFPLRTVRRKSKDRPSLRADRPASSADRPPLLLTVAFSAVDLQGRTVRTRRADRPRSAEWSNG

SEQ ID NO: 54349 - protein, 108 aa, Zea mays
  Coding DNA Sequence Number=SeqID_10974
MAADSPPTGGEIDDVSPVWWKNNIQARPVPSPADGGGGGATEREMCPWAISKDCPVSQRSAEPTVGRAICAGHVAEPTARRGHRTVRCAPDMSGAPTAPSLPTVGFTI

SEQ ID NO: 54350 - protein, 149 aa, Zea mays
  Coding DNA Sequence Number=SeqID_10975
MGKNNKRKREPTPPSKDFGDSEYSEEEFSSESEGSPAPIPLRESSDDSQGLATEVWTYIWAVERSGLEGSDESEYSSDEEDSDGGGEDEDGDDDDDDDEDGGGGDGDGSGRGGNKDGDGGSSRGGSGGGGGSRGSNRGGSGGGNNRASG

SEQ ID NO: 54351 - protein, 106 aa, Zea mays
  Coding DNA Sequence Number=SeqID_10976
MAAVERTKKKKVIIYTDPGMHSPLIDLLFDHYLDDMNIGAAQNATIRVVLVVFQWWGLNVAIIINKWNFQVLLTMPTTPTDRMKEIAQASQEFLYIDADGRATDVA

SEQ ID NO: 54352 - protein, 104 aa, Zea mays
  Coding DNA Sequence Number=SeqID_10977
  Subcellular localization annotation: CTP_CleavageSite=67; ConfidenceScore=5.27e-01
MALRKLYDDGGPPALLRKQDNVSRDSIAPTAVPPSGSAAPPTATTSRQQGAQISPAATLASEGSFVPSTEKAASAWARVLTWSQPAFSRMAEIRLAPENAQTSP

SEQ ID NO: 54353 - protein, 415 aa, Zea mays
  Coding DNA Sequence Number=SeqID_10978
MQAACNRTKGVHPFDLDASSMEAQAHTSCGRKQLSSRLQAHVPSWDSERTLSHGVKTTRPCSVPRTARARTAAAPRNTRPVALTLRQGRRHLWQAKQAMLHLRHDDRVKKRDRERGYSERDPSPRRKRAPSPPTDLRLALEGFDNRLRTRRARDDSGYVRYMAEAQATLPRLGGCSRKPGSGQTVDSLVTPISTKLQRPDGHNSGQGSVHSRDTISPRPSPASDKDSRPRRIHVSPEGLLKQRTHLRLVRGPTRAGFAEKPPWPDRHANRPYRRSIQCKDRLTPYPDARSSVDRAEEDSVACPAPTVVPPARVRLTAVKSSLGRHRKLRLARPQGSDSATPDPRARTQPRPRTTVSASPDPRARTQPRPRRSLRLARPWAQTDHVTGGPIITLPLASSGYGEQDRRPIWLAPVNK

SEQ ID NO: 54354 - protein, 269 aa, Zea mays
  Coding DNA Sequence Number=SeqID_10979
  Subcellular localization annotation: CTP_CleavageSite=37; ConfidenceScore=5.07e-01
MPGFAGSTGSGTASGATSHRWAECGYLPAIRAAVALRAPGDRPRRRALLGRCSCSWAVLPLLRHDAFARRLVLARPGGLEWGSASGQAAAVVGAEVVAAGEVLVADEIAAAIRAPGLGSLALIACPRPSSGDVGEGLIAAASALRSSLLLFGRPERRSLSLLPEWAAASHLGFCRPAGPPMWGVESLGSVGLAARGFSCPVKETLGRSAMSRSQRQRCQYGQRRSRLEKKLRRPRSRRLPRPRRHSSGGRSLAGSSTGGTNPGVGLPRP

SEQ ID NO: 54355 - protein, 444 aa, Zea mays
  Coding DNA Sequence Number=SeqID_10980
  Subcellular localization annotation: CTP_CleavageSite=9; ConfidenceScore=5.27e-01
MAAPPPPPSAGKVTGQTRMLLFRHVGKTSSIPPPTGGLTAAIVVVARRRKEYHVVAAVEGHELKTPETEYRPGLERLLETTHLELDGKLLVNTQQAPTWRANCRRFDPEGSLDRRVNCRCVSQPRWVGARRNTRGKTRGRSVPKVGRGGGSSEVEVESEPWGRARRRPSSEVEVESEPWGRARRRPSSEVEVESEPWGRARRRPSSEVEVESEPWGRARRRPSSGVEVESEPWGRARRRPSSGVEVESEPWGRARQSFLWRPRLDLAAVSLTLAGGIAVGAGTTLLIATRWCVRKHVGTKESYTDAPAHSEFGRLSSEYLALQVHANCAKGSTQTNKKSKLGFKERSKKETEVCPGLAHQTVRCATGQCPVHQGESAQTPQLRISQTQLCYNSPDCLVCHRTVRCTSGATTICAQRSTLTDEQCSTIPQQKSEQQVRGAPECPV

SEQ ID NO: 54356 - protein, 358 aa, Zea mays
  Coding DNA Sequence Number=SeqID_10981
  Gene Ontology: Mol. function=nucleic acid binding
  Homolog annotation: Hit_ID=Q60EK4; Match level="QueryCoverage=70%, HitCoverage=57%, E-value=4e-24, Identity=29%"; Hit description =Putative uncharacterized protein OSJNBa0032D15.11
MARRRSQKNKKTPLNEYNEVTLEILLHDCSNYDSWSTRVINAFRTIDPQLEQILDKSIIPPNYDRENASEENLRCIRLNYLAYHILSKSLSKEDYRAFIIKYDEPICDVHDIWTRIKIKFDESKHDGSFCASTSFGICETNPLKEEEENERWRPNDESTSPKEDKAVMLKLLKRAREQSETRQMLEDVLSMKMLRFDELTKEHEELKCSHVDLVQSKSSFELEFTGTKDDTYQKLKEENERLKMSLTQLKGKCIAQPSQDNRDHMVKKLETGTTMACTKSLKENFKDLRIVKRKEQKKKINTSAKSLNHASIQGNIQGNPKLQLVLERNRNNIELQMYLQLDGDESTSVTQKRMSKSA

SEQ ID NO: 54357 - protein, 148 aa, Zea mays
  Coding DNA Sequence Number=SeqID_10982
MGKSNKRKREPTPPSEDFGNSEYSEEEFSSESEGSPAPVSPPASSDDSDDSQGIAAEVWTYIRAVERSGLEGSDESEYSSDEEDSDGGGEDEDDDDDDGGGGDDGDGDGSGRGGNGGSRGGNGGSRSGSRRGSSGGCSRRGSSNKASG

SEQ ID NO: 54358 - protein, 158 aa, Zea mays
  Coding DNA Sequence Number=SeqID_10983
MWSPFCVEVAHKRFVAELKARKEYEDNAKTRVPEPVEANLVTAVLVQPPTGSATPTGGPRVAEPSPGDTVGEQAKVCSTLVNCVSEITLGAMDVLMIRNLGQDQQGLWKGLGVEEEQQGRHNRKEIKSDSAATPSRVPGPVCTKIDAQDASGLRLQQT

SEQ ID NO: 54359 - protein, 400 aa, Zea mays
  Coding DNA Sequence Number=SeqID_10984
  Gene Ontology: Mol. function=sequence-specific DNA binding; Cellular component=nucleus; Biological process=regulation of transcription, DNA-dependent
  Homolog annotation: Hit_ID=A2WTN2; Match level="QueryCoverage=81%, HitCoverage=20%, E-value=2e-80, Identity=53%"; Hit description =Putative uncharacterized protein
  Pfam annotation: Domain name=Vicilin_N; Domain location=205-361; Score=-74.1; E_value=0.099; Accession=PF04702.3; Description=Vicilin N terminal region
MALIQSLLNHTTLETDTVLFKLVTAVPEQQKQPVQSYDTDIFSRHDQKLLKASAFLPTIESPFVPNSFTGKRKSTVGNSPVVQPHVGSRAVHEYQFLPEQPSDTYERASPHYYDTPVEASNSRIPSLTSGSQLLHGSEEAAPSYAFQGHTSGSSLLPPSSRPQVFPVAPTDYEMTQFNSNLSSVPVEGQFDTSQVAAFEDPPVSSERRAYHDEDTSRVERKRKHNEEAKIAKEVEAHERRIRKELEKQDFLNRKREEQRHKEMERLERERRKEEERLLRERQREEERFQREQRRENERMEKFLQKQSRRVCFWVPRMLIEEKQRQKEQLRKEKEAARQKAANERAAARRIARDYMELVEDERLELMELAAQNKGLPSMLYLDSDTLQQLDSFREVIFHFK

SEQ ID NO: 54360 - protein, 50 aa, Zea mays
  Coding DNA Sequence Number=SeqID_10985
MEIGGLRGGNWNKDYGPLEDMVAGVIWPSILPPGWTVEWDPASAKEEHEE

SEQ ID NO: 54361 - protein, 52 aa, Zea mays
  Coding DNA Sequence Number=SeqID_10986
MARVECALHGKRLDGGVSVLSVRKQPAFVASIQRWYPKKRTKTRAAGGKALR

SEQ ID NO: 54362 - protein, 194 aa, Zea mays
  Coding DNA Sequence Number=SeqID_10987
MPPRTRRTARKHTGPIGVPCHQLAPRHDNSSSGSNDPIGDLEAEVSRLQAELRRRTDIWVADGDRINELRRDVRHLRDQLADRDLALDWVVQSRSLAWAKEETAQARVAELNLAVDNLQTYCNTLHEEVHVLYSQLHPSEPADPVKSEAGPSHVAGEALGGELDLFRPPPSMRLVDEWSPTPDDEAAKSNRKQE

SEQ ID NO: 54363 - protein, 59 aa, Zea mays
  Coding DNA Sequence Number=SeqID_10988
MALWLPTVGFAVEGKKSGTGHCPKFADEVMMLSSMDASLVIPLVIFLWMDVHVSLYFDE

SEQ ID NO: 54364 - protein, 137 aa, Zea mays
  Coding DNA Sequence Number=SeqID_10989
MEQAVPQLGIKALILLFGSYCQRGEIKDKATGSANTCDFFKILSSNMTNEQRYMKQIELGRGHSANLYRPSKKGLYEVKTKGTKENKKEKGESVLDYVAPDSPVHDPANCLLSGILANIGYNSPDRPRGAPNSPCAS

SEQ ID NO: 54365 - protein, 129 aa, Zea mays
  Coding DNA Sequence Number=SeqID_10990
MWHMEDGCGLNGWLRWRENAELFTGAPTSCIEGSSDFRLKRRKLRKAIEINEQRMNIFFLVSLSNEELRKNTENPSPRLIQDCNLADGEYVLIPEQGAVHEEDQEPAPEPAIEDLPTAPAIEGKPRLYA

SEQ ID NO: 54366 - protein, 794 aa, Zea mays
  Coding DNA Sequence Number=SeqID_10991
  Pfam annotation: Domain name=MAP7; Domain location=338-493; Score= -83.3; E_value=0.087; Accession=PF05672.2; Description=MAP7 (E-MAP -115) family
MSSERDLVEEFVGYGVWPLAHGWALGEVCPRQMPSLGGMLVRSPAFALDLHGRDPAAFVREAEDGTVRIVGRYVPKTEGLQSWDIRGSNDRLNRVFELNRLPYGCYPGEDAADRRGKKPIGGTEEGTSQVAAPATKKRKLGTIVGKGVSDNFAVELMGTCAAPGGRMSSPELRESLARMLEDTGGQWPKNLPIPWAEGEDMSTSRIARGLRIFPYGWNIATVVSAKRRAVIRLPDPRREAKRARGSVKAATPGGSQPTLAAKPAAPGSSNVPESTKAVVSGGTKSTPGEAAKVRELPSPGKRVADFATNISVDDYFVGSGEGQLVVVLSTVATTASTAMLGAADFADRVASGALTADVSAEVDRLRVQHTNAVREKSAAESKSRRLAEKVAALEAERTDLWRQLVEERREANQAIIEAQAMQAEAKLARAEGSLASQRVEEWEVRFNALRGLVERAEASTRSEVERTRTQLMDSYHELGARTADFEVPDREAGLRFLEWLQEELLALPTIVEGFMSFASLVTCEGAMNALSREGCRHYEVFDQTDESFEREIFKAEDPVVKQSAGALFDRMWGRMMERAEDVEDFGGLNDAPPEAAEGKPVLPSDAGEGPSDVLVPAATGEDPVSAPVPTVEGAQEVVQSFGPAHATATESANFVAASTVVAENDSGDSVSKIFESDDSGSLVVWTEESSDEDLDYFVALDVAAAEASPRVMGAEVPGPSARRRQRRVVANRRVSEVEGGCLRVDRAGKRELLSSPAGASVGEGELRSLFEGEELRIMLFNYREMGIIPKVEPM

SEQ ID NO: 54367 - protein, 331 aa, Zea mays
  Coding DNA Sequence Number=SeqID_10992
MGSARVAFVLLLLEERNFMEVGTFQPLLGFKDFHQAARPHPLTNGHAGGFKDLHHPCWGGRRAEPELYLPYGPTGHLFLQHSGERALTGLAEGADFDNAGPIGRKRRQLQHAWFAGSAGSGAASVGEGFPTDETVSATHGLTSGSLAFLVCPRPSSGDAGEGLVAATSALRSSLLLFSHPERRSLSLLMERAAASQLEFVVPQAPRCGGCSYPREWNRSSVCNGTLSVGVCSLWLSGPEHQETLGRSAMSRSWRQRRQRGQRRSRLEKKLRRPRSRRGADIFLQGGDPPTVSLSEVGSDSAEGGVDTEGAAAPPIDDLVVGSRIAYLSESY

SEQ ID NO: 54368 - protein, 69 aa, Zea mays
  Coding DNA Sequence Number=SeqID_10993
  Subcellular localization annotation: CTP_CleavageSite=21; ConfidenceScore=5.24e-01
MVPTSKAWDKIKKTNPQPRCRSANGESPLVTTLVYPPGRRVLRTSKRPEPANLVHCPSCDRHEPFCYSR

SEQ ID NO: 54369 - protein, 84 aa, Zea mays
  Coding DNA Sequence Number=SeqID_10994
MAPLDLEHIERINKISHQPHLFFKLPKLRLERHIFVISEGKNVSRQEVTVMMQKVEAKIPRIELGDQVMQFSENRPSSKVTSKT

SEQ ID NO: 54370 - protein, 378 aa, Zea mays
  Coding DNA Sequence Number=SeqID_10995
  Pfam annotation: Domain name=zf-CCHC; Domain location=278-295; Score =18.5; E_value=0.0024; Accession=PF00098.14; Description=Zinc knuckle
  Pfam annotation: Domain name=zf-CCHC; Domain location=31-48; Score =25.9; E_value=0.00015; Accession=PF00098.14; Description=Zinc knuckle
  Pfam module annotation: Pfam domain module=zf-CCHC::zf-CCHC; Domain location=278-295::31-48
MRMIRKINLMGVPLQVEDILFNIDRKKQRKRECFTCGEKGHFRDNCPTMAEPKKGRSKGKALTSVKTWDDSSSEDEPPRMRSHRSSSRSSRSSHKCLMSRGKMSIPSSSDESSSDDEGEGKPSVDELAEAVKFFQDVCTKQKAQLKTLKNKLISSQNDYKGKMEILSIHNNELTTKLENIGSTPEVSLVEIPEIIKKDASSSWFDLIDDSNSCNQVLVENIVVETCSNEVAKENEQLKQEVDRLGKALYDKKGKAKQIQPPQDNTTAGVNKPVEGESVICRLCHKEGHKSFQCKAKTRDKQKEKLKQNPTSKIYNTYIKKVDKKVATPYLIKKKNGKVIAIKANKQANNGKGAKRIWVPKEIISTMKSTKKVWIPKGK

SEQ ID NO: 54371 - protein, 302 aa, Zea mays
  Coding DNA Sequence Number=SeqID_10996
MGSARVAFVLLLEERNLTEVGTLQPSLGFKDFHQAARLHSLTNASRILTILAGEEGGASRGEPGLASAWAGDPLLPLAFGGGRHPPALRRRRPPAMRGKVNCRCLARVQHSVFRPGDCGRLHRGVAQHVIRREGGTRVLGWSRSHSCGENRSEDLPVRFGAAGARWCGVGGQVATGEGFSADETVGATYGPGLRLFGFNGLFSSPARGRERGPFSSSVCPEAVHVDVLSPETEVVVAAAVVGGEPPGLCYPTGPLNPRLLCDEPEPEAAVSAWTEASSAPEHVASQAEEVQQRRLELGQVVR

SEQ ID NO: 54372 - protein, 363 aa, Zea mays
  Coding DNA Sequence Number=SeqID_10997
  Homolog annotation: Hit_ID=Q6QP51; Match level="QueryCoverage=39%, HitCoverage=90%, E-value=9e-24, Identity=81%"; Hit description =Putative growth-regulating factor 1
  Pfam annotation: Domain name=Extensin_2; Domain location=11-340; Score=-129.8; E_value=0.032; Accession=PF04554.4; Description =Extensin-like region
MQVACNRTTRAHPLGFDASSIEAQTHTSCNRRAGYYVQATAPPLAPMSRLLDCGTGAATRGNHAHGPTVPIEHIDHGSVSRGRRDRERGYSERDPSPRRKRAPSPPTDQGFEGWPLERVRQPPQSTRAPRPLLIRGSKAGPSEGFDSCPRVRRARDDSGYVRYMAEARVTLPRRRSLPRPTPRARPPPQPRKVVSASPDPKARPQPQPRVESRPRPTSVSASGGVSASPDLGLGPTAPQGIHHYPTPSELRLRGNKTGVPSKLAPVTSNDGSPHASMTTAVLSPLWKQGDISKVPAAPTAVPLQGSSAPPTATTPRRARRRLLLRPRLGLGEVVTPPEAEAEAEAWGRARRRSSSEAEAEAKA

SEQ ID NO: 54373 - protein, 472 aa, Zea mays
  Coding DNA Sequence Number=SeqID_10998
  Gene Ontology: Mol. function=helicase activity
  Homolog annotation: Hit_ID=Q1EPC6; Match level="QueryCoverage=44%, HitCoverage=13%, E-value=3e-71, Identity=60%"; Hit description=DNA helicase homolog, putative
MDPDDDSDWLHRNEGFQANDIVATTDLLTPGSVHESIGVIGEPGIRVRESSLKCLRLYNHTPRRKEAKIEYLRKLRALQANTLNHTSITMEDPTYTPKVVHPKADATKPAGSSVSVDNWVVPKFIRTPFLPASTQTEDVGSFDLSTKVVRHKHHVTHGERQAILARQNQQFEASIAKNMATLIGDTISDADINNNAQCRVTCQGATLPTNGSADITEQESGVEHLRAKPRVIYNGDDDDEVVIFGEDDDDDEGYIFDGQYEETDEDNDIDGTQDESIATDVPDPYNNLPEEAHMLKPIADYGYCTAQKFEYEPPRCCCHGGKVELAPLDTPPQLRRLWDSVVSNAKHFRDNIRFFNSHFSFTSLYCCIDSMTTNERDSGIYTFRAQGMMYHNIKSFGKEGGSEHKHLELYFYDGDPSLEHRYRKCREEQLQKDKEVIKQIVDILHGNPYSEHLRSMGHVENLDDYHITLNLD

SEQ ID NO: 54374 - protein, 151 aa, Zea mays
  Coding DNA Sequence Number=SeqID_10999
  Subcellular localization annotation: CTP_CleavageSite=70; ConfidenceScore=5.39e-01
MPVSPARAHAYKAPSGVDRTPPRTLDLTGARNHRRLPSKRRARGHPSPCHRRPASRALPSHARPSEETVHASVKLPEQGIGPCFAGEASPRSPGLHPTAGERRPDCNLADGEYVLVPEQGAAQEVAPDPAPEPAPEDLPAPALEGKPRFYA

SEQ ID NO: 54375 - protein, 238 aa, Zea mays
  Coding DNA Sequence Number=SeqID_11000
MAVVVAAAPRRKEYHVVAAVEGHELETPETEQRPGLKRLLETTHLELNGKLFGNTQQAPTWRANYRRFDPGGVPGPTSKNCRGLRTAIVMDARGGAIITCYRGEPGWDAVRAQGRARRRLLLRPRPGSGEDAIPPEVEVEAEPWGLARRRPPSEDEAGAEPWGRARRRPPPEAEAQGRARRSFLLRLRLDLAVVSLTLAGGIAVGEGRAALFSYQVGQWKGEVTVVTSTLPTEARVSG

SEQ ID NO: 54376 - protein, 581 aa, Zea mays
  Coding DNA Sequence Number=SeqID_11001
MTNTLNTEGGIGITAREGVYSGLGGCRRHTLQDTLTLQARVLTLEGGSNTLGIDDTFGKARPSLGRRRGPRISAPKDDVVTTPGQSLPGTSPGIRPEQAAQPVTPGASADHLPRALARPEASADQLRRRSRQRTTRLGSGQPGFILEPTPPLFILISLPLASAHRRAAEGSPSPAWLEDVSAVGLEGDCHHQKLEEEVVRRPAQEVEPRLASLPAPARMTNTLNTEGGIGITARSTGERGEQPCRRHATALSGRASPTPDTPAWRPRPTRRATGAPDAACKQLHRHLRHHRASSIAEPIPRLEATQRATQQRQPDAAANAAKSRPAVMTGAGAREQRSRRQPSSRPIRGQQENPLSRREDNAPVIRSSNGSRTRNGRPANYSPRRINSVAGQAALLAGAAGDASPSPKQPRQKRLRASLLIRGSKAGPPKGSTAASDRVGPTPTTGQRGSKAGPRRVHSRLRRRARDDQGYVRYITKARVALPSSSETPCSAPIEGNMALSPPLLLAERRRRGVCKKAESVPDRPLALCRGSGAALANPDPAKPLTASTYQPENLGPDRTPGLRPARMREQPDQPKHYARH

SEQ ID NO: 54377 - protein, 177 aa, Zea mays
  Coding DNA Sequence Number=SeqID_11002
MTVSMASIPVLHSTEVAHLYPQVMLPIYQETANPIHLYRGGEAGAGIPRLTAIAAKSTQGPPYTDHSPTALAPFGYFYLLNLRIHSGLLDYSCRRFETGGSLRPTSECRVPQPRWVERVGEREGGKGARRPETGAREVGIPRPSCSSRAQVGRKERIQVYNGGVAECYVSSEGELVP

SEQ ID NO: 54378 - protein, 145 aa, Zea mays
  Coding DNA Sequence Number=SeqID_11003
  Subcellular localization annotation: CTP_CleavageSite=56; ConfidenceScore=5.05e-01
MPLTIQKNPWGFTKPHLRSFPQLNSIRGRGKGGGAYQRRDCSGEVVEGVGKVLRVTAMCGSPSGMVGVGRSTSAGRGARRRRGVRPNQGTIGQSNGSVSFTRDQGRRVTEVRRGQSWFSSEVLPGPSAWKASRATGEANRRAGAA

SEQ ID NO: 54379 - protein, 206 aa, Zea mays
  Coding DNA Sequence Number=SeqID_11004
MSECSAVLKKRERGSIYSHGSKTSHLTKNPVENRLNRPLGRLNRPLIGQQSVCQSDCQTDWQTDLQAGQTGQDRLNRPPRAVEPPPNTPGDLTASLTGRLQIRSQRLVEKDLQVERLSQRITTLEQQVEIRDNTIDVLENQLHDVQWELKEANDHLDMHQLEMEANEAGSEGEEAPEELGPAPGANGTTSVMPPSPASSVASAAQG

SEQ ID NO: 54380 - protein, 63 aa, Zea mays
  Coding DNA Sequence Number=SeqID_11005
MDLPLSLTKLDPKLLNCNLADGEYVLIPEQGAVHEEDQKQAPETAIEDLPAAPAIEGKPRFYT

SEQ ID NO: 54381 - protein, 91 aa, Zea mays
  Coding DNA Sequence Number=SeqID_11006
MTHRIARSTRAGGRPKSGEDDLGSPVKFCRVRALGKLHGLPVKLTEGQARLGSDWSRLATVAEAWEVMAGGRELAGAKEGRLVSEGEHGLR

SEQ ID NO: 54382 - protein, 107 aa, Zea mays
  Coding DNA Sequence Number=SeqID_11007
  Subcellular localization annotation: CTP_CleavageSite=34; ConfidenceScore=5.44e-01
MGMPSLVRLMCLFILLPRRSMSGTSRPTGCLLCRQTMKMKKSMLMIARSLPRLPTMGIRVNHPPTLRLLTLVRDPFLVQLSFPAELNFSCDELLQLQLSFSAELDFS

SEQ ID NO: 54383 - protein, 249 aa, Zea mays
  Coding DNA Sequence Number=SeqID_11008
MANDEQLPLQWAEVAVVPPNRRPWGPMQTIPRQTPALVATGMQWGDHTPPPVAEPPLSIHGERRSAHFALAHGVQGSRAPCSVANGKQQRQMTENRVFIAEIDENSTARSAPTVVSATPATTDNKSRSITEFSLGRNRKLRLARPHAPASGGGLRLARPQAPASGGGLRLARPSDSASTPVSGGIASSPDPGLGLKRSLRLDRPWARTDRANRGCIISLFLACSGYKEQDRRPIWLTLATGNDGAPRAP

SEQ ID NO: 54384 - protein, 57 aa, Zea mays
  Coding DNA Sequence Number=SeqID_11009
MESHDLRAKRESRLVGGYEIDGFGYVYGAGCQHCNHCSGEDEAVEGDFQEFQDYDEF

SEQ ID NO: 54385 - protein, 913 aa, Zea mays
  Coding DNA Sequence Number=SeqID_11010
  Gene Ontology: Mol. function=hydrolase activity, hydrolyzing O -glycosyl compounds; Cellular component=endoplasmic reticulum; Biological process=carbohydrate metabolic process
  Homolog annotation: Hit_ID=A2XDZ1; Match level="QueryCoverage=100%, HitCoverage=100%, E-value=0.0, Identity=84%"; Hit description =Putative uncharacterized protein
  Pfam annotation: Domain name=Glyco_hydro_31; Domain location=332-772; Score=753.7; E_value=1.2e-223; Accession=PF01055.17; Description =Glycosyl hydrolases family 31
MDPPRRRLPAALVVFLLLLAAASPVARAWKKDEFRNCNQTPFCKRARTRAPHSLDAPLSLAASSLAISPDGSISAELSHPSRPRPLVLRLSALPPHALRLQIDEDYSTATPPHRRFHVPDVLLPDLEARTLHLPEPKTAAGVSTVALSSDLDVVVRHDPFELAVRRAGSGDPVLSFNSHGLFDFEPMRESKPEDDTWEEHFRSHTDKRPRGPQSITFDLSFYGADFVYGLPEHGSTSLALRPTRGPGVEESEPYRLFNLDVFEYLHESPFGLYGSIPFMIGHGGRASSGFFWLNAAEMQIDVLAPGWDGVTDHENGRIDTLWMAEAGVIDAFFFVGSEPKDVIKQYISVTGTPSMPQQFATAYHQCRWNYRDEADVDGVDAGFDEHDIPYDVLWLDIEHTDGKRYFTWDHSAFPNPEEMQRKIADKGRKMVTIVDPHIKRDSSFHLHKEATDKGYYVKDANGNDFDGWCWPGSSSYPDMLNPEIREWWADKFSYENYKGSTPTLYIWNDMNEPSVFNGPEVTMPRDAMHYGDVEHRELHNAYGYYFHMATADGLLKRGEGKDRPFVLSRAFFAGSQRYGAVWTGDNSADWDHLKSSIPMVLTLGLTGLPFSVSTGADIGGFFGNPEPDLLVRWYQVGAFYPFFRGHAHHDTKRQRRTAIIREAIHMRYSLLPYFYTLFREASVNGIPVMRPLWLEFPDDKETYNNGEAFMVGPSLLAQGIYEEGQKSVSVYLPGKESWYDLRNGSPYKGSATHKLQVLEDSIPSFQRAGTIVPRKDRFRRSSTQMVNDPYTLVIALNSSGAGEGELYVDDGKSYEYQQGAFIHRRFVFADNKLTSFNIGPDDLGKKFRSDCVIERIIILGLRSGVKKAIIEPGNQELEIESGPISLRSGSSPVAPTIRRPNVCIADSWTIRIA

SEQ ID NO: 54386 - protein, 536 aa, Zea mays
  Coding DNA Sequence Number=SeqID_11011
  Gene Ontology: Mol. function=drug transporter activity; Cellular component=membrane; Biological process=multidrug transport
  Homolog annotation: Hit_ID=A7M6U2; Match level="QueryCoverage=94%, HitCoverage=86%, E-value=0.0, Identity=71%"; Hit description =Aluminum activated citrate transporter
  Pfam annotation: Domain name=MatE; Domain location=377-536; Score =30.6; E_value=5.6e-06; Accession=PF01554.9; Description=MatE
  Pfam annotation: Domain name=MatE; Domain location=74-293; Score =36.0; E_value=1.4e-07; Accession=PF01554.9; Description=MatE
  Pfam module annotation: Pfam domain module=MatE::MatE; Domain location=377-536::74-293
MEDNGAAAAAAAPATSMPAEKRVAVIQGDAPPEPAAGLLPCGPRKTGLHLFVMNIRSVFKLDGLGSEVLRIAVPASLALAADPLASLVDTAFIGRLGSVEIAAVGVSIAIFNQVSKVCIYPLVSVTTSFVAEEDAIISKAVRGNSSQEEDVEKASHVGFDPETSNLHASGMAECVNSCIPTECAADPSGRQGRCEKRYVPSVTSALIVGSILGLLQAVFLVLSARFVLNIMGVKSGSPMQGPAVRYLTIRSLGAPAVLLSLAMQGVFRGFKDTKTPLYATVVGDAANIILDPILMFVCHMGVTGAAIAHVVSQYMITLILLCRLVQRVHVIPPSIKSLKFGRFLGCGEIPLESRARIIISTLRKEIELFVSASGFLLLARVVAVTFCVTLAASLAARHGPTVMAGFQICCQLWLATSLLADGLAVAGQAVLASAFAKNDSKKVAAATSRVLQLSIVLGMGLTVVLGLAMRFGAGIFTSDVPVIQVIHRGIPFVAGTQTINSLAFVFDGINFGASDYRYSAYSMDVSLIPYIGKVSL

SEQ ID NO: 54387 - protein, 568 aa, Zea mays
  Coding DNA Sequence Number=SeqID_11012
  Gene Ontology: Mol. function=catalytic activity; Biological process =cellular metabolic process
  Homolog annotation: Hit_ID=Q10PY3; Match level="QueryCoverage=73%, HitCoverage=98%, E-value=2e-67, Identity=61%"; Hit description =Expressed protein
MERRARGLESAPASPPCSRAVLRSQEDAEEQEEKWRFQAEILRAECNFLRMEREVALRKLDRHRGQMEAALKSAVETLVSGRKKIDGKGDVGLAATLDEGIEDLEEMMEELRVEESGRRAMSGVRELQRSHGRNFDRQASSLRRRLEKMTPADPEPCIKDIREIALPVPAPPPPPAERSDDDERVHGANTPDVEMLRMKMEGMSKGMRERMAEYSRRLEAVASGDNTGCESGKCGNRHSRKASASSQRSWSGGSTASNGNAPSTLDAGPHGRSRQNVAAEKRQQQQTCWSLDLKNGDAVTVAAPYCFGMNDSLSMGNFEYTCPKNNLPCTLETARSIWGPSMTFRIGDVAPTTRKAKLFLVGLKGLGQARLRKVLAITVPFFQQIMAGECKLVGSASCCHCREIVWKVMEQVKAESDQWTEMQEMLEQVRLEMQELQASRDAWQHRAMASDISLRSLNSQVLEWKNRAQASEQRVEELHREILELESKLHTFKAHLPAPAAIPNQKQWSDACKMEYPRAKPQHPRSQESGKEEIKKHVLICRVKRSPSSVLSKRSPFQEIGNISLPRH

SEQ ID NO: 54388 - protein, 53 aa, Zea mays
  Coding DNA Sequence Number=SeqID_11013
MGLGVCGSLCQGGDEDDGFGYDYGTGCPRCNHCSGKDEVVEEDFQEFQEYDEF

SEQ ID NO: 54389 - protein, 262 aa, Zea mays
  Coding DNA Sequence Number=SeqID_11014
  Homolog annotation: Hit_ID=A2YAY0; Match level="QueryCoverage=43%, HitCoverage=20%, E-value=3e-07, Identity=35%"; Hit description =Putative uncharacterized protein
  Subcellular localization annotation: CTP_CleavageSite=56; ConfidenceScore=5.03e-01
MARSSEAPKLYGNTSASIGPPRASSHHGTLHRAPRYFLVSPDALTMEDRRRGAAPRAGKAAAEDSELSRPKFQPSSALELLRCKGEDRPDDQDPREINYIIKKEKVDDEDEDVALIEVTFGDAPSPAQLEVLSYTNGNELLLSRYNNALLQGCAQASYHALAHCLEFMFSPLNADELGGLFDVDFPSFWAQMEEDEARRKSEEGDCEKALIVYGNVQTVAEIPGRRGGGSSSGTKKKELTFEQLSRHFSVPIKQAAQELNVG

SEQ ID NO: 54390 - protein, 45 aa, Zea mays
  Coding DNA Sequence Number=SeqID_11015
MATAGASGAWIWAKQNQTPGAELVARGPAVQGTGQADYKSLIGLE

SEQ ID NO: 54391 - protein, 39 aa, Zea mays
  Coding DNA Sequence Number=SeqID_11016
MAHRTVRCANGKSLPWTSLAPPGRGCTGQSGAHRTVRCP

SEQ ID NO: 54392 - protein, 85 aa, Zea mays
  Coding DNA Sequence Number=SeqID_11017
MCHVTIQKQKEIAEAAAQQAQPKQVCDNKKDLRTIESPLKQRKVVLRNADFIQKPIDDFVHNIFGHLFNFVVPLRLRARRRFSRI

SEQ ID NO: 54393 - protein, 199 aa, Zea mays
  Coding DNA Sequence Number=SeqID_11018
MAERYQLPRSCILPTTRRKDGGYPPSGGLEGGKTRCIRERKDTVAFQGGHPPFKGDSPYLRPQPSWAKSSPTHSKVLPYSAGAGSHTSCKQAQNRRSQTAARAGPGKGDTPKRILPREGTRLRASLLIRGSKAGPSEGFNSRLRARGLHTHYWSEVRRPAPRKGSTAALGYSGSAPTTDQGFEGWPPKGSQPPQTQSEG

SEQ ID NO: 54394 - protein, 141 aa, Zea mays
  Coding DNA Sequence Number=SeqID_11019
MVRTSMMTTSEVTLSTNDLTSEVDEPMTDLASLDMLLRLVIHEEGYKNKYEATLKELEFVRAFVVLYDETECDERRFSGPGLGFAAKGVSDDLYGKVDGCSPLTSSEKPISTPNSIKVTPPKSTTLAMRDGVFEEHPRAPP

SEQ ID NO: 54395 - protein, 99 aa, Zea mays
  Coding DNA Sequence Number=SeqID_11020
MESHDLRAEWESRLVGGYEIDGFGYDYGAVHYSQTGYFAEYVDVYSTLALHTKPSPRFVSIATTCSAEMKLWKEDFRELPRLRPSYRLRVRAKRFRSAL

SEQ ID NO: 54396 - protein, 166 aa, Zea mays
  Coding DNA Sequence Number=SeqID_11021
  Homolog annotation: Hit_ID=Q8H6I5; Match level="QueryCoverage=66%, HitCoverage=12%, E-value=5e-09, Identity=41%"; Hit description =Putative RIRE2 orf3
MDAREEPSLPVTGNLRSLCDELEPEAAVSARTEAESARKEASSVREHVASQAEEVQQQRLELGQVIREWDQPRSHAAEAMSRAEVIGGQLAEATERPAGVSAQARTLAESLAVRAQARCCRPPSRWRSFRPCRRLRLGQVPPRVETPPRVLLLLLPMSEPAGTVCL

SEQ ID NO: 54397 - protein, 218 aa, Zea mays
  Coding DNA Sequence Number=SeqID_11022
MSGQFTAPSRVMTEEVNSRDCSILRKLRDSNKALSVRQLQEVEAPGASEEDMGTSLGKSTAYSVVKTRATIQERVKSPSKSKKKLQKPKPRKTSRSRSCTLLCVIHPTYQNMWVIIPQLLLLRLVSRKFLGHSFHLRRHYSLHTHETHENAEATKRYSFGNAVLKIAVKVSPKLEKVILKERSVTLLMLRKAVPKGAQPSGSNGSRGGDSSAAVEDMN

SEQ ID NO: 54398 - protein, 195 aa, Zea mays
  Coding DNA Sequence Number=SeqID_11023
MVIGSRVDGSDSKSPRVSRGRQIRIRRPEIAVRKLLRSNPSPPHKLHLTARGEIPKLTAVAGTRDGAATTRRRVHRSSRNPVLPSAKPKLKGAARSRGQCEPHGGKLTINNGAETTAHGEARSSCKNWASATNRGLHRPRLRPPKLRAGSRQPGGAPLTNYAPQFDAHREFSPNHGFFRDELMAAGFEKLGRLRT

SEQ ID NO: 54399 - protein, 218 aa, Zea mays
  Coding DNA Sequence Number=SeqID_11024
  Subcellular localization annotation: CTP_CleavageSite=21; ConfidenceScore=5.11e-01
MGAIKSRLGPLKDTISPRPSPASGKGSRPRRIYVSLEGPLKQRTHLRLARGPVFAKKQPWPNRHDDRPVRLKAAKSGLGRHRKLRLARSQGSDSALAPEDDELRLARSQGSDSASALEDDELRLARPQGSYAASAPEDDELRLARSQGSDSVSAPEDDELRLARPQGSDSASALEDDKLRLTRPQGSDSASTSEDILDLDLGRQTRPRPRRSPLPRPT

SEQ ID NO: 54400 - protein, 57 aa, Zea mays
  Coding DNA Sequence Number=SeqID_11025
MESHDLRAERESRLAGGYEIDGFGYDYGAGCQHCNHCSGEDEAVEGYFQEFQDYDEF

SEQ ID NO: 54401 - protein, 90 aa, Zea mays
  Coding DNA Sequence Number=SeqID_11026
LIYGLALAEALLFLVEKAVWEWKPRGVALVEPVLAPRRKRSSSKPHSGHGYLLCSLILDDVLRGVEEVRTSCPARWTPHAHIVMRMPCKG

SEQ ID NO: 54402 - protein, 99 aa, Zea mays
  Coding DNA Sequence Number=SeqID_11027
  Subcellular localization annotation: CTP_CleavageSite=74; ConfidenceScore=5.40e-01
MPGPEVELLQNRVKKFGLSSNFPRMCSRKTVSDTGVSQPSPLKGISSRDSGQSPPRVKRRIRKAGGGVGGDYIPASLGRQSGKLDLKNSSVSQVASSSE

SEQ ID NO: 54403 - protein, 190 aa, Zea mays
  Coding DNA Sequence Number=SeqID_11028
MHPGYHQITRGNNQTGQGITKGIKPSEESNHSSEASGATPGGRRSPPHPTSGLSPRLSLGRWSPPRPTLGLGLNLDLRRQSPPRPTPWLGLNLDLGGWSPPRPTPGLGLSPDLRRNRVLTQPRPQPQEESPPRLTLGSDRPRHRGTPRGRNADKFIGSSSAGIPRLTALAAKSTQGPPYTDHSPTALAPF

SEQ ID NO: 54404 - protein, 67 aa, Zea mays
  Coding DNA Sequence Number=SeqID_11029
MQTHEKEVNPYLLLVIKEKDCNLADGEYVLIPEQGPVQEEDQEQASEAAIEDLPAAPAIEGKPRFYA

SEQ ID NO: 54405 - protein, 40 aa, Zea mays
  Coding DNA Sequence Number=SeqID_11030
MASYNFVEDVNLFLNTFVSPRNIFSRKFEILFNFGLDCRV

SEQ ID NO: 54406 - protein, 450 aa, Zea mays
  Coding DNA Sequence Number=SeqID_11031
  Homolog annotation: Hit_ID=A2WQE8; Match level="QueryCoverage=58%, HitCoverage=68%, E-value=2e-72, Identity=50%"; Hit description =Putative uncharacterized protein
MRKFMAAANLTANWPSHARRHRKRDPDVIGIYVDNDGVFKKEGRGTLKGIAAATKRIKNGDHKLKIEFSSKLGGPVGPNARTFVDEIVLFTKKKAPLIGVKKWKDIELNVRSSIASDVLRRWEFLTNEDAHEKIWSIAKERYKGWRSTLSSTYKAYNSYAERMKNKPEDVDIVEWHYMMLYFGSEKFQKISSRNSENRQKQRTKHIMGSRTFSQISFQQRDPETGIEPTDLSLWMITHCKNDEWSEEASRGIYEKAAEKIVEKIYQTERFKLTREEENAIFQTTFKETTGCKANRLHGHGYLSRYPTRSQVMESKFLEQARATVATNQKNIELESQVQLLNEKLACEVAERERILQEKMQALQEEEERKRQVLREEMRQEMVAALAAVAQQSNRESTTPIDPSSVVPTKPPELIPADPPAPAPSSANNVRTPDTNNKKDNMQQTILALTL

SEQ ID NO: 54407 - protein, 70 aa, Zea mays
  Coding DNA Sequence Number=SeqID_11032
MAHGGSGPTEVLRRAISPPPEDILAWKDHEDVRDECPSGQGVTLHKIVTAIGGGVSVAKAQRLWKAVVGP

SEQ ID NO: 54408 - protein, 134 aa, Zea mays
  Coding DNA Sequence Number=SeqID_11033
MVVVIRAGARKLMNDLTGQQKLQVDYPRILVYRESSTKHPDVLIHLLKKLLQGLRGFPGKVLSHRSLPKPFDHGLNENFIRHYGCLCSQTQEPSDIRLDVFFMVLLALEQSLSSDQLRMEPLETGDQHVLQLLL

SEQ ID NO: 54409 - protein, 38 aa, Zea mays
  Coding DNA Sequence Number=SeqID_11034
MFGLQVVMRMMVSICGNGKEEAVEADLQEFQDIDEFKD

SEQ ID NO: 54410 - protein, 80 aa, Zea mays
  Coding DNA Sequence Number=SeqID_11035
MPEQGAAQEVAPDPAPEPAPEDLPATALEGKPRIPVEMNTSMLDRGSLEDMVAGVTWPSILPPGWTVEWDPTSAEEEHEE

SEQ ID NO: 54411 - protein, 103 aa, Zea mays
  Coding DNA Sequence Number=SeqID_11036
  Subcellular localization annotation: CTP_CleavageSite=33; ConfidenceScore=5.07e-01
MASAGLWRDAGHARSGAGVLWRAQNASNTWKCSSARVQTPTEIANVRILAKIRRRPLPGTYGYLSYDECPSGQGVTLHKIVTAIGGGVSVAKAQRLWKAVVGP

SEQ ID NO: 54412 - protein, 66 aa, Zea mays
  Coding DNA Sequence Number=SeqID_11037
MTSKVDYTCLGPRIPSLVYFAQISLHVIMGKRGNPGMDTLSNTWGVTALPLKGISLRDFRRKPFLN

SEQ ID NO: 54413 - protein, 331 aa, Zea mays
  Coding DNA Sequence Number=SeqID_11038
MAERYQLPRSCVPPTTRRKDCGCSPPGGSEGGKTRCIREREDMVAFQRGHPTFKGDSPYLRPQPSRAESSPTRSKVLPLRREGWIPRVMQAGPEQKKPNRRARCMQPPSGYEHSSAFAQTSGRKGGQPCRRHATAPSGRAPPTSNAPSMGAHAHASRNRRAGRYVQATAPPLAPLQRLLDCGTSTATRGDPAYDPAVPARRDGQYGHKRAGSNGGGRRAGAVVTSSAKLTSHPGAGPRKGDTPKRILLREGNRLRASLLIRGSKAGPSEGFNSRLRARGFCAHYLSEVRRPAPLKGSTAASGYSGSAPTTDQGFVGCPSKGSQPPQTQSEG

SEQ ID NO: 54414 - protein, 297 aa, Zea mays
  Coding DNA Sequence Number=SeqID_11039
  Gene Ontology: Cellular component=nuclear speck; Biological process =mRNA processing
  Homolog annotation: Hit_ID=UPI00015558E9; Match level="QueryCoverage =88%, HitCoverage=39%, E-value=1e-09, Identity=28%"; Hit description =PREDICTED: similar to splicing coactivator subunit SRm300, partial
MAVAGGQKQRSRRRPSSRHLVGQRENPLSRREDDAPVFCSSNGSCTRNGCPANHPPRRINSAAGQAAPLAGEGPGKGDTPKREPSSRRKRAPSPLLIRGSKAGPTEGFNSRLRALGLRAHYWSEREASSPRTPSKGDRVRQITRRVRLTAAKPGPRRYGKLRFARPQGSDSGSAPEDDELRSARPQGSDSGSAPEDDELRSARPHGSDSGSAPEDDELRFARPQSSHSGSAPEDDELRSARPQGSDSGSTPEDDKLRFARPQGSDSGSAPEDDELRFARPQGSDSGSALKYDELRFA

SEQ ID NO: 54415 - protein, 237 aa, Zea mays
  Coding DNA Sequence Number=SeqID_11040
  Gene Ontology: Mol. function=kinase activity
  Homolog annotation: Hit_ID=Q6QP54; Match level="QueryCoverage=31%, HitCoverage=26%, E-value=1e-09, Identity=48%"; Hit description =Putative kinase
MGRRETEREGGKKPEGDGRERWNPAAFVFVPRPGRAQGKDPGSCVVVAVGGALEPDGRTAIGAVESLLTSSCFRKGAESRRRHRAVMMAPPIDVVGPCPELGKVEGPPRSRSSLSSEAEVESEPLGRARRRPSAEARAESEPWGRAKRSSSSFGAEPESEPWGRAKRSSSSSGAEPESEPWGREKRSSSSSGAELESEPWGRAERSSSSSGAEPESEPWGREKRSSSSSRAEPESEP

SEQ ID NO: 54416 - protein, 389 aa, Zea mays
  Coding DNA Sequence Number=SeqID_11041
  Gene Ontology: Mol. function=aldehyde dehydrogenase (NAD) activity; Cellular component=cellular_component; Biological process=metabolic process
  Homolog annotation: Hit_ID=Q69P84; Match level="QueryCoverage=83%, HitCoverage=63%, E-value=1e-156, Identity=86%"; Hit description =Aldehyde dehydrogenase
  Pfam annotation: Domain name=Aldedh; Domain location=3-371; Score =169.2; E_value=1.1e-47; Accession=PF00171.13; Description=Aldehyde dehydrogenase family
MEHVHDAALAVGAAERTVRDVLQPWQLDQPKGTDVLAARQDRPGGGRRWHHGKQRMTDTTADRWEGKGAPTTPLITIAMTKIVASVLEKNNLPGAIFTSFCGGTEIGQAIALDIRIPLVSFTGSTRAGLMVQQQVSARFGKCLLELSGNNAIIVMDDADIQLAVRSVLFAAVGTAGQRCTTCRRLILHENIYQTFLDQLVEVYKQVRIGDPLEKGTLLGPLHTPASKENFLKGIQTIKSQVKGGKILFGGSAIESEGNFVQPTIVEITPSAPVVKEELFGPVLYVMKFQSLKEAIEINNSVPQGLSSSIFTKRPDIIFKWLGPHGSDCGIVNVNIPTNGAEIGGAFGGEKATGGGREAGSDSWKQYMRRATCTINYGSELPLAQGINFG

SEQ ID NO: 54417 - protein, 127 aa, Zea mays
  Coding DNA Sequence Number=SeqID_11042
MERAEEGKQWRSHRLCALELGVGKPATTVKAVRRRRRELDQLTGYSAPSGNVRGMSPMGEELEDGSGLEAAIGEVESDGAVGEEVESDGGVEEREGRPLELSAVEEEPSTVIRSNARMQSAARWAAR

SEQ ID NO: 54418 - protein, 347 aa, Zea mays
  Coding DNA Sequence Number=SeqID_11043
  Gene Ontology: Mol. function=unfolded protein binding; Cellular component=endoplasmic reticulum lumen; Biological process=protein folding
  Homolog annotation: Hit_ID=Q9SLY8; Match level="QueryCoverage=26%, HitCoverage=21%, E-value=1e-33, Identity=73%"; Hit description =Calreticulin precursor
  Pfam annotation: Domain name=Calreticulin; Domain location=18-226; Score=-152.4; E_value=8.3e-08; Accession=PF00262.9; Description =Calreticulin family
MAADHRTEAQSRGPPTLPSPLSLLGEPPQPRASAGIGAATGSKHGEKGKKCGRKCAAVYVGDGKNIVHSWLHFVCACPKEFEPDANIVEIARVAGIDVWASMGQKKEVGYRKQKFHGFTMQTDIIYEHWDILPPKQIKDPETKKPEDWDDKEYIPDPEDKKPEGYDGIPKEITDPDAKKPEDRDNEEDGEWTTHLLVPFPTKIQGTMETKRLNEALCLTTPSSLMILRWPRLLQRRHGASTRRYCVLMLGVKMVATLRFLSFKKKHRGREVTVIDCTSPTVPWPADDASGRWQPASCFHSTNATESKVFYLKMKGDYHSTWLKYKFVFHVFYPPPTRISWISDFYSR

SEQ ID NO: 54419 - protein, 146 aa, Zea mays
  Coding DNA Sequence Number=SeqID_11044
  Gene Ontology: Mol. function=nucleoside-triphosphatase activity; Cellular component=cytoplasm; Biological process=protein metabolic process
  Homolog annotation: Hit_ID=A3AJA8; Match level="QueryCoverage=30%, HitCoverage=6%, E-value=2e-13, Identity=84%"; Hit description =Putative uncharacterized protein
MGALIIGVKYRGEVEDRPKAILKEVTDSNGQTILFIDEIHKVVGAVRIVMLWLYFISPLNNSDALALFLPSYMVAKISMTVFILGPASMMIKLLISRLRDYLRILCSGLIKERHFGTDIPRWDYHVNSSHMMVALAKGGKIREKST

SEQ ID NO: 54420 - protein, 125 aa, Zea mays
  Coding DNA Sequence Number=SeqID_11045
MASARPAHDSDHQPSFLMVLHEEEVKVDSTEGFLPKRLMRAVLPTMRLGSTAEEDSREKLLGATVVDSARRGPKPVRRVQAKHQSDRGGRIRGPGRGVATAPPSGVPMLPYLSYSVNDGEIWLDG

SEQ ID NO: 54421 - protein, 54 aa, Zea mays
  Coding DNA Sequence Number=SeqID_11046
MASMRLDASVKVGPCIIVLKAELVTLLYGNILGINWVSEGTCVLNTRRWALRYL

SEQ ID NO: 54422 - protein, 403 aa, Zea mays
  Coding DNA Sequence Number=SeqID_11047
MTTSSIVGRSKPGCGLCPALSFKDLHHPCWGGGELSRSSTFAWAGIPLLPPASGGGNHPPALRRRRPPAMPGKANCCWPARVQHSVLCPGDGGQPHRGVSQHVVRREGGTRVLGRSHSRFRGEDLSVCFGAAGARWCGVGGQVDAAVGAEVVAAGESFPTDEIVGAICALGLWLFGFNIWFLSPARGREREPSSGSVRSGTIVAAAEVVDEPPRACRPAGPPMWREPRLLFDEPEPEATVSAWIEAELAREETSSAQEQDRRRSRAAEAMSRADVLGGQLAEATERLIKPSAWAGFLEETLAAMAQARPDSAEGGVDAEDAAAPLWMSEPVGSVCLYRIVYPSESYLSRKVMSEQNRLSERELLIQKVMSEDPTIEVVEKHERWSGRKTFSEENFDAEGVPPF

SEQ ID NO: 54423 - protein, 90 aa, Zea mays
  Coding DNA Sequence Number=SeqID_11048
  Homolog annotation: Hit_ID=Q6QP54; Match level="QueryCoverage=61%, HitCoverage=19%, E-value=3e-08, Identity=64%"; Hit description =Putative kinase
MAAAATGRDCAVGETRGRGHRHRGSDSSEVESESEPWGRARRRPSSGVEVESEPWGRARRRPSSGVEVESEPWGRARRRPSSEVEAGAEP

SEQ ID NO: 54424 - protein, 380 aa, Zea mays
  Coding DNA Sequence Number=SeqID_11049
MHAEAERTRTQLMDTYRELGARTGDFEVPDREPGLRCLQWVQEELLELPAVAGGLMSYASLVTCEGAMNALSREGCRHFEAFDQADEEFERDIYKVEDPVVKESAGALYDRMWGLYGREVVRERAETARAQRARRAGGRLRGSEQRAARPGADPRGGCDWGRPGANPGDRSDRDGCPHIRCGRRRPAPEGTPDAPAAAVPSAEDPAAVAAEPTAEAPAASGPSQVQDFGPAHATATTEFLAASTAEGGNEYGGSVSEFFDFTDSGSSVEWTEESSEEDLDYFAALDVAAAEASLHAADAPDVPGPSTGRRRRRAVAKRRVSAEEGARLRVSRAGRQELLSLPAAASTGERELRSLFAGEELRIMLFNYREMGLIPKVEPM

SEQ ID NO: 54425 - protein, 40 aa, Zea mays
  Coding DNA Sequence Number=SeqID_11050
MARLVGLATSSFSLAMNMKLAPDRTNKFMEIISVVQAHQR

SEQ ID NO: 54426 - protein, 304 aa, Zea mays
  Coding DNA Sequence Number=SeqID_11051
  Homolog annotation: Hit_ID=Q8LH90; Match level="QueryCoverage=25%, HitCoverage=29%, E-value=1e-23, Identity=70%"; Hit description =Putative uncharacterized protein P0030H06.108
  Pfam annotation: Domain name=PBD; Domain location=26-81; Score=39.1; E_value=1.6e-08; Accession=PF00786.19; Description=P21-Rho-binding domain
MGVTLTSSFLFHTELRPQDGKEAEMQIGFPTDVKHVAHIGWDGPGSTNNNNNNNSNNNSGGAPSWMKDYHSAPLDSSSFRSESGGTAAANPWASQGCLRHSQIYTALAGLRSSSSSCCKPINQCGSYIYASNDVALNKNTMRSLMLLLCAQTHGHPRLCLMTEIVMDGASVGETSFRDTKSEAGVDVGGGDSPPSPATRRSRRHRSRGSGTSSMDATGGEGEEKTKEKSKKGTRKNRKKQDKSAGDDASGTCQDLPAVPKKSNRRKNKGSSEGSGSAAAKDTTAAAPEEVAASASATAPAVDDD

SEQ ID NO: 54427 - protein, 56 aa, Zea mays
  Coding DNA Sequence Number=SeqID_11052
MTLNGVGSYSLIEAKDFMFVESTIRTKNMATTFFIAEVEVHEDASATNQADSSELR

SEQ ID NO: 54428 - protein, 71 aa, Zea mays
  Coding DNA Sequence Number=SeqID_11053
MGLGEDRSPRFRMCGIRTPRSARGRGPMHDEVSQDLALDSVARLEVQLELSKLHGPLGDVACGVRVVENSP

SEQ ID NO: 54429 - protein, 254 aa, Zea mays
  Coding DNA Sequence Number=SeqID_11054
  Subcellular localization annotation: CTP_CleavageSite=69; ConfidenceScore=5.15e-01
MNNSVIALAGVREPAGARGSGAADDLRRLRSWPGQLRQPLTPTRTPTQGSRVRFRLSPGGFVQDMPRTRKSARKSTGPIGVPHHQLAPRHEGSSSGSNDPIGDLEAQVEQLRTELRHRNRVWAQDGQHINELAADVRRLQDELAKWDLVVDWAVNSCSVSWDREAKARARVTELSAALDNLHVYCNTLHEEVHVLCARLRPEVHSDAALGARPSGTANEGLDEELDLFQPPPSMNLADERSPAAGNGAAKGDED

SEQ ID NO: 54430 - protein, 71 aa, Zea mays
  Coding DNA Sequence Number=SeqID_11055
MAMMDSTSEKMYLCQVLDFGFLNDKAETGLIPEMPTHNGSGEMARVACTLRGKRLDGGVSMLSIGVNPVWS

SEQ ID NO: 54431 - protein, 96 aa, Zea mays
  Coding DNA Sequence Number=SeqID_11056
MKASRREKKVARREEAVTQREALTIEYQAKLSALDQTLEAQWAQQQELEGKASDVALTDENLRAKEQSLDRRETDLARRRRDPQAMEATRKALEDL

SEQ ID NO: 54432 - protein, 83 aa, Zea mays
  Coding DNA Sequence Number=SeqID_11057
MKLQKSRSQGSVAREGVYRLQLKRDKFRPHQSSSYMDGKGSFAADSSLHHYLLSFGLLIFGLVILYKTKRYKESANFKEKVKQ

SEQ ID NO: 54433 - protein, 59 aa, Zea mays
  Coding DNA Sequence Number=SeqID_11058
MAGGNTLAGAKERWLADEGECGAKRGSNGSWCGFLRETLGDTGVSQRKRRGWRMRKRQQ

SEQ ID NO: 54434 - protein, 235 aa, Zea mays
  Coding DNA Sequence Number=SeqID_11059
MAKLAFCRVVHHRTVTIVVRCAISFHIWRIRPLVLGVGWRIRLCPVHTGQSGVPNRPLLWATRRPQIARPTVGAGDRLLTGQSGAPPYSPMVHTIQTTRINTNYIPPPRQVPVYLVVVEEIPVDLPRIQVENRVILEDNSEEFLPTPTPLVESLAFAAGWSASALPTPVVQAPSPGCDDPDNSGDDDEDNKEEEEDEENPNEEANEDQQDHYVGLWPVIEHYTSMFETGHFPNLL

SEQ ID NO: 54435 - protein, 98 aa, Zea mays
  Coding DNA Sequence Number=SeqID_11060
MAEVGRSTCTGGRARRRRGLRPIQGGIVQLNGSESFTRGQGRQRHEELENGSPDSSVDARWQVIEVRRGRFCFSVEAMPRLKLGEASQGLGEAIQGLG

SEQ ID NO: 54436 - protein, 525 aa, Zea mays
  Coding DNA Sequence Number=SeqID_11061
MPSSSSSAADTPPAGASSEETLSNVAAEELRTGDIVEFGVSQMSSVRVQDMHQLGYFGGGVARVLGAEEKRKIGNKIAQFGSCTFTPKTGKTSMEVVELVPCARNKWGNWWEFWFYVAEGTVEDHPGIPVAVMCSHYYSAYPQFEVAEEDEDEGALRCATHMSSGCDLVEEFVGYGVWPLARGWALGEVCSRQMPSRGGMLVRSPAFALDLHGRDPAAFVREAEDGAGFMSFASLVTCEVALNALSREGCSHYEVFDQSDEDFGREIYKVEDPVVKDSAGALFDRMWGPYVREVVRERSDRARDQMARAEDVEDFGALNSVQPEAEANPVVAEAEVDPAPPSETGEGSHAAPAAAVSGGGSSPATVPMVVQDFGPTHATDTANFVAVSTVVAGNELDESAFKFSDFDDSGSLVEWTEESSDEDLNYFAALDVAAAEASPHVTDAEVLPGLSAGRRRRRAVAKRRVSEVDGGRLRVGRAGKRELLSSPVGASVGEGELRSLFEGEELRIMLCNYREMGIIPKVEPM

SEQ ID NO: 54437 - protein, 350 aa, Zea mays
  Coding DNA Sequence Number=SeqID_11062
MQIQCEGRTPHQHPATGRHLARAYFAQRPATRQGPYPIPDKLLNQIASATHVGRAPQGPFVFILLRYLKLRGTNSTTSIEVLPVFGTIILREDFDRGLLAVRSRCPDIFCQGHHDIRCQLVDLDVESTQNFSHKSMRGQTNASGEKSLEDDQLAFRLGDLLCPQDTCHSAAKIPKLVHVLHTDRGHLRHAKLHYVAGAQLLRRHIAQRLLGRCTGRRCIGSRRGRGRHGYVPSAAAGGLLHMSQISDEQEQGGQTSSEQFEKELRRLHHLATPSAPDDLVELVPRSANVGAKANTLPFARCLRQSRCANGDDDRQSSLFIRHAEGRRPMVRSPHPAASPNTGAHVQSGPS

SEQ ID NO: 54438 - protein, 50 aa, Zea mays
  Coding DNA Sequence Number=SeqID_11063
MGLETLSTECTFASLTRLRRKTLKDMLAFGNQEVLFLDVEPIMAMMDSSS

SEQ ID NO: 54439 - protein, 102 aa, Zea mays
  Coding DNA Sequence Number=SeqID_11064
MAAPGQRYCESESGRAATPLIPNMYQAYDGESSDVESLDNDDDPMSGHWMGMVSSDDKNDDDGSSDYGSSDEDSEGSGDDDGDDDGGASQCDEMPPSKRRRL

SEQ ID NO: 54440 - protein, 114 aa, Zea mays
  Coding DNA Sequence Number=SeqID_11065
MDPADAITARLKARTLAERLATARLMHRRHLELRRQSRLNHQDVVCRIFVCASRVLSKRRRHRQRAIMGSSASTNAREVVSAPVHLEPVAPVIILSDNEDGEIDWTALMDDDDE

SEQ ID NO: 54441 - protein, 173 aa, Zea mays
  Coding DNA Sequence Number=SeqID_11066
MDGMFSKIKLDGGSIMAMMGSTSEKMYLCQTELRHRNRVWAQDGQHINELAADVIRLQDELAERDLAVDWTVNSRSVAWDHEAKAHARVAELSAALDNLQVYCNTLHEEVHVLYSRLHPDVPADPVAMGVGPSGTVGEGTDGELDLFRPPPSMNLADNRSPTTGNEETKDDED

SEQ ID NO: 54442 - protein, 149 aa, Zea mays
  Coding DNA Sequence Number=SeqID_11067
MTGKKTTTSSDGGTPKKAKVVVEDEEEAGLEDEEEATVTLSVEKDALECDIGCLPFQSEVFMASQITMHVYIQYILIGRLQHDALLCVKSVQERAFWMCKVLHPHGRKNYMLRFVGAFLLIVRNDLFSIEDLCNTISKDPWVIFVTYLT

SEQ ID NO: 54443 - protein, 90 aa, Zea mays
  Coding DNA Sequence Number=SeqID_11068
MPKLYPWVQRIKVEEGFDFQEPTTKLKFYHQVKGKVLNPRSGLWIYGKPKYVKTSKDMRNDHKISHLMDFGGTKTLNVPKTVETNPRNLN

SEQ ID NO: 54444 - protein, 316 aa, Zea mays
  Coding DNA Sequence Number=SeqID_11069
MAPNIPSLDLILVVYHQSYGREPIFLTQSPGRRRLTATWWSHASERWSSPLKTYSLPKKVSRATNPTTNLTVWFLPAIDVATTPTSTWWQKTDYSCPHCNHCSGEDEVMVEDLQEFQDYDEFYAWTHSTEVSHSFLAFSSCGASASSPSDWPVQPLGEVAPAPARGARASTPGPRAVGLFLLALAGGRVCEALLSCAPTGGVPCTTTGRPSRWSSCWRTKDPNNGDNDDSSLSHNTDLLEEQEPEGWVVQPITRDAARGCHFHDALDTLLCQALDQHNWSIEYRCVVYQHSREVYPDRWEATCLVRGGLIGALFYL

SEQ ID NO: 54445 - protein, 87 aa, Zea mays
  Coding DNA Sequence Number=SeqID_11070
MAVHESRDHMLQGLLEQQVEKNKVIYEDVSMERGAFLVQQAMGISTLKQQDLVEKGIFSSYEDVEKLLQALSKEEEEAVRACLVTFY

SEQ ID NO: 54446 - protein, 108 aa, Zea mays
  Coding DNA Sequence Number=SeqID_11071
  Subcellular localization annotation: CTP_CleavageSite=8; ConfidenceScore=5.08e-01
MAAAMAARLAARSAARLAARPGRPLGRPPGRAPDRPPDPWPRPLAARPAQPPRLGRPCAPCPRPRHCGTGGYEIDGYDYAMVLHCNHCSGEDEAVEGDFQEFQDYDEF

SEQ ID NO: 54447 - protein, 173 aa, Zea mays
  Coding DNA Sequence Number=SeqID_11072
  Gene Ontology: Mol. function=histone acetyltransferase activity; Cellular component=nucleus; Biological process=regulation of transcription, DNA-dependent
  Homolog annotation: Hit_ID=A2WXV3; Match level="QueryCoverage=75%, HitCoverage=12%, E-value=5e-31, Identity=53%"; Hit description =Putative uncharacterized protein
MAASVVTAPFAVVLIHLHGLGFEQEQMKEHALHLLVLSHVFSVPSLKTVCVDQLERGFLAPDNVVDMLQLARLCDAPRLALACVRMVIGDFKTISLTDGWKVMRRANPSMERLNSELMQRRQERAKKMEEKKVYLQLYKAMEVTPNLYGNLVANMAAGIVGGMGIMPGGRDCS

SEQ ID NO: 54448 - protein, 159 aa, Zea mays
  Coding DNA Sequence Number=SeqID_11073
MGKSNKRKREPTPPSEDFGDSEYSEEEFSSESEGSPAPVSPLASSDDSDDSQGIAAEVWTYIRAVERSGLEGSDESEFSSDEEDSDGGEDEDDDDDDDGGDGDDDGSGIGGGSGGKGSTRGGSSTGSTRGGSSKGSTRGGGGNGSTRGGGGGSSSKASG

SEQ ID NO: 54449 - protein, 24 aa, Zea mays
  Coding DNA Sequence Number=SeqID_11074
MAQKDMWAASCIRFPQKGILAQAQ

SEQ ID NO: 54450 - protein, 156 aa, Zea mays
  Coding DNA Sequence Number=SeqID_11075
MVVGGGRSTRAVRGARRRRGIRPNQGMIDQLNGPGSFTRDQGRCEREEFENGSPDRSVYAQPRATEVRRRRSWVSGEVLLGPRAWLAGFADWIKRYGGLKLGLSHYQTQREDPGFDESRARVPMPSSETLLNKNGISLVRIDLWTHQRIMKSEIYD

SEQ ID NO: 54451 - protein, 114 aa, Zea mays
  Coding DNA Sequence Number=SeqID_11076
MAPGKLSTEGLGEREGRAQPLYGPWRCPASNGVNGKGERSSLGNSRFLLRRKSELHQRSHAPEKHRAGAGASGIRLFHWDVGPTGSARCMSGSGRAKVYWAEFQQVALSMGKNT

SEQ ID NO: 54452 - protein, 124 aa, Zea mays
  Coding DNA Sequence Number=SeqID_11077
MADSKDHTDISPDNILKLAIESLTADEQQQYEDYMRQAKEKFLSQYMVNRHQKLVKHGETDVASLLYSLQVPNISKPDTSNLLNNGDLQPQPLYGMPMNSYSGQVPSPPSLLGRSAPLDTVEPV

SEQ ID NO: 54453 - protein, 110 aa, Zea mays
  Coding DNA Sequence Number=SeqID_11078
MESRTRQTILGGLLGVEAVTLPVDSELQIQGRAQLRREIPNTAAVLGAIIPAHDFDKHRQSINDLDRVLGISQIILNTNLLHRQLLFWYPEALLQLGYMEDIMYIHKMVG

SEQ ID NO: 54454 - protein, 289 aa, Zea mays
  Coding DNA Sequence Number=SeqID_11079
MTSHGSSNEGNALSHTDGLAREGFPRILWEVLQGAGYTTPPQYAVQQFEKHRVPRCRVRMSLEPHPLQPGWRSLDSKSFGYRAEDTIEAIALHGLTTFCGFHPLELSTHPIGLFPPEKEDGPMWKDRVEHAKDIWAIYPGQTAHLTVWCMNALYRLQVMRGEAMSHLMALLEATKITLDNREELVVDLSTKMVEKDLQVEQLSNEIQELEELVGTRENTIEVLEDQLINTQQQLAEANEHLDMHHQEIQDMEANGDVDIEGGEEPASSLDTAGSGRPPSPKSSVASFAH

SEQ ID NO: 54455 - protein, 156 aa, Zea mays
  Coding DNA Sequence Number=SeqID_11080
MDQKGWSAVVGFGWLLAGGGALCFQAVFRWPSAGKSEGVTVRMSEGPTTYLGIDTGKARGWTDRARARGLGELWPADHGRTRGGIASAPVLASRRRPPPPVLVARVAPTTSDADPHADVTVVTSPTSLTTPPELYCCRGFCAKSVTHANSRPRTVL

SEQ ID NO: 54456 - protein, 353 aa, Zea mays
  Coding DNA Sequence Number=SeqID_11081
  Subcellular localization annotation: CTP_CleavageSite=54; ConfidenceScore=5.49e-01
STLARAPACPAPRPSQTSAVARARAYKALPGFDYTLPRTLQTSPELTRRRLPVRSESAAAQSLCHHRPASRAIPNPVQPSEKAVHTSVRLPEQGIGVYFAGEASPRSPELSPPLEYVDRGAGYTTPPQYAVQQFEKHRVPRCRVRMTLEPHPLQPGWRSLDSESFGYRAEDTLEAIALHGLTTFCGFHPLELATHPISLFPAEREDDPMWKDRVEHAKDIWAIYPGQTAHLTVRCMNALYRLQVMRSEAMSHLMALLEATRITLDNREELVVDLSQEMVEKDLQVEQLSTDIQELEELVGTRENTIEVLEDQLLNTQQQLAEANEHLDMHHQEIQDQEANEDVDIEGGDEPAS

SEQ ID NO: 54457 - protein, 57 aa, Zea mays
  Coding DNA Sequence Number=SeqID_11082
MPLMGLGVCGLLCQGGDEDDGFGYDYGNGGCPRCNHCSGEDEVVEEDFQEFQEYDEF

SEQ ID NO: 54458 - protein, 63 aa, Zea mays
  Coding DNA Sequence Number=SeqID_11083
MLVDYTTVLNRPSVSGEGSMQQGEGASQTPPPAEAREKTVVALAPGIGAPAPRAGDDAVFQGG

SEQ ID NO: 54459 - protein, 74 aa, Zea mays
  Coding DNA Sequence Number=SeqID_11084
MAASRPGGRASRRPCTQAALPHAPDNGQLAESEGVTGEDPEQQSVGEGKCPLTHLCPTNSYNLFPAFTQFIPKD

SEQ ID NO: 54460 - protein, 209 aa, Zea mays
  Coding DNA Sequence Number=SeqID_11085
MTKEASSRGHSTAHSLQDSSKAPSDHQLHGAEAVGASEADMGISPEKSIACSVAKIRATRQEHARLPFKSKKRSPKQKPDRISRSRSYILLRATLPTYQNMWATNLQLLLLRQAIHKLPGPSSHRHHHCNLVTPEANSQKGASTPNSNVTSGRSPKLIYEAQKSFLRECKANINEATKVVPMGAQLLLQKKLNAHSIAPYVKHFTILLQ

SEQ ID NO: 54461 - protein, 53 aa, Zea mays
  Coding DNA Sequence Number=SeqID_11086
MGLSVCGSLCQGGDEDDGFGYDYGNGCPRCNHCSGEDEVVEEDFQEFQEYDEF

SEQ ID NO: 54462 - protein, 183 aa, Zea mays
  Coding DNA Sequence Number=SeqID_11087
MRVRAGATHPARARTSSVLLAACSLLLLRPGLLTYLLIIRNASEPHRTAPRRAWVDSSFIGTGRRRQVKKVLGNICRMKWPGLVIEDGKEVPVTRWDQYALAINVQHGNAQAVVWHDFWVISQAMFGSEGRRPESKNEATQYGLDMTKQQYLEHSIPWIAANDAAWHALCRYRASAEFKAKSV

SEQ ID NO: 54463 - protein, 85 aa, Zea mays
  Coding DNA Sequence Number=SeqID_11088
MSKKCKSKNKKQCQEKKKGVGEEFAVYSQNQLGSGTPDCPVVHQTVFGALGCSTGERLQIVEIPRKREEYSKGKDRGIQVDHCIT

SEQ ID NO: 54464 - protein, 265 aa, Zea mays
  Coding DNA Sequence Number=SeqID_11089
  Homolog annotation: Hit_ID=Q6QP51; Match level="QueryCoverage=46%, HitCoverage=41%, E-value=3e-20, Identity=50%"; Hit description =Putative growth-regulating factor 1
  Subcellular localization annotation: CTP_CleavageSite=55; ConfidenceScore=5.48e-01
MAAAGGRKQRSSRLQAHVPSWDSERALSHGVKTTHSTGGTFGRRSRRRFTSAIMTASKKGPGKGILRKGSFSTKEAGPEPPTDQRFEGWPLGRVQQPPESTRAPSPLLIRGSKAGPLEGFDSRLRALGLRAHHWLEAGPEGFDSRLRAHRARDDSGYVRYTTKARATLPRPSLRSKDTIPPRPSPTSGKDELRLARTQPRHRKMNSASPDPRAQTRPRPRRSLRLARPRARTRHVIGKAIITLPLASSGYGEQDRRPIWLAPVNK

SEQ ID NO: 54465 - protein, 114 aa, Zea mays
  Coding DNA Sequence Number=SeqID_11090
  Homolog annotation: Hit_ID=Q5VPC4; Match level="QueryCoverage=38%, HitCoverage=7%, E-value=2e-10, Identity=72%"; Hit description =Pherophorin-like protein
MVKWAVLCSSFLIMQNCMLMAEILEAELAAKKTELQRCRDTAERVEAENGWLCAELDAAALEFTSRKQRIVELEKEMAELRTRQRTPTTAPRPLRRQASVSRAPALRQSQTARV

SEQ ID NO: 54466 - protein, 176 aa, Zea mays
  Coding DNA Sequence Number=SeqID_11091
MVGRSKPGCGLCPALSFKDLHHPCWGGGRAEPELYLPYGPAGHLFLQHSEERALTSLAEGADFDNAGPLRNPRLLCDEPDPEVAVSAWTEAESARKGASSAQEQATSQAEEVQQRRPEPGRVIRERDHPRSYAAEAMSRADVLGGQPAEVTEQPVEVFAWARTLEETLAAMAQARC

SEQ ID NO: 54467 - protein, 407 aa, Zea mays
  Coding DNA Sequence Number=SeqID_11092
  Homolog annotation: Hit_ID=Q6QP51; Match level="QueryCoverage=56%, HitCoverage=76%, E-value=4e-28, Identity=41%"; Hit description =Putative growth-regulating factor 1
MPRLLDCGTGAATRGNPAHGPTVPAEHVGHGSVSRERRRDGRYGQKWADSRGGSRRAEAAVKPSAGSRPLLEQQGSPLPRREDDTPMFRPSNGLCNDCLANHPSRRINFAAGQATPLAGEAGVRRLAPRKGSTAAPEHSGFRLSTDQRFEGWPLGRVRQPPQTTWAPRPTTDQGFEGWPPKGFDNRPRTRRARDDSGYVRYMAKARATLPRLGAALANPALAKPLTASTYQPENSEPDHAPGLRGLMGAIQVKAPSTQGTRSRLARAQPRAGTENSAACPAPIAVPLARVRLTAAESSLRRHRKLRLARPQGSAPALASKDGLSLNLDLRRRSPPRPTLGLSLDLDLGGVTASPDLGLGLTTQQGGDPPGSKRRQITPAQKNLNPIGNGDALGEARGHGGREAEADF

SEQ ID NO: 54468 - protein, 69 aa, Zea mays
  Coding DNA Sequence Number=SeqID_11093
MTASKKGSGKGIPRKGSFPVKEPGSEPPYRSELPQITWALHPLLVRGSKAGPPEGFNDRLRLLGLRAHY

SEQ ID NO: 54469 - protein, 51 aa, Zea mays
  Coding DNA Sequence Number=SeqID_11094
MAYIAPPEYEVDGLRGTAADNRKPDSTLDGDSSGGGGRLRNGAAAGGRFCS

SEQ ID NO: 54470 - protein, 788 aa, Zea mays
  Coding DNA Sequence Number=SeqID_11095
  Gene Ontology: Mol. function=DNA binding; Cellular component=nucleus
  Homolog annotation: Hit_ID=A7PHF3; Match level="QueryCoverage=53%, HitCoverage=54%, E-value=1e-121, Identity=52%"; Hit description =Chromosome chr17 scaffold_16, whole genome shotgun sequence
  Subcellular localization annotation: CTP_CleavageSite=61; ConfidenceScore=5.23e-01
MDSPLFHRKYKNWEFACACSSWGPFVLLLSMVGGQSRTSSPLPLSPPPRRHYCSLRPGSASSSLAGGLPLGGQPRQSRGLPVLHIAQLHVKQHQSRGGPVLHIARRARRGCLGLEGAGGANVVRPKSRSPPSESSFLLICGCAGRHSLFCRTMDAPDVQQSMGYKESRGALNLASYGGSHALKLSKEDVFLYSAKVIPRNETRVMKMMDRLTDLGPKIIMGKDSGLHTSRHAYREELVIKNGEMLGVSHLRNRRVLSNGFVSLGKEDLQLMYSDGDKAFGTSTDLCIDERLRIASDGIIFVGMEIFRPQKEHGLTQTGLKGKFKITTRCLWLDNGRLLDALYKAAHAALSSCPVNYPLSHMERMVAEILRKMVRKYSEKRPDVIAVAMENTTTSFSKHLDAKSSRNFEPSSATSHLSRSPAMSLEGSYKTHPDNPEVDAEETLPEATRTTPDDATTSSNGEAFFSSDLHQPKTLEHLWESFKSPIAVKIARIVNGGKKQNLGKIGIMGKDSSIQSTPAPAKSSKKNKWKPEEIKSLIQMHGEMNERFQSVKGRMVLWEEISDNMLKQGISRTPAQCKSLWTSLVQKYEDRRVRSRGKIRLGQFQFVVCSCVLALVGRPVNLSLPVAFVIPIRQFTRVVVRSCAASPPAQSFRAVVHASPPLRCPLTHPRLQRPGHTPASPPPAAADARASAPLHPHPRHGRDFQPTHGCRSTRIGHERERGKRSHQISDTNPRSYKSPRSASLRLGVPSPEHDRVQETHDCYNSCAAFLFDSMRRGPPPSCSPPTTWI

SEQ ID NO: 54471 - protein, 177 aa, Zea mays
  Coding DNA Sequence Number=SeqID_11096
  Subcellular localization annotation: CTP_CleavageSite=26; ConfidenceScore=5.11e-01
MVDPCPQIPPWPLQPPVHPCGCAVVRCLASRSELQSCSARLASPFVVPLPTQGCRDPAIPPPRPHLRAPPTHLRLQMHVLRRRSTRIRDMGGISNPPAAAAPPASATNHASGSASIMLATHNVDLGNWPSKQSMYCCRRFDPRGVPGPTSKLSSRALAQMGRRETEREGGKARGRQA

SEQ ID NO: 54472 - protein, 446 aa, Zea mays
  Coding DNA Sequence Number=SeqID_11097
  Subcellular localization annotation: CTP_CleavageSite=40; ConfidenceScore=5.27e-01
MGAEPGSFTEKDPFRGIPLSRRSVVRFSCQRRRLSRRRVNATGRVQLARWLRDVWARASKPARQKSEKRVHLARLHAACMAARPSRPLVWAKVGNRFLVAPLRRRSPKTVTSSSWMGRGKPGCDPAPVSGLLVVAIALPCCDGDVLQSCRGRRTVAAQLGCNIPSFPSHSQRGRQRGSAGALGSGLLFGFDGWSASLERDREQEPPSGRVRPGPWLLPQRSLASLPMIVAPQARGRSYPRGRNRSSVCDGTLNASSSSLVKGTPWPLFDEPRPGVAISVRTEAELARKWEPGWPEPSRVAHQRGSTPESITRGLGSGWRPWKMLGRGPRGNRPSRLLGPDSRRSPRTVSPSEAGSDLAEGVVDAEGASGLSVGNRDVCVGESCFSRKVMSEKVMSEDPLFEAVKEHERNSAKKRSFFEEKFDAEGVSPLLAPEGGSGFAEARPTLP

SEQ ID NO: 54473 - protein, 120 aa, Zea mays
  Coding DNA Sequence Number=SeqID_11098
MEGIGGCGGGVSAMAVEGTSSGDERTALPYRPGIGVKCGTWCLMRSQSGLLMPDTPLPAHAGVMDTAFHSRHCTQRRGSTERPRLFPAGGPWAPNLLSLEMVSGDCDMAAAAGYGGTALT

SEQ ID NO: 54474 - protein, 55 aa, Zea mays
  Coding DNA Sequence Number=SeqID_11099
MPNYAFFDCLGMQVAMRIDGVGYDYGAGCQHCNHCSGEDEALEGDFQEFQDYDEF

SEQ ID NO: 54475 - protein, 148 aa, Zea mays
  Coding DNA Sequence Number=SeqID_11100
MRATAQRLRAFLHFRPDQRVKGQTAMQAACNRTNGAHPFDFDASSMEAQAHTSCNRHTGCYVQETAPQLAPLPCLLDCGTSTATRGNPAHDPTVPTRHIGHGAGGTFGMQSRRRFTSAIMTASKKGPGRGIPRKGSFSAKETGPELPY

SEQ ID NO: 54476 - protein, 130 aa, Zea mays
  Coding DNA Sequence Number=SeqID_11101
MSTSHSQDSRARSAIIHRTVRCATELPGEPAGNGYPAPMVDCKSTCHGEQCAAKSEQRSQRGTGLSVVAPDFPVPQEDKASNGRPAPNPNGYVTWRHTGQGTVHVRWCTGLSGAPIASNLPNGYGSGCGL

SEQ ID NO: 54477 - protein, 146 aa, Zea mays
  Coding DNA Sequence Number=SeqID_11102
MDEGCTQPLSSDPMINLNTTTFFLIVFFPFARNLHNLEPLALTILITKNAQECQRFIYNYTKSTVRNTVDYSGQEKLFGKIDYARTVRALAADSPRHRVDFDQELQIRDSPTKPRTVQLQHADRPAIIHGPSGYNSRTWFSPKVTS

SEQ ID NO: 54478 - protein, 96 aa, Zea mays
  Coding DNA Sequence Number=SeqID_11103
MRVNNSKRPEHKSDDVVVRPSRAPIAPNLVDQGLEPVVRAGRSVCFTIVPLPPAVQSCTGIVVLLLQSVGGDARAGTGRHADGQLVGGDAQAAACR

SEQ ID NO: 54479 - protein, 79 aa, Zea mays
  Coding DNA Sequence Number=SeqID_11104
MSGVPEDSNANLPPSGISRGTRAIIHRTVRRQACPYWGTGQGTVDVRCTTGHPGGPTSQKFQRSESNGSDDVAGAPDMS

SEQ ID NO: 54480 - protein, 30 aa, Zea mays
  Coding DNA Sequence Number=SeqID_11105
MAASPRCERRRILEARAAGDGSLRALRKHL

SEQ ID NO: 54481 - protein, 28 aa, Zea mays
  Coding DNA Sequence Number=SeqID_11106
MRQGAPLPNLDRNAQRTSHHAVEEGCLF

SEQ ID NO: 54482 - protein, 169 aa, Zea mays
  Coding DNA Sequence Number=SeqID_11107
  Subcellular localization annotation: CTP_CleavageSite=56; ConfidenceScore=5.06e-01
MQAACNRAKWTRFSDFQHAGMEAQAHASRNRRAGCCMQATAPPLAPPSRLFGCGANAATRGDPAHDPAAPAWRDGQCGRKDPGRGIPRKGSFPVKEPGSEPPPTDQRFEGWPSEGFNSRLRSRGPYTHYWSEDECPSGQGVTLHKIVTAIGGGVSVAKAQRLWKAVVGP

SEQ ID NO: 54483 - protein, 379 aa, Zea mays
  Coding DNA Sequence Number=SeqID_11108
  Homolog annotation: Hit_ID=Q6J9V9; Match level="QueryCoverage=23%, HitCoverage=38%, E-value=7e-17, Identity=54%"; Hit description =Putative uncharacterized protein
  Pfam annotation: Domain name=DUF1197; Domain location=159-240; Score=- 30.7; E_value=0.068; Accession=PF06710.2; Description=Protein of unknown function (DUF1197)
  Subcellular localization annotation: CTP_CleavageSite=44; ConfidenceScore=5.60e-01
MAAAGGRKQRSSRMQAHVPSWDSERTLSHGVKTTRPCSVPRTARARTTAAPRTTRPVALTLRQDRRHLWQAKQATLHLRHDDRVKKGTGKGDTPKGILLREGSGPRALLLIRGSKAGPSEGFDSRLRALGLRAHYWLAPEGFGSRLRERRARDDSGYVRYMAEARATLPRIPPEGGIEPSDPIKWDQENSAACAAPTAVPPVRVRLTAAKTGLRRHRKLRLARSQGSDSTSTSDDGLRLARPLSSDSASTSEDGLCLARPQGSDSTLTSEDGLRLARPLSSDSASTPEGGLRLARPQGSDSTSTSDNGLRLTRPLGLRLNLDLGRRSPPRPTPGLGLNLDLGGVTARARAQPRPRRSHRLARPRAWTNHVTGGPSLPYS

SEQ ID NO: 54484 - protein, 148 aa, Zea mays
  Coding DNA Sequence Number=SeqID_11109
  Homolog annotation: Hit_ID=Q6ZAC7; Match level="QueryCoverage=38%, HitCoverage=8%, E-value=2e-14, Identity=66%"; Hit description =Suppressor-like protein
MKSMGDRGSPWRSPRRWTGIRFTIDKDTGGRCGKKQTNEVEPALSKTHIFHDLQQKRPRNEVEGLRDIQFEEHMSFFFLVQGSDHSLNKNELSYDSDEDDDFAEELGDKDADDSFMESYSDALNKELSSTTLEKSFAHAPRPETNNEA

SEQ ID NO: 54485 - protein, 339 aa, Zea mays
  Coding DNA Sequence Number=SeqID_11110
MARLRHTARKSVIPFLPSRLAERPLHRTVSGQSSHLERLHHRLREEQERRRQHGEQQGSSSPPQREVESVRPRSSVAQLEAPPAPPRDVPAVGGATGGDPDDDDSDHSTESSEPQEAEGWVARPITRDAARGCHFHDALDTLLRQAFDRHTWSIEYRCVVYQHSRGRYPDRWEATCLVRRPEDDLRGAEAVSEHYSISERDTAEAAMQDAARRALSQYCSLFGGVADGLNLRYYPRRPTGSTESVVVSSVGEANPRLSSTVNLVAVLNTELDHSLDELSRARTEIAGLRAELAERHHQESGSPAPVGTQHPTTRRFTFSDLWLVAKTAFSDLRLVAKNF

SEQ ID NO: 54486 - protein, 229 aa, Zea mays
  Coding DNA Sequence Number=SeqID_11111
MEVLNLARRSSLCIQGSGTFPWGSRPTIVTLEYIVSSGHMAAPEPPTWRGRVLFTARLEIAAWTLCLHTVVRGTPDPGYRQWPPGLASREDTSLQEPVPKEDDSWAQAPAAENGLLVSVEVKRRTTAGGGVLLTWWRWRAPHAAVRLLRTRRPTPKEYDSWAWAPVPEAGPLLLVEARAPGPEAGPLLSAEMKRRTTAGGGMLFTQRFAFSAQGGRRPRSMTRGPGPPR

SEQ ID NO: 54487 - protein, 122 aa, Zea mays
  Coding DNA Sequence Number=SeqID_11112
MALLDPPERLQPEVALNLMCNLLGWGVSVSAGKIHVGASPLGDLAAGEFAFFVSNLPSGLALPISFFFVMLLEELVLQPQHFMPYLILQAAIISYLRNMPMGAMLLLTSSSSIRREGCSPAL

SEQ ID NO: 54488 - protein, 60 aa, Zea mays
  Coding DNA Sequence Number=SeqID_11113
MGLGVCGSLRQVLFAPWGGVRDVRITSGNEIDGFGIDSGNGKEGVEADLQEFQDVDEFED

SEQ ID NO: 54489 - protein, 277 aa, Zea mays
  Coding DNA Sequence Number=SeqID_11114
MAAQRASSRRTRGEGRGRAMRGQRTAAQGGPPRRGRARRDCAEADAASRAQGEGVRARQGRPRQTLGAGAAPGRAGAGTPRGEGKAERGSPSVGKSRVERDEGEGEEEGAACVQRLEKGGVGCWLERSHARELGHRGGGRSWAAKLSAGMGRAMRGALGWRCWIAGEVGPTQAERGRHGAHATISSRAVNIIRPLHVGSSGAATWPEETIYSKVATVGPDRHGKVPDPWMHSPDLRVRFKTSKGTNQTPRTGPRPLRRGPGYSKWGPGIPRQRIPRP

SEQ ID NO: 54490 - protein, 90 aa, Zea mays
  Coding DNA Sequence Number=SeqID_11115
MACDGYGVRVRVKGWKRGGTGRGEGTCRPAMPSPQLAKYTGRPRSPPAPPLDAVWLFVGKPHPTDVIVDITPQLITLNQRSKSDMYHKNK
